United States Patent Application Publication US 2011/0296543 A1 - sequence listing, part 8

SEQ ID NO: 33997 - DNA, 1611 bp, Unknown
  Obtained from environmental sample
  misc_feature (1)..(1611): n is a, c, g, or t
ttgggagcggtctccgtacagcagggagataaactcccggtgagcaagattcccgatgacggaactttccctaccgcaacaacccagtacgaaaagcgcgcagttgcggaaagggttccctcctggaatccggaagtgtgcatacaatgcggactgtgctctgttgtttgttcccacggatgcatcaggatgaagaacctgagcgtcgcggaagcttccgccgcgccggccggatttaagacagcggaaattaaaccaaaaccgattgacgggaaaaagacagcgctcgccatttctgccgaggactgcatggaatgtggggtttgcattaattgctgcccaatgtcaaaagaccccgcaaaagcagccctttcctggaaacctttcgccgacgatccggcttatcacgtggaacaggccgaggcatggaattacttcctttcactgccggaagtgccagccgcagaactcgatttaggcaaacaaaaggatcttgcgtataaaaggccgctctttgaattctccggtgcatgcggcggctgcggcgagacgccctatgttaagctcataagccagctctttggcgacaggatggtcatggccaacgcaacaggctgttcttccatttatggcggcaacctgcccaccactccgtattgccagagggcggacggaaggggcccggtgtgggcaaacagcctgtttgaagacgccgccgaattcggtatgggcatgaggcttacaagcgataagctcggcttacacgcccatgaaatcgcggaagaggcaaaatccgaaggaatagccgtcgcgagtatcgataaaatctttgcaaacgaccaaaaagatgacgacgctatcgaagcgcagcgcaaaaacgtggacgagcttaaaacagccctcaagaacgactccaaaccgacggcaaagttgctactctctctggcagacttctttatcaagcggtcagtgtggattctcggcggcgacggctggggttacgacatcggcttcggcggccttgaccacgttatcgcttccaaccggaacgtgaacctgctatgtatggacaccgaggtttattccaacaccggcggccagatgtccaaggctacccctgtgggcgctattgccaggtttgcggcggctggtaaggaagttacaaagaaagaccttggcgcaatcgcgatgagttacggttatgtgtacgtggcaagggtttccatggggggaaacccggcccaggccataaaagcgttccgggaagctgagtcctacgacgggccatctctcgtcatcgcctattcccactgcatcaaccatggcatcgatatgagccacggaatggatcagcaaaaagcggcggttacttccggtatatggccgctttaccgcttcgatccgcggcttaaggccgagggcaaaaaccccttccaattggatagcaaggatcctacaacgagccttgaagacttcatgtacaaggaagtgcgctttaagagccttaaagccgccgatccggcgcgggccgacgcccttttggccaaagccaaagcccataccgaaagggtcttgaaggaatacaagtaccttgcggaaaggccattctga

SEQ ID NO: 33998 - protein, 536 aa, Unknown
  Obtained from environmental sample
  DOMAIN (40)...(63): 4Fe-4S binding domain
  misc_feature (1)..(536): Xaa is any amino acid
MGAVSVQQGDKLPVSKIPDDGTFPTATTQYEKRAVAERVPSWNPEVCIQCGLCSVVCSHGCIRMKNLSVAEASAAPAGFKTAEIKPKPIDGKKTALAISAEDCMECGVCINCCPMSKDPAKAALSWKPFADDPAYHVEQAEAWNYFLSLPEVPAAELDLGKQKDLAYKRPLFEFSGACGGCGETPYVKLISQLFGDRMVMANATGCSSIYGGNLPTTPYCQRADGRGPVWANSLFEDAAEFGMGMRLTSDKLGLHAHEIAEEAKSEGIAVASIDKIFANDQKDDDAIEAQRKNVDELKTALKNDSKPTAKLLLSLADFFIKRSVWILGGDGWGYDIGFGGLDHVIASNRNVNLLCMDTEVYSNTGGQMSKATPVGAIARFAAAGKEVTKKDLGAIAMSYGYVYVARVSMGGNPAQAIKAFREAESYDGPSLVIAYSHCINHGIDMSHGMDQQKAAVTSGIWPLYRFDPRLKAEGKNPFQLDSKDPTTSLEDFMYKEVRFKSLKAADPARADALLAKAKAHTERVLKEYKYLAERPF

SEQ ID NO: 33999 - DNA, 942 bp, Unknown
  Obtained from environmental sample
  misc_feature (1)..(942): n is a, c, g, or t
atgtctgttctgcacagggctatagaaaacaatgctacggaggttcgcaatgtaactttgctgggtatgggtgttaatatattcctcaccatatccaagtttcttgctggaatctttggcaattcacgtgccttggttgctgatgccattcacagcttatcggatttaagcacggatattgccattctcatcggttcgtatttttggaaccagccgccagatgtggaacatccttatgggcatcgccgtatagaaacccttatatccgtagccatagggctggtgctagcttcggtgggtttgcttttggcttatgaggcaatagaatccctgagcggtgagcgcaaatccagttcgccaactcttattgctgctgtaatggcagttgtttcaatagttgtaaaagaatggctgtatcgctacacgttgagcgtgggcaaacgcgttaaaagttccgccactattgcgaatgcgtggcatcatcgttcagatgccattagctcaattcccgtgcttgtggcggttttggcttcttttgtttttccagagtggttctttttggatgccgtgggtgctatattggtttctctatttattttgcaagcggcttttcacattgccttgcccggaatttcagaaattatagacagaggtgcgtcaaaagaaatagacgatagacttatgaatatggcactcgctattcccgaagttaaaagcgttcacaatttgcgcactcgctattcgggcggtttattatgcgtggatatgcacatagttttaacaccgagcatctctctgcaccaagcgcacttaattggcaaccgagttagggattcctttttagcttcccatttagatattatggaagttctcattcacttagacccccacgacgaccacgaagaagatgagaaaataacagagaagttaataaactcttaa

SEQ ID NO: 34000 - protein, 313 aa, Unknown
  Obtained from environmental sample
  DOMAIN (19)...(301): Cation efflux family
  misc_feature (1)..(313): Xaa is any amino acid
MSVLHRAIENNATEVRNVTLLGMGVNIFLTISKFLAGIFGNSRALVADAIHSLSDLSTDIAILIGSYFWNQPPDVEHPYGHRRIETLISVAIGLVLASVGLLLAYEAIESLSGERKSSSPTLIAAVMAVVSIVVKEWLYRYTLSVGKRVKSSATIANAWHHRSDAISSIPVLVAVLASFVFPEWFFLDAVGAILVSLFILQAAFHIALPGISEIIDRGASKEIDDRLMNMALAIPEVKSVHNLRTRYSGGLLCVDMHIVLTPSISLHQAHLIGNRVRDSFLASHLDIMEVLIHLDPHDDHEEDEKITEKLINS

SEQ ID NO: 34001 - DNA, 513 bp, Unknown
  Obtained from environmental sample
  misc_feature (1)..(513): n is a, c, g, or t
atgactatggcaagcaagatcgtcgtcatgaaggacggaagggtgcagcagattggtacgcctctgtatctgtacaacaatcctaataataaatttgtcgccggattcataggttccccgccgatgaacttcctcaccgtaagggtgctggaagaaggaggctcaatcgcgctggatgaagggtcgtttaaggttaagccggactcgaatcacgccacccacctgaaaaaatatgtaggcaaagaaattttcttcggcattcgtcccgaggatatgaactatgtggaaagcagcggagacaacagcttccccacaaaaataacagtggttgaaccgctgggcgctgatatccacctctggcttaccaccggaacacaaccgttggttgcccgcaccgagcctcaccatatgtttaaagtaggcgattccgccaggttcgttcccaagatggaaaaggcccgctattttgacagggatacagagcttgccatcctgcctggaccccccaagtga

SEQ ID NO: 34002 - protein, 170 aa, Unknown
  Obtained from environmental sample
  DOMAIN (85)...(156): TOBE domain
  misc_feature (1)..(170): Xaa is any amino acid
MTMASKIVVMKDGRVQQIGTPLYLYNNPNNKFVAGFIGSPPMNFLTVRVLEEGGSIALDEGSFKVKPDSNHATHLKKYVGKEIFFGIRPEDMNYVESSGDNSFPTKITVVEPLGADIHLWLTTGTQPLVARTEPHHMFKVGDSARFVPKMEKARYFDRDTELAILPGPPK

SEQ ID NO: 34003 - DNA, 414 bp, Unknown
  Obtained from environmental sample
  misc_feature (1)..(414): n is a, c, g, or t
ttggccgagtacttctatgtgggaaaacttgcggaacacatggtggcaaatagatcaggctgtattataaacattacgagtataaacgcagaagctgcttggccgaacaatccggcatatatcactgtaaaaagcggcttaagaatgttaacaaaggctattgccagagatttcgggcaatatggtgtgcgtgctaacaacctaagtcccggatatatacataccgcaatgaccgataaatcattcagtgatccggttgcctataaagaacgaagtgataaaacaatgctgggaagatggggattaccaagtgagatcgctgatacatgtttgtttttagcttctgatgcatcatcttatataacaggtactgacatacatgttgatggcggttggcttgcaaaaggattttaa

SEQ ID NO: 34004 - protein, 137 aa, Unknown
  Obtained from environmental sample
  misc_feature (1)..(137): Xaa is any amino acid
MAEYFYVGKLAEHMVANRSGCIINITSINAEAAWPNNPAYITVKSGLRMLTKAIARDFGQYGVRANNLSPGYIHTAMTDKSFSDPVAYKERSDKTMLGRWGLPSEIADTCLFLASDASSYITGTDIHVDGGWLAKGF

SEQ ID NO: 34005 - DNA, 891 bp, Unknown
  Obtained from environmental sample
  misc_feature (1)..(891): n is a, c, g, or t
atgatcagatcggccgagaccgattttcttgttcccggaagccatacaaacgaagacgaagaaacttgccttattgttataccttcttcatcgcctgagaacagttttatgttgaatgaagacaccgtgagtctttgcgcaggatgcgaaatggacagccaaattttgcgaaaactttttaaatccgctgtccgcgccgctgatattctgggcattaaagacgcggatatgggacagttcttgtcaattcttaaacgcttgcctgcgccggctattcacagtaacggcagtatccgcgaatggtatgaagagtacgaggaagcagagccgggtcatcgccacttttcaaatttgtgggctctgtggccgggagatgagatctgcgatgatgaaacgccacagttgatggaagccgcccgtaaaacattaacgcgccgtctgtccgcaggcggtggcagtgccggctggagccgcgcatggcttgtaaacttttatgcccgccttaaagacggcaaagcggcaatggaaaatttatccgttatgttcaacggttttaccttgccgaacctgatgaacaacggtccgcctttccagatagacggcaacttcggcgcgttatcaggcatgactcaaatgttattgcaaagccgcctttgttacaaagacgatggttttcaggttgtactggatatcctccccgcgctaccgcaaaattgggcgtcaggctatgtaaaagggttacgcgcaaaaggcaacatagaagttgatcttgaatggaaagacggtcatcttacttcgctttccgtgaccaacaacaaccagaaagcggtttccgtagtgttacgcaacgcggatattcaagaccgtgaaatggtagtccgtaacagctaa

SEQ ID NO: 34006 - protein, 296 aa, Unknown
  Obtained from environmental sample
  misc_feature (1)..(296): Xaa is any amino acid
MIRSAETDFLVPGSHTNEDEETCLIVIPSSSPENSFMLNEDTVSLCAGCEMDSQILRKLFKSAVRAADILGIKDADMGQFLSILKRLPAPAIHSNGSIREWYEEYEEAEPGHRHFSNLWALWPGDEICDDETPQLMEAARKTLTRRLSAGGGSAGWSRAWLVNFYARLKDGKAAMENLSVMFNGFTLPNLMNNGPPFQIDGNFGALSGMTQMLLQSRLCYKDDGFQVVLDILPALPQNWASGYVKGLRAKGNIEVDLEWKDGHLTSLSVTNNNQKAVSVVLRNADIQDREMVVRNS

SEQ ID NO: 34007 - DNA, 876 bp, Unknown
  Obtained from environmental sample
  misc_feature (1)..(876): n is a, c, g, or t
atggcggttttatctattcagtctcatgtggtttacggatacgcgggaaataccgcggctgttttccccttgcagcggcttggacgcgaagtatgggcgattaacacggttgagttttccaaccacacgggttacggttcatggaaaggaaaagttctgggcgcagaactggcggcggaacttgttgttgggcttgaagagcgaaacgcgcttaaccgctgcgaagcggtactttcaggctacctgggcgacgcttccgtcgccatggcgattgcagacgctgttaaaaaagtgcgaagcaaatcacctaacaccatttacacctgcgaccctgtaatgggcgatgtgggacgggggttttatgtaaaacccgatattcccgatatttttaaaaaagaacttataccgcttgcggatattgttacgccgaaccaatttgagcttgaggctataacgggattaaatacgcanaacttaaccgacgctttnaaagcgataaaactcctgcatgaaatgggtccttccattatccttgtaaacagttacaaagaaaaagaaggagagctttccatgatcgcttccgcttccgataaaaaagaaatttataaaattacaacccctgaattaccgcttggcaagggagtcgccggcacaggtgacatgaccgcggcggtttttttatcccgttatcttgaaactaaagaccttaaaaaaactttggagttgtgtaccgcctccgtcttcagcattttagaaacaagttttaaagcggctaacgcaaaaagcggcgcattaatagaactgaaaataattgacacccagaaggagcttgtctctccttcttattcatttatggcggaaaaaataactacgtga

SEQ ID NO: 34008 - protein, 291 aa, Unknown
  Obtained from environmental sample
  DOMAIN (39)...(259): Phosphomethylpyrimidine kinase
  misc_feature (1)..(291): Xaa is any amino acid
MAVLSIQSHVVYGYAGNTAAVFPLQRLGREVWAINTVEFSNHTGYGSWKGKVLGAELAAELVVGLEERNALNRCEAVLSGYLGDASVAMAIADAVKKVRSKSPNTIYTCDPVMGDVGRGFYVKPDIPDIFKKELIPLADIVTPNQFELEAITGLNTXNLTDAXKAIKLLHEMGPSIILVNSYKEKEGELSMIASASDKKEIYKITTPELPLGKGVAGTGDMTAAVFLSRYLETKDLKKTLELCTASVFSILETSFKAANAKSGALIELKIIDTQKELVSPSYSFMAEKITT

SEQ ID NO: 34009 - DNA, 1536 bp, Unknown
  Obtained from environmental sample
  misc_feature (1)..(1536): n is a, c, g, or t
ttgccaatgatcagatcggccgagaagcggctatttcacaaggccgcctccgtggtgtgggcattgaaaacacggtggggcggatttatcccgaaagaacactgggcttcccaaatcgtaggttttgtaggggacgacggctttggccttgcgggaatagaatacgccttcgacaatgagttaaaagccgaacagggggtattgggcagaaccggaggtctaagaaccggaggtagtcaggtctttctgaccctggacgtgaatattcagtacctccttgaaagtatcgcagctcaggtaatgaacgaaaacaaggccgaagcggttatgtttatggctatggatccaagaaccggagatatacttggaagcgcttccctgcccggctatgatcccaacaacaggagaaattcggatgaaatttcccgcatggatcgacccgccatctgggcctacgaacccggatcggttttcaaagttttttcactttcagcgctgatggattcaggcgccgtcacaggcagcactttttttaactgcaacggccactacgaacggactacgggaaggggtgaaaaaataatcatcaattgcatgtccgcccacggaaatgtgaacgccagggacataatcatttattcgtgcaactcaggagccgcttacgcggcggatcgtttgggctcccaggcgttttatgaaagcatcacaagcctgggttttggatcgcgcaccggcgctggaaacccgggagaaaccgcgggattccttcgccccaccgagcgctggtcggagcgttccaagcccacaatagcgatggggcaggaaattgctgtctccgcccttcagatgttgcaggctgccacagcggtagccaatgacggtatcctggttcccccaaaaatcgtttcgcggattgtttcggccgacggcaaaaccgtaaatagctttgagaccggcgttccccggagggtttttagcgctgaaacggcaagaaccatgcgctcttacatgatggacgttacttccaacattggaaccggctggcgcgccaacgtggaagacctttccctggcggttaaaaccggcaccgcccagatcatcgatcccaaaaccggcgcttattcttccacggattttatagcaagctgcatagctatgcttccggccgaacacccttcccttgtgctttaccttgtaatttacaaaccccagggcgcgtcttaccttggcggcaggatcgccgcgccattcataagagaagctgccgaagccttgattaactacctgggcattccaaggggcagaaacccgcagataagccattcgggcgctctttccatccccgccctcccctaccccgcggtaggtgaaaccgtccccgattttaaaggcgtcgccaaaaggctcctgctccccctccttttaagggacgatcttcaactgcaaatatcgggcgacggctgggttgtgcgccaaagccccgctcccggaacgcctattacgccggaaacggtgatcgttttggagctggaatga

SEQ ID NO: 34010 - protein, 511 aa, Unknown
  Obtained from environmental sample
  DOMAIN (457)...(511): PASTA domain
  misc_feature (1)..(511): Xaa is any amino acid
MPMIRSAEKRLFHKAASVVWALKTRWGGFIPKEHWASQIVGFVGDDGFGLAGIEYAFDNELKAEQGVLGRTGGLRTGGSQVFLTLDVNIQYLLESIAAQVMNENKAEAVMFMAMDPRTGDILGSASLPGYDPNNRRNSDEISRMDRPAIWAYEPGSVFKVFSLSALMDSGAVTGSTFFNCNGHYERTTGRGEKIIINCMSAHGNVNARDIIIYSCNSGAAYAADRLGSQAFYESITSLGFGSRTGAGNPGETAGFLRPTERWSERSKPTIAMGQEIAVSALQMLQAATAVANDGILVPPKIVSRIVSADGKTVNSFETGVPRRVFSAETARTMRSYMMDVTSNIGTGWRANVEDLSLAVKTGTAQIIDPKTGAYSSTDFIASCIAMLPAEHPSLVLYLVIYKPQGASYLGGRIAAPFIREAAEALINYLGIPRGRNPQISHSGALSIPALPYPAVGETVPDFKGVAKRLLLPLLLRDDLQLQISGDGWVVRQSPAPGTPITPETVIVLELE

SEQ ID NO: 34011 - DNA, 480 bp, Unknown
  Obtained from environmental sample
  misc_feature (1)..(480): n is a, c, g, or t
gtgttttacataatgaataaaaaaaatattttgataaattggttaacaaaatttaaacgaaaggaggctatatttatggaaaaaataaaagaaagggcgttaaaagtggcgaatagaaaaatcgcgtttgtcggttctgtcaacgaaaataacgttccgaacattaaggcgatgtcggtcgcgaaacatcacgggctggaaatattttattttgtctcaagccattccgcggttaagacggaacactataagcgtaattttaacgcttgcctgtattttaacgacgggccgctttataaagaacttgtgctggaaggcataatgaaaatatttaacgatattgatataaagaaatcaatatggaaaagtaactttaaaggcgtgtttaaaaacggcggaatagatgatcctgattactgcgtgttaaaatttatcgcaaagaaggggcgttatcacaccgaggcgtttgagatcgaatag

SEQ ID NO: 34012 - protein, 159 aa, Unknown
  Obtained from environmental sample
  DOMAIN (29)...(115): Pyridoxamine 5'-phosphate oxidase
  misc_feature (1)..(159): Xaa is any amino acid
MFYIMNKKNILINWLTKFKRKEAIFMEKIKERALKVANRKIAFVGSVNENNVPNIKAMSVAKHHGLEIFYFVSSHSAVKTEHYKRNFNACLYFNDGPLYKELVLEGIMKIFNDIDIKKSIWKSNFKGVFKNGGIDDPDYCVLKFIAKKGRYHTEAFEIE

SEQ ID NO: 34013 - DNA, 774 bp, Unknown
  Obtained from environmental sample
  misc_feature (1)..(774): n is a, c, g, or t
ttgggctgtgatatcctgctggtggccgagccttcatattccctggaattgaaaaagaaaggcctgcttcaccgccatatctccgccgaggccggtaaccttgcttttggctgcgacaaggaaggttactggcatccggtgagggtttccgccatggttttggcgtataatccccaaaagaacgccgcaaacagcgttccccattctttctttgatttcgccaacaattcgggccttaggggcgccgtatcaatgggcaacccccttgtctctggggcggctatggccgcggccacggctcttaaagataaatacggttacgattattttgaggctctcggtaaacaggatatttcgattgaatcaagttctacagccctgacaaaactggaggccggggagtacaaagcgatcatggttctggaagaatctgtgttaaaaaaacggcaggaagaatcatccgtactggaaatcatttaccccatggacggggccgtaattattccttctgtaatcatgattatcgcgggcaagtggagcgccaacaacaataccaaatcggccgaaataataaccgactggtttctgagcccccaggggcaggacgctattgtagccggccagatgcattcggtaaggaaagattataaaatcccccacggctctgttcctaccggccgaattcaggcgctgcctctgaattgggaagacgctttccgccagcgggaagatatacaggtcaagtttgaggagctagtaatctccagaagataa

SEQ ID NO: 34014 - protein, 257 aa, Unknown
  Obtained from environmental sample
  misc_feature (1)..(257): Xaa is any amino acid
MGCDILLVAEPSYSLELKKKGLLHRHISAEAGNLAFGCDKEGYWHPVRVSAMVLAYNPQKNAANSVPHSFFDFANNSGLRGAVSMGNPLVSGAAMAAATALKDKYGYDYFEALGKQDISIESSSTALTKLEAGEYKAIMVLEESVLKKRQEESSVLEIIYPMDGAVIIPSVIMIIAGKWSANNNTKSAEIITDWFLSPQGQDAIVAGQMHSVRKDYKIPHGSVPTGRIQALPLNWEDAFRQREDIQVKFEELVISRR

SEQ ID NO: 34015 - DNA, 429 bp, Unknown
  Obtained from environmental sample
  misc_feature (1)..(429): n is a, c, g, or t
atgaaaaaaggcataacgctttttacacttgtgtttttttcgctttttttaataactaacgaagttttctcacagcgcggaggcagagcgcaggaagttatagaggtgcgtcttgcttctccgttgccgagaaattccgactggggacgggtgctggatcgtatagcgggtgaatggacgcgcgtaacagataatcaggtacggttacgtgtcattcatgacggattggagggcggcgaggcaaaaatgctttcatcccttaactctgacaatattcaggctgcggtttttacatcttcggggctttcggaaatttgtcctcctgtaatgactttgagtattccgttctttatcagaaataatgcggaattggacactgtactgaaagatacgctgcctgttctgaagaacctcggccgccgtccataa

SEQ ID NO: 34016 - protein, 142 aa, Unknown
  Obtained from environmental sample
  SIGNAL (1)...(24)
  misc_feature (1)..(142): Xaa is any amino acid
MKKGITLFTLVFFSLFLITNEVFSQRGGRAQEVIEVRLASPLPRNSDWGRVLDRIAGEWTRVTDNQVRLRVIHDGLEGGEAKMLSSLNSDNIQAAVFTSSGLSEICPPVMTLSIPFFIRNNAELDTVLKDTLPVLKNLGRRP

SEQ ID NO: 34017 - DNA, 465 bp, Unknown
  Obtained from environmental sample
  misc_feature (1)..(465): n is a, c, g, or t
ttgtactgggctgtcgcaggcgggcttgccgcttattcaattgacgtgtttgattttgaactgagcgcccgcataccaaactggtccgcaatgatacacagagcttacgaacttaatcccgattacggcggcgcttcccttgatgaatttttcattcttttttattcatcactgcctgaaacgatgggaggaaacaaggaacaggcgctgtaccattttcgcaaagcgctggaaaaaacacgcggtaattctacaagcgcgtatatttcctacgcacagtcgatcagcgttcccgctcaggattacgaaacattcagggattgtcttgaaaaggctctggctgttgacccaaatgccgatacttctacacggttgatgactattatcaatcagaagaaggcgcgctggcttctcgacaatgcctacaattacttttcattccttcccattccagaggattattga

SEQ ID NO: 34018 - protein, 154 aa, Unknown
  Obtained from environmental sample
  misc_feature (1)..(154): Xaa is any amino acid
MYWAVAGGLAAYSIDVFDFELSARIPNWSAMIHRAYELNPDYGGASLDEFFILFYSSLPETMGGNKEQALYHFRKALEKTRGNSTSAYISYAQSISVPAQDYETFRDCLEKALAVDPNADTSTRLMTIINQKKARWLLDNAYNYFSFLPIPEDY

SEQ ID NO: 34019 - DNA, 1086 bp, Unknown
  Obtained from environmental sample
  misc_feature (1)..(1086): n is a, c, g, or t
ttgcaactgcaaaccgcatcgggtaattttgatttgtcaggccgtgactggatattgttccgtataaaatgtcttgatgaaaaaatcgcgccgtcgctcgaccttgcaatgcgtgtaatctgtgaagcggatttttccgaccgcagaagaataaatgatcttgttctggaaatgaagaacgagattaattccagtctcgcgccaatgggacatatttattcgtcaggcagggcaggccgttttagttcacgttcaaaaaaagtggaagaaaaattctcaggaatttcgcagattgaatttgttcaacagcttgcgagatacgatacgggggaaataattaagaaactgcaatacatcagggaaaaaattataaaggcggggcttatagtaaatatcacgggaaacgctcttaatgtcgcagaaacggagatagcgcagagatttaaccgctttggtccgcctttgccccggctttccgtggaaataggcgcaggtatacaaaggcctgaagtttttacttccaagtctttgcaagtgggttttgcggcgttggcgttaaattccgcgcctcatgacacattggaatcagtcgcagaatttgttttaacgcatcagttgagtaccggggcgttatgggaagatatacggatgaaaggcggcgcttacggcgcttttatcaacagcaattcgcttgagaactgcgtgtcttttgccacatatcgcgatccgaatccactgcgttcattggatgtgatttcttcaatatttaaagacagcacttacggaaaatgtacggaagactaccttgtaaaatccataatcggctgttactcgaaagaaacgcgccctcagaccgcggcggaaaaaggtttaatcgactttaacagattcctttacggtattgacgaaggttaccgcaggaaaaggctggaacgtattatttctctttcaaccgccgacattgaagcgatttttaattctttcagttcaagagttacgtcgccgcccgtaataatcgcgggcgtaaaaacagccgaagaagccgccaaagctcttggggttaatgtgcagatgttgaagatttaa

SEQ ID NO: 34020 - protein, 361 aa, Unknown
  Obtained from environmental sample
  misc_feature (1)..(361): Xaa is any amino acid
MQLQTASGNFDLSGRDWILFRIKCLDEKIAPSLDLAMRVICEADFSDRRRINDLVLEMKNEINSSLAPMGHIYSSGRAGRFSSRSKKVEEKFSGISQIEFVQQLARYDTGEIIKKLQYIREKIIKAGLIVNITGNALNVAETEIAQRFNRFGPPLPRLSVEIGAGIQRPEVFTSKSLQVGFAALALNSAPHDTLESVAEFVLTHQLSTGALWEDIRMKGGAYGAFINSNSLENCVSFATYRDPNPLRSLDVISSIFKDSTYGKCTEDYLVKSIIGCYSKETRPQTAAEKGLIDFNRFLYGIDEGYRRKRLERIISLSTADIEAIFNSFSSRVTSPPVIIAGVKTAEEAAKALGVNVQMLKI

SEQ ID NO: 34021 - DNA, 396 bp, Unknown
  Obtained from environmental sample
  misc_feature (1)..(396): n is a, c, g, or t
gtgccggatttcgtagagattagcggcgaaattcgagcctgccgcgagagcgaactggaaagaataacttctgtttatgaaaacgccgttagaaaatttaacgagcggggcgaagggcgcgcgcaaatcgacgtagaacgcaagtataacgggttcgttttagacgaaaactcgccgcttatcaggaaaatgagcgcggctgccgaaaaaatcggcaaaaccccgaacgtaatttcaagcggcggaggcagcgacgcgaattttttcaacgaaaaaggcgtcccgacctgcgtaatctcgtgcggaatgtcgaacgtgcataccagtcgggaatatatccgggtgtcggatatgactgactgcgcaaatatgctgttaaactttataatcgggtga

SEQ ID NO: 34022 - protein, 131 aa, Unknown
  Obtained from environmental sample
  misc_feature (1)..(131): Xaa is any amino acid
MPDFVEISGEIRACRESELERITSVYENAVRKFNERGEGRAQIDVERKYNGFVLDENSPLIRKMSAAAEKIGKTPNVISSGGGSDANFFNEKGVPTCVISCGMSNVHTSREYIRVSDMTDCANMLLNFIIG

SEQ ID NO: 34023 - DNA, 669 bp, Unknown
  Obtained from environmental sample
  misc_feature (1)..(669): n is a, c, g, or t
atgatggccgagggggctggtttcacntacagcaatgttgacgcgatgaacaagggaattaccgccaacctcatgctcttctgtttttccgttgcccttacccaactgtgtattgcccacatcaagggggtgattgccaacataaaggccaagtcccccaaggtgctggcggaattcgggcagttgggaatgttggttgggatgtactttgtggttctttccctcgtagtgttcaataccgggttcggcggggttaaaacctggcagtttgtcagcctgtttggcggtttcgcgctgaacttcgtatttggcaattacgaaggaagcgtcctcaaatccttccttagtagttgcgcgaatattcttacaaacgtgttgaacataaccagtgtgttctccgacatcatgtcctacatcaggctttgggcggtaggtcttgccggggcttccattgccagcacagtcaacggctttgccggtccccttataggccacttgatctttttcatattcggcctggcgctctttttgttcggccacagttttaacatggtgcttaacgtgctgtcggttttggtccatggggtaaggctcaatacgctggaattttcttcccacctggggcttacctggtccggtttttcatataagccgtttgctaaacggtag

SEQ ID NO: 34024 - protein, 222 aa, Unknown
  Obtained from environmental sample
  misc_feature (1)..(222): Xaa is any amino acid
MMAEGAGFTYSNVDAMNKGITANLMLFCFSVALTQLCIAHIKGVIANIKAKSPKVLAEFGQLGMLVGMYFVVLSLVVFNTGFGGVKTWQFVSLFGGFALNFVFGNYEGSVLKSFLSSCANILTNVLNITSVFSDIMSYIRLWAVGLAGASIASTVNGFAGPLIGHLIFFIFGLALFLFGHSFNMVLNVLSVLVHGVRLNTLEFSSHLGLTWSGFSYKPFAKR

SEQ ID NO: 34025 - DNA, 681 bp, Unknown
  Obtained from environmental sample
  misc_feature (1)..(681): n is a, c, g, or t
ttgcaaaaagggaatacccgtaatcaagcctggctcacgaaaaacgtgaaaacacagccattctttaccatcatccacgaagacgacaatattatagcagtcaacaaagccgccggaatttcggtgggcggcgataggtgggatgtatccagggaacggctggataaactggtagcagaaaatattaatcctccggcgaaagtatttgttgtccatcgtatagactgcgatacttccgggctggtggtattcgcaaaaaacgaggaaacccaccgctgtctttcactcgcttttgaagggcggaatgtaactaaacggtacattgccattgtccacggccgcccttcctggcaggaaacggcttgcgatcttcctctgattcccaacggaaacaagctccaccagacgataattgacaaataccaggggaaaaaatcccttacccgttttgcgctactgggcagcgcgggaaattacagcgtaattgaagccctgccggaaacaggcagaacccaccagatacgcgttcatgccgcggccttgggccatcctgttgtatgcgattcaatgtacggaaagggcaagccggttatgctttctgaaataaaaagaaactggcacggcgacccttatgaagaaaaaccccttctggcgcggctgggccttcatgctgtgaattaa

SEQ ID NO: 34026 - protein, 226 aa, Unknown
  Obtained from environmental sample
  DOMAIN (30)...(180): RNA pseudouridylate synthase
  misc_feature (1)..(226): Xaa is any amino acid
MQKGNTRNQAWLTKNVKTQPFFTIIHEDDNIIAVNKAAGISVGGDRWDVSRERLDKLVAENINPPAKVFVVHRIDCDTSGLVVFAKNEETHRCLSLAFEGRNVTKRYIAIVHGRPSWQETACDLPLIPNGNKLHQTIIDKYQGKKSLTRFALLGSAGNYSVIEALPETGRTHQIRVHAAALGHPVVCDSMYGKGKPVMLSEIKRNWHGDPYEEKPLLARLGLHAVN

SEQ ID NO: 34027 - DNA, 798 bp, Unknown
  Obtained from environmental sample
  misc_feature (1)..(798): n is a, c, g, or t
ttgggcggcaaatcgccgcgactggatgttaacgtcactttcaacgacggagaggccgccgacctggaaatgcaagtagacaaatcggcggacgacctcagggacagagccgccttctatacagccatgctccagtcagtccagtcgcgcaaaggccacgcctataaagagataaaacgggtataccagatatttttcctgaactgtatcctgtatccgcacagcgccaaactgccccggcggtatttttacatggaagaagaggagcatgaccggctgacggagataagcgaaattatcttttacgagatgccgaaactggagcagcgggtagaggacctgcttgccgggaaagcggatatgggggccttgtcgaaagaagaagaatggtgtatttatatgaggtacaggcacgaggctcgggcggcgaagttgatagaagagctatcccggaaggaggaaggcattatgtgggcggaaagggcagtaacgaaaatagaccgtgattatgacaaagcgatacggaagatgaacgaactcaagaacagcatggatcgcgcgcagttaaggtacgatgccagacaggaaggccttgcggaaggccgagcggaaggccgagcggaaggccgtgcggaaggtcatgcggaaggtcgagcggaaggtcatgcggaaggcatagaaaaaggccgcgtcgaaggtctactcgaagttgcccggaagatgaaagaaatgggcgattccgttgaaaagatacaagcaataaccgggctccctgtgagaactattgaacagctataa

SEQ ID NO: 34028 - protein, 265 aa, Unknown
  Obtained from environmental sample
  misc_feature (1)..(265): Xaa is any amino acid
MGGKSPRLDVNVTFNDGEAADLEMQVDKSADDLRDRAAFYTAMLQSVQSRKGHAYKEIKRVYQIFFLNCILYPHSAKLPRRYFYMEEEEHDRLTEISEIIFYEMPKLEQRVEDLLAGKADMGALSKEEEWCIYMRYRHEARAAKLIEELSRKEEGIMWAERAVTKIDRDYDKAIRKMNELKNSMDRAQLRYDARQEGLAEGRAEGRAEGRAEGHAEGRAEGHAEGIEKGRVEGLLEVARKMKEMGDSVEKIQAITGLPVRTIEQL

SEQ ID NO: 34029 - DNA, 525 bp, Unknown
  Obtained from environmental sample
  misc_feature (1)..(525): n is a, c, g, or t
ttggggaagtctcgcacttatgtcaatttatttttaacgatgctaatcggggggctatggcacggagcggcttggaggtttgttgtttggggtggtttgcacggagtggctctagctgttgaacgcctgcttaaatcttacattaacataccgcaaaatataatcacacgcatattcacacgcattataggcgtaatcataactttccattttgtaacctttgcctgggtatttttccgagcgcaggattttagcacggctattgatttgataggtatggcgagcaaggtggattttgagaaagagcattggcttgcggttattgatgcgtataaaaatgttatgattgtgttgctctctgggtttattatgcattttttgccaaatttctttgtacagtggctacagaggatttttaccgctctgcctattattgccaaagccttggtaatagggctggttttatggctggtgcatgcaactgcctctagcgagatacagccttttatctattttcagttttga

SEQ ID NO: 34030 - protein, 174 aa, Unknown
  Obtained from environmental sample
  misc_feature (1)..(174): Xaa is any amino acid
MGKSRTYVNLFLTMLIGGLWHGAAWRFVVWGGLHGVALAVERLLKSYINIPQNIITRIFTRIIGVIITFHFVTFAWVFFRAQDFSTAIDLIGMASKVDFEKEHWLAVIDAYKNVMIVLLSGFIMHFLPNFFVQWLQRIFTALPIIAKALVIGLVLWLVHATASSEIQPFIYFQF

SEQ ID NO: 34031 - DNA, 894 bp, Unknown
  Obtained from environmental sample
  misc_feature (1)..(894): n is a, c, g, or t
ttggcaatggcggcttacatttgcggagaaggcagaattaggcgggttgtaagggaaagctcaacagattcttcaaaaaaagtttcttactggaatttgaagttgcctcgcgaaacaatgctctatgttccaagaattttggcagctgccattatagggcatttcccagaaaattattcgttcacagttgaaaaacagagccgtgttccatttgatacagtcacaataaaagattgcattcctctagacaaagctggttctgcggttggtgcaagcattaacacaatgcgcgaattgaacccagaattaacgcgctggtgcacacctccaaatttaaaaacctacacaatgaaagttcccaaaggttctagagaaagatttttggcagcttacgaaaaaatggataaaacccagcttgtacgctggcagcaatacaaagtgcaaaggggcgataaccttggtcaaatatcaaggctttttggactcagggttgcagacatacaagcggcaaataatttgagaaactcaagacttagtgttgggcaagttttgataattccaatgcccaccggagcaaatcctcccgaaagacagaggcaaattgaaaaacaagaaagtgcggcagcacttgcaaaaaaacagctctttgatgctccttccgaaaagtcaggcctcagcatacgttcttatgttgttcgcagaggagataatttgagttccatttctaggcggtttggaatatcttcgcaaaacttaatgacttggaataatttgcaatccaatagggttatgattgggcaacgtatttacttgcaagatccttctaaacaagattccaaaaaaaatgaaggtttagccccaataactcaaaaagaagttaagggcacaagctag

SEQ ID NO: 34032 - protein, 297 aa, Unknown
  Obtained from environmental sample
  DOMAIN (230)...(272): LysM domain
  misc_feature (1)..(297): Xaa is any amino acid
MAMAAYICGEGRIRRVVRESSTDSSKKVSYWNLKLPRETMLYVPRILAAAIIGHFPENYSFTVEKQSRVPFDTVTIKDCIPLDKAGSAVGASINTMRELNPELTRWCTPPNLKTYTMKVPKGSRERFLAAYEKMDKTQLVRWQQYKVQRGDNLGQISRLFGLRVADIQAANNLRNSRLSVGQVLIIPMPTGANPPERQRQIEKQESAAALAKKQLFDAPSEKSGLSIRSYVVRRGDNLSSISRRFGISSQNLMTWNNLQSNRVMIGQRIYLQDPSKQDSKKNEGLAPITQKEVKGTS

SEQ ID NO: 34033 - DNA, 699 bp, Unknown
  Obtained from environmental sample
  misc_feature (1)..(699): n is a, c, g, or t
gtgccacaaggtttagatgcaaaagaaatggcaaagttgcttgaaaatgcaacaaaaaaaggcgatttatatgccgcaaatgaagagcgtttaaatcgctggcacgtagaatggagccgccgtacagaggcaatgcttgcaaacaacaatcgcgattcccactttcaaaggctttggctaatagattttttcaatggacttttgggtgaaacaccagaaaggcaaggttctttgactgcagcctggggtgaaaatcaagatatttgccagcagcatggttatgacccagaacttatggaatactcggctctttaccctatttctgcaacaaaatacatttccaaaaaaactgcaaatatacgcaaaattcaaatttctcctgtgttgcctggcaacgaaaggatgagtagcttgccagttagcgcaacaatttttgaactggaaaacccaacaaacaaaacacgtgaaattaccattgtgcaaatgcaagacaatatttgcggttataatgttataaaagataggcacggggttcaagactcttcttttgttttgcaaccaaacgcaaaatttttggaagctcagtgctatgggcaagttcaatcagatggccgcaacacaattggaattgaattctatgcaaaaaaattccccacagaatccgactgcgcaggcagaatggcaatagcatccacatga

SEQ ID NO: 34034 - protein, 232 aa, Unknown
  Obtained from environmental sample
  misc_feature (1)..(232): Xaa is any amino acid
MPQGLDAKEMAKLLENATKKGDLYAANEERLNRWHVEWSRRTEAMLANNNRDSHFQRLWLIDFFNGLLGETPERQGSLTAAWGENQDICQQHGYDPELMEYSALYPISATKYISKKTANIRKIQISPVLPGNERMSSLPVSATIFELENPTNKTREITIVQMQDNICGYNVIKDRHGVQDSSFVLQPNAKFLEAQCYGQVQSDGRNTIGIEFYAKKFPTESDCAGRMAIAST

SEQ ID NO: 34035 - DNA, 345 bp, Unknown
  Obtained from environmental sample
  misc_feature (1)..(345): n is a, c, g, or t
atgaaactgctccttcattgctgctgcgcgccttgctcttcttcatgcctgcccgcccttcgcgctgaggagattgaacccgatcttttttggtataacccgaacattcacccatgcggcgaatattcattgcgccgcgattgcctggtaaatttcgcggatagcgaaaaattaaaattgacgatgcccgatgaatatgatgaatacggtcttcaagcatttttaagcgaagtattcccgcaggacggaggacgctgtcaaaaatgttacgcaatgcgtcttgaaaaagccgctattaccgcggcgcgggatgggtatgacgctttttcgacaactttgctgtaa

SEQ ID NO: 34036 - protein, 114 aa, Unknown
  Obtained from environmental sample
  SIGNAL (1)...(21)
  DOMAIN (3)...(114): Uncharacterized BCR, COG1636
  misc_feature (1)..(114): Xaa is any amino acid
MKLLLHCCCAPCSSSCLPALRAEEIEPDLFWYNPNIHPCGEYSLRRDCLVNFADSEKLKLTMPDEYDEYGLQAFLSEVFPQDGGRCQKCYAMRLEKAAITAARDGYDAFSTTLL

SEQ ID NO: 34037 - DNA, 1101 bp, Unknown
  Obtained from environmental sample
  misc_feature (1)..(1101): n is a, c, g, or t
atgacagattggccgagacataataccggcgagagccgaagcgctttttatttgggcggcgacagtctgcccgatcttgacagggcatatcctgaattcaaaccccaggcgcattatttacaggagtacgccggcttccccgtgtatgctaataccaaatcagtgtacttcgattcaggcgaaggattttacaggcgcgtgcttgaagaattgggaaaggcaaagaaatacatttttctggaattctttattctgaaagaaggggtaatgcttaactccataatttcgatactggcgcgtaaagcgaaagagggccttgatgtgcggcttatttacgatgatctgggttgtttcctgtcccttcctgaaaatttcaggcagagtctggaagaaagatgcataaagtgttttgtgtttaatcctttccggccgattctttcttccctgcaaaacaaccgcgatcaccgtaagataatttccattgacgccagggtggcgtttacaggcggccttaaccttgccgacgaatatataaacactgttcatcgttttggccactggaaggacgccgccataatgctggaaggcgaaggagcgtggtcgctgacgctgatcttcctgcagatgtggaacatccagccgggttttaatgacagttatgagtcgttttacccatggaaacaaagctcttgtgaaataaagtctgacgggtttgtacagccctacgctgacagccccattgacagggaaaatgtcggcgaacatgtatacattcaaatcatcaacaaggcgaaaaaatatgtgtatatcaacaccccctatttaattctggacgacggcctgctttccgcgttaatacttgccgcaaaaagcggcgttgacgtccgcattataactccgcaccgctgggacaaatggattgtagcgattacgtcccgttcttattaccgaaggcttattcgggccggagtaaaagtttatgaatacacttccggttttaatcacggcaaaacttttgtttccgatgataaaatagcgactgtaggcacgacgaacttggattttaggagcctttatcttcactttgaatgcggcgtgtaa

SEQ ID NO: 34038 - protein, 366 aa, Unknown
  Obtained from environmental sample
  DOMAIN (330)...(357): Phospholipase D Active site motif
  misc_feature (1)..(366): Xaa is any amino acid
MTDWPRHNTGESRSAFYLGGDSLPDLDRAYPEFKPQAHYLQEYAGFPVYANTKSVYFDSGEGFYRRVLEELGKAKKYIFLEFFILKEGVMLNSIISILARKAKEGLDVRLIYDDLGCFLSLPENFRQSLEERCIKCFVFNPFRPILSSLQNNRDHRKIISIDARVAFTGGLNLADEYINTVHRFGHWKDAAIMLEGEGAWSLTLIFLQMWNIQPGFNDSYESFYPWKQSSCEIKSDGFVQPYADSPIDRENVGEHVYIQIINKAKKYVYINTPYLILDDGLLSALILAAKSGVDVRIITPHRWDKWIVAITSRSYYRRLIRAGVKVYEYTSGFNHGKTFVSDDKIATVGTTNLDFRSLYLHFECGV

SEQ ID NO: 34039 - DNA, 849 bp, Unknown
  Obtained from environmental sample
  misc_feature (1)..(849): n is a, c, g, or t
ttgatcagatcggccgagattttgtccggcgctttgttaatcatgggatgtccggatataaccgaaaacccggatcctccgagtatttcaggttttagcagaacgccgacatcggtagtaaccccgacagatacggtaaccgtatccgcaaaagtaacaaccactacatcgacaattacaaaggtcgtccttcaatggacgcttggcggtaaagcgcaaactgacatacctatgacgccaagcgggactctgtattccgctacgattccggcgcaagccgcaggttcagtagttacctataaagtttccgcaaccaacaatcttggcgaaaccgctacaacggttacgcaaagctatacagtggcagttgagcctcctccggatgggcctccggttatttccaattttggcagaaatattccatcggtaacaccgtcagatacggtaaccgtatccgccacggtaacaacagcagcccagtcgacaattacaagcgtcgttcttcaatggacgcttaacagtacggataaagacgacattgaaatgacggcaagcggtaatgtttattccgctacgattccggcgcaatccttaaattcagttgtcacctataaagtttccgcgaccaataatcttggcgaaaccgctacaacggctacgcaaaactatacagtggcagaagtaccggtggatcctccggctatttcaggtttaagcagagagccgtcatcggtaaccccgacagatacggtaaccgtatccgcaacagtaacaacaactacatcgccnattacaacggtcgttcttcaatggacgcttaacggcgcagcgcaagtaaccttactatga

SEQ ID NO: 34040 - protein, 282 aa, Unknown
  Obtained from environmental sample
  misc_feature (1)..(282): Xaa is any amino acid
MIRSAEILSGALLIMGCPDITENPDPPSISGFSRTPTSVVTPTDTVTVSAKVTTTTSTITKVVLQWTLGGKAQTDIPMTPSGTLYSATIPAQAAGSVVTYKVSATNNLGETATTVTQSYTVAVEPPPDGPPVISNFGRNIPSVTPSDTVTVSATVTTAAQSTITSVVLQWTLNSTDKDDIEMTASGNVYSATIPAQSLNSVVTYKVSATNNLGETATTATQNYTVAEVPVDPPAISGLSREPSSVTPTDTVTVSATVTTTTSPITTVVLQWTLNGAAQVTLL

SEQ ID NO: 34041 - DNA, 606 bp, Unknown
  Obtained from environmental sample
  misc_feature (1)..(606): n is a, c, g, or t
atgaaaacaaccaaaatagaatggacagaagctacctggaacccttcaataggttgttccaaagtaactactggttgtaagaattgctatgcggaaataatggctagaagattgcaagcaataggagttacaggttacgaagatggttttgaatttaaaatattgccagatagattatatcaacctttaagtatcaaaaagcccacaaaattctttgtaaactcaatgagcgatttatttcataagaatatgccttttgattttcttgataaaatatttgaaattatgaaaagcactccgcaacaccattatcagattttgacgaaaagagaaaatattcttcaaaaatattttacaaaaagagaagttcctgcaaatgtttggttgggtgtaactgtggaacataaggatacaaaacatagaatagatgttttgagaaatattgaagccaaagttcgttttatttctatagaacctttgataggtgatattggaaaattgaatttagagaaaattcattgggtaatagttggcggagaaagcggaaattatgcaagaccaatgaatcctgagtgggcaattaacatacaagaatcatgtgtttaa

SEQ ID NO: 34042 - protein, 201 aa, Unknown
  Obtained from environmental sample
  DOMAIN (2)...(200): Phage protein Gp37/Gp68
  misc_feature (1)..(201): Xaa is any amino acid
MKTTKIEWTEATWNPSIGCSKVTTGCKNCYAEIMARRLQAIGVTGYEDGFEFKILPDRLYQPLSIKKPTKFFVNSMSDLFHKNMPFDFLDKIFEIMKSTPQHHYQILTKRENILQKYFTKREVPANVWLGVTVEHKDTKHRIDVLRNIEAKVRFISIEPLIGDIGKLNLEKIHWVIVGGESGNYARPMNPEWAINIQESCV

SEQ ID NO: 34043 - DNA, 1239 bp, Unknown
  Obtained from environmental sample
  misc_feature (1)..(1239): n is a, c, g, or t
gtgcccgccgtgctgaaacatacgaacaaggtttattatcttaacgacaaggaaattgccgtaatcaggactcactcggtcaaattttataatattgacaaggaacctgttgaaaaacggattgaaacaataacatggaatattgacagcgcggaaaagggcggctatccgcatttcatgcttaaagagatcatggagcagccgaaaatactgcgggatactattaattccacggttaaatcaggcacttataaaaacatttttgacaatcttgacgttacgcgctttaccaagatcgtgataagcgcctgcggttcggcttacaacgcgggagttgtcgccaggtatgtgtttgaaaaactgtgcaggtttccctcaattgaagtggaactcgcgagcgaattccgttataaagacgccgttatcggcgaaaagacgctggttattctgatcagccagtcgggagagacagcggataccatagcggcaatgcgggaagcaaagcgcaaaggcgccgttaccctgtcaatcgtcaatgtcgtcggcagcactatcgccaaagaatcggacttctgcatgtttacggcggccggccccgagattgccgtggcgacgacaaaagcattttcggcccagctcgtgctgctgtatattctggcgatatggttcgccgctaaatcgggaaaactgccgccctatgaggcacagagactaatgtctgaaattgactccctgcccgaaaaaaccgaacgcctgcttaaacagaccgacgctgttcagatgtacgcttccacctgcatcggctataagagcatcttcttcatcggcagaaacattgattacgccatcgcgctggaaggctcgttaaaactcaaggaaatttcctatattcactccgaagcctacgcgggcggtgaattgaagcacggcactatttccctggttgaacaggacacgctggttgtcgccatctccaactgcgccccgctgtacggcaaaattatgagcaacgcggagcaggtggtaagccggggcgcgaaagttctgcttatcggcaactgcccaaacgttaaacaggacgacaaactcttccatatcgctttacctgaaagtccggatttgttttccccttccctgtcggttattgtcttgcagcttttcagctattacgtggcggctaacaagggtttggacatagacaagccgaggaatttggccaagagcgttaccgttgaatag

SEQ ID NO: 34044 - protein, 412 aa, Unknown
  Obtained from environmental sample
  DOMAIN (263)...(398): SIS domain
  misc_feature (1)..(412): Xaa is any amino acid
MPAVLKHTNKVYYLNDKEIAVIRTHSVKFYNIDKEPVEKRIETITWNIDSAEKGGYPHFMLKEIMEQPKILRDTINSTVKSGTYKNIFDNLDVTRFTKIVISACGSAYNAGVVARYVFEKLCRFPSIEVELASEFRYKDAVIGEKTLVILISQSGETADTIAAMREAKRKGAVTLSIVNVVGSTIAKESDFCMFTAAGPEIAVATTKAFSAQLVLLYILAIWFAAKSGKLPPYEAQRLMSEIDSLPEKTERLLKQTDAVQMYASTCIGYKSIFFIGRNIDYAIALEGSLKLKEISYIHSEAYAGGELKHGTISLVEQDTLVVAISNCAPLYGKIMSNAEQVVSRGAKVLLIGNCPNVKQDDKLFHIALPESPDLFSPSLSVIVLQLFSYYVAANKGLDIDKPRNLAKSVTVE

SEQ ID NO: 34045 - DNA, 921 bp, Unknown
  Obtained from environmental sample
  misc_feature (1)..(921): n is a, c, g, or t
atgctggagaccggaagctggaagggaaaacactttagatcgtataacgtaaaaacgccgccgacccgcctgacgccgggccggagcaatccttacgcgaaattccttgagaacgtgaaggacaagctcgcctccctcgggttcgaggaatttgacggcccgttagttgaaacagagttctggaattcagacgccctgttcatgccgcagttccattcggcgcgggacatacatgacagctacagccttagcgatcctgtaaagccgggcgaaatcgcaaaggccaagtcgatagaggagccctggctttccaatgttgcggcggcccatgaaagcggcgggaacaccggcagccggggctggagctacgcttttgaccgtgactttacccggcggctgattctccgttcacaaggcacagtgctttcggcgaaaaccctgccaaaggcggaagttcccggcaagtatttcggcattgtccgctgcttccgttatgaccgcgtggatgctacccatcttcctgacttctaccagaccgagggcatagtgttaggcgaaaacgtaaaccttcgaaccctgctgggaatgctggaaatgtttgcccgcgaggttgcgggcgcgaaagaggttaaatacgttccgggatatttcccttttaccgagccttcggtagaggtgcatataaaacaccctatgctcggctggttcgagctgggaggttccggcattttccgtcccgaggtgacgcaaagcctgggagtggacgttccggtcgcggcctggggcatcggcattgaccgcatggcccttatggcgctcggccttaacgatctgcgggatcttttcagcggcaatatagaagacgtgcggctgcgacggcttactgaagcaaacaaaatcaaggaaaaaacaaatgcctaa

SEQ ID NO: 34046 - protein, 306 aa, Unknown
  Obtained from environmental sample
  DOMAIN (14)...(292): tRNA synthetases class II core domain (F)
  misc_feature (1)..(306): Xaa is any amino acid
MLETGSWKGKHFRSYNVKTPPTRLTPGRSNPYAKFLENVKDKLASLGFEEFDGPLVETEFWNSDALFMPQFHSARDIHDSYSLSDPVKPGEIAKAKSIEEPWLSNVAAAHESGGNTGSRGWSYAFDRDFTRRLILRSQGTVLSAKTLPKAEVPGKYFGIVRCFRYDRVDATHLPDFYQTEGIVLGENVNLRTLLGMLEMFAREVAGAKEVKYVPGYFPFTEPSVEVHIKHPMLGWFELGGSGIFRPEVTQSLGVDVPVAAWGIGIDRMALMALGLNDLRDLFSGNIEDVRLRRLTEANKIKEKTNA

SEQ ID NO: 34047 - DNA, 363 bp, Unknown
  Obtained from environmental sample
  misc_feature (1)..(363): n is a, c, g, or t
atgggttacagaatcgcgtttgccggtacgggagaatacatagatcagcatttcggatcggcgcggtattttcaggtttacgatctcgcggataacggaaaccatgaacacgttgaaacccgcaccgcgcaggcaaagtgccggggaaattgcgagggcggttttgaccacttattacaaattctgaacgactgcgacgcggtatttgtcagtagaatcgggcaaagcgcggcggcgtttatgatttccaaaggcaaacgggtgtttgaggcaagcggcaaaatagaggatattttggcaaaattgaaagaaggaaatcttctggaaaaggaaccggagttaagcgatgaacgcgacatttga

SEQ ID NO: 34048 - protein, 120 aa, Unknown
  Obtained from environmental sample
  DOMAIN (10)...(104): Dinitrogenase iron-molybdenum cofactor
  misc_feature (1)..(120): Xaa is any amino acid
MGYRIAFAGTGEYIDQHFGSARYFQVYDLADNGNHEHVETRTAQAKCRGNCEGGFDHLLQILNDCDAVFVSRIGQSAAAFMISKGKRVFEASGKIEDILAKLKEGNLLEKEPELSDERDI

SEQ ID NO: 34049 - DNA, 516 bp, Unknown
  Obtained from environmental sample
  misc_feature (1)..(516): n is a, c, g, or t
gtgtattattcagcctttatccatcccggcggttacgtgcaaaaagaaaattcaatattaagcgattcacgccttcctgaaattgtcagccctccccttgtcagggaacaccgtctttatcaggcagattggctattgcgtttttatcatttctccgcaggcgaaatattaaacgaagatgaaccgtttcttgacacgcacttagaccccaagacagcgtgggcgcttaaaaatctggactttttcccgatagaaataaaccgcgccgattacgagactttgctgcgtattccgggcataggcgcgaaaaccgcccgcagaatactggaaacccgccgttccaaaagaataactatagaaaccctgcaaagaataggagccgttttaaaacgcgcccgctacttccttaccgccgcaggcgcgtttattgaaagaccggatgatccggtccgtatccgccgcctgttatctgacactgacggcgcgggattgcagcttccgctttttgatttttaa

SEQ ID NO: 34050 - protein, 171 aa, Unknown
  Obtained from environmental sample
  DOMAIN (82)...(111): Helix-hairpin-helix motif
  misc_feature (1)..(171): Xaa is any amino acid
MYYSAFIHPGGYVQKENSILSDSRLPEIVSPPLVREHRLYQADWLLRFYHFSAGEILNEDEPFLDTHLDPKTAWALKNLDFFPIEINRADYETLLRIPGIGAKTARRILETRRSKRITIETLQRIGAVLKRARYFLTAAGAFIERPDDPVRIRRLLSDTDGAGLQLPLFDF

SEQ ID NO: 34051 - DNA, 516 bp, Unknown
  Obtained from environmental sample
  misc_feature (1)..(516): n is a, c, g, or t
gtgaatatttctgaatattcagtaaaacaccctgttacaattgttatacttttcgcgcttattatcggaattgcttttacattattagtcaacctttcaatggacctttacccgtcggtaaatatgcctgttttttccgtatttactcggtttccgggagcaggttccgccgatgttgaacgcaatgtaacagaacggcttgaaagagcgctttcttcatcaaggggccttgttaacatgacaagcaattcccaatttgagacaagcaatatcaatcttgaattcggatttgggactaacatggataaagctgttaacgatgctcaattactggttaacagacttgccaattctcttccagacggtgttcaaactcctgttgtacgccgttttgacatgagcgctttaccgattatgcgtcttattgtaaggggaaactacccgcctgatcagcttcgtatttttgccgaagatgaaatacagtcttcaattgagcggatgactcggccaatctga

SEQ ID NO: 34052 - protein, 171 aa, Unknown
  Obtained from environmental sample
  misc_feature (1)..(171): Xaa is any amino acid
MNISEYSVKHPVTIVILFALIIGIAFTLLVNLSMDLYPSVNMPVFSVFTRFPGAGSADVERNVTERLERALSSSRGLVNMTSNSQFETSNINLEFGFGTNMDKAVNDAQLLVNRLANSLPDGVQTPVVRRFDMSALPIMRLIVRGNYPPDQLRIFAEDEIQSSIERMTRPI

SEQ ID NO: 34053 - DNA, 336 bp, Unknown
  Obtained from environmental sample
  misc_feature (1)..(336): n is a, c, g, or t
atgcggcgcatggttcgcgattcccaattcaggggaatgcaggcggcgggcaccattaaaatgtggcccaaagtgcaggcgggcgagcgcaagtacattttcccgtttcagggtactgccgacgccacgtttaactccgcccttgattacgagctttcggttttcaaatatttcgccgacccgctgttaaaagccgtaaagcccggaatgtttgaatacgccgaagccacaagactgctttcgtttttggaaaattttacccctattccgccgcaatatgtgcccggcacgagtatccttcgcgagtttatcggcggcagcgagtttaagtactga

SEQ ID NO: 34054 - protein, 111 aa, Unknown
  Obtained from environmental sample
  misc_feature (1)..(111): Xaa is any amino acid
MRRMVRDSQFRGMQAAGTIKMWPKVQAGERKYIFPFQGTADATFNSALDYELSVFKYFADPLLKAVKPGMFEYAEATRLLSFLENFTPIPPQYVPGTSILREFIGGSEFKY

SEQ ID NO: 34055 - DNA, 450 bp, Unknown
  Obtained from environmental sample
  misc_feature (1)..(450): n is a, c, g, or t
atgaaattctccgacaaccccgagaagactacaaacccgggcgtaaagcaggtttggcgtatttgggataataaggggcaggcgctcgccgacttgctcggcattaacaacgatgaagacccgaaagcggggcagcgctgtactttctggcatccttccgccgattacaggcactttaaccacaatatcgaagccgcagaagccctgttaaaaatacgcatagaaaacggcttgctttctgcggaattaccgaaattagacgaagtcaaagcctttgcctgcgcctgtcttgaccgcttcgacgccacttacaaaaggcttttaaatccgcatatttacaaggtttcgattacggaaaacttgcgtaaattgaagttggaattgattgagaagaatttaacgagaagacaagatagaaataacagagaagaattttaccacgaatcataa

SEQ ID NO: 34056 - protein, 149 aa, Unknown
  Obtained from environmental sample
  misc_feature (1)..(149): Xaa is any amino acid
MKFSDNPEKTTNPGVKQVWRIWDNKGQALADLLGINNDEDPKAGQRCTFWHPSADYRHFNHNIEAAEALLKIRIENGLLSAELPKLDEVKAFACACLDRFDATYKRLLNPHIYKVSITENLRKLKLELIEKNLTRRQDRNNREEFYHES

SEQ ID NO: 34057 - DNA, 867 bp, Unknown
  Obtained from environmental sample
  misc_feature (1)..(867): n is a, c, g, or t
ttgacggcgcgtttttggattttcttaaacttttcgttttacggttctttatgggcaatggatgagggaaccgtagtctttccgcaggagccgcttatcagggtggaaggcagccttattgagtgccagataatcgagggtatgctgcttaacaccgtaaattttcaaagtttaatcgcgacaaaaacctgccgtatatggcttgcaagcggaaaaggcaaattgatggagttcggaatgcgccgcgctcaggggtttaacggcgcgatttgggcgtcaagggcggcgtatataggcggcgcaaacggaaccagcaatacccttgcgggtaaaatcttcggcatacccgtaatggggacaatggcgcactcgtgggttatgtcgtataacagcgaagaagaggcctttgacgcttatgccgccatgtatccggacagatctatctttttaatagacacttacgacacattgagaagcggtatacagagcgcgattaaatccgggaaaaaacttgacgaaaaaggaaaaaatttcggggtgcgccttgattcgggggacattcaatatctttctaccgaggtaagaaagaggcttgacgaggccggattacaaaaagcgtttattacggtatccaacgatttggacgagaatattatcgaaaatcttgtaaaagacggcgctcccgtagacagttggggtgtgggaaccagaatggtaacaggcggaaatgtagcggcctttaccggcgtttacaagttaaccgccatgctggaagggaaacacggctgttcccgtaatgaaattctccgacaaccccgagaagactacaaacccgggcgtaaagcaggtttggcgtatttgggataa

SEQ ID NO: 34058 - protein, 288 aa, Unknown
  Obtained from environmental sample
  DOMAIN (73)...(280): Nicotinate phosphoribosyltransferase (NAPRTase) family
  misc_feature (1)..(288): Xaa is any amino acid
MTARFWIFLNFSFYGSLWAMDEGTVVFPQEPLIRVEGSLIECQIIEGMLLNTVNFQSLIATKTCRIWLASGKGKLMEFGMRRAQGFNGAIWASRAAYIGGANGTSNTLAGKIFGIPVMGTMAHSWVMSYNSEEEAFDAYAAMYPDRSIFLIDTYDTLRSGIQSAIKSGKKLDEKGKNFGVRLDSGDIQYLSTEVRKRLDEAGLQKAFITVSNDLDENIIENLVKDGAPVDSWGVGTRMVTGGNVAAFTGVYKLTAMLEGKHGCSRNEILRQPREDYKPGRKAGLAYLG

SEQ ID NO: 34059 - DNA, 555 bp, Unknown
  Obtained from environmental sample
  misc_feature (1)..(555): n is a, c, g, or t
gtgccggattccggtcttgacgccgctctgggttattcgcgccagtcgggtatcccttacggggtaggttttataaaaaaccgttacatagggcgcacgtttatacagccctctcaggaagagcgcgaccgttccgtgcgaataaaacttaatacaatagaatccacaataaaagacaagcgcgttgttttaatagacgactcaatagtacgcggcacaacaatgagaaggattgtaaatcttgtgcgcgaatcgggagcgaaagaagtccacttgcgcatttcttccccgccttttataaatccctgttatttcggcacggatattgacagccgggaaaatcttatcgcttgcaaaatgtctatccccgaaatacgcgattacctgggtgcggacagccttggatatctttcggtggataatgttactaaaatcgcgcaaaacgcaaattgtaatttttgcatcggctgtttcagcggtaaataccctgtgccggaacctgtgcctttctcaaaaaataaatttgaacataaaatcaacaaggttaacaattaa

SEQ ID NO: 34060 - protein, 184 aa, Unknown
  Obtained from environmental sample
  DOMAIN (7)...(110): Phosphoribosyl transferase domain
  misc_feature (1)..(184): Xaa is any amino acid
MPDSGLDAALGYSRQSGIPYGVGFIKNRYIGRTFIQPSQEERDRSVRIKLNTIESTIKDKRVVLIDDSIVRGTTMRRIVNLVRESGAKEVHLRISSPPFINPCYFGTDIDSRENLIACKMSIPEIRDYLGADSLGYLSVDNVTKIAQNANCNFCIGCFSGKYPVPEPVPFSKNKFEHKINKVNN

SEQ ID NO: 34061 - DNA, 342 bp, Unknown
  Obtained from environmental sample
  misc_feature (1)..(342): n is a, c, g, or t
atggaaaacagtttcagtgaaagttacaaaaacgcaggcgttgacgtaacggccggataccgcgccgttgaattgatgaaaaagcacgttaaccgcacaaagattcccggcgttatagaggaaatcggcggattcggcggattgttcgctctcccgaaacttgattataaagagcctgtccttgtttccggcactgacggagtaggcacaaaaataaaaatagcgatgttagttgacaagcacgatacgattggaattgactgcgtagccatgtgcgttaacgacataatctgcgccggccgcgaaaccgcttttctttttggattatatagcgttaggtaa

SEQ ID NO: 34062 - protein, 113 aa, Unknown
  Obtained from environmental sample
  DOMAIN (5)...(113): AIR synthase related protein, N-terminal domain
  misc_feature (1)..(113): Xaa is any amino acid
MENSFSESYKNAGVDVTAGYRAVELMKKHVNRTKIPGVIEEIGGFGGLFALPKLDYKEPVLVSGTDGVGTKIKIAMLVDKHDTIGIDCVAMCVNDIICAGRETAFLFGLYSVR

SEQ ID NO: 34063 - DNA, 1455 bp, Unknown
  Obtained from environmental sample
  misc_feature (1)..(1455): n is a, c, g, or t
gtggctaaaaccgatactacgggcgaattaccgttagaaatgtctaccggcaaagtaattcccatagcgatagaagatgaagtaaaaactgactacctcaattacgctatgtccgtcattgtaagccgcgccctgcccgatgtccgggacgggctgaaacccgtgcacaggcggctgctctacgcgatggataccctgggactgcgcccgggcggagcgacaaagaagagcgccctcatcgtcggcgagacgatgggtaaataccacccgcacggcgatctttcgctttacgacgctcttgtgcgcatggcgcaggatttttccctccgctacccgcttattaaaggacagggaaatttcggctcaatagacaacgatccgcccgcggccatgcgctataccgaggcgaaattatccaaagtcggcgatgaaattttgcaggatctccagaaggagactgtggattttgtccccaactacgatgaatctttcatggaaccggcggttctgccctccgccattcccgaccttttggttaacggctcaagcggaatcgccgtcggtatggctacaaatatggccccccataaccttggcgaaatttgcgacgcgatctgcgcttatatcgacgatccctcttttaccaacgacgatttgatgcgctttgttcagggccccgatttccccacaggcgggataattctgggcagacaggggattatcgaggcttacaagacgggaaggggcaaacttcttgtccggggcaaattcaacgttgaaaccaccaagcagggcaaggaaaaaatcatttttaccgaaattccctacaatgtgaacaaagcccaattattggaaaaaatcggacaactgatgcgcgacaaggaaatcgacggtatagcgaacgcgaacgacgaatccgaccgcgacggtatacgcatcgttatcgagctgaaaaagggcgcgattgtcaaagtcgtccttaaccagcttttttcaaatactcagcttcaaacttcgtttagtataattaatctggcgctcgttaagggaaagccgcagttactcacattgagagaattaatacaccactttgttgaacatcgcgtcgaagtagtcacgcgccgtacccgtttcgacttacgcaaggctgaggaacgcgcccatatcctcgaagggcttgttatcgcccttgccaacattgacgaagttatcgcaatcatcaaggcgagcaaagacgtggcgacggcgcggcttaaactgcaggagcgttttaagctgtccgaggctcagtctgaggcaatcgttgagatgaggctgggcaggcttacgagccttgaaatcgaaaaaattgagaaagagcttgcggaactgaaagttcaaatcgcctactttaaatccttgttagccgatgaaaagaaactgcgcggagtatcaagaccgactcggccgatctga

SEQ ID NO: 34064 - protein, 484 aa, Unknown
  Obtained from environmental sample
  DOMAIN (43)...(478): DNA gyrase/topoisomerase IV, subunit A
  misc_feature (1)..(484): Xaa is any amino acid
MAKTDTTGELPLEMSTGKVIPIAIEDEVKTDYLNYAMSVIVSRALPDVRDGLKPVHRRLLYAMDTLGLRPGGATKKSALIVGETMGKYHPHGDLSLYDALVRMAQDFSLRYPLIKGQGNFGSIDNDPPAAMRYTEAKLSKVGDEILQDLQKETVDFVPNYDESFMEPAVLPSAIPDLLVNGSSGIAVGMATNMAPHNLGEICDAICAYIDDPSFTNDDLMRFVQGPDFPTGGIILGRQGIIEAYKTGRGKLLVRGKFNVETTKQGKEKIIFTEIPYNVNKAQLLEKIGQLMRDKEIDGIANANDESDRDGIRIVIELKKGAIVKVVLNQLFSNTQLQTSFSIINLALVKGKPQLLTLRELIHHFVEHRVEVVTRRTRFDLRKAEERAHILEGLVIALANIDEVIAIIKASKDVATARLKLQERFKLSEAQSEAIVEMRLGRLTSLEIEKIEKELAELKVQIAYFKSLLADEKKLRGVSRPTRPI

SEQ ID NO: 34065 - DNA, 507 bp, Unknown
  Obtained from environmental sample
  misc_feature (1)..(507): n is a, c, g, or t
ttgacgtatctggagcaggtggttaatgccggtaaggaaccgttccgggtataccaatgccgtatgaccctggcttacatttatgtattaaccaagcgctccaaaatggcggaatttgagcttcaccgactggcaaataatgggtatgaatctgcccaactctacgtcaccttggcttatgccgcatgggcccagaaacaaaattctcaggcagtggactattatgagaaagctttggatcttgacgcaaataataccactgccctcaatgggttgggctttattttagccgatactgatatagatccccttcggggactccggtgctgcaaaaaagctgtagacctcaaacctcagaatcccgcgtatcttgattccttgggttgggcctattacaaaagcggggatctcctggaagcccgtacttggctgcgcagggccgcggaagcagctcctcatgaaaaagaaatccaacagcatttgcggttggtaacggagggtgcgtga

SEQ ID NO: 34066 - protein, 168 aa, Unknown
  Obtained from environmental sample
  DOMAIN (52)...(85): Tetratricopeptide repeat
  misc_feature (1)..(168): Xaa is any amino acid
MTYLEQVVNAGKEPFRVYQCRMTLAYIYVLTKRSKMAEFELHRLANNGYESAQLYVTLAYAAWAQKQNSQAVDYYEKALDLDANNTTALNGLGFILADTDIDPLRGLRCCKKAVDLKPQNPAYLDSLGWAYYKSGDLLEARTWLRRAAEAAPHEKEIQQHLRLVTEGA

SEQ ID NO: 34067 - DNA, 897 bp, Unknown
  Obtained from environmental sample
  misc_feature (1)..(897): n is a, c, g, or t
atgacccccatggaggatatggcttcgggcctctttgtccagattgagagaatcataacagacagattccctgcggtaagtgtggaagttcaggttatggacagacaaagaaagcctatcgtaggattggaagcgaggaatttccttttgagcgaaagagggcagaccgtggcggaacagaatttccttggagcggcaaatctttcgaaaaatattgatatcgcgatacttatggaacgttcggcccagactatcaatttgcgggacgatctcattactgccgcaagggatatcagcgcggcggcaaccaaggtggtgtctgtagtttccgcgggagaacagccgcgacgggaaaacctaagccctccgccgggaactaccccggcgcgggctttggaagaagtcgcttggggggaaactacgatgtattcgcctcgttggcgctttgatttaggcctccgccttgcggctacagacctcctgcctggagaaaagaaacgagccgtggtttttgtgggtgccggtaataccctaggggcggcagggagtcttggagaactggcttatgaacagtacagcctttcggaactggcggcttatcttgtgaataacaacatagtcttctatacagtattggtggggaatggcactgcaggcggggatctccgttatctctgcgagcaaaccgggggtcaggttctttcactttaccggaacgaaggcgtagggccggtaatacggtctctcgtccaaaagcccaacggcaattaccttttgagctaccgctcctcgctgcccacggattttggtaggaattatcttcccctggaagtagaggtctaccttatggatcggtcgggcagggatggcacgggttatttcccgcctctggattga

SEQ ID NO: 34068 - protein, 298 aa, Unknown
  Obtained from environmental sample
  misc_feature (1)..(298): Xaa is any amino acid
MTPMEDMASGLFVQIERIITDRFPAVSVEVQVMDRQRKPIVGLEARNFLLSERGQTVAEQNFLGAANLSKNIDIAILMERSAQTINLRDDLITAARDISAAATKVVSVVSAGEQPRRENLSPPPGTTPARALEEVAWGETTMYSPRWRFDLGLRLAATDLLPGEKKRAVVFVGAGNTLGAAGSLGELAYEQYSLSELAAYLVNNNIVFYTVLVGNGTAGGDLRYLCEQTGGQVLSLYRNEGVGPVIRSLVQKPNGNYLLSYRSSLPTDFGRNYLPLEVEVYLMDRSGRDGTGYFPPLD

SEQ ID NO: 34069 - DNA, 798 bp, Unknown
  Obtained from environmental sample
  misc_feature (1)..(798): n is a, c, g, or t
gtgcagactttccatgagccctcgcgcacaagcgtaaaccgcgccggaaacgcgtctttgcttgaagactgcctgaaatcggcatcgaagtatttttccggcgcacatggcgcggatttgtccgtagaccttatggctggattaccgtatcaggatgaaaaaacaattaaagatgatataaaccgtatctgcgccttcaatccttcgcatatttcgctttacagcttaactgtagaaaacaacaccccgctggaagaaaaaatcaaaaaaaaggaaattgaaatgccaagccttgataaagctgattctctctggctttttgggcgcgaattacttgaaaaagaaagctacaatcattatgaagtttccaatttcgcccttgacgggaaacaatgtcttcataatttacgttattggcaaatgaaaaactggattggagcgggtccttcggcgtcaggcactattgttgacgaacaaactgcgttcgcgcggcggtttacctacgctaatgatgttgacgcgtatataaaatcgccgttaattacatccgcgtactgtgaaacaatcgataaaaaaactcttttaaaagatacaattttaatggggtacagatgcagagagcgtcttgataacgaattatttaaaaacaggtttggttgtacggtagaagaatgtattccgaaaactctggcaaaatggaaagataaagacaaaatgttttttttgaacgcgtttctctccgacgcgtttacggagattgagcggaggcaagagcgatttccgcgtcagtttttctga

SEQ ID NO: 34070 - protein, 265 aa, Unknown
  Obtained from environmental sample
  DOMAIN (136)...(256): HemN C-terminal region
  misc_feature (1)..(265): Xaa is any amino acid
MQTFHEPSRTSVNRAGNASLLEDCLKSASKYFSGAHGADLSVDLMAGLPYQDEKTIKDDINRICAFNPSHISLYSLTVENNTPLEEKIKKKEIEMPSLDKADSLWLFGRELLEKESYNHYEVSNFALDGKQCLHNLRYWQMKNWIGAGPSASGTIVDEQTAFARRFTYANDVDAYIKSPLITSAYCETIDKKTLLKDTILMGYRCRERLDNELFKNRFGCTVEECIPKTLAKWKDKDKMFFLNAFLSDAFTEIERRQERFPRQFF

SEQ ID NO: 34071 - DNA, 579 bp, Unknown
  Obtained from environmental sample
  misc_feature (1)..(579): n is a, c, g, or t
atggatttaattgacaatcttatgaaaaaagcggagctttcgccgaaagaccttaacggtattctttgcatgggcggacccggttcgtttacggggcttcgtatcggttattcaacagcgaaggggctcgctctttcgctttctattccctttgcgcccgttcccactctggagtgccttgtctatgacgaacggtttaaacagggcgttaccctctcggtaattgatgcaaggaaaaacgcatggtttaacgcattctttaaagacgggcggagagttacggaagataaagactcaaatctctctcttataaccgacgatataaagcgttatgtaaaagacggacaaataacgcttaccggttacggttcgcaaacactttatgaatctttgccggaagatttaaaagccggcattaccgtttcttttgaaaacaagggattcgcggaaaaacttatccgtatcgcggaagataaaaatttattttcaggcggctgcgaagccaatctttattcggggccggaatatatcagaaaaactgacgcggaaatcgctcttgcctccgctcaatctccgtaa

SEQ ID NO: 34072 - protein, 192 aa, Unknown
  Obtained from environmental sample
  DOMAIN (1)...(186): Glycoprotease family
  misc_feature (1)..(192): Xaa is any amino acid
MDLIDNLMKKAELSPKDLNGILCMGGPGSFTGLRIGYSTAKGLALSLSIPFAPVPTLECLVYDERFKQGVTLSVIDARKNAWFNAFFKDGRRVTEDKDSNLSLITDDIKRYVKDGQITLTGYGSQTLYESLPEDLKAGITVSFENKGFAEKLIRIAEDKNLFSGGCEANLYSGPEYIRKTDAEIALASAQSP

SEQ ID NO: 34073 - DNA, 720 bp, Unknown
  Obtained from environmental sample
  misc_feature (1)..(720): n is a, c, g, or t
gtggaaagactgcgcaaattaggatacaaacgcgtaacgcttaaaaccggcgcttataacctgcgtgatcttgcaaaagcgattaaatggtcggcaaaagcgcatatcgatctcctgactattgacggagcgtccggcggaacaggaatgagtccgtggcgcatgatggaagaatggggcgttccgtcgatctatctgcacagcgcggcttatgaatacacgtccattcttgccgctaaaggcgaaaagaccgcagacattgccttcgcaggcggcttcagttctgaggacggcgtgttcaaagctttggcgctcggttcaccgtatgttaaagccgtatgtatgggcagagcgttgatgattcccggcatggtcggcaaaaacattgatcaatggataaaagacaacaaactgccgaaatcggtaagcgaattcggaaacaaggttgaggagattttcgtcaattacgaacaggtaaaatcaatggtcggcgaaaaagaaataaaaaatattcctctgggcgctattggtatttacagttatgcggataaacttaaagtcggtctgcagcagcttatggcaggcgctcgctgtttcaatcttccctcaatcgcccgcaccgacattatgtcgctgacggaggaatgcgccaaaataacaggtatcccctacttgatggaatgttaccgcaaagaagcgctggatatactaaataaataa

SEQ ID NO: 34074 - protein, 239 aa, Unknown
  Obtained from environmental sample
  misc_feature (1)..(239): Xaa is any amino acid
MERLRKLGYKRVTLKTGAYNLRDLAKAIKWSAKAHIDLLTIDGASGGTGMSPWRMMEEWGVPSIYLHSAAYEYTSILAAKGEKTADIAFAGGFSSEDGVFKALALGSPYVKAVCMGRALMIPGMVGKNIDQWIKDNKLPKSVSEFGNKVEEIFVNYEQVKSMVGEKEIKNIPLGAIGIYSYADKLKVGLQQLMAGARCFNLPSIARTDIMSLTEECAKITGIPYLMECYRKEALDILNK

SEQ ID NO: 34075 - DNA, 756 bp, Unknown
  Obtained from environmental sample
  misc_feature (1)..(756): n is a, c, g, or t
atgtatcaggctatgctgcaggttgtcagcggatttgattcccgccgcggtatatggaacattcgctatgtcggggaatggatagtaatttccatgccgcttattttatgcggtttaagcatggggttttccgtccgcgtgggattgttcaacatcggggcggaaggacagtacattgccggattaacggcggctcaattaatcgccgttggttttacaaatgccgcaggggagcggttgcctgtccatttctcgctcgccgtgttaggcgcaatgtttttcggggcgttgtggggcggcatttcgggctttttcaaagccagatacaaagtatcggaagttgtttccacaatcatgatgaactacatcgctttttttctgcacaggtttatatcattaagcattccgggaagcaacacgttcagaactcccaatttccctgacagcgcgtccctttcaaatcctgttttaacggcgattacaaacagatcaggactgaacaacggtctttggtttacaatagcggctgtcgtaatttattggctaataatggaaaaaagcgcgtttggtttttctcttaaagcgaccggctttaacaaagaagcggctttatacgcgggtatgcgcgtaaaaacaaatatcacagcggcaatggcgatctcaggcgcttttgcgggtcttgcgggcgcggttgtttcgctgggctttgtcagttacggacgaatattaacatcgtttgacaattacggcttttga

SEQ ID NO: 34076 - protein, 251 aa, Unknown
  Obtained from environmental sample
  DOMAIN (23)...(250): Branched-chain amino acid transport system / permease component
  misc_feature (1)..(251): Xaa is any amino acid
MYQAMLQVVSGFDSRRGIWNIRYVGEWIVISMPLILCGLSMGFSVRVGLFNIGAEGQYIAGLTAAQLIAVGFTNAAGERLPVHFSLAVLGAMFFGALWGGISGFFKARYKVSEVVSTIMMNYIAFFLHRFISLSIPGSNTFRTPNFPDSASLSNPVLTAITNRSGLNNGLWFTIAAVVIYWLIMEKSAFGFSLKATGFNKEAALYAGMRVKTNITAAMAISGAFAGLAGAVVSLGFVSYGRILTSFDNYGF

SEQ ID NO: 34077 - DNA, 339 bp, Unknown
  Obtained from environmental sample
  misc_feature (1)..(339): n is a, c, g, or t
ttgacaaacacgcgaaaaagagcgaaagatttcgctccgccattgagcggacgggttgggataaatttaaatccgaaatggaggcggcctattatggatgactttgccgtggatgaaaccgtagacgtcacagatgtagtgtgtcccatgaccttcgtaaaagcgaaggtagcgctggaggatttgagcgacggacagattctgtccatccgtttaaacgacggtgaaccgattcaaaacgtaccccgcagtatcaagggagaggggcacaagatcctcaaacttatcgataacggggatggaacttataatttgattgttaagaagattggagattga

SEQ ID NO: 34078 - protein, 112 aa, Unknown
  Obtained from environmental sample
  DOMAIN (37)...(109): SirA-like protein
  misc_feature (1)..(112): Xaa is any amino acid
MTNTRKRAKDFAPPLSGRVGINLNPKWRRPIMDDFAVDETVDVTDVVCPMTFVKAKVALEDLSDGQILSIRLNDGEPIQNVPRSIKGEGHKILKLIDNGDGTYNLIVKKIGD

SEQ ID NO: 34079 - DNA, 636 bp, Unknown
  Obtained from environmental sample
  misc_feature (1)..(636): n is a, c, g, or t
atggggggggtgaacaccggcgtttgcggccctagggtgcgcacggtaaccgcttgtcagggcagtgaaatatgtccctccggttgcatcgacacctacccgctggcgcgggagatctccgagcggtactttgggcgcgaactggcgcacaagtttaagttcggaattaccggatgtgtgaataactgcctgaaagccgaggaaaacgatctcggcgtaaagggcggttatgtaattgaatggcgcaaagaggagtgtactttttgcggagtatgcgtaaaagtctgccgagaagaggctctcgcgcatagcacggagcgcggtttcgatgaaattttgctggacgagtccaaatgcaacaactgcgggcgctgtgtcaaatcttgccccgtagacgcgtggaagggagatccgggatatattctctccttcggcggaacgtttggaaaccttatagcgaagggcgaacaatttttgcccgtaatccggaacaaggagaccctattccgagtggcggacgcggcgctggacttttttgacaaacacgcgaaaaagagcgaaagatttcgctccgccattgagcggacgggttgggataaatttaaatccgaaatggaggcggcctattatggatga

SEQ ID NO: 34080 - protein, 211 aa, Unknown
  Obtained from environmental sample
  DOMAIN (79)...(102): 4Fe-4S binding domain
  misc_feature (1)..(211): Xaa is any amino acid
MGGVNTGVCGPRVRTVTACQGSEICPSGCIDTYPLAREISERYFGRELAHKFKFGITGCVNNCLKAEENDLGVKGGYVIEWRKEECTFCGVCVKVCREEALAHSTERGFDEILLDESKCNNCGRCVKSCPVDAWKGDPGYILSFGGTFGNLIAKGEQFLPVIRNKETLFRVADAALDFFDKHAKKSERFRSAIERTGWDKFKSEMEAAYYG

SEQ ID NO: 34081 - DNA, 615 bp, Unknown
  Obtained from environmental sample
  misc_feature (1)..(615): n is a, c, g, or t
atgaaaagcaacattacctgtttgtgcggaacaagtattcttattgattatgaagaagtcatcgatctggatcaggagcctaaataccttgaggaaattttaaacggcgcgtttatgacttataaatgctctttttgcgaaaagaaaaataagcctgaatttccgattaacattgaatggaaatccaaaaatttaaaaatgagggtaatccccgaacttgatcgcggcgaattttaccgcgataaaaaagatacttacaaatttgaaacgattatcagttacccggaaatggctgatcgcctggcggtaataaatgacgggcttgagcccattgttatagaagcgttaaaatctttccttttggataaagccgcggaaagttatcccgataaagatgtaaacgcgtggtatcatttgaatgatcccgcttttatagaatttcatcttgacggaataagacagggagaagtcgccgtaatgaagattcctcaagaagtttataaaaagacttttaacgattataaaaagaatccaaagcgcggcattttcccgtcgcttcgcgttcgttcttacctttccgtgcagaattacttacgacccgacgagttgaagtaa

SEQ ID NO: 34082 - protein, 204 aa, Unknown
  Obtained from environmental sample
  misc_feature (1)..(204): Xaa is any amino acid
MKSNITCLCGTSILIDYEEVIDLDQEPKYLEEILNGAFMTYKCSFCEKKNKPEFPINIEWKSKNLKMRVIPELDRGEFYRDKKDTYKFETIISYPEMADRLAVINDGLEPIVIEALKSFLLDKAAESYPDKDVNAWYHLNDPAFIEFHLDGIRQGEVAVMKIPQEVYKKTFNDYKKNPKRGIFPSLRVRSYLSVQNYLRPDELK

SEQ ID NO: 34083 - DNA, 681 bp, Unknown
  Obtained from environmental sample
  misc_feature (1)..(681): n is a, c, g, or t
ttgaacgcggccactgctgcggcgcccaaacaaatcacactgtttgccggttccccgacagacggcaacgccttcttcttcttcgacggggcgatgagcgttctgaaccccttcattgacaagggcgtactcaaagttgtgggcccctatcccaagacttccgctgacaccgccaacttccagaggattgccaccgaaaactggcaggcgccaattgccaagacccgcatggaaaaccttttgaatggcgacgcgcgcaatgttactttggatgcgatacttgcacccaatgacacactggcccgggccatccttgaagcctgcaaagccgatgccaaataccggactaaacttcctgtaatttccggtcaggatgctgaattcgattccgctctttccataaagaacggcgagcagtacagcacagtgttcaaagacaccgcaaagcttgccgaagccgccattcttctggttgatcagcttctcaaaggtcaaacccccagcatccccggcgcggttcttgcgtcaggcgatcttgccaagattggcgataccggcaaaaaagtagtaactacctacctgctggaccccattctggttaccaaagccaacctcaatgttccgatagacgctggtttttattcggatcttccggccagtgatgtcgccaagctgaagtag

SEQ ID NO: 34084 - protein, 226 aa, Unknown
  Obtained from environmental sample
  misc_feature (1)..(226): Xaa is any amino acid
MNAATAAAPKQITLFAGSPTDGNAFFFFDGAMSVLNPFIDKGVLKVVGPYPKTSADTANFQRIATENWQAPIAKTRMENLLNGDARNVTLDAILAPNDTLARAILEACKADAKYRTKLPVISGQDAEFDSALSIKNGEQYSTVFKDTAKLAEAAILLVDQLLKGQTPSIPGAVLASGDLAKIGDTGKKVVTTYLLDPILVTKANLNVPIDAGFYSDLPASDVAKLK

SEQ ID NO: 34085 - DNA, 441 bp, Unknown
  Obtained from environmental sample
  misc_feature (1)..(441): n is a, c, g, or t
atggctagatcacttggcttcgggtctatggcatgcaactgtgcgaacttgcgttcgcttttcgccctgttcagactcggtttccctccggctccgggactcccatcccttagcctcgctgcataccataactcgcaggctcattctacaaaaggcacgccgtcacccaattgcttgggctccgacctgttgtgggtccacggtttcaggttctttttcactcccctcgccggggttcttttcgcctttccctcacggtacttctgcactatcggtcgctctctgtgtttagccttggatcgtggtcgacccggattcccgcggggtttctcgtgccccgcagtacttaggataccgctaccatcagtccatcgtttcgggtacggggctttcaccctttttagccggctttcccaaaaccgttcccctacgatgacctga

SEQ ID NO: 34086 - protein, 146 aa, Unknown
  Obtained from environmental sample
  misc_feature (1)..(146): Xaa is any amino acid
MARSLGFGSMACNCANLRSLFALFRLGFPPAPGLPSLSLAAYHNSQAHSTKGTPSPNCLGSDLLWVHGFRFFFTPLAGVLFAFPSRYFCTIGRSLCLALDRGRPGFPRGFSCPAVLRIPLPSVHRFGYGAFTLFSRLSQNRSPTMT

SEQ ID NO: 34087 - DNA, 486 bp, Unknown
  Obtained from environmental sample
  misc_feature (1)..(486): n is a, c, g, or t
gtgaggccccctagtccatccagagctctacctgcgcaaggttttgacgaggctgtccctcaaggcatttcggggagagccagctatttccaagtttgtttagtctttcgctccgagccacgggtcatccctgccttttttaacagactagggttcggccctccacccagtttcacccgggcttcagcctgcctatggctagatcacttggcttcgggtctatggcatgcaactgtgcgaacttgcgttcgcttttcgccctgttcagactcggtttccctccggctccgggactcccatcccttagcctcgctgcataccataactcgcaggctcattctacaaaaggcacgccgtcacccaattgcttgggctccgacctgttgtgggtccacggtttcaggttctttttcactcccctcgccggggttcttttcgcctttccctcacggtacttctgcactatcggtcgctctctgtgtttag

SEQ ID NO: 34088 - protein, 161 aa, Unknown
  Obtained from environmental sample
  misc_feature (1)..(161): Xaa is any amino acid
MRPPSPSRALPAQGFDEAVPQGISGRASYFQVCLVFRSEPRVIPAFFNRLGFGPPPSFTRASACLWLDHLASGLWHATVRTCVRFSPCSDSVSLRLRDSHPLASLHTITRRLILQKARRHPIAWAPTCCGSTVSGSFSLPSPGFFSPFPHGTSALSVALCV

SEQ ID NO: 34089 - DNA, 480 bp, Unknown
  Obtained from environmental sample
  misc_feature (1)..(480): n is a, c, g, or t
atggcgcaaacaatgaaaatttccgttgaggattataccgcttatgaaagcggtcagaaggatttttcgttcagtttcttacaaaacgcggcgcaaatttttggcgtggatgtcgtagacattatttccggcgaatcgccaaaacttaccaaatgcgccattgtcagaaaaggcgaaggtttcgacatagaacgacgcaaggcctatgactataaacatcttgcgttcacgttcagcaacaaaaaagccgagcctttcattgtaacggtggagccaaagccgaatgaggtgccgacattgcactcgcacgatgggcaggaatttgactatatgctttccggcaagatggaatttcactttgacaaattagtctatgaactcaacgagggcgacagcatttatttcgattcaggcgttccccacgccatgaaagccgccggtgaacaggcggtaaaatttcttgccgtagtaatcaaataa

SEQ ID NO: 34090 - protein, 159 aa, Unknown
  Obtained from environmental sample
  DOMAIN (86)...(157): Cupin domain
  misc_feature (1)..(159): Xaa is any amino acid
MAQTMKISVEDYTAYESGQKDFSFSFLQNAAQIFGVDVVDIISGESPKLTKCAIVRKGEGFDIERRKAYDYKHLAFTFSNKKAEPFIVTVEPKPNEVPTLHSHDGQEFDYMLSGKMEFHFDKLVYELNEGDSIYFDSGVPHAMKAAGEQAVKFLAVVIK

SEQ ID NO: 34091 - DNA, 315 bp, Unknown
  Obtained from environmental sample
  misc_feature (1)..(315): n is a, c, g, or t
atgactcgcgaattcgttatgttgtcggagtttgaccgccaatggcagaaagtgagtttaggcgatgacgaactccgtctactacaggaaactctattgcaaaatccgaaagcaggagatgtaatcctgggaacaaaaggattgcggaaaattcgcatagccttacaaggacagggaaaaagcgggggtgtcaaagttgtttatgttgacttttccgtttatgagacggtctatctcataaccacatatctcaagaatgagaaggacaatctatcaaaagcagagcgaaactcaatagttaagatgatttcctaa

SEQ ID NO: 34092 - protein, 104 aa, Unknown
  Obtained from environmental sample
  misc_feature (1)..(104): Xaa is any amino acid
MTREFVMLSEFDRQWQKVSLGDDELRLLQETLLQNPKAGDVILGTKGLRKIRIALQGQGKSGGVKVVYVDFSVYETVYLITTYLKNEKDNLSKAERNSIVKMIS

SEQ ID NO: 34093 - DNA, 564 bp, Unknown
  Obtained from environmental sample
  misc_feature (1)..(564): n is a, c, g, or t
gtgcttaccgcagagctaataaagcaaaacgtgcttgtacttcagacaggctgttcagcgattgccagcgccaaggcggggatgcttaagccggaagtagctttgagccaggccgggcctgggctgcgggaggtctgcgaggccgtcggtatcccgcctgtgctgcacctcggcagttgcgtggacaacagccggatactggaagccgctaccgaatcgattcttgaaggcggccttggggaagatatggggggttatcccgcggtaggcgtcgcgccggaatggatgagcgaaaaagccgtcgcgattgcctgttacttcgtggcaagcggagttccggtagtcctgggaaatccgttctacgtttccggttccaaagccgtaagcgattatctccacggcagcgtacaggaggaattcggggccaggttctactgcatagaagatccgctacaggccgccgaccgcattgtaagaatattaaatcaggcaagagacgccctgggaatcaataagaaagcggagcgcaagctcttcgatatgaaagacaggagggcgttgtaa

SEQ ID NO: 34094 - protein, 187 aa, Unknown
  Obtained from environmental sample
  misc_feature (1)..(187): Xaa is any amino acid
MLTAELIKQNVLVLQTGCSAIASAKAGMLKPEVALSQAGPGLREVCEAVGIPPVLHLGSCVDNSRILEAATESILEGGLGEDMGGYPAVGVAPEWMSEKAVAIACYFVASGVPVVLGNPFYVSGSKAVSDYLHGSVQEEFGARFYCIEDPLQAADRIVRILNQARDALGINKKAERKLFDMKDRRAL

SEQ ID NO: 34095 - DNA, 831 bp, Unknown
  Obtained from environmental sample
  misc_feature (1)..(831): n is a, c, g, or t
gtgcgcggtccgaatatggacattgtgtgcagtgatctcggacagggggtgcgcgcccctgtggtgttctacaaccgttccaacgaagccgcccagcagcttgcgcctgggaattttgactgggacgctatttttggcggaacgaagccggcagtccgctggtttcactctggcggaattttcagcgccctttcgccgaccacctcacagctcgttatcgaggcgatgcaagtcgcgaaaaaagccggcgcggtggtgtctttcgatctgaactacagagccaagctctgggcagttgccgcggcagagcagggcaagagctcagcccaggcaagcgaggaagcggcaaaaaccctgcgtaagattgtcagtcatgtggatgtgctggttgggaatgaagaagatctacagaaagggctgggtttaaaaggacaggatgtggaggccaaaggctccctcgatccatcggcgttttttggcatgatagaaagcgttaccagggacttccccaatatcaaggcggtggccactaccttgcgcgaagttcactctacaaaccgccacacatggagcgccgttctttggatcgacggcaagcactaccaggctcccaccgccgaactggacgtttacgacagggttggcggcggtgatgggtttgctgcggggctgttctacggccttttgtccggcaaaagccacgaggaagccctgcgcttgggctgggctcacggcgcgctgctgaccaccacgccgggagacacctccatggttacgctggaccaggtagaggcttttgcaaaaggcggttcagcgcggatacaacgctaa

SEQ ID NO: 34096 - protein, 276 aa, Unknown
  Obtained from environmental sample
  misc_feature (1)..(276): Xaa is any amino acid
MRGPNMDIVCSDLGQGVRAPVVFYNRSNEAAQQLAPGNFDWDAIFGGTKPAVRWFHSGGIFSALSPTTSQLVIEAMQVAKKAGAVVSFDLNYRAKLWAVAAAEQGKSSAQASEEAAKTLRKIVSHVDVLVGNEEDLQKGLGLKGQDVEAKGSLDPSAFFGMIESVTRDFPNIKAVATTLREVHSTNRHTWSAVLWIDGKHYQAPTAELDVYDRVGGGDGFAAGLFYGLLSGKSHEEALRLGWAHGALLTTTPGDTSMVTLDQVEAFAKGGSARIQR

SEQ ID NO: 34097 - DNA, 897 bp, Unknown
  Obtained from environmental sample
  misc_feature (1)..(897): n is a, c, g, or t
ttggggaaattcaacatgaacggaaaagaacagaagtatcaaaacgcggaaatagccgagattcttattcacgctttgccttacatccagcaatttcggggcaagaccatagtggttaaatacggcggcaacgcgatgataaacgaggagcttaaagccgccgtaattcaggatgttatccttatgggctgcgttggaatccgtaccgtgctggttcacggcggcgggccggagattgacgccatgcttaaaaaaaccggaaaggaaagccgctttatcaacggccttcgctacaccgacgaggataccatggaaatcgttcagatggttctctgcggcaagctgaacaaggacatctgctctcttatccagcactcaggcggcagagccgttggcctctgcggcatcgacggcgcgctgcttcaggcccgccggaaaagcggcgaagacctcggccttgtcggcgatgtggaaaacgtggacgcaacgatactcaactccgcgctggacgacggcattattccggtggtttcttccgtggcctacggcatcggcgaggacgagggccgctcgctcaatataaacgcggacattgccgccgcgaaaatcgccggggccatcaaggcggaaaaactcatgcttatgacggacgtgcagggcatactccgcaatgtccaggacccggcctcgttaatcaggcagataaaccgctcggagatggaagccctaaaaagagacggcgttttcagcaagggcatgatcccaaagattgactgctgcctccttgccatggacggaggcgtaaaaagaacttacgttattgacggacgcttgccccatgcccttttaatcgagctttttaccgacaaaggcgtgggcaacatgatagaatcgtaa

SEQ ID NO: 34098 - protein, 298 aa, Unknown
  Obtained from environmental sample
  DOMAIN (35)...(275): Amino acid kinase family
  misc_feature (1)..(298): Xaa is any amino acid
MGKFNMNGKEQKYQNAEIAEILIHALPYIQQFRGKTIVVKYGGNAMINEELKAAVIQDVILMGCVGIRTVLVHGGGPEIDAMLKKTGKESRFINGLRYTDEDTMEIVQMVLCGKLNKDICSLIQHSGGRAVGLCGIDGALLQARRKSGEDLGLVGDVENVDATILNSALDDGIIPVVSSVAYGIGEDEGRSLNINADIAAAKIAGAIKAEKLMLMTDVQGILRNVQDPASLIRQINRSEMEALKRDGVFSKGMIPKIDCCLLAMDGGVKRTYVIDGRLPHALLIELFTDKGVGNMIES

SEQ ID NO: 34099 - DNA, 900 bp, Unknown
  Obtained from environmental sample
  misc_feature (1)..(900): n is a, c, g, or t
atgtcaaaaatcgaagcgaaaatgctggagctttcgcccggtgaatttaatttcgagaaaatgctgcaaaaagttgttgcggtagtcaatttccgcgtggacgaaaagcggcaaaaacttgtcgtacacattgacaataaaattcccaaaaccctgatagccgatgaccagcgtctggctcaggttgttaccaatctcctgagcaatgcggtaaaattcacgccggaagaaggttctatcgtcctaaacgcagactatatgggggaagaaaaaggcctttgtaccatacaggtttcagtaagcgatacgggaatcggaataagcgatgaacagcaaaaacgccttttcagttctttcatgcaggccgagtcgagcacgacgcgcaaatacggcggcacggggcttggccttgctatttccaaaagcatagtggaaatgatgggcggaaaaatctgggttcagtcggaaccggaaaaaggctcaacttttatctttaacgttaaggcaaagcgcggtgcggaaggcaagcaaaagcatttgctggatgtcaatttgagcgatgtccgtattatggcaatagatgatgacccggatattttatcgcattttattgaaataatgcggggctatggcgtaacaatcgataccgccacaagcggagaaaaagcgcttgaactcatagaccaaaagggcggctaccatatctattttatagactggaaaatgccggggatggacggcatacagcttgcccgtgaaataaattcgcgcaggtcaggaaattccattgtaacaatgatttccgccgccgaatggagcacgattgccgaagatgcgaaagctgcaggcgtcgataaattcctgtccaagccgctgttccctccacaattgcggaaataa

SEQ ID NO: 34100 - protein, 299 aa, Unknown
  Obtained from environmental sample
  DOMAIN (188)...(299): Response regulator receiver domain
  misc_feature (1)..(299): Xaa is any amino acid
MSKIEAKMLELSPGEFNFEKMLQKVVAVVNFRVDEKRQKLVVHIDNKIPKTLIADDQRLAQVVTNLLSNAVKFTPEEGSIVLNADYMGEEKGLCTIQVSVSDTGIGISDEQQKRLFSSFMQAESSTTRKYGGTGLGLAISKSIVEMMGGKIWVQSEPEKGSTFIFNVKAKRGAEGKQKHLLDVNLSDVRIMAIDDDPDILSHFIEIMRGYGVTIDTATSGEKALELIDQKGGYHIYFIDWKMPGMDGIQLAREINSRRSGNSIVTMISAAEWSTIAEDAKAAGVDKFLSKPLFPPQLRK

SEQ ID NO: 34101 - DNA, 858 bp, Unknown
  Obtained from environmental sample
  misc_feature (1)..(858): n is a, c, g, or t
gtgctgataatcgaacccgcaaaggacgaatacatacgctggtcaatagagcggaaaaaacagggaaaagatatcaacatatttatgccgggcgtaaatatgtttgaaggcgagcgaattccgcagttgaagttaaatccgtttcagcctgcggctattaaaggcgcggatgttgatattatgacgcgctgcgagcaatttacggcattgttgtgctccagtctgccggcaagcgacgtgctgcctgttcttattgacgaaactattttctcctatttggaagaaaagcttggggatgattttctgcagggagcaatgaaacagcaaggacagtatccaaagctggatggcgtgaagactacagctcaaaaaatattgaaagaacgcggttatacgggagagacaaccagccagtttaccgcggcgctggaaacgcgtttttcgtatctggtaaggggaaaacgcggcgaaattctgaatattagtaattccaccccctgggaagatctgtttaataaaacaaccgttatcaatttgagcaaaatcgccaaccccagagacagagcgctgataatgtcccttcttatgctggcgttatatgaatacagggtttcggcgtatacgtataatgccgactaccggaaacgcgcgcaggataataaactgctgcaccttaccgtagttgaggaagcgcataacgttctttcaaaacccggtcaagagatgcagggaaccggcaatccgcagcaggtcgtcgccgatttgttcagcaatatgctgtctgagattcgcgcttacggcgagggggcttatgattgtagaccaggtgccgacaaagctgattcccgacgtgattaa

SEQ ID NO: 34102 - protein, 285 aa, Unknown
  Obtained from environmental sample
  misc_feature (1)..(285): Xaa is any amino acid
MLIIEPAKDEYIRWSIERKKQGKDINIFMPGVNMFEGERIPQLKLNPFQPAAIKGADVDIMTRCEQFTALLCSSLPASDVLPVLIDETIFSYLEEKLGDDFLQGAMKQQGQYPKLDGVKTTAQKILKERGYTGETTSQFTAALETRFSYLVRGKRGEILNISNSTPWEDLFNKTTVINLSKIANPRDRALIMSLLMLALYEYRVSAYTYNADYRKRAQDNKLLHLTVVEEAHNVLSKPGQEMQGTGNPQQVVADLFSNMLSEIRAYGEGAYDCRPGADKADSRRD

SEQ ID NO: 34103 - DNA, 723 bp, Unknown
  Obtained from environmental sample
  misc_feature (1)..(723): n is a, c, g, or t
atgagcggacggaaaatcattattggcgtaacaggcggaatagcctgttataaagccgtcagtctggtcagttttttaaggaaaagcggctataccgtgcaggtggttatgacggaaaatgccgccaaatttgtgacggcggtgacttttcgcgccatttcccgcaatccggtttgcagcgacgcttttgcgccgggcggttctcctgtgccgcatattgctttgacggaggacgccgcgctttatgtgattgcgccggcgacggccaatactctggccaagctagccaacggtctggcggataatattctgacgacttcttttctggcggccaaatgtccgaagctgctcgtcccggccatgaataccaatatgtatacaaataaaatcacgcaggataatttgcggcggctgcgggacagcggttgtgtgatcctcgagccggagacgggggatttggcttgcggtgtgcgcggcgcgggacgttacccggataacaaggtgatctccgcgcaaattagcaaattactcggccggacggaaaaactgcgcggcaagagggtgctgctgacaggcggcggcacgcgcgaaccgttcgaccccgtgcgggcgctgaccaataattcctccggtcaaatgggcctggcgctcaaagccgccgctgaaaacgccggcgcggaggtgacctatatcgatgctgcggcttctcgtgccgaattctga

SEQ ID NO: 34104 - protein, 240 aa, Unknown
  Obtained from environmental sample
  DOMAIN (4)...(120): Flavoprotein
  misc_feature (1)..(240): Xaa is any amino acid
MSGRKIIIGVTGGIACYKAVSLVSFLRKSGYTVQVVMTENAAKFVTAVTFRAISRNPVCSDAFAPGGSPVPHIALTEDAALYVIAPATANTLAKLANGLADNILTTSFLAAKCPKLLVPAMNTNMYTNKITQDNLRRLRDSGCVILEPETGDLACGVRGAGRYPDNKVISAQISKLLGRTEKLRGKRVLLTGGGTREPFDPVRALTNNSSGQMGLALKAAAENAGAEVTYIDAAASRAEF

SEQ ID NO: 34105 - DNA, 525 bp, Unknown
  Obtained from environmental sample
  misc_feature (1)..(525): n is a, c, g, or t
atgatcgcgagaccaagccttgtactgctgggagcaatagcttttgttcttagtgcgctttctttcgccgtcggcataggtccgctgactctgctcagggggagcggccccatctttattgtcattttttgggccttcattttacaggctacagaattatctccgcttcgaatcagttccgaaggctttgtacaggcgcttattttttcgtttagaatagcaacggctttttcggctggaaccctgtttttttcggttacaactccacacgagatcagaaaatcgctttcccgccttgagacattcctgcgtatagagaaactaaacttgagcctttacatatcgctgatgctgggctttcttccgcagttttttcaagtttgggaagacctgtgccttgcctggaaaagcaggggagggaaaaagaacctgtccttcatcgttaccattgttcccctcgccatagaaaggatgatgagacaagctgcggaaacagctatggccatggaagcacggggagcttag

SEQ ID NO: 34106 - protein, 174 aa, Unknown
  Obtained from environmental sample
  SIGNAL (1)...(23)
  DOMAIN (3)...(174): Cobalt transport protein
  misc_feature (1)..(174): Xaa is any amino acid
MIARPSLVLLGAIAFVLSALSFAVGIGPLTLLRGSGPIFIVIFWAFILQATELSPLRISSEGFVQALIFSFRIATAFSAGTLFFSVTTPHEIRKSLSRLETFLRIEKLNLSLYISLMLGFLPQFFQVWEDLCLAWKSRGGKKNLSFIVTIVPLAIERMMRQAAETAMAMEARGA

SEQ ID NO: 34107 - DNA, 891 bp, Unknown
  Obtained from environmental sample
  misc_feature (1)..(891): n is a, c, g, or t
ttgggattgacgacaacataccgcgnctttcttacaggcgacgatcagcaccttgcccaggtaatttccaaccttctgtcaaacgcggtaaaattcactcccgagtacggtaaaattaaccttaacgcaaaactcctggaagaaaaaaacggcctttgtaccttgcagatggaagtaagcgattccggcatagggatcagcgaagatcagcagtcgcggcttttcagctcttttgagcaggcggacagcggaacttcccgaaagtacggcggtaccggtcttgggcttgcaatttccaaaagtattgtagagctaatgggcggcaaaatttggattaattcggaactgggaaagggatcaactttcttctttacaataaaagccaaaagagccaacgaaacgggcgcgaacactcaggggccaaacgcaaattttggaagggaaagccttacagataatggcgctgaanatgaggagcatgaaggcgaacaacaggcggaaagggataattatgaaggctgttgcctgcttttggtcgaagacatagatataaacagggaaattgtccttaccattcttgagccttcgcgtttagagatagactgcgcggaaaacggaatgcaggccgtcagtaagtttgccgaagcgccggaaaagtacgacatgattttcatggatatacagatgcctgaaatggacggctacgaagctacgcggcgcatcagggcgcttgatgttccggcggcaaaaaccattccgattatcgccatgtccgcaaacgtgttccgtgaagatattgaaaaatgcctggaggccgggatgaatgaccacatagggaaaccgttggattttatggcggttatggaaaagctccacatttatttaacctaa

SEQ ID NO: 34108 - protein, 296 aa, Unknown
  Obtained from environmental sample
  DOMAIN (174)...(292): Response regulator receiver domain
  misc_feature (1)..(296): Xaa is any amino acid
MGLTTTYRXFLTGDDQHLAQVISNLLSNAVKFTPEYGKINLNAKLLEEKNGLCTLQMEVSDSGIGISEDQQSRLFSSFEQADSGTSRKYGGTGLGLAISKSIVELMGGKIWINSELGKGSTFFFTIKAKRANETGANTQGPNANFGRESLTDNGAEXEEHEGEQQAERDNYEGCCLLLVEDIDINREIVLTILEPSRLEIDCAENGMQAVSKFAEAPEKYDMIFMDIQMPEMDGYEATRRIRALDVPAAKTIPIIAMSANVFREDIEKCLEAGMNDHIGKPLDFMAVMEKLHIYLT

SEQ ID NO: 34109 - DNA, 885 bp, Unknown
  Obtained from environmental sample
  misc_feature (1)..(885): n is a, c, g, or t
ttggtgagcgggaagaagtatgtttgcgagaattcgtcctggaaaatagcctctactgatgttggttttggttcttgcacggatgctaatcagggaatgattgccaacaacggacctgattattatatttgcgatagcaaggtttggaggaaggctacggagtatgagcgtgatgttggaggctttgggaattgctccacggagggtgtgattaaggatggtcaggtgagcggtacaaagtatatttgcaaaaataaggtttgggtaatagctactaaatgccaagaaagtaaatcttgccagacattcactgatgaacgcgataagcaagtttattattctgttaaaataggcgagcagacttggatggcggagaacctcaactatgccgcagatagcagtaaatgctacaacaacaagcctgctaactgcgaccagtacgggaggttgtataattgggcaacggctatgggcatagatgcaaaatacaatagcgaaaaatggggcggaagcgatgcgaatcataaaggcatctgccccagtggttggcatattccgagtaatgcggattggaatgcattgatggtagcagttggcggtgcttcaactgctggaacaaagttgaaggctacgagcggttggaataataacggaaataagtcgggcaatggcactgacgatcacggcttttcggctttgccgggcggcagcggccattctagtggcagtttcaacgatgtcggcaactacggcatctggtggactgctacggagaccggtgctagctacgcttaccgccggctcatgtactacaacaacgcctatgtaggcagcctcggcgacgataagagctacctttattcagtgcgttgtgtccaggactaa

SEQ ID NO: 34110 - protein, 294 aa, Unknown
  Obtained from environmental sample
  misc_feature (1)..(294): Xaa is any amino acid
MVSGKKYVCENSSWKIASTDVGFGSCTDANQGMIANNGPDYYICDSKVWRKATEYERDVGGFGNCSTEGVIKDGQVSGTKYICKNKVWVIATKCQESKSCQTFTDERDKQVYYSVKIGEQTWMAENLNYAADSSKCYNNKPANCDQYGRLYNWATAMGIDAKYNSEKWGGSDANHKGICPSGWHIPSNADWNALMVAVGGASTAGTKLKATSGWNNNGNKSGNGTDDHGFSALPGGSGHSSGSFNDVGNYGIWWTATETGASYAYRRLMYYNNAYVGSLGDDKSYLYSVRCVQD

SEQ ID NO: 34111 - DNA, 834 bp, Unknown
  Obtained from environmental sample
  misc_feature (1)..(834): n is a, c, g, or t
gtgaccctttcgcgggcaaattgctgtttacctgcggggacgggaaggcacaatgacgggcatcgacctgcccccgttcgcaaattacggtctgcggtttcctgccagattaccgtcgcgggcggcgtttccacattagccgaagttgaagaaatcgccgccatcggttgtgacgtgcaacttggcatggctttatacaccggaaaaataaatctatcggaagcttttacagtttcactaaactggaaaaaaggagaaattccaacccctgattccccactccccactccccactccctgctccccatcatagttcaagctcccgacggtcaggtcttgatgaccggctttacggataaagaagcgttagctgaaacatttaagcgcggtaacgtatgctttcacagccgtactagaaacaaactttggatgaaaggcgagaattccggcaatgtaataaaattaatcaggttacggacggactgcgaccatgacgcgattcttgccatagcggaacctgaaggccccgtctgccatactggcgcgtggtcgtgcttttcaaataacaggggttatacgctgcaatttttacagaacataatacaggagcgttttcgaaatcccacgccgggttcgtatacggcaacccttgacgatgaacttgtgcgcgaaaaaattttggaagaggcgaaagaactgtgcgaggcaaaaacccacgaagaaattgtttgggaagccgccgaccttctgtattttacaaccgtgcttatgacaaaggcaggggtgggtattcaggaaattcttgacgaacttgaccggaggcacaaaaagtaa

SEQ ID NO: 34112 - protein, 277 aa, Unknown
  Obtained from environmental sample
  DOMAIN (194)...(276): Phosphoribosyl-ATP pyrophosphohydrolase
  misc_feature (1)..(277): Xaa is any amino acid
MTLSRANCCLPAGTGRHNDGHRPAPVRKLRSAVSCQITVAGGVSTLAEVEEIAAIGCDVQLGMALYTGKINLSEAFTVSLNWKKGEIPTPDSPLPTPHSLLPIIVQAPDGQVLMTGFTDKEALAETFKRGNVCFHSRTRNKLWMKGENSGNVIKLIRLRTDCDHDAILAIAEPEGPVCHTGAWSCFSNNRGYTLQFLQNIIQERFRNPTPGSYTATLDDELVREKILEEAKELCEAKTHEEIVWEAADLLYFTTVLMTKAGVGIQEILDELDRRHKK

SEQ ID NO: 34113 - DNA, 843 bp, Unknown
  Obtained from environmental sample
  misc_feature (1)..(843): n is a, c, g, or t
atgctgctgacaaaaaaacaggcgcggcaatttctgctccgccgccatggcttgctgggagaacatatcttcaaaggcaaagaaggagtgatggccttcattaaacgcgcaggctgcctgcagttcgatcccgtggatctatgcggcagaaacgccgatatcgtcctgaattcacgtgtctctggttatacacaagagatgcttgaagaactgctttacaaagagcggcgtctcatagactacttcgacaagaatttgtcaatcttccccgttgaagatttcccggtctttgtgagcgagaagccaggcgggggatacgccgaagcttacgacgcgcggggcggcgaggcggtgcagcagattaagccccacatcaggcagttaatcgcggagcggggacatatcagcgcgagagaggtcgatgttgacgagaagatcatctggcactggggcacaattgcttcgcttccgagggccgcgcttgagtcgatgtactttcgcggggaacttgtcatccatcacaagacaggcacgaacaagagttacgcctttacaaaagatcttttgcccacagaaatattgaacgcgccggaacgtttcaagacagacgaggagcggcaggcgtggttcgtaaaacgccgtataggcgctgtcggaatgttatggaacaagacaagtgacgcgtttttggggctgaggttgaaaccggccccaacgatggcgatattcggcaaactgcttgcgaaacgcgagatctttcgagtcagcgtacaggacataaaaagagcgctttacattcgcgaagacgagcgctttgctcntgaggaagtactttccgcgtag

SEQ ID NO: 34114 - protein, 280 aa, Unknown
  Obtained from environmental sample
  DOMAIN (1)...(265): Protein of unknown function (DUF1006)
  misc_feature (1)..(280): Xaa is any amino acid
MLLTKKQARQFLLRRHGLLGEHIFKGKEGVMAFIKRAGCLQFDPVDLCGRNADIVLNSRVSGYTQEMLEELLYKERRLIDYFDKNLSIFPVEDFPVFVSEKPGGGYAEAYDARGGEAVQQIKPHIRQLIAERGHISAREVDVDEKIIWHWGTIASLPRAALESMYFRGELVIHHKTGTNKSYAFTKDLLPTEILNAPERFKTDEERQAWFVKRRIGAVGMLWNKTSDAFLGLRLKPAPTMAIFGKLLAKREIFRVSVQDIKRALYIREDERFAXEEVLSA

SEQ ID NO: 34115 - DNA, 777 bp, Unknown
  Obtained from environmental sample
  misc_feature (1)..(777): n is a, c, g, or t
ttggaacaaatagaaaaagcgctggaagccgccggaaaaaatctggaagaaaccgaagaacgtttggaaagaaaaaacattgaggcaatggaacagtccacaaaggacgtattggcgggggttaagtcgattgtttcggattttgaggcaacggctcatgtattagaacgaaaagtagaagaacaccgcgaagcggtaaacaaagttgaaaaagacagggaagccgttttaaaccacgatattgaacaggttaaaaaaatctttaaagacgttcttgaaaacgccggaaagcgcgcggacaagattgaagaagccgccttattaaaattacgcgatcaggcgatggaaagagtcaacagcataaaaaatttctttgaggaaaaattaaaaacatcgcaggatattcttaaaacagaacaaggagcgattaacgaaaaacttaaaggtattaacgataaatggaactctgaaataaccgatttaactgcaaagcagaaaaattatcatcaggaatggactaagatgtccgcagaacttgataacatagcgaaaaaacaaaaagaagatataacgtcttctctcgcgcgccagcaggaagaagttacaaacgcgcttataaaagaaagggatacaatcaactcgtctcttgtacaacagcaaaacgactggaaacaaaatttcctggagttaaaaaaatccgcggaaaaacagcgtaaagaattggacacaagtttgttaacttccaaacaggaacttaatcttgccattaccgactaa

SEQ ID NO: 34116 - protein, 258 aa, Unknown
  Obtained from environmental sample
  misc_feature (1)..(258): Xaa is any amino acid
MEQIEKALEAAGKNLEETEERLERKNIEAMEQSTKDVLAGVKSIVSDFEATAHVLERKVEEHREAVNKVEKDREAVLNHDIEQVKKIFKDVLENAGKRADKIEEAALLKLRDQAMERVNSIKNFFEEKLKTSQDILKTEQGAINEKLKGINDKWNSEITDLTAKQKNYHQEWTKMSAELDNIAKKQKEDITSSLARQQEEVTNALIKERDTINSSLVQQQNDWKQNFLELKKSAEKQRKELDTSLLTSKQELNLAITD

SEQ ID NO: 34117 - DNA, 723 bp, Unknown
  Obtained from environmental sample
  misc_feature (1)..(723): n is a, c, g, or t
ttgcgctttgtcgacgacggcgcgattaacgaaaacggaagatttgtttttatcgaaacattacagccgcagcctgccaacttgcagggatttaactgttccggtttcacaaaatggctgatagacggtattctgcgccccgttacaggcgaaagacttaaaataacgccgcttaaagcgcagtttggagacagaggctcgtcttttaccgccaactatgatcaaaggaaggatatatttttcgggcttgactggatcagaaatcttgcggcggcggcgaatggaacgctaaggtcttcttcataccgctcgctcgacgaatttgaaatccgcaaaaacgattttgcccatattcttgtaaatgaaagagggacttttgtcgttaattcttaccctggttttttaactgacgcgggatacgccgtcgaaggactgcacccgcttctctacactcttgccattgacgagccgtatagtttttatcttgccgccgctaacagggaaatggatatagccaacgagatttcacctcgcggaacttcgcgccttcgccagtattaccatgtagccgctcttgttccttattttgatgagaacggattttttaatatcgtggtttttgaaagcgccgcggaaactacatttaccggtttcagaaccagacatctcggcagtcatgtaaaccttgtaaaaatccccgtctcgcctactttcgatccttga

SEQ ID NO: 34118 - protein, 240 aa, Unknown
  Obtained from environmental sample
  misc_feature (1)..(240): Xaa is any amino acid
MRFVDDGAINENGRFVFIETLQPQPANLQGFNCSGFTKWLIDGILRPVTGERLKITPLKAQFGDRGSSFTANYDQRKDIFFGLDWIRNLAAAANGTLRSSSYRSLDEFEIRKNDFAHILVNERGTFVVNSYPGFLTDAGYAVEGLHPLLYTLAIDEPYSFYLAAANREMDIANEISPRGTSRLRQYYHVAALVPYFDENGFFNIVVFESAAETTFTGFRTRHLGSHVNLVKIPVSPTFDP

SEQ ID NO: 34119 - DNA, 543 bp, Unknown
  Obtained from environmental sample
  misc_feature (1)..(543): n is a, c, g, or t
gtgcgggaataccttgagttgttctgggctttcatcgtagtcggttgcacgacatttggcggcggctacacggcgctgccggtgcttgagcgcgaaatgataaagaaacgcggctggcttactatggacgaagttctggatttttacaccatcgcccagataacgcccggcattattctggttaacatagcaacattttccggctataaacgaaaaggcatacccggcggcattatcgccaccatcggactggcgctgccgggcttttgccttatgctgttagtatcgttattcattaaacgcttcgccgaatactccttggtacagcgcgccttcagcggcatacgccttgccgtctgcgccctcatcctggacacggcggttaaattgttcaaaggattctggaaagattataaggcgctgattatcagtattgcggcttttgttctttcggccattttcagcgtgtcgcccgtgtatatcatccctgtcgccggcctagcgggctttctgcttttttcgccaaaggggaaaaacgggtga

SEQ ID NO: 34120 - protein, 180 aa, Unknown
  Obtained from environmental sample
  DOMAIN (2)...(179): Chromate transporter
  misc_feature (1)..(180): Xaa is any amino acid
MREYLELFWAFIVVGCTTFGGGYTALPVLEREMIKKRGWLTMDEVLDFYTIAQITPGIILVNIATFSGYKRKGIPGGIIATIGLALPGFCLMLLVSLFIKRFAEYSLVQRAFSGIRLAVCALILDTAVKLFKGFWKDYKALIISIAAFVLSAIFSVSPVYIIPVAGLAGFLLFSPKGKNG

SEQ ID NO: 34121 - DNA, 687 bp, Unknown
  Obtained from environmental sample
  misc_feature (1)..(687): n is a, c, g, or t
gtggccgacttcatagcttttattccggcgcatgtcgaaaaagatttcaaaattctcaacgggctgtgcaggcagtacttttttatctcctccgcgtccgcctaccagaagcccctttcctcgtacctcataaccgaaagcactccgttggcaaatccactctggcagtattccagagataaaatcgcctgcgaggatttccttatgggaaagtaccgggaatgtggctttcccgtcacaataatccgccccagccacacctacgatgagcgcagcgtccccatgggagtacacggcgcgaacggcagttggcaggtagtaaaacgcatgctcgacggcaaacccgtgattatccacggcgacggcaccagcctttggacaatgacgcataacagtgatttcgcgcgggcttttacagggctcatgggcaatatccacgccattggggaagcggtacagatcacttcagatgaaagcctcacctggaaccagatttaccaggccattgccaacgcgctgaatgttgagcttaaagctgtccatatttccagcgatttccttgataaatgctccggcagccgttacgatttccgcggcggcctcctgggcgacagggcaaattccgtggtttttgacaacaccaagctgaagcgtctggttccggggcttcgtgccaactgcgtttga

SEQ ID NO: 34122 - protein, 228 aa, Unknown
  Obtained from environmental sample
  misc_feature (1)..(228): Xaa is any amino acid
MADFIAFIPAHVEKDFKILNGLCRQYFFISSASAYQKPLSSYLITESTPLANPLWQYSRDKIACEDFLMGKYRECGFPVTIIRPSHTYDERSVPMGVHGANGSWQVVKRMLDGKPVIIHGDGTSLWTMTHNSDFARAFTGLMGNIHAIGEAVQITSDESLTWNQIYQAIANALNVELKAVHISSDFLDKCSGSRYDFRGGLLGDRANSVVFDNTKLKRLVPGLRANCV

SEQ ID NO: 34123 - DNA, 723 bp, Unknown
  Obtained from environmental sample
  misc_feature (1)..(723): n is a, c, g, or t
ttgccaacccatcgatgtagcaaactggatgaaattcttaatcgctggataccaagggagaaaagaacaaataacaatgaacaaataatcaacaacaaagaacaaagagcagataaagaccccacacccatcagcatcccgggtgttgatactgtaaaaggcatagcgatgaccggcgggacagtcgcctcttataagcaagtgttatccatgtttaataaagacgcagaagacagaatgccttttttgcaagccttgcccaaggcggatgccatgaatgtgttcgttacccaggttcatgccctgaaaagtgcatccgcttctatcggggcgacagagttgtcgaagcgggcagccgcccttgaagccgccggcaataccggagacgttgcttttattcaggaaaatctggctgtttttgtgcagatgctgaggaatcttacggataatattcgtactgtgctgcaacataatgaatcccctatttcccactcccagctttccgctctctattccccactatttgaagagcttgccaaaaccctgaaatcccaaaacgcctatgaaatagatcgtattctggatgagctaaatcatgggcagctggattccaatgccaggaaaacagtagagaaaatattggacgaagtgttgttggctgaatatgacaaggccacggaaattcttgacggctttcttaagcacaagaacctgcatttataa

SEQ ID NO: 34124 - protein, 240 aa, Unknown
  Obtained from environmental sample
  DOMAIN (67)...(154): Hpt domain
  misc_feature (1)..(240): Xaa is any amino acid
MPTHRCSKLDEILNRWIPREKRTNNNEQIINNKEQRADKDPTPISIPGVDTVKGIAMTGGTVASYKQVLSMFNKDAEDRMPFLQALPKADAMNVFVTQVHALKSASASIGATELSKRAAALEAAGNTGDVAFIQENLAVFVQMLRNLTDNIRTVLQHNESPISHSQLSALYSPLFEELAKTLKSQNAYEIDRILDELNHGQLDSNARKTVEKILDEVLLAEYDKATEILDGFLKHKNLHL

SEQ ID NO: 34125 - DNA, 603 bp, Unknown
  Obtained from environmental sample
  misc_feature (1)..(603): n is a, c, g, or t
atgacaatcattcgcgcagcagcaattgcactgctggcttctctttcgctcaccgcccaagtgcaggaatccaagacgttcaaattggccaaagaagggcaatggactcccaaaaggtgggacgccaacgccacactgattggcaagccgatgccaaagctagatctgtcaggctgggtgaatgggcaggtgggcagcgaggacatgaaaggcaagatagtcatcattgatttttgggccacttggtgcgctggctgtatcctaggtattccgcacaacaatgaaatggccaaaaaatacgccgacaggggcgtactggtcttgggcatctgctttcccggccgaggcgcagaaaagatgggcgatgtggtcaaaacaaagggcgctgcctatcccaatgcccacacaacgccggccaccataaaggcttggcagcaagtgttcattctgccgacctatgccgttgttgatcgaaatggcatactaagggcctttggaataaagccggactacgttgaaaaagtggttgacgcgctattggaagagcagccacattctatggcaaatcagggtgattcaatcccgaaaagttatctgcaataa

SEQ ID NO: 34126 - protein, 200 aa, Unknown
  Obtained from environmental sample
  SIGNAL (1)...(21)
  DOMAIN (46)...(184): Redoxin
  misc_feature (1)..(200): Xaa is any amino acid
MTIIRAAAIALLASLSLTAQVQESKTFKLAKEGQWTPKRWDANATLIGKPMPKLDLSGWVNGQVGSEDMKGKIVIIDFWATWCAGCILGIPHNNEMAKKYADRGVLVLGICFPGRGAEKMGDVVKTKGAAYPNAHTTPATIKAWQQVFILPTYAVVDRNGILRAFGIKPDYVEKVVDALLEEQPHSMANQGDSIPKSYLQ

SEQ ID NO: 34127 - DNA, 363 bp, Unknown
  Obtained from environmental sample
  misc_feature (1)..(363): n is a, c, g, or t
atgcatggcgctatttttaccagcgggttggacatggacgaacacgccagaacagaagatgaacccataagggccacggcgatggatcttttgggcgcatacagggacatactcaagcgccttctgcctccgcctccggtngaagttgtggccccgccaaaaacactggaacagcgcatcgccgaggtgctggatatgctgggcgctggcagctggctgccgttcgcaaggctattcgctggatccaaaaaccgagaagaccttgtcctcacatttctggcgctgctggaaattgtgaaaaatggccaagcgaggctggtgcagacagaaattttcggcgagatacgcatccaagctgcttga

SEQ ID NO: 34128 - protein, 120 aa, Unknown
  Obtained from environmental sample
  misc_feature (1)..(120): Xaa is any amino acid
MHGAIFTSGLDMDEHARTEDEPIRATAMDLLGAYRDILKRLLPPPPVEVVAPPKTLEQRIAEVLDMLGAGSWLPFARLFAGSKNREDLVLTFLALLEIVKNGQARLVQTEIFGEIRIQAA

SEQ ID NO: 34129 - DNA, 549 bp, Unknown
  Obtained from environmental sample
  misc_feature (1)..(549): n is a, c, g, or t
atgagatttccgttgaggtggatgatgatcctcgggcggcttactttaaacaggcgaagtacggaatgtatgtccgcatggcgttactggcttcattattgggggtggaaaatgcttaatattgaaagaattaataacggtgttgtcattgatcacatcaaggcggggcaggggattaaggttttcaactggcttggacttgacaaggttccgtatacggtcgctttcgtgattaacgccaattcaggaaaaatatttaaaaaagacattattaaaattgaaaatgacattgccattaattttgatgttctggggttgattgatcccaatattacaataagcattattaaaaatgagcatgttgtggaaaaaagaagactcagactgcctgaaaaagtggaaaatgtgctgatatgcaaaaacccgcggtgtatcacctcgacggaaaagtatgttccccatgttttccatcttgtgaatccggaactgcaaacctaccgctgcgaatactgcgatgaaatacgctctgcggaggattttagaaactaa

SEQ ID NO: 34130 - protein, 182 aa, Unknown
  Obtained from environmental sample
  DOMAIN (131)...(182): Aspartate carbamoyltransferase regulatory chain, metal binding domain
  misc_feature (1)..(182): Xaa is any amino acid
MRFPLRWMMILGRLTLNRRSTECMSAWRYWLHYWGWKMLNIERINNGVVIDHIKAGQGIKVFNWLGLDKVPYTVAFVINANSGKIFKKDIIKIENDIAINFDVLGLIDPNITISIIKNEHVVEKRRLRLPEKVENVLICKNPRCITSTEKYVPHVFHLVNPELQTYRCEYCDEIRSAEDFRN

SEQ ID NO: 34131 - DNA, 1110 bp, Unknown
  Obtained from environmental sample
  misc_feature (1)..(1110): n is a, c, g, or t
atggcgagggccgagtcttcttgcggcagaagcataacccattggctgcttcacataacgcgtcttgggggaatcccggcagtaatttacggatcgggcagcgccgggaagatggttgtggactgtcttttgggaaatatcagaaccggctatgtaccggcgctgatccttgataaggctcctgaaggcggcgcgcctaacggcggcgcgcctaacggcggcgcgcctaacggcgcggatgaatacagaaatatcccgataatccatgatacctccatagggcctgaaattgtaaggcggtataaaatcaagatggcaatggttgccatgcccgatcttgacaatcagggcctgaagcaccttatgaatacatcggtatccgctttcaggtacagttcgtatatccctggttttgtcagcgccacgaatatatggatgtccgtccgtgattttggcggcgtactgggcctggcgaccagcaataagcttaagatagcctggaatttatggatcaaacgttttatggatattgcgattgttatttttggcgggatactgatattgccctttctcctgatcatagcgcttttggtaaagcttagctcgccggggccggttctgtacgggcacaaacggcttggaaccaacggagaacattttaccgcttataaattccgttcaatggtgatggattcacaggagcggcttcagaaactttttgaatcgaatcctgaaatcaaaaaggaatgggataaaaaccaaaagctgcagaatgaccccagagtgaccgctatcggcagattcctgcggcggacaagcctggacgaattcccccagcttattaatattctgaaaggagaaatgagtcttgtagggccgcgtccgattgtagatgcggaaaaaagcagatacggtgaggattttaactggatattttcggtaaagcccgggatgacaggaatgtggcaggtgtccggcaggtcagaaacggattatgccaccagggttctgtatgatacttattatctgcaaagctggtctgtctggcttgatatctggattctttttatgactttcggagccgttttgcgcggcaaaggtgcgtattaa

SEQ ID NO: 34132 - protein, 369 aa, Unknown
  Obtained from environmental sample
  DOMAIN (172)...(369): Bacterial sugar transferase
  misc_feature (1)..(369): Xaa is any amino acid
MARAESSCGRSITHWLLHITRLGGIPAVIYGSGSAGKMVVDCLLGNIRTGYVPALILDKAPEGGAPNGGAPNGGAPNGADEYRNIPIIHDTSIGPEIVRRYKIKMAMVAMPDLDNQGLKHLMNTSVSAFRYSSYIPGFVSATNIWMSVRDFGGVLGLATSNKLKIAWNLWIKRFMDIAIVIFGGILILPFLLIIALLVKLSSPGPVLYGHKRLGTNGEHFTAYKFRSMVMDSQERLQKLFESNPEIKKEWDKNQKLQNDPRVTAIGRFLRRTSLDEFPQLINILKGEMSLVGPRPIVDAEKSRYGEDFNWIFSVKPGMTGMWQVSGRSETDYATRVLYDTYYLQSWSVWLDIWILFMTFGAVLRGKGAY

SEQ ID NO: 34133 - DNA, 558 bp, Unknown
  Obtained from environmental sample
  misc_feature (1)..(558): n is a, c, g, or t
atgagaaacaattctcaattaaaaaataattttttgcctaatgagtaccgtaaaacagcagaaaacctgtttcccaaagacggattttttaagggacacaagccggaagttaaagccgcttctgaatttgcaaaagcgcttggcatcggcgttgaatatcagcgtttacttgcccttgacaaagacagcaatgaactgcggacttttttggaacacttccagaataatctcgatttattgatacagaaaacatgggtagaaaaagcagaagaacggcgcaaagaaaaattgcagaatgaaatcccttcgttaatgactacaataggaaaaggtgatttatcggcagccatagaagaatttaatatgattttggaagaattatcatatctctttttcggctctcaaagtgaaaaagaggattttaccgaatatactttccgcatagacgcgcaaatgggacttttttggtggtacgggaacaaacttttttcattaaaagacttggcagcaagaacggagccagagatgaaaaagttttatgggcagtcctgcttctag

SEQ ID NO: 34134 - protein, 185 aa, Unknown
  Obtained from environmental sample
  misc_feature (1)..(185): Xaa is any amino acid
MRNNSQLKNNFLPNEYRKTAENLFPKDGFFKGHKPEVKAASEFAKALGIGVEYQRLLALDKDSNELRTFLEHFQNNLDLLIQKTWVEKAEERRKEKLQNEIPSLMTTIGKGDLSAAIEEFNMILEELSYLFFGSQSEKEDFTEYTFRIDAQMGLFWWYGNKLFSLKDLAARTEPEMKKFYGQSCF

SEQ ID NO: 34135 - DNA, 351 bp, Unknown
  Obtained from environmental sample
  misc_feature (1)..(351): n is a, c, g, or t
ttgccgggcggatttgttgatccgggagaaggcgctcttgagagcctgtaccgtgaattgcaggaagaacttggctggacgccgccaattcccgaaggcgcaaaccttaccgaagtttttaaactttatgcttcattcccgaatgtttatccgtataagggtataaaatacaatacctgtgatatgtactttacggtctgcgctcccggtcttacacagaaggatttgtgtattgaacaggatgaaatttccgaagtccgtttcctgaaacctaacgaaattgatcttgggcaatttgcgtttgaatctaccaagcgggcagtgaaggcttggcttgccaatcttgactaa

SEQ ID NO: 34136 - protein, 116 aa, Unknown
  Obtained from environmental sample
  misc_feature (1)..(116): Xaa is any amino acid
MPGGFVDPGEGALESLYRELQEELGWTPPIPEGANLTEVFKLYASFPNVYPYKGIKYNTCDMYFTVCAPGLTQKDLCIEQDEISEVRFLKPNEIDLGQFAFESTKRAVKAWLANLD

SEQ ID NO: 34137 - DNA, 606 bp, Unknown
  Obtained from environmental sample
  misc_feature (1)..(606): n is a, c, g, or t
gtgggaaccgccgaaatcacccttgggggctattattcagacacaatttttgcaaaggacaaactgccgatccgcatggcgggcctttcccactgtttccgccgcgaggccggagcggccgggcagttctcaaagggcctgtacagggtgcaccagtttaccaaactggaaatgtttgtgtactgcctccccgaagaatccggaaagttccatgaagaattacgcctgacagaagaagaaattttcaagggccttgacatccccttcagggtggtagacacctgcaccggcgaccttggcgcgcccgcataccgcaaatgggatcttgaggcgtggatgccgggccgcaacaacggcgaatggggggaagtgacctcgacttcaaactgcacagactaccagtccaggcggctgaatatacgctacaaggacgacgacggcaaaaacaaattcgtccacatgttgaacggtacggccatcgcaatatcaagagcgattatcgccatattggaaaatttccagcaagccgacggctcggttcgtatccctccggcgcttgtcccctatgtcgggtttgatgtaatcaaaaaaagcaatgagcaatga

SEQ ID NO: 34138 - protein, 201 aa, Unknown
  Obtained from environmental sample
  DOMAIN (1)...(116): tRNA synthetase class II core domain (G, H, P, S and T)
  misc_feature (1)..(201): Xaa is any amino acid
MGTAEITLGGYYSDTIFAKDKLPIRMAGLSHCFRREAGAAGQFSKGLYRVHQFTKLEMFVYCLPEESGKFHEELRLTEEEIFKGLDIPFRVVDTCTGDLGAPAYRKWDLEAWMPGRNNGEWGEVTSTSNCTDYQSRRLNIRYKDDDGKNKFVHMLNGTAIAISRAIIAILENFQQADGSVRIPPALVPYVGFDVIKKSNEQ

SEQ ID NO: 34139 - DNA, 1278 bp, Unknown
  Obtained from environmental sample
  misc_feature (1)..(1278): n is a, c, g, or t
atgaacaagtaccttattgagggcggatacccaataagcggcacgataagggccagcggcaataaaaacgctgccctgccctgcattgccgccgcccttttaactgataagccaataatcctgcgaaatattcccgacattgaagacgttcaggtaatgcttgccgtgtaccgttctctcggcggcaaagctgaatcccttggaccgaatacctggcgtctaagcacgggaaatatcagctcttcggaaattccggcggaatatgcagtgaaaataagggcatccatccttttcgccggcccactcctggcgagaaccggcagggtagtgctgcctccgcccggcggggatgtaatcggccgccgccgcctggacacccactttcttgcccttaccgagcttggggcgcaagtggaggttaaggacgcttttgtatttagcagttccggtcttgaaggagcgaatattttcctggacgaggcgtcggtaacggctacagaaaacgccgtcatggtcgcggcgctggcgaaacgcgaaaccatcctgaccaacaccgcaagcgacccccatgtgcaggatctctgctgtatgctttgcgctatgggcgctcgtatagaaggaataggctccaacatcctcaccataaaaggggtacaaaaacttcggggctgcgagtttgcgataggcgcggactttatggaagtgggctcctttatcggtcttgcggctgccacacgcggggaactttttatcgaaggcgcaaggccttccgatctcaggcccgcaaaaacagcattcggcaagcttgggatagtgtgggaacacgagggctctacaatccatgtacccgccagccaggcgcttgaagtgaactgcgacctcggcggcatgatccccaaaattgacgacgctccatggcccgggtttccgcctgacttgaccagcatcattaccgttgttgccactcaagttatgggaacagttcttattcacgaaaagatgtttgaatcccgaatgttcttcgtagacaagctaatcggcatgggcgcgcgtattgtgctttgcgatccccaccgggcggtggtgtccggccccacccgcttgactggttcggaactccaaagtcccgatgtgcgggccggtatggctatggtaatagccgccatgaccgccgaaggcaaaagccagatcgacaacgtgtaccaaatagagcggggctatgagaatatcgttgcaaggctttcgtctctgggcggaaaaataagcgcggtgccttaa

SEQ ID NO: 34140 - protein, 425 aa, Unknown
  Obtained from environmental sample
  DOMAIN (6)...(414): EPSP synthase (3-phosphoshikimate 1-carboxyvinyltransferase)
  misc_feature (1)..(425): Xaa is any amino acid
MNKYLIEGGYPISGTIRASGNKNAALPCIAAALLTDKPIILRNIPDIEDVQVMLAVYRSLGGKAESLGPNTWRLSTGNISSSEIPAEYAVKIRASILFAGPLLARTGRVVLPPPGGDVIGRRRLDTHFLALTELGAQVEVKDAFVFSSSGLEGANIFLDEASVTATENAVMVAALAKRETILTNTASDPHVQDLCCMLCAMGARIEGIGSNILTIKGVQKLRGCEFAIGADFMEVGSFIGLAAATRGELFIEGARPSDLRPAKTAFGKLGIVWEHEGSTIHVPASQALEVNCDLGGMIPKIDDAPWPGFPPDLTSIITVVATQVMGTVLIHEKMFESRMFFVDKLIGMGARIVLCDPHRAVVSGPTRLTGSELQSPDVRAGMAMVIAAMTAEGKSQIDNVYQIERGYENIVARLSSLGGKISAVP

SEQ ID NO: 34141 - DNA, 771 bp, Unknown
  Obtained from environmental sample
  misc_feature (1)..(771): n is a, c, g, or t
gtggtaagcgccggttcaagcataacgcttccaggcggcagcgggctatcgaaaagcggttatacttttaacggttggaataccaatgcttctggcagcggtgatctttacggcgccggttcatcctttataccgtatagtaacattacgttatacgccaattggaaccctggcgttacaacaaccacctacacagtaacctacaatgccaacggaggaagcggtaccttacctgcttcgcagacagcgcagtcaggctctgcaataacgcttcccaacggcagtggattaacaaaaagcggttttactttcggtggctggaatactaatacttcgggtactgggagcaatttcaatgctggtgattcctatactgttactgccaacataaccctatatgccaagtggaatgccagcggccctattgttgtttctggcgataaccttgccgctaaattttcatggctgaaaaccaatgcgcaaagcggcggtgaatatactattgaagtaaattcaaatgagggcattaatggcgaagaactatcttacagcggaaagagcaatatcgctattaccttgaatggtgttggtcaggcgcggactatcagccttacatctaatggttcgatgtttacaataggctcaggcgttactttgatactggataacaacataattctaaagggacgaagtagcaatacaaattctctggttcagataaatagtggcggaactttggtaatgaacancggggtcaggcattaccggtaa

SEQ ID NO: 34142 - protein, 256 aa, Unknown
  Obtained from environmental sample
  misc_feature (1)..(256): Xaa is any amino acid
MVSAGSSITLPGGSGLSKSGYTFNGWNTNASGSGDLYGAGSSFIPYSNITLYANWNPGVTTTTYTVTYNANGGSGTLPASQTAQSGSAITLPNGSGLTKSGFTFGGWNTNTSGTGSNFNAGDSYTVTANITLYAKWNASGPIVVSGDNLAAKFSWLKTNAQSGGEYTIEVNSNEGINGEELSYSGKSNIAITLNGVGQARTISLTSNGSMFTIGSGVTLILDNNIILKGRSSNTNSLVQINSGGTLVMNXGVRHYR

SEQ ID NO: 34143 - DNA, 777 bp, Unknown
  Obtained from environmental sample
  misc_feature (1)..(777): n is a, c, g, or t
atgaaagtaatggcaggggcttactccgacaaaggcggtcgccctcacaacgaggacgcttttctgtgcgccaaatttatgggtggcagtgctatttgtatgggtggcaacattggggacaacggcgctgaatattcaagtattgttgacgcatcgctttttttccttgtcactgacggcatgggtggtcatgacgcaggggacgtggccagcgcttttgtggtggaaggtatgctcaaagcggcgcagatgacggcgaatgaggggcgcgtttttgatgaagccgctattgagacactgataaaatcggttcacactgctttattaatagaaggaaaagataaaggaacgcctaatatgggctccaccctgacaggtcttttattgcaaaaggacgctccctgcgcgtttataaatgtgggggacagtcgcgtctaccgtttacggaacggtttccttcaacaattgagcagggacgattctcttgcaagcattatgcccggcgcggcgaaaaacatcatcacaaacgccattggcgcgggattgccggacgtgtcagtcgcaagcagattctctcccgctgtcgcggttgtgggagacacattcctaatgtgcagtgacggcgttcatggctctgtaagcgatgatgatcttgaaaagtttcttactgaaacatttccgccgttggaaatcgcgaaacggatagtgcaagcggcaatcgacaatgattctgatgataactgtaccaccgtggtggtgaagctggatgaggagtaa

SEQ ID NO: 34144 - protein, 258 aa, Unknown
  Obtained from environmental sample
  DOMAIN (49)...(256): Stage II sporulation protein E (SpoIIE)
  misc_feature (1)..(258): Xaa is any amino acid
MKVMAGAYSDKGGRPHNEDAFLCAKFMGGSAICMGGNIGDNGAEYSSIVDASLFFLVTDGMGGHDAGDVASAFVVEGMLKAAQMTANEGRVFDEAAIETLIKSVHTALLIEGKDKGTPNMGSTLTGLLLQKDAPCAFINVGDSRVYRLRNGFLQQLSRDDSLASIMPGAAKNIITNAIGAGLPDVSVASRFSPAVAVVGDTFLMCSDGVHGSVSDDDLEKFLTETFPPLEIAKRIVQAAIDNDSDDNCTTVVVKLDEE

SEQ ID NO: 34145 - DNA, 648 bp, Unknown
  Obtained from environmental sample
  misc_feature (1)..(648): n is a, c, g, or t
gtgatgtacgacgcctgcgaaaactgcggcgcgattataaaccctatccttgaaaaagcgttcgctcaggaagcgcccgtcgaactagcggcgatgagcgatgcggaagcggaaaaaattgaggccgattttaaggcaatgaaatcaaatgaaagcgcggagtttaaggcatttcagaaaaaactggttgaacgccagattttgcttgaggagcgggattactttaacaaacgtgaaaaaagaatcatcaaagcgtttggcagccgccctttcacgctggaactgcctgaccccgctgaggaagccttcagaatgaaagcctatgccgcgttggaaaaaacggtgattgaacgcgaggaaaaagcgatagaggcggaattggacaaattgtttccgccgttgcctccggtagacaccagcgttgaagacgcccgtcttgcgnaaatagaacggaaacgcgccgagatggaacanaagttcaacgaggcgctggcgaaagtgaacagcgaggttgatgatttccgtaaaagagaaagacgtaagcgcattgaagaagaacgcagacggcttgaggaggagcgcgccattgagaagaacgcaggcgcaaagaaaaggagcgcggcgcgagctgaacgcagcggaaaatga

SEQ ID NO: 34146 - protein, 215 aa, Unknown
  Obtained from environmental sample
  misc_feature (1)..(215): Xaa is any amino acid
MMYDACENCGAIINPILEKAFAQEAPVELAAMSDAEAEKIEADFKAMKSNESAEFKAFQKKLVERQILLEERDYFNKREKRIIKAFGSRPFTLELPDPAEEAFRMKAYAALEKTVIEREEKAIEAELDKLFPPLPPVDTSVEDARLAXIERKRAEMEXKFNEALAKVNSEVDDFRKRERRKRIEEERRRLEEERAIEKNAGAKKRSAARAERSGK

SEQ ID NO: 34147 - DNA, 468 bp, Unknown
  Obtained from environmental sample
  misc_feature (1)..(468): n is a, c, g, or t
atgaagccgattaaattgacaatgagcgccttcggctcttacgccggattggagacgcttgacttcactaaactgggcgatagcggtctatacctcatcaccggcgagacgggttcgggcaagacgacgatattcgacgcggtctcgttcgcgttatttggcgaggcgagcggcgcggggcgggataagtatcataatctgcgttccgattttgcggatgagaacgcaaactctttcgttgaacttgatttcgcgtcgggcagcggtgcgtaccgtatcaggcgggagataaagaagacggggcaggacgttcatcttgtattgccggacggcacctctttgagcggggcgcgtgatactcaggataagatcgccgaggtcgttgggcttgaccgcgatcaattcgcgcagatagtgatgatagcgcaaaacgattttctgcgttttcttcagagcggcacggattag

SEQ ID NO: 34148 - protein, 155 aa, Unknown
  Obtained from environmental sample
  misc_feature (1)..(155): Xaa is any amino acid
MKPIKLTMSAFGSYAGLETLDFTKLGDSGLYLITGETGSGKTTIFDAVSFALFGEASGAGRDKYHNLRSDFADENANSFVELDFASGSGAYRIRREIKKTGQDVHLVLPDGTSLSGARDTQDKIAEVVGLDRDQFAQIVMIAQNDFLRFLQSGTD

SEQ ID NO: 34149 - DNA, 1149 bp, Unknown
  Obtained from environmental sample
  misc_feature (1)..(1149): n is a, c, g, or t
atgaaattcctgcatctatccgacccgcatatcggcaagagcgtgaacggtttctctatgattgaggagcagcggcgcgtactgcggcaggttataggctacgtgaagtccgagcgccccgccgccgtggttatagccggcgacgtctacgaccgcgccgtgcccggcgttgacgcggtgcggctgttcgacgattttctcaccgatcttgcgggagagggggtgacggtcatggttgtggccggcaaccacgactcgccggagcggctgggttacgccggacggctgctcgccgagagaaatctctttatacgcggcgcgtttgacggcgtcgtcgaccggatagttctgtcggatgagtacggcgaggtgaatttttggctgctgccgtttatcaggccgatctccgttcgcggattgttcggcgaccgcgaaatttccacatacggcgaggctgtggcggcggcgattgaggccgccggggttgactactccgctagaaacgtgcttgtctcccaccaattttacaccaaggccgggaccgaacttgaatattgcaactcggaactgaatcctgtcggcgggctagacgctattgacgcgggcgttatcggtcgtttcgactacgccgcgctggggcatttgcacgcccctcagtggattagcgggagcaattgccgttacgccggatcgccgcttaagtattcgttctccgagattcggcatgagaaatcgataggccttgtggagttccgcgaaaagggagatttgtcggtctctacgctaccgcttgtaccgatacacgatatgcgggagattaaggggccgctttctgaattgatcagcgataaagtgtcctctcttgccgataaaaatgattatttgcgggtaatacttacggatgaggaggagatcgttgacccgatgggaaaaatccgcggcgtttatcccaacgtgatggcgctgagttttgagaacgcgaggacgggaattgacgttgcggggatcgccgctaattcggagcgggtgtcggcgctgtcgccgtacgagttgttcagcgaatttttcttagcggtgaacggctctacgatgagcggcgagcaggcggcgttagtgaggaagttgatggacgcgggggcgggggaatga

SEQ ID NO: 34150 - protein, 382 aa, Unknown
  Obtained from environmental sample
  DOMAIN (1)...(218): Calcineurin-like phosphoesterase
  misc_feature (1)..(382): Xaa is any amino acid
MKFLHLSDPHIGKSVNGFSMIEEQRRVLRQVIGYVKSERPAAVVIAGDVYDRAVPGVDAVRLFDDFLTDLAGEGVTVMVVAGNHDSPERLGYAGRLLAERNLFIRGAFDGVVDRIVLSDEYGEVNFWLLPFIRPISVRGLFGDREISTYGEAVAAAIEAAGVDYSARNVLVSHQFYTKAGTELEYCNSELNPVGGLDAIDAGVIGRFDYAALGHLHAPQWISGSNCRYAGSPLKYSFSEIRHEKSIGLVEFREKGDLSVSTLPLVPIHDMREIKGPLSELISDKVSSLADKNDYLRVILTDEEEIVDPMGKIRGVYPNVMALSFENARTGIDVAGIAANSERVSALSPYELFSEFFLAVNGSTMSGEQAALVRKLMDAGAGE

SEQ ID NO: 34151 - DNA, 465 bp, Unknown
  Obtained from environmental sample
  misc_feature (1)..(465): n is a, c, g, or t
gtgggtttcttgatgggtaaaataaagggacaaccgctcctccccgatcatgtcagcaaccggattatcgcaatagcgcagacggccaagctactaattattgggataaaagatttcaagtccctattccaatacgctcgatttaagattgtcaacaaacgcctcaaagcgagcacggctgcgccgactaccgacgagatcactttattcgcggttgattccgacacgcgcggcatgggcgtcggaaaagagctattcaacaactatctgcaacacctgaaggagcttggccggagcgacttctacctgttaacagatacgatgtgcacttttagtttctacgaacacaaaggtatgactcgaggcgccgagcaagatatgaccatatatctcgatggcaagccgaaaaagattggtgtctacctctacgccggtaacgttgacgaggcgatcaaattaagttag

SEQ ID NO: 34152 - protein, 154 aa, Unknown
  Obtained from environmental sample
  DOMAIN (34)...(120): Acetyltransferase (GNAT) family
  misc_feature (1)..(154): Xaa is any amino acid
MGFLMGKIKGQPLLPDHVSNRIIAIAQTAKLLIIGIKDFKSLFQYARFKIVNKRLKASTAAPTTDEITLFAVDSDTRGMGVGKELFNNYLQHLKELGRSDFYLLTDTMCTFSFYEHKGMTRGAEQDMTIYLDGKPKKIGVYLYAGNVDEAIKLS

SEQ ID NO: 34153 - DNA, 834 bp, Unknown
  Obtained from environmental sample
  misc_feature (1)..(834): n is a, c, g, or t
ttggcaatgcagggtgaaaagggggtgttcccagcattgaattgcgttatgttcaactcaccagccgtgcagagaaatttgcaaacccttcgctctgggggggttaaaattgtggaacccgccgttgggcatttggcttgtggcgaagaaggggcagggaagttcccagaaccagaagatattgcagatgagcttgaattttacgaggcaaagaaaaacaaaaccctgctgataactatggggcgtacccaagaatcaatagaccctgttcgctatatatcaaataaatcaagcggaaaaacgggtgtggcaatagcaaaagaatttttgcgtaatggctggcaagttatagcaatttgcggaccaatggaagcaaaactgccaaagcaatgcgaaataatagaagtaaaaagcgcaaaggatatgaataattcagtgcttaaaatgcaaaaaaaagcaaacgccattgtgcactgtgctgccgttgcagattaccgccccaaacgaacagcggatcaaaaagtgaaaaacagcagagcgatgcaaaaattagaattggaagaaactccaaatatcttgaaaaatacaattaaaaacaaagtgtcaaaacaaaaaatagtatcttttgcgttggaaacagaaaatgccttgcaaaatgccaagaaaaagtttgaaagcggcggcatagatattttagttgtgaacacagcggataattttggaaaggataaagttgaatatgcaattttgaacaaaaacagccaaagcacaaaactcgctcttggcaacaaagaagaactcgcttcgcgggtatttgcgggggtaaatgcctaa

SEQ ID NO: 34154 - protein, 277 aa, Unknown
  Obtained from environmental sample
  DOMAIN (69)...(265): DNA / pantothenate metabolism flavoprotein
  misc_feature (1)..(277): Xaa is any amino acid
MAMQGEKGVFPALNCVMFNSPAVQRNLQTLRSGGVKIVEPAVGHLACGEEGAGKFPEPEDIADELEFYEAKKNKTLLITMGRTQESIDPVRYISNKSSGKTGVAIAKEFLRNGWQVIAICGPMEAKLPKQCEIIEVKSAKDMNNSVLKMQKKANAIVHCAAVADYRPKRTADQKVKNSRAMQKLELEETPNILKNTIKNKVSKQKIVSFALETENALQNAKKKFESGGIDILVVNTADNFGKDKVEYAILNKNSQSTKLALGNKEELASRVFAGVNA

SEQ ID NO: 34155 - DNA, 555 bp, Unknown
  Obtained from environmental sample
  misc_feature (1)..(555): n is a, c, g, or t
gtggttgctttggcagctttgctcatagctttggaacgcctatttgtgctggggcacagagggcatgtttcaaaaacattcacacgcaaacttcaagagctaataaaaaacaaccatattgaagaggctaaaaccttgtgcaaaaaacaaaaaaccagccttggaaaaattttagcggcaatagttgaaaatgcttcaaactcaaaatccgaggcgcaaaaagatttgcagagagtgatgctcaccgagcaatccaaattggaaaaacgcatgggatttttggcggcacttggcacggtggctcctttgctaggtcttttgggcaccgttaccggaatgatattgctgtttcaggttattactcaagttggcacaaacgatgccagaattttggcaggtggaatttccgaagccttaataacaacagaaacaggtttgataatcgcaattccaattatgctattccacggcaaacttagcgaaacacttgactacataacaacagagataagaatccaaagtcttgcggttttgaattcattgtggaaagactaa

SEQ ID NO: 34156 - protein, 184 aa, Unknown
  Obtained from environmental sample
  DOMAIN (37)...(175): MotA/TolQ/ExbB proton channel family
  misc_feature (1)..(184): Xaa is any amino acid
MVALAALLIALERLFVLGHRGHVSKTFTRKLQELIKNNHIEEAKTLCKKQKTSLGKILAAIVENASNSKSEAQKDLQRVMLTEQSKLEKRMGFLAALGTVAPLLGLLGTVTGMILLFQVITQVGTNDARILAGGISEALITTETGLIIAIPIMLFHGKLSETLDYITTEIRIQSLAVLNSLWKD

SEQ ID NO: 34157 - DNA, 339 bp, Unknown
  Obtained from environmental sample
  misc_feature (1)..(339): n is a, c, g, or t
gtggaagcatatccagatgcaaaagaaaaagatttagaaattatggatgccgtcattcgcaatttgccgaatttgaaaaatttttacaatggcagcgaatataaaatagaagatttggcagacgaattgcgtggtccttatgaaatagaaatagtcaaggaggttattccgcaggcttattgcccgtgcagccgcgaaagagttatgacaagcctctctggtttgcacgaatgtgagataagggacataaagcaaaagaacgaggttttagatgtagtttgtgatttctgccgcaaacattatgccgtagcaccaaacgaattagtctttccacaatga

SEQ ID NO: 34158 - protein, 112 aa, Unknown
  Obtained from environmental sample
  misc_feature (1)..(112): Xaa is any amino acid
MEAYPDAKEKDLEIMDAVIRNLPNLKNFYNGSEYKIEDLADELRGPYEIEIVKEVIPQAYCPCSRERVMTSLSGLHECEIRDIKQKNEVLDVVCDFCRKHYAVAPNELVFPQ

SEQ ID NO: 34159 - DNA, 774 bp, Unknown
  Obtained from environmental sample
  misc_feature (1)..(774): n is a, c, g, or t
atgacgtacgtcaagccggagaagccggattggaaagaagggcttgcgcgcgaaaaatttgaatgggacaaggcccacccgaagaaaaccggcaagggcagcggtgatagggcagctattgaagcagacagggcggcggaaagatatacacagcgtctgataaaaagagaggccgacatgaagaaaggcgttgttgatgcggagaagtatgtcaaggaatgcgaagctaaaaagggaaaactgtccgcagatcagaaagcgctggacgccttattgaaaggcgggaagaagctcgcaaagaaagaacttgaagagaaggcgcggctagaagaggagattgctaaaacgagaaaagaacttggcggcaacgccgacgaagtagtctcccgtgcaataaatatgcgaaagcaggcaaaagctaggctgtcagccgtatgggacgaggcggaagcggccacatccaaactctcaaacatagagctagagacttgggtagacaacaataaggatagatgggataaaagcaggtcgcaccttgccgcggcagggatcatcccgccgcgcggcggcgcctccacgccgtcacagagcgcggccccagcaacaaccaaaacggcaagcgtgtctaacccgttcgcgtctgttgtcgtgaagaagtttcctgacaagataacgatgaacgagttgatggggatttttaaaaataacggtgtaaagccacaagaacaagcagtcattattgatgcgctttctaatgcggattggataaagtag

SEQ ID NO: 34160 - protein, 257 aa, Unknown
  Obtained from environmental sample
  misc_feature (1)..(257): Xaa is any amino acid
MTYVKPEKPDWKEGLAREKFEWDKAHPKKTGKGSGDRAAIEADRAAERYTQRLIKREADMKKGVVDAEKYVKECEAKKGKLSADQKALDALLKGGKKLAKKELEEKARLEEEIAKTRKELGGNADEVVSRAINMRKQAKARLSAVWDEAEAATSKLSNIELETWVDNNKDRWDKSRSHLAAAGIIPPRGGASTPSQSAAPATTKTASVSNPFASVVVKKFPDKITMNELMGIFKNNGVKPQEQAVIIDALSNADWIK

SEQ ID NO: 34161 - DNA, 1296 bp, Unknown
  Obtained from environmental sample
  misc_feature (1)..(1296): n is a, c, g, or t
ttgaggaacaaaggggataacgcaatgaataatccgcaaaaaagaacgttgaacacatcaggcagactattctgccttctgaccctgctcctatgcgcctgcacggagatgcccgaatactgcagtaaccacaacctgctcgaccctcttacgcagttttgctacgaagggaaggctgtatacaagtgccatgggtcgaagtacgacccctactcagagttttgctaccaaaacagaactattatgagcaaatgcggcggagaagaatatgatccgtccacgcaagagtgctataacggagtagtcaaaaacgacacatacattttgaccgttgaaataacacccgaagagggcggcaccgtgtcgcgcatcccgggtcagtcgaactacgcacggggaacaaacgtcaccttgacggcgacggcggagagaggctacaaatttatcgcgtggtattccgacgagttttggtggtccgacgcgttttggttgtctgacgcgtattggtcaacaaacgccactataacaatcactatggacgacgacaagacgctgaccgccatcttcgaagaagaggaaccggatctgccgacatacaccgtgtctttcaacgcaaacggcgctacgggcaacgtccccgcgactatacaacgagactccggctacgtgataacgctgcccaatccaaccggattggtaaaagtgggacacacattcgcgggatggtgcgccgcggacgacggctgtgaggaaatctacgcggctagcaacgagtacacggttacccaaaacgtcaccctatacgctcaatggacggcagccacctacacactcacaacaaacgtctccccgcaaaacagcggcacggtgtcgcgcgaccccgacaatgagagatacctatacggcaattacgttaccgttacggccgcgccaaccggcaactacacgttttacggctggtccggcgtgtcttcgtctacaagcaacacaataacaattatcatggacaacgacaagactctgacggccggcttcggggagccggatgccgaagtgttcagagtctacttcgacggcaatggcatgacaggcggctacgcccccgagacggcctccgccgttgccggcacaagcattacgctgccagatcaacatactatgtataaaaacaactatcgcttcgcggggtggaatacaaacagcgacggtacgggaaccaactacgccgctaactcctattacaacgttaccgacaatattaaccttttcgctaagtggatacgcgtttacccgtaa

SEQ ID NO: 34162 - protein, 431 aa, Unknown
  Obtained from environmental sample
  misc_feature (1)..(431): Xaa is any amino acid
MRNKGDNAMNNPQKRTLNTSGRLFCLLTLLLCACTEMPEYCSNHNLLDPLTQFCYEGKAVYKCHGSKYDPYSEFCYQNRTIMSKCGGEEYDPSTQECYNGVVKNDTYILTVEITPEEGGTVSRIPGQSNYARGTNVTLTATAERGYKFIAWYSDEFWWSDAFWLSDAYWSTNATITITMDDDKTLTAIFEEEEPDLPTYTVSFNANGATGNVPATIQRDSGYVITLPNPTGLVKVGHTFAGWCAADDGCEEIYAASNEYTVTQNVTLYAQWTAATYTLTTNVSPQNSGTVSRDPDNERYLYGNYVTVTAAPTGNYTFYGWSGVSSSTSNTITIIMDNDKTLTAGFGEPDAEVFRVYFDGNGMTGGYAPETASAVAGTSITLPDQHTMYKNNYRFAGWNTNSDGTGTNYAANSYYNVTDNINLFAKWIRVYP

SEQ ID NO: 34163 - DNA, 861 bp, Unknown
  Obtained from environmental sample
  misc_feature (1)..(861): n is a, c, g, or t
gtggctatagtgacgccatttaagaccgacggcagcctcgacgaggtggggctgcggtcgaacatcgactatctgatcgacaacggcgttgccggtctggtgccgtgcggcacgaccggggagagcgcgacgctctcttgggaggagcacatgcgcgtggtcgacgtcacgatagatcaggcgaacaagcgcgttcaggtgatcgccggcgcagggtcgaacaacacgaccgaggcggttgaggcggcgctccacgcgaaaaagagcggagcggacgcgatcctgaccatcaccccgtactacaacaagccctcgcaagaggggttatatcggcacttctccgtgatcgccgagaaggctgacgtgcccatggtgctctacaacgtgcccggccgcaccggcgtgaacatgctgcccgaaacggtggaaaggctttgccgcttcccgcaggtggtggcgataaaagaggccagcggcaacctaaaccagatttcggagatacaccgcgtttgcggcgacaggatcaccatactgtccggcgacgacgctctgacgctgccgattttagcctgcggcggaacaggcgtgatctctgtaaccggcaacatcctgccggctaagatgagcgagatggtaaacttttggttgaacggcgaccacgccggcgctctgaaactgcatgacgagctgctcccgatctcgcaagccgtattcatagaaacaagcccggtgccgataaagacatgtatggcggaggcgggtctcgcggcggggccggtcaggttgccgcttgcgcctatgttggacagtaataaagagaaattgttggcggtttggaagaaatatttggattctttttaa

SEQ ID NO: 34164 - protein, 286 aa, Unknown
  Obtained from environmental sample
  DOMAIN (2)...(283): Dihydrodipicolinate synthetase family
  misc_feature (1)..(286): Xaa is any amino acid
MAIVTPFKTDGSLDEVGLRSNIDYLIDNGVAGLVPCGTTGESATLSWEEHMRVVDVTIDQANKRVQVIAGAGSNNTTEAVEAALHAKKSGADAILTITPYYNKPSQEGLYRHFSVIAEKADVPMVLYNVPGRTGVNMLPETVERLCRFPQVVAIKEASGNLNQISEIHRVCGDRITILSGDDALTLPILACGGTGVISVTGNILPAKMSEMVNFWLNGDHAGALKLHDELLPISQAVFIETSPVPIKTCMAEAGLAAGPVRLPLAPMLDSNKEKLLAVWKKYLDSF

SEQ ID NO: 34165 - DNA, 882 bp, Unknown
  Obtained from environmental sample
  misc_feature (1)..(882): n is a, c, g, or t
atggaaactcttgtatcatttttcggcggccaaatcggcaaggctttgtccctttcaaagatacctacggtaataaacgaacacaacgtgtttcaggagggggatccggaaattcttgccatccttgacgaaatggcggaaaaacttatccttcctggctcgggacttgacgggctggagcatcttgaagagcttttggcccttgccgaatcgggaaagtcctgcctgcttttgcctgagcattacagcaacctagatctctcgattatttcccttatggtacgcaaagcgggggggcgcggcaaagacatcggcaattcaattattgccatcgccgggatgaaactcaacgaagaccatcccgctgtcgccgcttttacaggcgcttacaccaaaatcgtaatttatcccagtcggtacttgtccggtctgagcgccgaggaaaaaaaggccgaattcgtccgcagtaacatgattaaccgcgccgccctgaaggtaataaacgagcaaaaaaccaaaggcaggctaatactgatttttccttccggtacacgataccgcccctgggatcctgacagcaaaaaaggcgtccgcgaaattgattcgtatatacgttcatttgactatatgtgccttgtcgcaataaacggcgaatgtcttcatattcaaaaaaccgatatgataaacgacgaagtgagtgaagatttggtcagggttacagtaagccctgttatttcatgcgccgagttcagggaaaaagccaaggcttccatgtcaggtggcgaagacaaaaaacaggtggtttgcgacactgtaatggcggagctggaaaggatgcatatcgcggctgaagagaaaaggcagaagctgctgaagggttag

SEQ ID NO: 34166 - protein, 293 aa, Unknown
  Obtained from environmental sample
  misc_feature (1)..(293): Xaa is any amino acid
METLVSFFGGQIGKALSLSKIPTVINEHNVFQEGDPEILAILDEMAEKLILPGSGLDGLEHLEELLALAESGKSCLLLPEHYSNLDLSIISLMVRKAGGRGKDIGNSIIAIAGMKLNEDHPAVAAFTGAYTKIVIYPSRYLSGLSAEEKKAEFVRSNMINRAALKVINEQKTKGRLILIFPSGTRYRPWDPDSKKGVREIDSYIRSFDYMCLVAINGECLHIQKTDMINDEVSEDLVRVTVSPVISCAEFREKAKASMSGGEDKKQVVCDTVMAELERMHIAAEEKRQKLLKG

SEQ ID NO: 34167 - DNA, 1026 bp, Unknown
  Obtained from environmental sample
  misc_feature (1)..(1026): n is a, c, g, or t
atggcccctaccagggaattggctgtccagattgaggaagaggcgcagatgctgggcaaataccttcccattaaggttggcagtttttacggcggagtgggctatactcagcaggaaaaactgctgcgggaaaatgttcaagtaatggtaggaacgccgggccgggtgctggatttgaacaaatcaggccggatgaacctgatggatattgcttttctgattctggacgaggctgaccggatgttcgatatgggcttttaccccgacctccgcaaactgatcaaagtagtgccccctgttgaccgccgtcagaccatgctgttcagcgcgacactgaacgcatgggttaaaaatcttgcatgggaatacacccgcgcgccgtttgaaattgagatcaagccggaactggtaacggttgaagaaatcgatcagatcctctaccacgttccttccgaagaaaaaatgaagctgcttctgggtatatttgagcgggagcagcctgaaagcgccattatcttttgcaataccaaacgctatacggaaattgtagccaagcggctgcggctcaacggctacgactgtgaattcatcatcggcgacctgcctcagtcccggcggctcaaggttatcaatgacgttaaggcgggaaagaccaggtttctggttgccaccgatgtcgcggcgcgnggactggacattgagggcctggctatggtggtcaattatgatctgcccaacgatgccgaagattacgtacaccgcatcgggcgcacagcgcgcgccagcgccatcgggactgccatcaccttaatctcgaaagaagaccagggacgcttcgcccgcatcgagcagttgctcgaaaaagaattggacaaactgcccctgcccgacgaccttggcaaagtgcccgactacacccccaactcatcccaaaaaccgaagcaagaccatcggaaaaagcgcanaggaaagttcacgccccgctcccaaaagcgccacaaaggcaaagccaaaaatgaagaatag

SEQ ID NO: 34168 - protein, 341 aa, Unknown
  Obtained from environmental sample
  DOMAIN (1)...(119): DEAD/DEAH box helicase
  misc_feature (1)..(341): Xaa is any amino acid
MAPTRELAVQIEEEAQMLGKYLPIKVGSFYGGVGYTQQEKLLRENVQVMVGTPGRVLDLNKSGRMNLMDIAFLILDEADRMFDMGFYPDLRKLIKVVPPVDRRQTMLFSATLNAWVKNLAWEYTRAPFEIEIKPELVTVEEIDQILYHVPSEEKMKLLLGIFEREQPESAIIFCNTKRYTEIVAKRLRLNGYDCEFIIGDLPQSRRLKVINDVKAGKTRFLVATDVAARGLDIEGLAMVVNYDLPNDAEDYVHRIGRTARASAIGTAITLISKEDQGRFARIEQLLEKELDKLPLPDDLGKVPDYTPNSSQKPKQDHRKKRXGKFTPRSQKRHKGKAKNEE

SEQ ID NO: 34169 - DNA, 870 bp, Unknown
  Obtained from environmental sample
  misc_feature (1)..(870): n is a, c, g, or t
gtggaaacgtttgtccgtgaaattatggattataaagcggaaataataagctttgtccaggcggcggcggggtgggcgctgtccggcgatatttcggagcagaccatgtttattttgttcgggaccggggccaacggaaaatccacgtttttgaacacgataatgtacctgttaggcgactattctaccgcaacgcctacggaaactttcatgaaaaaatcgggggacaattattcaaatgatgttgcccgccttcggggaaccaggcttgttaccactacggaagttgagcaagggcggcggctttccgagcctttgataaaaaagataacgggcaatgacgaaatgacggcaaggtttttgtatggggagttttttaatttcaagccgactttcaagatttttatggcgaccaaccacaagcctgtgattaaaggcaccgaccacggtatatggcggcggataaagctgattccttttacgacaatgatacccgaagaaaggcaggataaattccttgaattgaaactgcgggaagaggcaagcggtatccttaactggcttttagagggaatagggcgttggaagagggaggggttaaaggctcccaatgcggtgctgctggctactgacgaataccggggggaaatggacgttatcggaaacttcataaaagagcgcactgtccagcaagaggggtttacgatacggattagggaactgtataaggcgtatgccgactggtgcgatgaaaacaacgaacacgccgtaagcgagcgttttctttccatgcggctcaaagaaatggggtttgagcagacaagaaccgccgaggcgcggttttggtcgggggtcgggcttaggtgctga

SEQ ID NO: 34170 - protein, 289 aa, Unknown
  Obtained from environmental sample
  DOMAIN (2)...(272): Poxvirus D5 protein-like
  misc_feature (1)..(289): Xaa is any amino acid
METFVREIMDYKAEIISFVQAAAGWALSGDISEQTMFILFGTGANGKSTFLNTIMYLLGDYSTATPTETFMKKSGDNYSNDVARLRGTRLVTTTEVEQGRRLSEPLIKKITGNDEMTARFLYGEFFNFKPTFKIFMATNHKPVIKGTDHGIWRRIKLIPFTTMIPEERQDKFLELKLREEASGILNWLLEGIGRWKREGLKAPNAVLLATDEYRGEMDVIGNFIKERTVQQEGFTIRIRELYKAYADWCDENNEHAVSERFLSMRLKEMGFEQTRTAEARFWSGVGLRC

SEQ ID NO: 34171 - DNA, 1023 bp, Unknown
  Obtained from environmental sample
  misc_feature (1)..(1023): n is a, c, g, or t
ttggaaaataatttttctccgcgccgctttcttatagaacattgcgaggcaaacggaatctattcaaaaatgatttttacaagcgttcttgttaaccagttaaagggagacaaatacaggaagcagaacgcgagggaagaactctggaaagcccaggactcctgcctgtttgttcccggaaacggatttntacgccacgaactccgcaaagcggcatacagttctcttttgcgcgccgaaaggctgtccagggaaaagggaaggtttgtttcatcgcttgttcagcatgattttgatcttgacggcgttaaggaatatttgtttcaggacgcaaggattaactgttacattcagttaaaaggcgcgagtgtttttgagcttgattatctgcccaaagactggaactaccttgactgtggttccacaaattccgcgaaagacaggcgcacatcttttgcggacgcgcttatacccgcgtcatcgcaggccgattttcaaattagttttccgcccggttcccgcctgtgttttaacgaacaatatgaagaaatctcgcaggaccgcaaaggaaaatcatgctttaaactgcctgccgcaagtgtagatactccgtacaacggcattgtgattgaaaaatgttatctgctaaaaaaagacgttctttcagtaaattatgaattaaaaaacacaggcgacaagccggaagactttatatttgttacggtaattaatttttcttttgcaggtaacggcgaagagtttgttcgttttcatgtgattgacaagaacggaaaagagattcccgccgaaaacattttaacgggtgttgataccctaaaaatacttgacgtgaccaatgaagttcagcttctgcttggttccgctaagtcgtttaacgcatgtttgcttcccgcccttgacgacgggctttatcagtctagccgtgttattacgcaatttgcggtttcattgaaaagcggtgagaactgggagaatgaatttagtttgaaattttcgcattaa

SEQ ID NO: 34172 - protein, 340 aa, Unknown
  Obtained from environmental sample
  misc_feature (1)..(340): Xaa is any amino acid
MENNFSPRRFLIEHCEANGIYSKMIFTSVLVNQLKGDKYRKQNAREELWKAQDSCLFVPGNGFXRHELRKAAYSSLLRAERLSREKGRFVSSLVQHDFDLDGVKEYLFQDARINCYIQLKGASVFELDYLPKDWNYLDCGSTNSAKDRRTSFADALIPASSQADFQISFPPGSRLCFNEQYEEISQDRKGKSCFKLPAASVDTPYNGIVIEKCYLLKKDVLSVNYELKNTGDKPEDFIFVTVINFSFAGNGEEFVRFHVIDKNGKEIPAENILTGVDTLKILDVTNEVQLLLGSAKSFNACLLPALDDGLYQSSRVITQFAVSLKSGENWENEFSLKFSH

SEQ ID NO: 34173 - DNA, 390 bp, Unknown
  Obtained from environmental sample
  misc_feature (1)..(390): n is a, c, g, or t
ttggaaaaaacggttttgcttttctcgatctgggaatgcctttggattacaaaaccagcctgggggcaaaagacatttctccggacagatttgtggaaatattccgggacgcgcggggttgataaaaattataccgtatgttatactttttttatgaaaacagcaatctctattgatgacaaactatttgaagaagcagagagtttctcccaaactataggactatcacgcagcagactgtactcgacagcaataaacgagtacatccaaaatcacagtcctgacttaatcacggaaaaattaaacgactactataaaaaccataacagcaaaattgatgatgacttaaaagaagcggcacataatttattagccagggaagactggtaa

SEQ ID NO: 34174 - protein, 129 aa, Unknown
  Obtained from environmental sample
  misc_feature (1)..(129): Xaa is any amino acid
MEKTVLLFSIWECLWITKPAWGQKTFLRTDLWKYSGTRGVDKNYTVCYTFFMKTAISIDDKLFEEAESFSQTIGLSRSRLYSTAINEYIQNHSPDLITEKLNDYYKNHNSKIDDDLKEAAHNLLAREDW

SEQ ID NO: 34175 - DNA, 729 bp, Unknown
  Obtained from environmental sample
  misc_feature (1)..(729): n is a, c, g, or t
atgtatccccttcgctatctacccacggggcatatctttatcgatccgaccgatgattgcgatctcgttgtcaattccatactggaaataaattatggtgaggagttttgtcttgcgagggattttgatgaagcttttatttgccatcttatggaagccggttttttggttatgtccatggaactcaaagacgaggattccgaagaagaaaataaaagcgaagaggcagaacctttttacattctgcttcccaaactccaccttgttcgctcggtgttgttttttcctgatctgcgcataaagaaaagcatccgccgccttctttcacattacgagctgcgagtaaacacagattttgattttattcttgataaatgcgtacagatccacggctcagactggcttaccacgccgcttgttgaaattctcaaaaatatccaccacggcagtacagacacaagacccttctctttcgcggtttaccgtgaaggcgaactaaaagccggcgaaatcggcgttgtcgtcgggcgggtttacaccagctattcaggctactatgaggaagataacgccggaaccgttcaaatgatcctcatgacccgatggcttggaaaaaacggttttgcttttctcgatctgggaatgcctttggattacaaaaccagcctgggggcaaaagacatttctccggacagatttgtggaaatattccgggacgcgcggggttga

SEQ ID NO: 34176 - protein, 242 aa, Unknown
  Obtained from environmental sample
  DOMAIN (76)...(230): Leucyl/phenylalanyl-tRNA protein transferase
  misc_feature (1)..(242): Xaa is any amino acid
MYPLRYLPTGHIFIDPTDDCDLVVNSILEINYGEEFCLARDFDEAFICHLMEAGFLVMSMELKDEDSEEENKSEEAEPFYILLPKLHLVRSVLFFPDLRIKKSIRRLLSHYELRVNTDFDFILDKCVQIHGSDWLTTPLVEILKNIHHGSTDTRPFSFAVYREGELKAGEIGVVVGRVYTSYSGYYEEDNAGTVQMILMTRWLGKNGFAFLDLGMPLDYKTSLGAKDISPDRFVEIFRDARG

SEQ ID NO: 34177 - DNA, 534 bp, Unknown
  Obtained from environmental sample
  misc_feature (1)..(534): n is a, c, g, or t
atgtttgcgtgtccgccttgtaccagtaaatttctccccagggagtaccggggcattgcagaaaaattatttcctcccggtggtttttccgatggtaaagggccctctattgaagctgccggagctttcgccaacatacttggaataggggaagattacaggcggctttggaaaagccacaaatccggtcttacggcagggaattttctggagcattttcagaacaatttggatcttttaattcagaagacctgggtggaaaaagcggatgaagcgcgaaaggaagaattgcaggatcaggttccgccttttatcgcgtttatagaatgcggggattacgccaatgcccttgaagaatttggcgcaatactggaagaactggcgtatctcttctttagtacacagagccaaaaggacgattttgccgagtatgttttgcggattgatacgcaaatggggcttttttggtggtacggaggacagataaacagcgtaaaaggagcgccctggataaaaagcgtgacagaaacgtaa

SEQ ID NO: 34178 - protein, 177 aa, Unknown
  Obtained from environmental sample
  misc_feature (1)..(177): Xaa is any amino acid
MFACPPCTSKFLPREYRGIAEKLFPPGGFSDGKGPSIEAAGAFANILGIGEDYRRLWKSHKSGLTAGNFLEHFQNNLDLLIQKTWVEKADEARKEELQDQVPPFIAFIECGDYANALEEFGAILEELAYLFFSTQSQKDDFAEYVLRIDTQMGLFWWYGGQINSVKGAPWIKSVTET

SEQ ID NO: 34179 - DNA, 750 bp, Unknown
  Obtained from environmental sample
  misc_feature (1)..(750): n is a, c, g, or t
atggtagccaatatcaattcagttaccaacacgctgatcagcaacgccggcaatgtaaagacgctaaaggaagcttctgagacaggaaagacaggtctatctggcgtggctcatgatattcaggaaatatcccgcgaatccgagggccttctggagatcaactcggtaatggaaaacatcgccagccagaccaaccttctttcgatgaacgccgcgatagaagcggcgcacgccggagaagcgggcaaaggctttgccgtagtcgccgatgaaatccgcaagctggcggaaagctccggcgagcagtccaaaacgattggcatggtattgaagaagatagcggattcaatcaaaaaaattacaaacgccaccgggaatgtactaaccagattcgaggcaattgactcggcagtcagaaccgtttcgcagcaggaagaaaacatccgcaaggctatggaagagcaaagcgagggaagcaaacagcttctgcaaagttctggcggtttaaatgaaattacccggcaggtaaaaagcggttccgaagaaatgcttgagggcagcaaggaagttatgaatgaaagcaggaatcttgagaagataacgcaggaaataaccggcggcatgaacgagatggcaataggtgcggatcagatgaatattgcggtacaccatgtcagtgagataagcggcaagaaccgtgatgccattgaaactttgttaaaggaagtttcgcgctttaaagtggagtaa

SEQ ID NO: 34180 - protein, 249 aa, Unknown
  Obtained from environmental sample
  DOMAIN (2)...(214): Methyl-accepting chemotaxis protein (MCP) signaling domain
  misc_feature (1)..(249): Xaa is any amino acid
MVANINSVTNTLISNAGNVKTLKEASETGKTGLSGVAHDIQEISRESEGLLEINSVMENIASQTNLLSMNAAIEAAHAGEAGKGFAVVADEIRKLAESSGEQSKTIGMVLKKIADSIKKITNATGNVLTRFEAIDSAVRTVSQQEENIRKAMEEQSEGSKQLLQSSGGLNEITRQVKSGSEEMLEGSKEVMNESRNLEKITQEITGGMNEMAIGADQMNIAVHHVSEISGKNRDAIETLLKEVSRFKVE

SEQ ID NO: 34181 - DNA, 504 bp, Unknown
  Obtained from environmental sample
  misc_feature (1)..(504): n is a, c, g, or t
atgccgccggttatttcctgcgttatcttctcaagattcctgctttcattcataacttccttgctgccctcaagcatttcttcggaaccgctttttacctgccgggtaatttcatttaaaccgccagaactttgcagaagctgtttgcttccctcgctttgctcttccatagccttgcggatgttttcttcctgctgcgaaacggttctgactgccgagtcaattgcctcgaatctggttagtacattcccggtggcgtttgtaatttttttgattgaatccgctatcttcttcaataccatgccaatcgttttggactgctcgccggagctttccgccagcttgcggatttcatcggcgactacggcaaagcctttgcccgcttctccggcgtgcgccgcttctatcgcggcgttcatcgaaagaaggttggtctggctggcgatgttttccattaccgagttgatctccagaaggccctcggattcgcgggatatttcctga

SEQ ID NO: 34182 - protein, 167 aa, Unknown
  Obtained from environmental sample
  SIGNAL (1)...(28)
  misc_feature (1)..(167): Xaa is any amino acid
MPPVISCVIFSRFLLSFITSLLPSSISSEPLFTCRVISFKPPELCRSCLLPSLCSSIALRMFSSCCETVLTAESIASNLVSTFPVAFVIFLIESAIFFNTMPIVLDCSPELSASLRISSATTAKPLPASPACAASIAAFIERRLVWLAMFSITELISRRPSDSRDIS

SEQ ID NO: 34183 - DNA, 372 bp, Unknown
  Obtained from environmental sample
  misc_feature (1)..(372): n is a, c, g, or t
atgatagtagctaagccccgatttctggttttgttgtttttttgcggtctctctgtcctgatttttgcctgcaagggttcgccttttgccagagggacaaatttcacgcccggcgtttatttaggtaacggcataggttacaggagcatgattcaagtccgtgtgcaaacatccgcatccgggattcaggatgtcgccatcgtcagccatcaggaatcaaactaccccggccttgcggcgatgctagagcttatggaacagatgctggaaacaggcgataccgatcttgacgccatctcgggggcaacttattccagcaggggctttctgtcagcggtggaagaagccctggaaaaagcccgccgccggtaa

SEQ ID NO: 34184 - protein, 123 aa, Unknown
  Obtained from environmental sample
  SIGNAL (1)...(23)
  DOMAIN (46)...(120): FMN-binding domain
  misc_feature (1)..(123): Xaa is any amino acid
MIVAKPRFLVLLFFCGLSVLIFACKGSPFARGTNFTPGVYLGNGIGYRSMIQVRVQTSASGIQDVAIVSHQESNYPGLAAMLELMEQMLETGDTDLDAISGATYSSRGFLSAVEEALEKARRR

SEQ ID NO: 34185 - DNA, 1053 bp, Unknown
  Obtained from environmental sample
  misc_feature (1)..(1053): n is a, c, g, or t
atggcagcatatttggttttacagaacggtacggtaatggaaggcatcccctttggcaccttgggcgaagttaccggcgaagttgtgtttgccaccggcatgacaggttaccttgaaaccttaaccgatcaaagctattacgggcagatcgttttacagacgtttcccctgattgggaactacggcattatccccaccgactttgaaagctccgccgtcggggcaaaagcatacattgctaagcatccctgccaaaacccctccaacttcagaagcgagggcgatcttgacgcttttttaaaagagcgcggcattatcggcttatgcggaattgatacaagggcgctcaccaggattatcaggcaaaacggcgtgatgaacggtaaaatcaagacaaagcctccgactcaggatgacattgccgaagcgaaggcgtactcaatcctgaacgccgtcgcagccgtttcttcacgctcggttacaaaaaccccgccaaaagactcacaaacagtcaggcgcgtggcgttgatggacttcggcgcgaagcgcggcatagcggaagcgctggcggcgcggggctgcgaagtgtggtcgtttccgcacgacacgaaagcggatgaaatactaaagatgaagccggacgggatcatgctaagcaacggcccgggagatccggcggaaagcgccaacgattgcataatcgaaacgctccgtgaactccagcggagcanaacgccgatcttcggtatatgcctcggacaccaactgcttgcgctcgcaaacggttattcaacaaaaaaattgaagttcggtcatcgcggagcgaatcagccggttaaggagacagcgacggggcgcgtgtatatcactagccaaaaccacgggtacgccgttgtcacggataacggttcgtttatcaatgtaaacgacggcacttgcgagggacttgattacggaaaatcgttctccgtgcaatttcaccccgaagcgtgcggcggtccgctggatacttcttttctctttgacagatttatcgaaaggatgggcaaatga

SEQ ID NO: 34186 - protein, 350 aa, Unknown
  Obtained from environmental sample
  DOMAIN (176)...(329): Peptidase C26
  misc_feature (1)..(350): Xaa is any amino acid
MAAYLVLQNGTVMEGIPFGTLGEVTGEVVFATGMTGYLETLTDQSYYGQIVLQTFPLIGNYGIIPTDFESSAVGAKAYIAKHPCQNPSNFRSEGDLDAFLKERGIIGLCGIDTRALTRIIRQNGVMNGKIKTKPPTQDDIAEAKAYSILNAVAAVSSRSVTKTPPKDSQTVRRVALMDFGAKRGIAEALAARGCEVWSFPHDTKADEILKMKPDGIMLSNGPGDPAESANDCIIETLRELQRSXTPIFGICLGHQLLALANGYSTKKLKFGHRGANQPVKETATGRVYITSQNHGYAVVTDNGSFINVNDGTCEGLDYGKSFSVQFHPEACGGPLDTSFLFDRFIERMGK

SEQ ID NO: 34187 - DNA, 975 bp, Unknown
  Obtained from environmental sample
  misc_feature (1)..(975): n is a, c, g, or t
atggtctggaaaaacaggacaacaagtaactaccagaactgtacaaattggggcgaagcgcaactgacaggggcgccccctctaacaacggcccccacgtttagcccgaacttgacgacaacggaagttacctatcggcgtggcgacacgccgacggcgcttaccgccacggcaaccggggcattgggagcggcgatttcgtaccagtggtactattcaagcgcggcattcggcggcacgcttaccgcggttacgggcgcgacaaccaataccttttcgccgcctacgacagccgctttcacgacccgttactactttgtacgggcaaccgccaaagaaaacgatcacatggacaacacggctgactcggcgcgcgtgccggtaacggtaactgaaagagccttgctgtctgccgcaaccctggacagcgtggggcttacgccgcttccctcccgcggtacaacttgggccaatgccgctgccactgcgatgactgtcgctgccgctaacagcgttaccttggccggcaccgctgttgttgcaacgggggtcacggttgactactgtattatggcgcccaccgctacaggtgaccccacttgggtaacctccggcgtattgaataccgccgaccttaagttcgcctacgtaggcatcaaggtgtacgacgatcaaaacaatgtgacaagtatctacaaatgggcgctgtcgataggcgcttccaataacgccagcatgagggctcgtgctagcacacaaggagccctcgcacagtccggcctgtacatcggcggcataccgtcaaccggcaacggcacaccgggcgccggcccggggcttaccggtacaactggcggcgccncgacgtcaaacggcgcaatttacggggaactctaccagcggcatttccagcagcaagatagtggtcattaccgaagcgcccgtatccaaggtcgagttcggctgggcagctaa

SEQ ID NO: 34188 - protein, 324 aa, Unknown
  Obtained from environmental sample
  misc_feature (1)..(324): Xaa is any amino acid
MVWKNRTTSNYQNCTNWGEAQLTGAPPLTTAPTFSPNLTTTEVTYRRGDTPTALTATATGALGAAISYQWYYSSAAFGGTLTAVTGATTNTFSPPTTAAFTTRYYFVRATAKENDHMDNTADSARVPVTVTERALLSAATLDSVGLTPLPSRGTTWANAAATAMTVAAANSVTLAGTAVVATGVTVDYCIMAPTATGDPTWVTSGVLNTADLKFAYVGIKVYDDQNNVTSIYKWALSIGASNNASMRARASTQGALAQSGLYIGGIPSTGNGTPGAGPGLTGTTGGAXTSNGAIYGELYQRHFQQQDSGHYRSARIQGRVRLGS

SEQ ID NO: 34189 - DNA, 1062 bp, Unknown
  Obtained from environmental sample
  misc_feature (1)..(1062): n is a, c, g, or t
ttggttgaagcgtcagagtacggcaaaacaggactccagaccgtagcgcaggaaatacaggaaatagcccgtgattcagaaggattgctggaaataaactcggtaatggacaatatcgcaagccagactaatttgctttcaatgaacgccgctattgaagcggctcatgccggagaagtcggcaaaggctttgccgtagttgccgatgaaatccgcaaacttgccgagtcttcgagtaatcagtcaaaaaccactgcggtgatgttaaaaaaaataaaaacttcaatagacaacattacaaaatcgtctaacgacgtattagctcgtttcggcgcaatagactcaagcgtaaaaacagtttccgaacatgagcaaaacattttacacgctatgcaagaacaagaaacaggcggtaagcaaatactggaatcaataagcgtattgagggacataacagcttcggttaaaaaagggtctgatgatatggaaagatcaggtgaaacattagtcaaggaaacagacgaattcataaaaaccagtcaggaagttgcggaaggtatgaatgagatattggcaggcattaaccagataaaagtttcagtgaaccatgttaacgagatgagtttggagaacaaccgtaatttcgatgcgttaaaacaggaaacggagaaatttaaggacaccgcangtaacgagaggaaaaaaatcctcatcgttgatgacgatgatattcatcttgaaatggtagaaacagtactgcacagtgaatatgacgtaacgagcgccaaatccggtaaagaggcaattaatttattttaccaggggcttgtaccccagttaatattgttggacttaataatgcccgatatggacggatgggatacttataaaaggataaaagcgataagcgccttacacgataccccgatagcgtttttcacatcttcagacgacccaaaagacaaacaacacgcacgcgaaatgggcgcggttgatttcatcaagaagccatacgataaagacgatctattacgcagggtggggagaattttgaataaataa

SEQ ID NO: 34190 - protein, 353 aa, Unknown
  Obtained from environmental sample
  DOMAIN (1)...(189): Methyl-accepting chemotaxis protein (MCP) signaling domain
  misc_feature (1)..(353): Xaa is any amino acid
MVEASEYGKTGLQTVAQEIQEIARDSEGLLEINSVMDNIASQTNLLSMNAAIEAAHAGEVGKGFAVVADEIRKLAESSSNQSKTTAVMLKKIKTSIDNITKSSNDVLARFGAIDSSVKTVSEHEQNILHAMQEQETGGKQILESISVLRDITASVKKGSDDMERSGETLVKETDEFIKTSQEVAEGMNEILAGINQIKVSVNHVNEMSLENNRNFDALKQETEKFKDTAXNERKKILIVDDDDIHLEMVETVLHSEYDVTSAKSGKEAINLFYQGLVPQLILLDLIMPDMDGWDTYKRIKAISALHDTPIAFFTSSDDPKDKQHAREMGAVDFIKKPYDKDDLLRRVGRILNK

SEQ ID NO: 34191 - DNA, 1584 bp, Unknown
  Obtained from environmental sample
  misc_feature (1)..(1584): n is a, c, g, or t
ttgcgagacatcagacgnngaatgacccgcgctaccaaaagaaccatggaaacgctcaaacggcgcgaaaagatggcaaacgcgctgaacagggcggcgataaaatttctctcgcacagcggaggaacactcaaagaaaccatgacggcaggcattaaggaaatcgccgataccttcggtttggaccggttcgcgatttggcgtaacaatcccttgcctgacttcctgcatgtatcgcagatataccgctgggacagggaatccggcggaaccaccgtgccgacaaaaggattggaggatgtcacctatgccaagtttgcgccgcgctgggaaaaagttttagcttcgggcgagaccattaacagcccggcaaaacttctgcccgaagcggcgatgctgcaaacatttggctgcgcatcggtgtttgtcacgccgctgtttatcaataatgatttttggggctttgcccttcttgaagaccgtcataccgaacgcttttttgaaaaggacagcgttgatatgatgcgttcggcggcgttcttatgcgcgaacaccgtcatacgcaccgatatggaaaccaacatacgcaagcaaagcgcattgattaaaaccaggctggaacagcaggaattaatatccgatatttcaagaggctttatcgcgtccggcgattcggaaacatacgtcaaggaagccattgccaaattgggacgttaccacaatgtgtccatcgtgttcattttcgccattgattatgaggctaaaaacacgcgtctggcctatcactggtgcgccgacgaggcgccgccgcggacggccatatccaacctgttcgagtatttaatatccctcttccccgaacacctgccggagagcgacgatataccgatagtcgtatgcgacgacaccgccaagaatcccgagcccgtctttcaggcgctctactccatagacgtcatggcggtcatcggcgcgccgctctacgtggacggccgcctatggggtgtggtctgcgtggaacagaactacatgccccgccattggaccgagagggaaaaagagttcgtctccgtaaccacaagcaccatagccggcgtaatcatgcgcgacatctacaccataaaactcaaggaggctctgcataaggcgaccgaggcgagcaaggcgaagggcgagttcctctccaacatgagccacgagatgcgcacccccctaaacgcgataaccggcatgacggcaataggcaaaaacgcgaaggatatggaccgcaaagactacgccctcggcaaaatacaagacgcctcgacccacctcctcggcctgatcaacgatatactcgacatgtcgaaaatcgaggcgaacatgcttaaattgtccgccgtcgagttcagtttcgaaaaagtcctcaaaaaagtggtcgaaatggtcaacttccggattgacgaaaaacatcagaaattcacggtgcgcatcgacaaagcgattcccgacgccctattcggggacgaccagcggctggttcaggtcattatcaaccttctggaaacgccgtcaagttcacgccggaaactcggccgaatctga

SEQ ID NO: 34192 - protein, 527 aa, Unknown
  Obtained from environmental sample
  DOMAIN (43)...(186): GAF domain
  misc_feature (1)..(527): Xaa is any amino acid
MRDIRRXMTRATKRTMETLKRREKMANALNRAAIKFLSHSGGTLKETMTAGIKEIADTFGLDRFAIWRNNPLPDFLHVSQIYRWDRESGGTTVPTKGLEDVTYAKFAPRWEKVLASGETINSPAKLLPEAAMLQTFGCASVFVTPLFINNDFWGFALLEDRHTERFFEKDSVDMMRSAAFLCANTVIRTDMETNIRKQSALIKTRLEQQELISDISRGFIASGDSETYVKEAIAKLGRYHNVSIVFIFAIDYEAKNTRLAYHWCADEAPPRTAISNLFEYLISLFPEHLPESDDIPIVVCDDTAKNPEPVFQALYSIDVMAVIGAPLYVDGRLWGVVCVEQNYMPRHWTEREKEFVSVTTSTIAGVIMRDIYTIKLKEALHKATEASKAKGEFLSNMSHEMRTPLNAITGMTAIGKNAKDMDRKDYALGKIQDASTHLLGLINDILDMSKIEANMLKLSAVEFSFEKVLKKVVEMVNFRIDEKHQKFTVRIDKAIPDALFGDDQRLVQVIINLLETPSSSRRKLGRI

SEQ ID NO: 34193 - DNA, 693 bp, Unknown
  Obtained from environmental sample
  misc_feature (1)..(693): n is a, c, g, or t
gtgaaggacttatcacaaagtaaaacgccatgctttatagccccgacattttcctgctataaaaaaatcaaaacagtaacggcacaaaaaaccccggctcccgcccgaaagcctggctttgtatggctcactggaaagcgacacccagccccgctacccctacattcccgtacnngntnttttgnggacaaacgcngttacaccataagttactcggttgacgtaaaaattaacgaagctgtatggccgaataacctgtacctgtggatacccctgcccgtaacatccgcttcacagcggaaagttacgcttgtctccagaagcatggaaccttttatggaaaatcacaggggggtaagtctttttaaactggacaatcttacggccggcgcggctcatacgattaatctttcttttaatatagaggtatacgccgttgaaacaagcgtaagaccggtatcggtaaggcagggcaaaagcccgctttataccgcgtacactcaaagcacaaatttaattcccgccgacaattctcatattaaatcaactgtcgcgggcattgtaggcaagggacaaaatccaaattttaggcgaggatgtatacgaatggatcataaaaatatagatattgatgaaattcctttattacttcgggcccggtttcgcggtgggacaaaaaaaagcgaaccctaa

SEQ ID NO: 34194 - protein, 230 aa, Unknown
  Obtained from environmental sample
  misc_feature (1)..(230): Xaa is any amino acid
MKDLSQSKTPCFIAPTFSCYKKIKTVTAQKTPAPARKPGFVWLTGKRHPAPLPLHSRTXXFXDKRXYTISYSVDVKINEAVWPNNLYLWIPLPVTSASQRKVTLVSRSMEPFMENHRGVSLFKLDNLTAGAAHTINLSFNIEVYAVETSVRPVSVRQGKSPLYTAYTQSTNLIPADNSHIKSTVAGIVGKGQNPNFRRGCIRMDHKNIDIDEIPLLLRARFRGGTKKSEP

SEQ ID NO: 34195 - DNA, 516 bp, Unknown
  Obtained from environmental sample
  misc_feature (1)..(516): n is a, c, g, or t
gtgtgcccatccgctctttcaatgaggatgagatacttcccatctccgctctggcaaaagacaaaaacattgcggtccggtttattgaacttatgccccttggttccgccggaaccttggaacctgttcccggcggggaaatcgcggcgctgcttgaaaaaaactatggaacccttacgcctttttccggcatcatgggaaacggcccggctgtttattacagccttccggattttaccggaaagacaggttttattaatgcccgtaagccggggcttctgcgagacttgtaaccgcctccgcctgagttctgaaggattgttaaagccctgtctcgcaaatgaactgtgcctggacttgagagaaatgcttcgttccggcgcttgtgacggagacattatacaggccgtcaacgaagccgtatcgaaaaagccgaggtttcattctctttcgaaagtgtacggcgcgtcttcggaggaaaggcccgccgccggtatgtcctgtacagggggctga

SEQ ID NO: 34196 - protein, 171 aa, Unknown
  Obtained from environmental sample
  DOMAIN (34)...(150): Molybdenum Cofactor Synthesis C
  misc_feature (1)..(171): Xaa is any amino acid
MCPSALSMRMRYFPSPLWQKTKTLRSGLLNLCPLVPPEPWNLFPAGKSRRCLKKTMEPLRLFPASWETARLFITAFRILPERQVLLMPVSRGFCETCNRLRLSSEGLLKPCLANELCLDLREMLRSGACDGDIIQAVNEAVSKKPRFHSLSKVYGASSEERPAAGMSCTGG

SEQ ID NO: 34197 - DNA, 783 bp, Unknown
  Obtained from environmental sample
  misc_feature (1)..(783): n is a, c, g, or t
atgttaatcgacacttttggaagggtaattgattaccttagagtttccattaccgaccgctgtaatttacgctgcgtctattgtatgcctcccgaaggagtggaatggaagccccacaataccatgcttaagtttgaggaaatcctgcgagcctgcgggatcatggcgggcttggggatacgtaaaattaaagttaccggaggcgaacctttggtacgccggggcgcggcggcatttatacaaaacctaaatgcccttccggggattgaaaaagtcacccttacgacaaacggccttcttttgggcgcataccttgacgaagctgaaacccagggttattcggcgggcgtggacggggtaaacatcagcctggacgcgctgaatccgcggcgatacggacaaatcagccgtaatgagggaacagatccggcggtgatactctcccttattgaccgcctgcttgataaaggcattgcggtaaaactgaattgtgtgcccatccgctctttcaatgaggatgagatacttcccatctccgctctggcaaaagacaaaaacattgcggtccggtttattgaacttatgccccttggttccgccggaaccttggaacctgttcccggcggggaaatcgcggcgctgcttgaaaaaaactatggaacccttacgcctttttccggcatcatgggaaacggcccggctgtttattacagccttccggattttaccggaaagacaggttttattaatgcccgtaagccggggcttctgcgagacttgtaa

SEQ ID NO: 34198 - protein, 260 aa, Unknown
  Obtained from environmental sample
  DOMAIN (15)...(182): Radical SAM superfamily
  misc_feature (1)..(260): Xaa is any amino acid
MLIDTFGRVIDYLRVSITDRCNLRCVYCMPPEGVEWKPHNTMLKFEEILRACGIMAGLGIRKIKVTGGEPLVRRGAAAFIQNLNALPGIEKVTLTTNGLLLGAYLDEAETQGYSAGVDGVNISLDALNPRRYGQISRNEGTDPAVILSLIDRLLDKGIAVKLNCVPIRSFNEDEILPISALAKDKNIAVRFIELMPLGSAGTLEPVPGGEIAALLEKNYGTLTPFSGIMGNGPAVYYSLPDFTGKTGFINARKPGLLRDL

SEQ ID NO: 34199 - DNA, 1200 bp, Unknown
  Obtained from environmental sample
  misc_feature (1)..(1200): n is a, c, g, or t
gtggcggtggtaattgtgtactttaccctcaacagcactaccaaaccaatcgtcaaggtagctgagacccttaaggatatttccgaaggcgaaggcgacctgacgcgcagcattgtcgtccgctctaaagacgaagtaggcgatcttgccaattgcttcaacaaaactcttgaaaaaatcaaaggcctgattatcatcatcaagaatgaggggcaaagcctcagcagcatcggcaatgaccttgccagcaacatgaccgagaccgccgcggcgatcaacgaaattaccgccaatatccagagcatcaagggccgggtaataaaccagagcgccagcgttaccgaaaccaacgccaccatggaacaggttgttgctaatatcaataaactcaacggtcatgttgaaacnccaagcggcagtatttcccaggcttcatccgccattgaggaaatggtagccaatatcaactctgtcaccaatacgctggttaccaatgccgcaaatgtaaagaacttactggaatcctctgaagtcggccatgccggattacaggacgtgtctcaggatattcaggagatatcccacgaatccgaaggcctgttggaaattaacgctgtaatggaaaacatcgcaagccagaccaatctgctttcgatgaacgccgctattgaagccgcccacgccggagaggcgggcaagggctttgcggtagtagccgatgaaatccgcaagctggcggaaagttccggcgagcagtccaaaacaattggtacggtattgaaaaagatagcggagtcaatccataaaattacaagttccaccgaaaacgtactgcataaattcgaggcgattgattcaagcataaagacagtttcgcagcaggaagaaaatatccgcaacgcgatggaggaacagggtgaaggaagcaagcagcttctgcacagcgccggagatttgaatgaatcaacccagcaggtaaagaccggttccaatgaaatgcttgttggcagcagggaagttatgaaagagagccggaatcttgaaaagttaacgcaggaaataaccggcggcatgaacgagatggctacaggcgcggatcagatgaatgtcgcggtacaccatgtcaacgagataagcggcaagaaccgtgaagccattgacattttgatgaaagaagtttcgcgctttaaggttcagtaa

SEQ ID NO: 34200 - protein, 399 aa, Unknown
  Obtained from environmental sample
  DOMAIN (1)...(62): HAMP domain
  misc_feature (1)..(399): Xaa is any amino acid
MAVVIVYFTLNSTTKPIVKVAETLKDISEGEGDLTRSIVVRSKDEVGDLANCFNKTLEKIKGLIIIIKNEGQSLSSIGNDLASNMTETAAAINEITANIQSIKGRVINQSASVTETNATMEQVVANINKLNGHVETPSGSISQASSAIEEMVANINSVTNTLVTNAANVKNLLESSEVGHAGLQDVSQDIQEISHESEGLLEINAVMENIASQTNLLSMNAAIEAAHAGEAGKGFAVVADEIRKLAESSGEQSKTIGTVLKKIAESIHKITSSTENVLHKFEAIDSSIKTVSQQEENIRNAMEEQGEGSKQLLHSAGDLNESTQQVKTGSNEMLVGSREVMKESRNLEKLTQEITGGMNEMATGADQMNVAVHHVNEISGKNREAIDILMKEVSRFKVQ

SEQ ID NO: 34201 - DNA, 504 bp, Unknown
  Obtained from environmental sample
  misc_feature (1)..(504): n is a, c, g, or t
atgccgccggttatttcctgcgttaacttttcaagattccggctctctttcataacttccctgctgccaacaagcatttcattggaaccggtctttacctgctgggttgattcattcaaatctccggcgctgtgcagaagctgcttgcttccttcaccctgttcctccatcgcgttgcggatattttcttcctgctgcgaaactgtctttatgcttgaatcaatcgcctcgaatttatgcagtacgttttcggtggaacttgtaattttatggattgactccgctatctttttcaataccgtaccaattgttttggactgctcgccggaactttccgccagcttgcggatttcatcggctactaccgcaaagcccttgcccgcctctccggcgtgggcggcttcaatagcggcgttcatcgaaagcagattggtctggcttgcgatgttttccattacagcgttaatttccaacaggccttcggattcgtgggatatctcctga

SEQ ID NO: 34202 - protein, 167 aa, Unknown
  Obtained from environmental sample
  misc_feature (1)..(167): Xaa is any amino acid
MPPVISCVNFSRFRLSFITSLLPTSISLEPVFTCWVDSFKSPALCRSCLLPSPCSSIALRIFSSCCETVFMLESIASNLCSTFSVELVILWIDSAIFFNTVPIVLDCSPELSASLRISSATTAKPLPASPAWAASIAAFIESRLVWLAMFSITALISNRPSDSWDIS

SEQ ID NO: 34203 - DNA, 900 bp, Unknown
  Obtained from environmental sample
  misc_feature (1)..(900): n is a, c, g, or t
atgacggacgccattgccgagcgttcggtgaagatctacaggcttgcggacagcgatcctattttggagattattaagtcgcgtacgctgcgcggctgcttcttggaaggcaccaccaccatcggcgcggttactcagcatttacgcggcgagtatgagattaccttggtggatgacgatagcgccgcgtacatgatgctcaaaagcgggaaagtcgacgcctactttgaggaaaatacggcggaggccgtttttaaccgctacggcgacgtaatagccgaggatttcctgcccgttatatataatcccgtttccatgaccaccgctaaccccgaacttaaggatatcatctccgtggtgcaaaaggcgctgcaaaacggctctataggctatttgacaagcctgtataacaaagggggggacgcgtatagacggcacacgctgtttatgagattatccgatgaggagaaggcgtatatacgcgacaacccggtcgtatcgtttgccgccgaatatgataattatcccgtcagtttttacaacagatatgagaacaaatggcaggggatagcccatgatgtgctgagagagttggaagagcttaccggtttgacctttgagataacaaatgatgaaaacgcggaatggacggagctgttgaacaaactttcgcgcggggaagtgtctatgataagcgagcttttgcgttttccggaacgcgaagaatcgtttttgtggccgaaagcggcgataatgaccgaccactacgcgctcatatccaaattgagttatccgcgtattcgcataaacgacgtactgagcgtctcagtaggtttgattagggcgacggcctacgcctcattgttcagaagctggtttccgaccataaaaacatcgtga

SEQ ID NO: 34204 - protein, 299 aa, Unknown
  Obtained from environmental sample
  misc_feature (1)..(299): Xaa is any amino acid
MTDAIAERSVKIYRLADSDPILEIIKSRTLRGCFLEGTTTIGAVTQHLRGEYEITLVDDDSAAYMMLKSGKVDAYFEENTAEAVFNRYGDVIAEDFLPVIYNPVSMTTANPELKDIISVVQKALQNGSIGYLTSLYNKGGDAYRRHTLFMRLSDEEKAYIRDNPVVSFAAEYDNYPVSFYNRYENKWQGIAHDVLRELEELTGLTFEITNDENAEWTELLNKLSRGEVSMISELLRFPEREESFLWPKAAIMTDHYALISKLSYPRIRINDVLSVSVGLIRATAYASLFRSWFPTIKTS

SEQ ID NO: 34205 - DNA, 864 bp, Unknown
  Obtained from environmental sample
  misc_feature (1)..(864): n is a, c, g, or t
ttggcctatctccaccagattaccgccgaagatgccgtaaattgccctgtcagtactatctcttgtagcggcagcggtttcgtgcagttcctttgcaccatgagtacttttgtaatctatgggcattggcgggcacgggacattcagccacatcacgtcattggcaatgtcttcgtaatcggagaaattttccttttcaaaatcatcagccaaagggaaatgagcctgctcttgctcactgtagttgtttctaagacttacggcgagtctaccgcgtcaaaaatcatcgctctcgtggaaagcgcgtcgagcaaaaaggccaaaactgaaaacttcattacaactttcgcgaggtactacacgccctccgttgtggccgccgcgatactgatcgccgtcgcgccgccgctgttttttaacggtgtttggatggactggataaaccgcggattgattttcctcgttatctcctgtccgtgcgcgcttgtactgtccatacctatgagttttttcgccggtataggcaaggcggcgaggcggggcattctgatgaagggcggcggttgtctggaaaccataagttgtcttgacaccgtagtgtttgacaagacgggaactctgaccaagggcgtcttcaacgtggtcgagatccgcccggcaagcggattttcgcgcgacgccgtgctgtcggcggcggcgagcgcggagtccctctccaatcaccccatcgctctttcaatcgtgcgggagtacggtaaagaggtggataagaacgaactgtctgagtacaacgaacagccgggcttcggcgtgagcgttgcgggcgaacggcaaaaccgtttctgcccgnaaacgcgaagttga

SEQ ID NO: 34206 - protein, 287 aa, Unknown
  Obtained from environmental sample
  DOMAIN (6)...(192): E1-E2 ATPase
  misc_feature (1)..(287): Xaa is any amino acid
MAYLHQITAEDAVNCPVSTISCSGSGFVQFLCTMSTFVIYGHWRARDIQPHHVIGNVFVIGEIFLFKIISQREMSLLLLTVVVSKTYGESTASKIIALVESASSKKAKTENFITTFARYYTPSVVAAAILIAVAPPLFFNGVWMDWINRGLIFLVISCPCALVLSIPMSFFAGIGKAARRGILMKGGGCLETISCLDTVVFDKTGTLTKGVFNVVEIRPASGFSRDAVLSAAASAESLSNHPIALSIVREYGKEVDKNELSEYNEQPGFGVSVAGERQNRFCPXTRS

SEQ ID NO: 34207 - DNA, 912 bp, Unknown
  Obtained from environmental sample
  misc_feature (1)..(912): n is a, c, g, or t
ttgcacgcgtttgccgcggatccgacaaagatgcatgaagttatatcttatgaactgtttagagatatgggaattcacgctccgcgaacatcctatgccaatgtatatatcaataacaaccttattgggctttttttggcggtggaagaaattgacggcagatttaccaaatccagatggcccgactacggcgatggaaacctttacaaggaagtatggccgcgtaccaccgatacaaaatattatttagacggcctcaaaaccaatgacaagcctgaagataatcctaacgtacaaaaaatggtggcgtattacaatgcgattaactcttcaagcgagcagagttttgagaaaaatctctcttcgtatatggattttgactacctcctgcgctacttggcggtggatgtggccattaagaattgggacggcatgcggtcgtggtattgggatagtaaaaagaatcagggcaataatcacaattatttcttttacgaagaagaagcaaaaaaagcaaacggaaaaacctggattattccatgggatatggatcaagcgttgacgtcaagagacaactactttgacgctgggggtatgggcggggggttccctggcggcgggttcggcggacaaccgctgccgcagtggaatgtgcctaccaccaactgcggagcccaatccgtcgccggcaattcttttatgccgccgaattgcgacaaacttactaaacttatggcggtcaatttttggaaccgttacgtgcagcttggagatttgtttttaaaagacctgttcgtaagccagcgattaaatgaaaaaataaccaaacattcaaatttgatcacgtccgccgtgcaacaggatcctaatataaatcagagtacatggacgacggatgtcaatagcctttaa

SEQ ID NO: 34208 - protein, 303 aa, Unknown
  Obtained from environmental sample
  misc_feature (1)..(303): Xaa is any amino acid
MHAFAADPTKMHEVISYELFRDMGIHAPRTSYANVYINNNLIGLFLAVEEIDGRFTKSRWPDYGDGNLYKEVWPRTTDTKYYLDGLKTNDKPEDNPNVQKMVAYYNAINSSSEQSFEKNLSSYMDFDYLLRYLAVDVAIKNWDGMRSWYWDSKKNQGNNHNYFFYEEEAKKANGKTWIIPWDMDQALTSRDNYFDAGGMGGGFPGGGFGGQPLPQWNVPTTNCGAQSVAGNSFMPPNCDKLTKLMAVNFWNRYVQLGDLFLKDLFVSQRLNEKITKHSNLITSAVQQDPNINQSTWTTDVNSL

SEQ ID NO: 34209 - DNA, 954 bp, Unknown
  Obtained from environmental sample
  misc_feature (1)..(954): n is a, c, g, or t
atggataatgaactcaacgagccgcagctaaaggcggtaaaccggctcgacggggcaatcttcataatagccggggcagggtccggaaagaccagggtcattaccttccgtattgcccacatgctgaaaaagggcatcccccagtccgcgattctggccctcacctttaccaacaaggctgcccgggaaatggaaaccagggtaaaggaacttacaggaaaaaaactccagagcctgagtataagcacctttcacgcctttggggtgaggattctgcgggaagaaatcgaaagtctgggctacaggaagaacttttcgatttacgatgagacagaccgcacggaactaatcaaggagtgcctccgggaaatcaaacatacctctgagggcgtcgatctttacggcctgggccagattttttcaaacgtcaagatcggccgctttgaatggggccatgccagcggcatagccgatacgggccgctacgcggacccggtgtgggagccggtttacaatgaataccagcggagcctcaagatttttaacgccctggactttgacgatctcttgactgtccccatcagcatctttgagcaatttcccgaaatccttgaaaagtaccgccgccgttaccgctatatcatggttgatgagtttcaggacacgagccttattcagtacaaactaatgaagatgcttgcggaccggagtcaggtggacgcgactccgggtacacgggccaatgtctgcgtggtgggtgatgacgaccagtccatctactcctggcggggggcgagttacgaaaatctccttcgttttgaaaaggatttccccggtaccgaggaaattaagctggagcagaactaccggtccaccaccaccattcttgaggctgccaacggggtcatttcaaataataccaaccgcaaggctcggccgaatctgtcctgttaa

SEQ ID NO: 34210 - protein, 317 aa, Unknown
  Obtained from environmental sample
  DOMAIN (5)...(317): UvrD/REP helicase
  misc_feature (1)..(317): Xaa is any amino acid
MDNELNEPQLKAVNRLDGAIFIIAGAGSGKTRVITFRIAHMLKKGIPQSAILALTFTNKAAREMETRVKELTGKKLQSLSISTFHAFGVRILREEIESLGYRKNFSIYDETDRTELIKECLREIKHTSEGVDLYGLGQIFSNVKIGRFEWGHASGIADTGRYADPVWEPVYNEYQRSLKIFNALDFDDLLTVPISIFEQFPEILEKYRRRYRYIMVDEFQDTSLIQYKLMKMLADRSQVDATPGTRANVCVVGDDDQSIYSWRGASYENLLRFEKDFPGTEEIKLEQNYRSTTTILEAANGVISNNTNRKARPNLSC

SEQ ID NO: 34211 - DNA, 726 bp, Unknown
  Obtained from environmental sample
  misc_feature (1)..(726): n is a, c, g, or t
ttgaccttctgcctcgccattgttatcatattctctcgggagggacacatgacactctggtttgccagcggaaatatccataaaaaaaaggaactcgcggatattctatccggtgatattctatccgtggacatacttgccggtattgggggtttggagcttaaaatcccaaaagacttgggacttaactttgaacctgaagagaccgggcacagctttcttgaaaacgcccttattaaagccgaggaattgtaccgccttctggaaacgcaaaacacgggcgaaagttttcacatggtgatagcggacgactcaggcatttgcgtggacgccctggaaggaaggccggggattcattcggcacggtatggaatgtcaaacaatggggaaaaaataagcgacacagaaaagaacgctatgcttcttgccgagcttggggataaccaaaggcgaaacgcgcgttttgtgtgtgccatggttttatactgcggcccagaccgtttctatgccgcccaggaaaccatggaaggacaattggtcgtgaatgcggaagctgcaaggggcaaaggcggttttggctacgatccaattcttttcattccggaattaggccgcaccgtggcagagctttcagaagaagaaaagaacaaacacagccaccgcggcaaggccggaagggtaatcgcgaaaattttatcatcagctttgttggataccaatggataa

SEQ ID NO: 34212 - protein, 241 aa, Unknown
  Obtained from environmental sample
  DOMAIN (19)...(232): Ham1 family
  misc_feature (1)..(241): Xaa is any amino acid
MTFCLAIVIIFSREGHMTLWFASGNIHKKKELADILSGDILSVDILAGIGGLELKIPKDLGLNFEPEETGHSFLENALIKAEELYRLLETQNTGESFHMVIADDSGICVDALEGRPGIHSARYGMSNNGEKISDTEKNAMLLAELGDNQRRNARFVCAMVLYCGPDRFYAAQETMEGQLVVNAEAARGKGGFGYDPILFIPELGRTVAELSEEEKNKHSHRGKAGRVIAKILSSALLDTNG

SEQ ID NO: 34213 - DNA, 498 bp, Unknown
  Obtained from environmental sample
  misc_feature (1)..(498): n is a, c, g, or t
ttgccgcgcacgatccttataaacattattgcattcaaactcttcaaggatgtcgaagacgtccactcggagttccgcccgatggaggtcaaccgccatacgttgctcacggataggatgtcgctacattacttcgagttgccgaaactgcctaaaatcgaggatattaacgcatccgacgaagtagagctgtggcttgccgcgattaacgcgaaaaccgaagaacaactgtcaacaatcaaaactataggaggagagcctatggaacagttagtagaagcgtatcacaatgtggcggcgtcgtccgaattccgggagatggtacgtcaaagagaacgcgcacgacacaacgaagcgtcggcgctagccaatgcagaattaaaggcgcgacgagaaatcgtcaagaatatgtacagtgagggcttcgatgttgcagacattgtaaaagccactaaattctcggaaaaggacatcaaagatattttgggcgtaaactaa

SEQ ID NO: 34214 - protein, 165 aa, Unknown
  Obtained from environmental sample
  misc_feature (1)..(165): Xaa is any amino acid
MPRTILINIIAFKLFKDVEDVHSEFRPMEVNRHTLLTDRMSLHYFELPKLPKIEDINASDEVELWLAAINAKTEEQLSTIKTIGGEPMEQLVEAYHNVAASSEFREMVRQRERARHNEASALANAELKARREIVKNMYSEGFDVADIVKATKFSEKDIKDILGVN

SEQ ID NO: 34215 - DNA, 552 bp, Unknown
  Obtained from environmental sample
  misc_feature (1)..(552): n is a, c, g, or t
atgaagtacgatgtaattttagcgggggttgggggacagggggttctttccgtcgcgtccattatcgcccaggccgcggttagcgaaggttttgaggcgcgtcagagcgaagtacacggtatggcgcaaaggggaggggcggttcttgcctctttacgcatcgccaagaaaaagatagcgggcgatcttgtgccgaaagggggcgcggatttaataatttccatggagccgcttgaaagcctgcgttatttgtcatatctcaagccggacggcatacttattaccgcggcggaaccgtttatcaatatcgggaattatcccgacattaacggtatttattccacggttaagaaactgccgaaatggcggattattcagacggcggccctcgcgaaagaagcggggctttcaaaaaccgtaaataccgtcatggtgggggcggcctcgtgctttctgccgttaaaagcggaaagtcttgagaagactattaccgaagtttttttcagaaaagacgcgaagacggcacaagctaacacaaagcttttaaactag

SEQ ID NO: 34216 - protein, 183 aa, Unknown
  Obtained from environmental sample
  SIGNAL (1)...(25)
  DOMAIN (11)...(183): Pyruvate ferredoxin/flavodoxin oxidoreductase
  misc_feature (1)..(183): Xaa is any amino acid
MKYDVILAGVGGQGVLSVASIIAQAAVSEGFEARQSEVHGMAQRGGAVLASLRIAKKKIAGDLVPKGGADLIISMEPLESLRYLSYLKPDGILITAAEPFINIGNYPDINGIYSTVKKLPKWRIIQTAALAKEAGLSKTVNTVMVGAASCFLPLKAESLEKTITEVFFRKDAKTAQANTKLLN

SEQ ID NO: 34217 - DNA, 333 bp, Unknown
  Obtained from environmental sample
  misc_feature (1)..(333): n is a, c, g, or t
atgcagggggcttttgtgtccgaagaagaagtcgaggcggtggtggcccatgtaaaaacattcggcgaacctgattatattgacgatgaaatcttttttgatgaagaagaggaagaagccgagccgtctcttttctccggcgccgatgatcccctgtacgaaaaagccctggagatcgtcatgcagcagggaaaggccagcgccagttacatacagcgccgcctgaaaatcggctacaaccgcgccgcccgccttgtagaagaaatggaacacaggggcgttgtcggtccggcgcaggggtcaaaaccgcgggaactattgcgcggggtataa

SEQ ID NO: 34218 - protein, 110 aa, Unknown
  Obtained from environmental sample
  misc_feature (1)..(110): Xaa is any amino acid
MQGAFVSEEEVEAVVAHVKTFGEPDYIDDEIFFDEEEEEAEPSLFSGADDPLYEKALEIVMQQGKASASYIQRRLKIGYNRAARLVEEMEHRGVVGPAQGSKPRELLRGV

SEQ ID NO: 34219 - DNA, 666 bp, Unknown
  Obtained from environmental sample
  misc_feature (1)..(666): n is a, c, g, or t
atggatcacatgatgcccgaaatggacggcattgaagcaacggcggccatccgcgcatgggaaaaagaacaacaggaaaaaaatccggaccatccgcaaactactatagttgccctgaccgccaatgctgttgtaggaatgcgggaaatgtttatcgaaaatgatttcaatgattttcttgcaaaaccaatagatgtttccaaactggatgaaatactcgaccgctggataccgagggaaaaaagggcaatgaatgaaaaacaaaataatccaccggataaagataccaattcttcattgtcttctattcccggcgttgatactcaaaaaggcatcgacatgacaggcggaaccattgacaattataaacaggtgctgtttatgttttgcaaagacgcgaaagccagactgccgttgctgcaagaaacacctgaaggggacgaattaaccgtattcattacccaggttcacgccctgaaaagcgcgtcggcaactctgggagcggaaaaattttcaaaggaagcagaagagcttgaatacgcaggcaaagcggtagacatggcctttatccgcgaacatctgggcgcttttgcacagcggcttgcggaactgatacgcaatattgagaaagccatagatgataactcggccgctcggccgatctga

SEQ ID NO: 34220 - protein, 221 aa, Unknown
  Obtained from environmental sample
  DOMAIN (124)...(207): Hpt domain
  misc_feature (1)..(221): Xaa is any amino acid
MDHMMPEMDGIEATAAIRAWEKEQQEKNPDHPQTTIVALTANAVVGMREMFIENDFNDFLAKPIDVSKLDEILDRWIPREKRAMNEKQNNPPDKDTNSSLSSIPGVDTQKGIDMTGGTIDNYKQVLFMFCKDAKARLPLLQETPEGDELTVFITQVHALKSASATLGAEKFSKEAEELEYAGKAVDMAFIREHLGAFAQRLAELIRNIEKAIDDNSAARPI

SEQ ID NO: 34221 - DNA, 777 bp, Unknown
  Obtained from environmental sample
  misc_feature (1)..(777): n is a, c, g, or t
atgaatacaatacggttccagcataaaccgatcagattcactctgctggtggcagaggatatccccctggaactgatcggcgacgaattacgcattaagcagattttaaacaatttgctgtccaacgcctttaaatatacgaactcaggcgatgtaacgctgtcttttaccgttgagaaaccatacggtgaagcgccggcgtcacttgcagtgccggcgtcacttgcagtgccggcgtcacttgcagtgccggcgtcgcaagcgaagatgacagaccttattatccgcgtcagcgacacgggacaaggtatgacagaggcgcagattaaggtgctgtttgacgaatacacccgctttaactcggaaagcaacaggaaaatttcaggcaccgggcttggcatggccatcaccaataatttagtcaacctgatgaacggaaaattaatcgtgcaaagcgcgcccggcgagggaaccgtgattacggcccgaataccgcagaagatcgcgggttcgggaacgcttggcccgatagtcgcggagaatttaatggcgttaaatttttccgcaacatcgcaaaagaaaaacaaaaagcttgtccgtgagcccatgccctatggaaaggtgcttattgttgacgacatgaagtccaatctggatgtcgccgtttttatgcttacaccttaccagcttcaaattgacattgcggagagcggcgccgaagcggccgccttaatcgaaaaacgaaagagtatgacattatactcatggatcacatga

SEQ ID NO: 34222 - protein, 258 aa, Unknown
  Obtained from environmental sample
  DOMAIN (27)...(167): Histidine kinase-, DNA gyrase B-, and HSP90-like ATPase
  misc_feature (1)..(258): Xaa is any amino acid
MNTIRFQHKPIRFTLLVAEDIPLELIGDELRIKQILNNLLSNAFKYTNSGDVTLSFTVEKPYGEAPASLAVPASLAVPASLAVPASQAKMTDLIIRVSDTGQGMTEAQIKVLFDEYTRFNSESNRKISGTGLGMAITNNLVNLMNGKLIVQSAPGEGTVITARIPQKIAGSGTLGPIVAENLMALNFSATSQKKNKKLVREPMPYGKVLIVDDMKSNLDVAVFMLTPYQLQIDIAESGAEAAALIEKRKSMTLYSWIT

SEQ ID NO: 34223 - DNA, 423 bp, Unknown
  Obtained from environmental sample
  misc_feature (1)..(423): n is a, c, g, or t
ttggctggcgatctgggctatcacgatgaggacggcttcatctacattaaaggccgcaagaaaagcctgattgtaacttccggcggcaagaacatctatcctgaagaaatagaaatccagtttaataattcccgtgtaattggtgaagtccttgttacaggccgcagggagccggtccacgggggcgaacagattatcgctgtaacggttcctaattatgacatgatcaaggaggaccatccgggcagggaaaacgacgaagaatttatcaaaagtttaattaagaaggctgtcgaggaagcgaaccgtggtttgccgggctacaagaaaatcagcgactttatagtacggaaagaaccttttgaaaaaaacgcccagcagaagatacgaaggtttttgtacaaggaatacgagaattcgtaa

SEQ ID NO: 34224 - protein, 140 aa, Unknown
  Obtained from environmental sample
  misc_feature (1)..(140): Xaa is any amino acid
MAGDLGYHDEDGFIYIKGRKKSLIVTSGGKNIYPEEIEIQFNNSRVIGEVLVTGRREPVHGGEQIIAVTVPNYDMIKEDHPGRENDEEFIKSLIKKAVEEANRGLPGYKKISDFIVRKEPFEKNAQQKIRRFLYKEYENS

SEQ ID NO: 34225 - DNA, 480 bp, Unknown
  Obtained from environmental sample
  misc_feature (1)..(480): n is a, c, g, or t
ttgaaaaaaacgcccagcagaagatacgaaggtttttgtacaaggaatacgagaattcgtaatattatgtgggttatatatgcgttgctgtctgcggttttcgccgccttaacttcaattttggcgaaaattggtattcagaatattaattcaaatctggcagtggcaatcagaactgtagttgtattatttatggcctgggttatagtgttttttaccggaaaacataacgatattgtaaatattggccagaaaaacatgctctttttaatattatccggactcgctacaggattgtcctggcttttttattataaagcattacaaattggcgaggcgtcaaaggtaataccgattgataaattcagtttggtaataggtatggtaatggcctttattattttaaaagaaacaataaccgtaaaaacaattatcggcggcgtttttattactattgggacccttgttntgatatnttag

SEQ ID NO: 34226 - protein, 159 aa, Unknown
  Obtained from environmental sample
  DOMAIN (33)...(159): Integral membrane protein DUF6
  misc_feature (1)..(159): Xaa is any amino acid
MKKTPSRRYEGFCTRNTRIRNIMWVIYALLSAVFAALTSILAKIGIQNINSNLAVAIRTVVVLFMAWVIVFFTGKHNDIVNIGQKNMLFLILSGLATGLSWLFYYKALQIGEASKVIPIDKFSLVIGMVMAFIILKETITVKTIIGGVFITIGTLVXIX

SEQ ID NO: 34227 - DNA, 972 bp, Unknown
  Obtained from environmental sample
  misc_feature (1)..(972): n is a, c, g, or t
atgtcagaatcaaagtcatcggccgcatcacatgagctaaacgcgctgggcaaggctcaagcgtaccaactcgcggacattaccaaaacgccgccccagtacggctccctcacacccaggtggctcacgcgcttcctcgagttcaaggggctctcttccggtatctaccgggtcaaccgcgtcaaggagggggagaccccgctcgacgctctctgctcctccgagaagaaaggtttggaaattccgcaggggtacgtggactacgataagaagcccagggagtacatcctaaactcaatctccaccgtcattaatgtggataccgttgtggaagacgtctactcctctccctacgaccagaccaaagagcagctccacctcgccattgaaagcttgaaggagcgtcaggagagccagatcatcaacaacgacgattacggtttgctcaagaatgtcgcgaagagccagattgtaaagcccctcaaggacgcgcccacgccggacgatctcgacgagcttcttacaaaggtgtggaaggaaccctctttctttttggcgcatcctagggcgatcgcggcgtttacgcgcgagtgcacgcggcgcggtgttccgcctgtcacgatgaatcttttcggcggcgtctttatcacgtggcgcggggttcccattatccccaccgacaagctgtttgtagacggagtgaagaaccccaaggcaaagaccggcaagacgaatattcttttggtgcgcaccggcgaggcgaagcgcggggtggtggggctgttccaatccagtttgaccggcgcggccgatcagtctcgcgggctctccgtccgctttaggggcgtggacgacaaaggcgtggcctcttacctgctgtcgatgtactgctcggcggcggtgcttgcggacgacgctctcgccatgcttgaagacgtggaggtgggaacataccatgattacgaccgctaa

SEQ ID NO: 34228 - protein, 323 aa, Unknown
  Obtained from environmental sample
  misc_feature (1)..(323): Xaa is any amino acid
MSESKSSAASHELNALGKAQAYQLADITKTPPQYGSLTPRWLTRFLEFKGLSSGIYRVNRVKEGETPLDALCSSEKKGLEIPQGYVDYDKKPREYILNSISTVINVDTVVEDVYSSPYDQTKEQLHLAIESLKERQESQIINNDDYGLLKNVAKSQIVKPLKDAPTPDDLDELLTKVWKEPSFFLAHPRAIAAFTRECTRRGVPPVTMNLFGGVFITWRGVPIIPTDKLFVDGVKNPKAKTGKTNILLVRTGEAKRGVVGLFQSSLTGAADQSRGLSVRFRGVDDKGVASYLLSMYCSAAVLADDALAMLEDVEVGTYHDYDR

SEQ ID NO: 34229 - DNA, 876 bp, Unknown
  Obtained from environmental sample
  misc_feature (1)..(876): n is a, c, g, or t
atgaaaaatgttaacagaaatcacaagaacagcgtattctcctcactgttcagcaatccggatgttctaagagaactctactcggctattgagggtatccctatccctcaggatattcccatcaatattaataccctttcaaacgtcctttttatgaaacagataaacgacgtttctttcttgctcgacaaacggcttgtcgtgcttattgaacatcagtcgacaataaacgaaaacttgccgtaccgtctgcttgaatacataacacggatatatgagaaaatagttgataaagaaaagaaatatcaaaagaaccttgtgaaaattccaaagcctgaatttatcgtcttgtacaacggcgcggatccttaccctgattatacggaattaaagctttccgacgcttttatggacattgaagggttaaaattgacaggtattgataaaataccgctggaattaattgtaccggtatacaatataaaccaaggacataatcccgaaatattgaaaaagtgcgaaagtctttacggctacagtttttttattagcaagatacgggaataccagacgcaaggattaacgcttgaagaattgataacccccgtgatagaatactgtataaagaacaacatactgaaggactatttggaagctcacgcttcggaggtaataaatatgatttttggcgaatacgacagagaaatggatattgctgtaaaccgcagagaagctagagaagaaggacgcgaagaaggttttaaagaaggcaagctaataatcgctaaaaatttgctttcagaaggttcaacgccagaatttgtacagcgcattacaggactcactttggacgaaattgaagaaataggactgtaa

SEQ ID NO: 34230 - protein, 291 aa, Unknown
  Obtained from environmental sample
  misc_feature (1)..(291): Xaa is any amino acid
MKNVNRNHKNSVFSSLFSNPDVLRELYSAIEGIPIPQDIPININTLSNVLFMKQINDVSFLLDKRLVVLIEHQSTINENLPYRLLEYITRIYEKIVDKEKKYQKNLVKIPKPEFIVLYNGADPYPDYTELKLSDAFMDIEGLKLTGIDKIPLELIVPVYNINQGHNPEILKKCESLYGYSFFISKIREYQTQGLTLEELITPVIEYCIKNNILKDYLEAHASEVINMIFGEYDREMDIAVNRREAREEGREEGFKEGKLIIAKNLLSEGSTPEFVQRITGLTLDEIEEIGL

SEQ ID NO: 34231 - DNA, 567 bp, Unknown
  Obtained from environmental sample
  misc_feature (1)..(567): n is a, c, g, or t
ttgccctatttcccgcgccatagtgaacgccatgttccctgcctcaagcgctattntgtctgtcggttccaacaacctgtacagcgcctgccgtccctggatactggttttccccttatgcattgtcatctttctgtttttaccgatgaccgccatcgtgtactcccgtttcccaaggtcaatccccacataccttcgtttctcttccatcttgacattagatacaaaatgtattacagtttaaccgtgcgcgggatagacgttgaatgggacgatgacaaaaacgaaagaaacaagcgcgagcatgacggtctcagctttgaagatgcccagtatgtttttaccgatcctgaaaggcttgaacgtcttgaccgaagcgaagggaatatatacggggaagagcgatggcaaaccctgggtatggcgggaaaggttcttttcgcagtctatacagaacgcggggagaagaagcggatcatatcggcgcgcctggccaacaaggcggaacggagaagctataatgggaattacaagatcgacggtatgggttggtcaaaagccacctaa

SEQ ID NO: 34232 - protein, 188 aa, Unknown
  Obtained from environmental sample
  DOMAIN (86)...(176): Protein of unknown function (DUF497)
  misc_feature (1)..(188): Xaa is any amino acid
MPYFPRHSERHVPCLKRYXVCRFQQPVQRLPSLDTGFPLMHCHLSVFTDDRHRVLPFPKVNPHIPSFLFHLDIRYKMYYSLTVRGIDVEWDDDKNERNKREHDGLSFEDAQYVFTDPERLERLDRSEGNIYGEERWQTLGMAGKVLFAVYTERGEKKRIISARLANKAERRSYNGNYKIDGMGWSKAT

SEQ ID NO: 34233 - DNA, 609 bp, Unknown
  Obtained from environmental sample
  misc_feature (1)..(609): n is a, c, g, or t
ttgggtgcaatctntggttcaaaagcttcttcccagatgcaaaatgacctaaaggctgttctggaaattgatccaagcaaaatgaatactggcgatgtaaaggataaggtagcgtcttggcagaaaaccattagcgacctcaaggaagcctacaaaaaccatagcgaagcagatatcgctacaggcacagcggcttctgaggtgttgcacgttggtcctaactactcaacaggtttgggtggtgcagctgcaaatcagataaaggtaaactacaccgctgttgacgtcaaaggcttaggcttgcaagcccaaaccattgacacccgcgaaggtgcccaaaaagctattgacaagcttcaggaaaccatcaaggtgataagtggcaaccgtgcatctataggtacctacatcaaccgccttgactacaccgtcaacaacattgcatctatggaatacaacatccaagacgcagaaagccgcattcgcgacacggacttcgcaaccgaaacgactaacttcaccaggaatcaaatcatggtgcaagccgctacgagcatgttgtcacaagcgaacagcttaccacaatcggttctcggattgattggttaa

SEQ ID NO: 34234 - protein, 202 aa, Unknown
  Obtained from environmental sample
  DOMAIN (109)...(180): Bacterial flagellin C-terminus
  misc_feature (1)..(202): Xaa is any amino acid
MGAIXGSKASSQMQNDLKAVLEIDPSKMNTGDVKDKVASWQKTISDLKEAYKNHSEADIATGTAASEVLHVGPNYSTGLGGAAANQIKVNYTAVDVKGLGLQAQTIDTREGAQKAIDKLQETIKVISGNRASIGTYINRLDYTVNNIASMEYNIQDAESRIRDTDFATETTNFTRNQIMVQAATSMLSQANSLPQSVLGLIG

SEQ ID NO: 34235 - DNA, 645 bp, Unknown
  Obtained from environmental sample
  misc_feature (1)..(645): n is a, c, g, or t
atgaagcaagttacgatccgggtaaatgaccggggtccctttgtcagctccagaattattgatttatcaatggctgcggcggaagccctggacatgataaacaccggaacagcccctgtgatcgtcgaaaaagccttgaataccgttttgggacctgtactgggacagatatcggaaaataaaataacagctccgattaccacgtcaattacagcgagtaccgattcagaagagataataaagcaaaaaccctcggcttttcaggctactcctgagcctgccacccagctggaaattgttaatgtcccggctgatgagccaatggttcaggaatacatcagtacgccctcaccgaaagcccaggaattctacaacacgcctgcggcaaaaattgtaggaaccattccaccgcccacaagctccaaatcttaccgactccaggtgggagcgtttacagtaccgcgaaacgcgttaaacgcgttcgacaaactaaaaagcgcagggctgaatcccgcttacgagcaaaacggcgaattctaccgcgttgtacttgcggggttaaaggccagcgaaatacagacaatcgcgcagatacttgcgaataacggatttcatgaagcaataatcagggaagaaacaaactaa

SEQ ID NO: 34236 - protein, 214 aa, Unknown
  Obtained from environmental sample
  DOMAIN (140)...(211): Sporulation related domain
  misc_feature (1)..(214): Xaa is any amino acid
MKQVTIRVNDRGPFVSSRIIDLSMAAAEALDMINTGTAPVIVEKALNTVLGPVLGQISENKITAPITTSITASTDSEEIIKQKPSAFQATPEPATQLEIVNVPADEPMVQEYISTPSPKAQEFYNTPAAKIVGTIPPPTSSKSYRLQVGAFTVPRNALNAFDKLKSAGLNPAYEQNGEFYRVVLAGLKASEIQTIAQILANNGFHEAIIREETN

SEQ ID NO: 34237 - DNA, 783 bp, Unknown
  Obtained from environmental sample
  misc_feature (1)..(783): n is a, c, g, or t
gtggcaaaaggttctgactgccctttggagattcttcccatatcggttcattttcgatttggatcctggggcaactttacacttgaattgttacttaaaaaaatagaaaaggtttgcggatttttcggtacacacagaaaaaaaatgcttttcaccgaaagggtacggcaatgcagggatcatgtccttgaagttatcgaaaatcgttatcaaattaaaacagaaacttccgattcttttgaagaacgccttggcaaggttattagtatagcccttgggactgcggaacggatgttgggtgttaaagccgagagagatttcttttccagaatgtacagagtgcgtcagatctgctgggatcgaattttccttccgggggttgataatttggaagggatgtctgctgttgagcgtagctccgttgatctgaatgccggagaggcgtggtatatagcacggcatatggagctggtggattttagctggtactttcgtattccgctcccgacagaagaaacggttatccataaaaaggttgaatatgttcagaatctctgggattttgccaaccgcgccatggggggcgcattcaataacagggtaagtattttcccgcgaaaagtaattatacatactgctccggcaatcaacctaagcgagcgccttccatcctataacaaagataagaaagcggaaatcgcgttggcaatatcggacttggagaaggctttccttgactgtattactgaagcaaacggtattgccgacggcaggaagaaatag

SEQ ID NO: 34238 - protein, 260 aa, Unknown
  Obtained from environmental sample
  misc_feature (1)..(260): Xaa is any amino acid
MAKGSDCPLEILPISVHFRFGSWGNFTLELLLKKIEKVCGFFGTHRKKMLFTERVRQCRDHVLEVIENRYQIKTETSDSFEERLGKVISIALGTAERMLGVKAERDFFSRMYRVRQICWDRIFLPGVDNLEGMSAVERSSVDLNAGEAWYIARHMELVDFSWYFRIPLPTEETVIHKKVEYVQNLWDFANRAMGGAFNNRVSIFPRKVIIHTAPAINLSERLPSYNKDKKAEIALAISDLEKAFLDCITEANGIADGRKK

SEQ ID NO: 34239 - DNA, 795 bp, Unknown
  Obtained from environmental sample
  misc_feature (1)..(795): n is a, c, g, or t
atgaaatacttcaatccagcgaatttagccgtaattgcgtgtcccggcggggaaattttcgctgatgaggtaattcaacaccttcgtcataaataccattatagtagaaaacagaccgttgaaagtatttcaaaacgttacaatatgagcgcggatcaggtagacctgcaaatagaccttataaataaaattgtggcgcggggaacggccgcccaaagcggtactataaaaaatagcgcacagtttaaaattcccgttaaattttcagtttttcccaatggtgaaataaaatctgaaattcaagagtcaattcggggcaaggacgtgtatatttttcaggatgtggaaaaccattatcctgtaaaattttcaggtgaagccgtaaataatctgtccataaacgatcatttaatgaccctttttgtcacgattgacgctgctcatcaggccggggcggagagggttactcttgtaataccgaattatccttattcacgccaacacaaggcaaagggaagggaagggcttaccgcgagcagaatcggaaaaatttttgaaagccttggggtagacagtattattacgttggatattcattccagggacatcatgaatatttttaacgatctgcgccttgaaaatcttcatgccagttatcagattattcaaacccttataaatatggatgatattttaaacgatgattttgtcgtagtttcccccgacacgggcgcggtggacaggaataaattttacgcttccgccttaaaaaagnccgttggcgttgatatataa

SEQ ID NO: 34240 - protein, 264 aa, Unknown
  Obtained from environmental sample
  SIGNAL (1)...(21)
  misc_feature (1)..(264): Xaa is any amino acid
MKYFNPANLAVIACPGGEIFADEVIQHLRHKYHYSRKQTVESISKRYNMSADQVDLQIDLINKIVARGTAAQSGTIKNSAQFKIPVKFSVFPNGEIKSEIQESIRGKDVYIFQDVENHYPVKFSGEAVNNLSINDHLMTLFVTIDAAHQAGAERVTLVIPNYPYSRQHKAKGREGLTASRIGKIFESLGVDSIITLDIHSRDIMNIFNDLRLENLHASYQIIQTLINMDDILNDDFVVVSPDTGAVDRNKFYASALKKXVGVDI

SEQ ID NO: 34241 - DNA, 678 bp, Unknown
  Obtained from environmental sample
  misc_feature (1)..(678): n is a, c, g, or t
atgaacacgggcgcggacgtcgccgtgagcgcaaacggtcttttaactacaatcgccgccgggttaagcgaaaaagttcaatacgcgcttgagggttcagtctttacgggcggcgcggttattcaatggttacgggacgaattgcgtattattaccgacagcgcggacagcgaatattatgcggagaaagtaaagaataccggaggcgtctatcttgttccggcgtttaccggtcttggcgcgccgtattgggatatgtacgcgcgaggctgtataatcgggatcacgcgcggaacaaaaagagcgcatattatcagggcggcgcaggaatccatcgcgtatcaggtaatggatcttttaaacgccatggaaaacgatcttggagtaaaactaaaagagttaaaagttgacggcggcgcgagcagggataaattccttatgcagtttcaggcggatatgtgccgcgcgcggattatacgccctattgtccgcgaaacaacggctctcggcgcggcgtgccttgccggaattaccgttggtttttggaaagatttaaacgaggtaaaaagccgctggcgtgaggacactgttttttcacctgaaatggacaatgaaaaacgcgataaattaatcgccggctggcataaagcggtggaaagaagccgcggctgggcttga

SEQ ID NO: 34242 - protein, 225 aa, Unknown
  Obtained from environmental sample
  DOMAIN (1)...(209): FGGY family of carbohydrate kinases, C-terminal domain
  misc_feature (1)..(225): Xaa is any amino acid
MNTGADVAVSANGLLTTIAAGLSEKVQYALEGSVFTGGAVIQWLRDELRIITDSADSEYYAEKVKNTGGVYLVPAFTGLGAPYWDMYARGCIIGITRGTKRAHIIRAAQESIAYQVMDLLNAMENDLGVKLKELKVDGGASRDKFLMQFQADMCRARIIRPIVRETTALGAACLAGITVGFWKDLNEVKSRWREDTVFSPEMDNEKRDKLIAGWHKAVERSRGWA

SEQ ID NO: 34243 - DNA, 522 bp, Unknown
  Obtained from environmental sample
  misc_feature (1)..(522): n is a, c, g, or t
atggggcatggcgacttgtccccgccaggggcggcccccgccgccggagccaaaggccgcttttgccccggacaatgccttgtcggcctccggtttgccgtggatcagggcggtcacttcccaggcgaggcgctctttcgcctcgttggggtttttgcccggcgctgtcagcgcctcacattccccgatttgcaggaaggtgaacataagcaaaaagcggcgtatgtccgcatcctgcacgttgcgccagtactggaaaaaatcgtaggggctggtcagcgccgggtcaaggaaaagggctcctttctcggtcttgcccatctttttgccgtcggcggtggtgatcaggggaaaggttatgccaaaaacttccgccccctcaacgcggcggatcagttccacgccggcaacgatattgccccactggtcatcgccgccaatttgcaggcggcatccgtagcggcggtacagttccagaaagtcgtaactttgcaaaagctgataattaaactcgatgaatga

SEQ ID NO: 34244 - protein, 173 aa, Unknown
  Obtained from environmental sample
  misc_feature (1)..(173): Xaa is any amino acid
MGHGDLSPPGAAPAAGAKGRFCPGQCLVGLRFAVDQGGHFPGEALFRLVGVFARRCQRLTFPDLQEGEHKQKAAYVRILHVAPVLEKIVGAGQRRVKEKGSFLGLAHLFAVGGGDQGKGYAKNFRPLNAADQFHAGNDIAPLVIAANLQAASVAAVQFQKVVTLQKLIIKLDE

SEQ ID NO: 34245 - DNA, 387 bp, Unknown
  Obtained from environmental sample
  misc_feature (1)..(387): n is a, c, g, or t
gtgagaatcttcaaaaacaagtggtttcatcggtttgctaacaaggaaggtataactgacagtgagttgaaggaagtagtaaaacggcttgaaaacggacaattctatgccgatttaggcagcggagtctataaaatggaattagccagaaaaggcgaagggaaacatggaggttatcggtcaatcgtcatgttcaaaagcgagtttcgctccttttttgtgtactgttttccgaattcaaagaaggacaatattgaagacgatgatttgagatactataaaaaacaggcaaaagagagattctctttgactgatgaacagataaatgaatggttaaagaaccattcattgatagaaattgtacaggaggaagaaggtgaaatataa

SEQ ID NO: 34246 - protein, 128 aa, Unknown
  Obtained from environmental sample
  DOMAIN (1)...(121): Protein of unknown function (DUF1044)
  misc_feature (1)..(128): Xaa is any amino acid
MRIFKNKWFHRFANKEGITDSELKEVVKRLENGQFYADLGSGVYKMELARKGEGKHGGYRSIVMFKSEFRSFFVYCFPNSKKDNIEDDDLRYYKKQAKERFSLTDEQINEWLKNHSLIEIVQEEEGEI

SEQ ID NO: 34247 - DNA, 789 bp, Unknown
  Obtained from environmental sample
  misc_feature (1)..(789): n is a, c, g, or t
atgataaaacatgtaatgaaaattggacggggtattgaaatgaatatactgattattaacggcagtccaaagaaaaaagacggcgcttcggcgttcttcgcgaaagttttacgctgtatgctttttcaaaacaatgttacaacaataagccctgggatatcaaaaaattaccgggaaatttttattcatcttcaaaatgccgatgctgttataataacggttccgctttatgttgacagtattccctctcatattatacatctcctgaaagagatggaacagtattgtaaaaataatccatgtaaatttatgctttatgtaatttccaatgccggttttgtcggcggacatcataatcaggcgcatctggaacagtataaatgttggtgcgaaagaaccggcattacatggggaggcggattaggcataggcggtggcgtaatgcttcatgtgttttataaaataacgtttatatggacagttatacaaattgttattacaataattaacaacatttttgccaagatatctgttgtagaaagcatttttaatacgttattaccaagtcttgctaattgtatagttttaatgctgattttttacagcggaatgttactttttgattttattctcgcgtgggcaataagaaataaaaaaagcataaaaaataaatacacaagggtgatgttaccttcgtttattttcataatagtcgcgaatatatttatggctttaaccggactatttcacggtaaattgatattttctttgtttaagaaacaggcctaa

SEQ ID NO: 34248 - protein, 262 aa, Unknown
  Obtained from environmental sample
  misc_feature (1)..(262): Xaa is any amino acid
MIKHVMKIGRGIEMNILIINGSPKKKDGASAFFAKVLRCMLFQNNVTTISPGISKNYREIFIHLQNADAVIITVPLYVDSIPSHIIHLLKEMEQYCKNNPCKFMLYVISNAGFVGGHHNQAHLEQYKCWCERTGITWGGGLGIGGGVMLHVFYKITFIWTVIQIVITIINNIFAKISVVESIFNTLLPSLANCIVLMLIFYSGMLLFDFILAWAIRNKKSIKNKYTRVMLPSFIFIIVANIFMALTGLFHGKLIFSLFKKQA

SEQ ID NO: 34249 - DNA, 639 bp, Unknown
  Obtained from environmental sample
  misc_feature (1)..(639): n is a, c, g, or t
atgactgatatagattcgcgttcaattgaaattgaacgctgtgcgccaaagtttttgaaaaactggaaaccccagttttttcaaaaactgacgggcgccggttcccgcagccttataccgatttgcaaccgtttggatgcaaatcggtataaaagctatgcaacgatgcgccgtgaaaagtcccgcaggggcctggccgggttcacgctattcgagctgctcgtgacgcttatgatcctgtcaatactgtctgcggttgccatcccagtaatgaaaaacacgcagcgcagaaacaaggaaatcatactttaccaaacactgcgccagatgagggaagccattgacaactacaaaagggctgccgaccaagggctgatagatcccggccccccagagaattttgggtaccctgcctcgctggaggccatggtggacggagttcaagccaaatctggggctggcacgtaccgctttctgcgccaaatccccaaagaccccattactggaacacccgaatggtctctgcgctccatgaacgatgacgccaaaacgagttcgggggctgggggatgcgtcttcgacatacatagcacggcaaagggaactggcctgaacggcatcccttatgcggaatggtag

SEQ ID NO: 34250 - protein, 212 aa, Unknown
  Obtained from environmental sample
  DOMAIN (89)...(212): Bacterial type II secretion system protein G
  misc_feature (1)..(212): Xaa is any amino acid
MTDIDSRSIEIERCAPKFLKNWKPQFFQKLTGAGSRSLIPICNRLDANRYKSYATMRREKSRRGLAGFTLFELLVTLMILSILSAVAIPVMKNTQRRNKEIILYQTLRQMREAIDNYKRAADQGLIDPGPPENFGYPASLEAMVDGVQAKSGAGTYRFLRQIPKDPITGTPEWSLRSMNDDAKTSSGAGGCVFDIHSTAKGTGLNGIPYAEW

SEQ ID NO: 34251 - DNA, 648 bp, Unknown
  Obtained from environmental sample
  misc_feature (1)..(648): n is a, c, g, or t
atggagaatagtatattacctgaccctaatgttatctttcctgttccaaatataaaaacagtaacttatataaaaccgacaattaaaaataagaatataattgtcggggattttacgtattttagcgataccgattttgaaaaccatgttacacatttttatgatttttacggcgataaattaattatcggtaaattttgtcaaatagcgtcaggtgtggagttcataatgaatgggggcgatcatcaaatgaattgtgtatcaacattcccgttctatatatttgaaaaatggaatgaaaatataccttcattggataaaatgccatttaaaggcgataccgttattggaaatgacgtatggatagggcagaactctacaattttgcctggtgtgaaaattggagatggtgcaattattggaacaaaaagcgttgtgggaagtgatgttgagccgtattcaatagtagcagggaatccagcaaaaattattcgtaaaagatttgatgatgaattgattgaattaatgttgaaatttaaatggtgggatttacccattgaggaaataaataaattaataccattattgcataataatgatttggaatatgttaagggaaaagtgaaagagttatatatcttggcttag

SEQ ID NO: 34252 - protein, 215 aa, Unknown
  Obtained from environmental sample
  misc_feature (1)..(215): Xaa is any amino acid
MENSILPDPNVIFPVPNIKTVTYIKPTIKNKNIIVGDFTYFSDTDFENHVTHFYDFYGDKLIIGKFCQIASGVEFIMNGGDHQMNCVSTFPFYIFEKWNENIPSLDKMPFKGDTVIGNDVWIGQNSTILPGVKIGDGAIIGTKSVVGSDVEPYSIVAGNPAKIIRKRFDDELIELMLKFKWWDLPIEEINKLIPLLHNNDLEYVKGKVKELYILA

SEQ ID NO: 34253 - DNA, 408 bp, Unknown
  Obtained from environmental sample
  misc_feature (1)..(408): n is a, c, g, or t
atgcctgacagcgcgttgttggatttagcgcttcttcgtctcaataaagcgacaagatgtctacagtcagccgagagggcgttagccgccgatgactttgaagacgccgctaatcgctcgtattattgtattttccattcgatgaaagcagttttggcatttgacgagttcaacgctaaaagccacggcgagataatcggcaagttccgcaaggattatataaaaaccgggtttttccatacaaaatattccgatatcatcggagatgccgaagacgttcgtatttactgcgattacgatgattcgtatactgtctcagtaaacggtgtatctgctcaagttgaaagtgcgcgggaatttttagcggacgtagagaagtacgtcggcgagagaatcaaacaccaatga

SEQ ID NO: 34254 - protein, 135 aa, Unknown
  Obtained from environmental sample
  DOMAIN (12)...(132): Protein of unknown function DUF103
  misc_feature (1)..(135): Xaa is any amino acid
MPDSALLDLALLRLNKATRCLQSAERALAADDFEDAANRSYYCIFHSMKAVLAFDEFNAKSHGEIIGKFRKDYIKTGFFHTKYSDIIGDAEDVRIYCDYDDSYTVSVNGVSAQVESAREFLADVEKYVGERIKHQ

SEQ ID NO: 34255 - DNA, 342 bp, Unknown
  Obtained from environmental sample
  misc_feature (1)..(342): n is a, c, g, or t
atgtgcgacaaagccgtcttggacgagataacgtcaagggtctgcgccgccgccaaagaggtcttgggcgacaagttggagaaggtaatcctctacggttcatacgctcgcggggactacaacgaatggtcggatattgatattatgatacttgccgatattcagccggaagaagttgatgaaacgcgtaaaagaatccgtagttttatgaattatattgaactggagtacgatatcattgtcagtttgtctatggtatgcagtaagaattacaatcgatatataaatgttttgccgttctatataaacgtgcaaaaagagggggtagaattgtatgcctga

SEQ ID NO: 34256 - protein, 113 aa, Unknown
  Obtained from environmental sample
  DOMAIN (7)...(111): Nucleotidyltransferase domain
  misc_feature (1)..(113): Xaa is any amino acid
MCDKAVLDEITSRVCAAAKEVLGDKLEKVILYGSYARGDYNEWSDIDIMILADIQPEEVDETRKRIRSFMNYIELEYDIIVSLSMVCSKNYNRYINVLPFYINVQKEGVELYA

SEQ ID NO: 34257 - DNA, 744 bp, Unknown
  Obtained from environmental sample
  misc_feature (1)..(744): n is a, c, g, or t
atgtcggccagtctcgccaagagtatcgacgaaatgacgagaagaatgacggagtccaaagcggagattgacgccgaagccgcgaaaaggagggaggaggccgaagccgaagccgcgaaaaggagggaggaggccgaagctgcgaaaaggagggaggaggccgaagctgcgaaaaggatgaaggagaccgaagcagagctcgcgaaattgagggaggagaccgccgccaaagtcgctgaggcgtccagaatatacaactccctcatggaaaaaatgcgggacgataccgatacgaagttggataagtggataggctacttcgggaacagtatcggcaatatcgtcgagttggtgcttattcccgggataaagaagaaaatgaacgatttggggcataatttcaacgccctatcgccgcgcaagcagtattacagcaaggacgggaagacttacgcggaagttgatttgctccttgaaaacggcgaggaagttatggttgtcgaggtaaagacgcagttgtcggtaaaagaggttgagcgccaaatcaaaaggcttgaattgctgcggaagaacgaaggcggaaacctgaaagggaagacaatctactcggcggtagccggattacagatagacaaagatgcccgcgagatggctcttggtcttggaatgtacgtagtggaaatggtagaggatacgaagagcgtcaacgtaattaagccgtcaggaaagttaggtacgtggtag

SEQ ID NO: 34258 - protein, 247 aa, Unknown
  Obtained from environmental sample
  misc_feature (1)..(247): Xaa is any amino acid
MSASLAKSIDEMTRRMTESKAEIDAEAAKRREEAEAEAAKRREEAEAAKRREEAEAAKRMKETEAELAKLREETAAKVAEASRIYNSLMEKMRDDTDTKLDKWIGYFGNSIGNIVELVLIPGIKKKMNDLGHNFNALSPRKQYYSKDGKTYAEVDLLLENGEEVMVVEVKTQLSVKEVERQIKRLELLRKNEGGNLKGKTIYSAVAGLQIDKDAREMALGLGMYVVEMVEDTKSVNVIKPSGKLGTW

SEQ ID NO: 34259 - DNA, 681 bp, Unknown
  Obtained from environmental sample
  misc_feature (1)..(681): n is a, c, g, or t
gtgctgcataaaaaagccggcgatacctttgaagccggccttcttgacgccggaagcggcagcggccttggccgcggaaaaatcgaaaaagtcggcatagacggttccgtcagtttttcttttgaattggatgctccccctgtcccgcgtctgccggttcgtgtcggggtcggcttcccgcggcccattcagatacgccgcatcttgcgcgatctttccagccttggcgtggaggccatagacctttttggcacggaacttggcgaaaaaagctaccgcgacactaaacttctggacgatggcggggcgcgcgccgccctcattgaaggagccacccagtcgcgcgatactaccattccggcgttaggtgttttttccggcctggcggactggctgcgggaacgcccctgggaaaaatccacactccccatccgcgccgttcccctgcttgtcgccgcagacaatgtacgtcccgagggcgccatgtcgcgcataacccctactatgcgccccatgatactggcgattggatccgagcgcggctggacagatcacgaacgcggtcttctggaagaggcgggctttctccgcctgtctttgggaagccgcgccctgcggactgaaacagcctgcattgccgcggcggttctggcaatagaaaaaatcggcgagttggggtaa

SEQ ID NO: 34260 - protein, 226 aa, Unknown
  Obtained from environmental sample
  DOMAIN (1)...(220): Protein of unknown function (DUF558)
  misc_feature (1)..(226): Xaa is any amino acid
MLHKKAGDTFEAGLLDAGSGSGLGRGKIEKVGIDGSVSFSFELDAPPVPRLPVRVGVGFPRPIQIRRILRDLSSLGVEAIDLFGTELGEKSYRDTKLLDDGGARAALIEGATQSRDTTIPALGVFSGLADWLRERPWEKSTLPIRAVPLLVAADNVRPEGAMSRITPTMRPMILAIGSERGWTDHERGLLEEAGFLRLSLGSRALRTETACIAAAVLAIEKIGELG

SEQ ID NO: 34261 - DNA, 798 bp, Unknown
  Obtained from environmental sample
  misc_feature (1)..(798): n is a, c, g, or t
atgaacacggatcaggtaaaacaaaaacttttacggattgaggacgccccgctggagttttcccttgttttctcggggaaaaaaagtagtaaggtaaacggcctgtacaagcccgacagccgcgagatcgtcatccataaccgcaattttgatcaggacaccgccggggaaaacctgctgttgtacacggcgatccatgaatacgcccaccatctccatgcctgctctcagggcggcaaactctcgccccgttctcatacgtcggaattttgggcgattttccacgcgcttctggaaaaagccgagtcaaaaaaaatctaccgcgacgttttcgcagacgccccggaactaacagcccttaccgaaaccatccgcaaaaaataccttcaggaaaacggcagcctggtcaaggaaatgggcaaacatctcctgaaagcgcatgaactctgcaccgcgataggggtgcgttttgaggactatgttgaccgcgtgttgcgaataccccgtaccgcggcaaacatggcgattaaaatgttcaattacgacctaaacccgcaaacgggcgcagataacatgcgcttcctcgccggtatccgcgacgacggcgagagaaaagccgccgaaaccgccctgctcaaaaataaaagcccagattcggttaaaacggcgattcgccaaaaagccaaaaacgaagaccccacgctgatgcttgaacgggaaaagatccgccttgaacgtaccatacagacgctttccaaacggcttgaagaagtgaaaaaggagcttgggcagaaataa

SEQ ID NO: 34262 - protein, 265 aa, Unknown
  Obtained from environmental sample
  misc_feature (1)..(265): Xaa is any amino acid
MNTDQVKQKLLRIEDAPLEFSLVFSGKKSSKVNGLYKPDSREIVIHNRNFDQDTAGENLLLYTAIHEYAHHLHACSQGGKLSPRSHTSEFWAIFHALLEKAESKKIYRDVFADAPELTALTETIRKKYLQENGSLVKEMGKHLLKAHELCTAIGVRFEDYVDRVLRIPRTAANMAIKMFNYDLNPQTGADNMRFLAGIRDDGERKAAETALLKNKSPDSVKTAIRQKAKNEDPTLMLEREKIRLERTIQTLSKRLEEVKKELGQK

SEQ ID NO: 34263 - DNA, 324 bp, Unknown
  Obtained from environmental sample
  misc_feature (1)..(324): n is a, c, g, or t
atgaaaaataaaataacagaaagttatgtgcgtggtctggtcagtaaaaacctcaggcgattaagatccgttcataatatatcgcagttaaatcttgcgattaacgcgggccttgcgcataattttatcaatgatattgaaaactgcaaaaaaggcatctccgtaaaaacgctcgcaaaactttccgtcgctcttgacgcggaaccgtatcagtttttcctgccggaaaccatgtcagataacaacatgatgcattatgtgaacgattttaacgattcgctccagaaaatggtaaaagagctgacccagcctcggccgatctga

SEQ ID NO: 34264 - protein, 107 aa, Unknown
  Obtained from environmental sample
  misc_feature (1)..(107): Xaa is any amino acid
MKNKITESYVRGLVSKNLRRLRSVHNISQLNLAINAGLAHNFINDIENCKKGISVKTLAKLSVALDAEPYQFFLPETMSDNNMMHYVNDFNDSLQKMVKELTQPRPI

SEQ ID NO: 34265 - DNA, 936 bp, Unknown
  Obtained from environmental sample
  misc_feature (1)..(936): n is a, c, g, or t
atgatgaataaaaacgccgcgccgcccgatctttctgtcaccattgccggtctgcgcctgcaaaatccggttattgccgcgtcggggactttcggttacggcagggagtacgcgggaattattgacgtgtcccgtttgggcggcatttgcaccaagggccttaccctgaatccccgggcgggtaataccggcattcgcctttgggaaactccggcggggctgttgaattccatcgggcttgaaaaccccggcattgccgcttttatcgaaaacgagctgccccatttgcgcacgctggggccggcagttatcgcaaacctttcaggctccacggtagaagaatataccgaaggggcggcgttactgaacgccagttccgttgacatgatcgagcttaatatctcctgtcccaacgtcaaggcgggcggtatggcgtttggcctggaccccgaagcggcggcatcggtggtaacgccggtacgccgcgctctccacaacaagcccctcatggtaaaactttcacctaacgcgccggatttgaccgccgtcgcaaacgcctgcatcaactccggggcggacgcaatttcgctggtcaacacattcaaggcgatggcgatagacgtacaaaaacgcaggcctgtttttgacaatatcagcgcggggctttccggtcccgctatcaggccgattgcacttcgcatggtgtgggaacttcgcggcgccgtcgccgtcccgatagtcggcttgggcggcatcgcctgctccaatgacgcgctggaattcctgatggcgggagcaacggcgctacaggttggttcggcgatattttcgcatcccaatacgatgatcgaaatcattgacggcattgaaagttatatgcgcagctacaaactttccgccgtaggagaaatttccctggaaaaacgaatgggctga

SEQ ID NO: 34266 - protein, 311 aa, Unknown
  Obtained from environmental sample
  DOMAIN (10)...(293): Dihydroorotate dehydrogenase
  misc_feature (1)..(311): Xaa is any amino acid
MMNKNAAPPDLSVTIAGLRLQNPVIAASGTFGYGREYAGIIDVSRLGGICTKGLTLNPRAGNTGIRLWETPAGLLNSIGLENPGIAAFIENELPHLRTLGPAVIANLSGSTVEEYTEGAALLNASSVDMIELNISCPNVKAGGMAFGLDPEAAASVVTPVRRALHNKPLMVKLSPNAPDLTAVANACINSGADAISLVNTFKAMAIDVQKRRPVFDNISAGLSGPAIRPIALRMVWELRGAVAVPIVGLGGIACSNDALEFLMAGATALQVGSAIFSHPNTMIEIIDGIESYMRSYKLSAVGEISLEKRMG

SEQ ID NO: 34267 - DNA, 1173 bp, Unknown
  Obtained from environmental sample
  misc_feature (1)..(1173): n is a, c, g, or t
gtggaaaaaacggtcagacccaaatacgcctgccgttgctgtgaaggaacagaggatgaagagatgccgacagtccgcattgcgcccgtggaaccggcgattattcccaaaagcatagcgagcccaagccttttaagcaccatattcacgcagaagtttgaaatgcatctgccgtattacaggcaggagaaacagtttgagcagataggagctgaaataagcaggcaggatatggccaactggcagcagcaagtatacatgagtcttgaacctttatttgcgttacttgaaaaagcggttaaggacggccctgtaatacagatggacgagactccggtacaggtcatttcagaggcaaagtctggggacgtaaagtcagcggacatgaagcccgaagaggctgacgggaaaaacacgcatgaaagccgtatgtggcttgcccgcggcggatctgtcgggaagaaagtaacatggtatgaatatcacccgacccgcaccgcatatcacgcgaaagagtttttggaaggatattcaagatatctgcaaacggacggatatataggatatgacagcgcgataaaagacatgcccgacattattcatgtggggtgtttcgcccatgcgcgacggaagttttttgaagcggcgaaagtaaacaagaattccaaatccgcgcaggaaggaataaagcatattcgcatgttgtacgacattgagaatgaattacgtgaaaagtttgcgaataacaataacatgttcctgactgaacgcaagacccgcgccggagttgtgcttgaaaagttcaaggcatggcttgagaaacgaaaagaagaagttccctcaagcatgctgttggggaaagcgatatcctacagccttgaccnatggacccagatgatagcgtatcttgaaagcccctatttgacccccgacaacaacgcgtgtgaaaacgcgatccggccttttgtccttgggaggaaaaactggttattctgccagagtgttggcggggcgaaaagttcntgcggcatgtttactcttatagaaacggcaaagcaaaacggtcttattccccgagaatatcttactgtcctctttgagaaagctccttatgccgcaacgttggaagattgggataaactgctcccttggaacattaaactctctgtttag

SEQ ID NO: 34268 - protein, 390 aa, Unknown
  Obtained from environmental sample
  DOMAIN (3)...(200): Transposase IS66 family
  misc_feature (1)..(390): Xaa is any amino acid
MEKTVRPKYACRCCEGTEDEEMPTVRIAPVEPAIIPKSIASPSLLSTIFTQKFEMHLPYYRQEKQFEQIGAEISRQDMANWQQQVYMSLEPLFALLEKAVKDGPVIQMDETPVQVISEAKSGDVKSADMKPEEADGKNTHESRMWLARGGSVGKKVTWYEYHPTRTAYHAKEFLEGYSRYLQTDGYIGYDSAIKDMPDIIHVGCFAHARRKFFEAAKVNKNSKSAQEGIKHIRMLYDIENELREKFANNNNMFLTERKTRAGVVLEKFKAWLEKRKEEVPSSMLLGKAISYSLDXWTQMIAYLESPYLTPDNNACENAIRPFVLGRKNWLFCQSVGGAKSSCGMFTLIETAKQNGLIPREYLTVLFEKAPYAATLEDWDKLLPWNIKLSV

SEQ ID NO: 34269 - DNA, 408 bp, Unknown
  Obtained from environmental sample
  misc_feature (1)..(408): n is a, c, g, or t
ttgatattgagcgattatcttttaaaaaccgatgacgaatatcctatactcaaattgggaaattacgcaagcgaagttttgcgaaacggcaaaaccgtgcaaatgaaactgctgaaagaaaaacaagcaccagaaattacaaccaataaaaaacaaactagaccagttgacaacagattatttgcaattttgcgtgagctgagactagcaatagcaaaagaacaaaacgttccagcattcgtaattttcccagacagcactctgatagatatgtgcatgaaagttcccacgacagatgaggaatttttgaatgtatctggcgttggcaaggtaaaactggaaaggtatggcgaaaaatttttaaaagccattgcagaattcttgcgcaacaatgaaggattaatgtga

SEQ ID NO: 34270 - protein, 135 aa, Unknown
  Obtained from environmental sample
  DOMAIN (54)...(132): HRDC domain
  misc_feature (1)..(135): Xaa is any amino acid
MILSDYLLKTDDEYPILKLGNYASEVLRNGKTVQMKLLKEKQAPEITTNKKQTRPVDNRLFAILRELRLAIAKEQNVPAFVIFPDSTLIDMCMKVPTTDEEFLNVSGVGKVKLERYGEKFLKAIAEFLRNNEGLM

SEQ ID NO: 34271 - DNA, 654 bp, Unknown
  Obtained from environmental sample
  misc_feature (1)..(654): n is a, c, g, or t
ttggagagttataaaaccgccggccgacttggacatcttacctttatccagcaccagaaattcattatgcagccagtaacgcacccagggttttttaccggtcgccgcttcgctctgcgctatctcattggtatggtgaatcggtatatggtcgatgccgcccgcgtgaatatcaaactgttctcccagatatttaatgctcatcgccgagcactcaatatgccatcccggatacccccgtccccagggactgtcccagaccagcgcctgattctcaaatttacttttggtaaaccacagtacaaaatcgtgaggattttttttgtattcgtccacggcagtccgcgccccggctttcagatcatccagccgcagcagggcaagttcgccgtaagcgggaaatttggtaatgtcgaagtagaggttgccccccgcggaataggtatagccgttatctgcaatgcgctggatcagcgcgatcatgtcggcaatatgttcggtagccttgcacactaccgaaggccgcacaatattcaagcggtcggtatcgttaaaaaaagcggcggtatacatttcggcaatttccagcacgctcttgccgcgttcggcggcgctcctgaccattttatcatcgccttcatcattgtcgcctga

SEQ ID NO: 34272 - protein, 217 aa, Unknown
  Obtained from environmental sample
  misc_feature (1)..(217): Xaa is any amino acid
MESYKTAGRLGHLTFIQHQKFIMQPVTHPGFFTGRRFALRYLIGMVNRYMVDAARVNIKLFSQIFNAHRRALNMPSRIPPSPGTVPDQRLILKFTFGKPQYKIVRIFFVFVHGSPRPGFQIIQPQQGKFAVSGKFGNVEVEVAPRGIGIAVICNALDQRDHVGNMFGSLAHYRRPHNIQAVGIVKKSGGIHFGNFQHALAAFGGAPDHFIIAFIIVA

SEQ ID NO: 34273 - DNA, 1302 bp, Unknown
  Obtained from environmental sample
  misc_feature (1)..(1302): n is a, c, g, or t
atgttaatgaaaaccttgtctttaccctacggtaaggaacacctgaccgccgaaattccggagagtcgttataaaggcgaaatggtttccagcctccattcgtatcaggctgaaatgagtgcggaatatctggtagatcaagccttgaccaatcccgttggtacgcctccgttacacgttatggcgcagggtaaaagaaaggtggttatcatcgcaagcgatcacacccgtccggttccaagcaggatcattgtaccgaggatgttggctgaaattcgcaaaggcaatcccgatgcagaaataaccattcttatagcctcaggctgccacagggcagccacaaatgcggaactggaagataaattcggaaatgaaatattcggaaaggaaaagattgtaatccacgactgcgattctaaggatatggtgaatataggcaagcttccctcagggggagaaataatcattaaccgtctggctgtggaagccgacctgttgacagcggaaggttttatagagccgcatttttttgccggattttcagggggccgcaaaagcgtactccggggaattgccgggtatgaatgcgtggttcaaaaccactcttccgcttccattgccgataaaaatgccgccagcggcgtactcgacgaaaaccccgtccaccgggatatgatgttcgccgcggaagcggcgggccttgcgtttatcctgaacgtgacgcttggcgaagggcggaaaatcgacaacgcggtctgcggcgaccccgcgctcgcgcataaagaagggtgcgcgcgccttttaaagaaagcagcggtaaagcgcgtaaaagcgcctatagtcatctcgaccaacggcggctatcctctcgaccagaatttgtatcagcttgtgaagtgcatggatacggcggagaaatgctgtgaagaaggtgggattatcatcgccgccggagagtgccgggacgggatcgggggcgaaggtttttataacgatttcgcggggggagaaagcccgcgcgagttgacagagcgttttctttcgcgcaagccttccgagacaaaaggtgatcaatgggaatcgcaaatcctcgcccgcatactacaaaagtttcgcgtaatagtcgtcgctccgctgataaaggatatcctgaaaaacatgggccttggttttgcggcaaaccttgacgacgcgcttgccctggccggcaaatggcttggaaagccgcagggcggggaagcggatattgttgtgatacccaacggcctggaagtcattattgtagacacccctgcgatgtaa

SEQ ID NO: 34274 - protein, 433 aa, Unknown
  Obtained from environmental sample
  misc_feature (1)..(433): Xaa is any amino acid
MLMKTLSLPYGKEHLTAEIPESRYKGEMVSSLHSYQAEMSAEYLVDQALTNPVGTPPLHVMAQGKRKVVIIASDHTRPVPSRIIVPRMLAEIRKGNPDAEITILIASGCHRAATNAELEDKFGNEIFGKEKIVIHDCDSKDMVNIGKLPSGGEIIINRLAVEADLLTAEGFIEPHFFAGFSGGRKSVLRGIAGYECVVQNHSSASIADKNAASGVLDENPVHRDMMFAAEAAGLAFILNVTLGEGRKIDNAVCGDPALAHKEGCARLLKKAAVKRVKAPIVISTNGGYPLDQNLYQLVKCMDTAEKCCEEGGIIIAAGECRDGIGGEGFYNDFAGGESPRELTERFLSRKPSETKGDQWESQILARILQKFRVIVVAPLIKDILKNMGLGFAANLDDALALAGKWLGKPQGGEADIVVIPNGLEVIIVDTPAM

SEQ ID NO: 34275 - DNA, 855 bp, Unknown
  Obtained from environmental sample
  misc_feature (1)..(855): n is a, c, g, or t
atggggcaacggctccttgttttggacgctgacggcgcattcatagacgaacatagggcggtgctggagttggtctttgacgttgatttcgctgcctcttccgataacgtggtcaggatgctggaagggggcgactacgccgccgctctggtcagcgcggagatagacgacaacaagggctacgctgtctgcgcgaacatccgcaacaaccgtcgcctttcaaacttcaagatcgtcctgattagctcaaacgccaccaaggccgatttcgagcggcacaaaaaactgagggttcgcgccgatcaatacctgcacaagcccattcaggccgagacccttgtggaggagcttagtgccttcgtccccaagaaggcttccgcgctggacggcacgctagacgccctcatgggcttcgacattgacgagaattggctggcaagcttggacagcgctgaacctgccgcaaagagcggggcaggcgacgacatgcaggaagaaactgggggcgcgcctagttgggaggacgcccatgcggcggccatgggcaggttgatcacggaactgcgggtcaagaccttggacctcgcgcaggcgcggcaggagattgcggaactccatggcaccgtgaccgcgatggcggtggagcttggcgcgagggaagcggaactacagtcaaagacaatcgaactgctggaggccaggcaggacatccagcaactgcaacgtaaaaatgacacaatcacggtcaacctggaggagctggaagagcgccagagggtgtttggggacatccaagagcgcctgagcgaagccgaagaccagatcaggtacttggagtcccccgacagactttga

SEQ ID NO: 34276 - protein, 284 aa, Unknown
  Obtained from environmental sample
  DOMAIN (3)...(118): Response regulator receiver domain
  misc_feature (1)..(284): Xaa is any amino acid
MGQRLLVLDADGAFIDEHRAVLELVFDVDFAASSDNVVRMLEGGDYAAALVSAEIDDNKGYAVCANIRNNRRLSNFKIVLISSNATKADFERHKKLRVRADQYLHKPIQAETLVEELSAFVPKKASALDGTLDALMGFDIDENWLASLDSAEPAAKSGAGDDMQEETGGAPSWEDAHAAAMGRLITELRVKTLDLAQARQEIAELHGTVTAMAVELGAREAELQSKTIELLEARQDIQQLQRKNDTITVNLEELEERQRVFGDIQERLSEAEDQIRYLESPDRL

SEQ ID NO: 34277 - DNA, 939 bp, Unknown
  Obtained from environmental sample
  misc_feature (1)..(939): n is a, c, g, or t
atggcagaacaaaaagaaatgcgaatggcttatgttgacacattgatggcgttagctgaaaagaataaaaatattgtcgtgctggaagccgatcttatgagctgtacaaacaccggcattttcaaaaaaacataccccgaccgttttatcaactgcggcatcgcggaggcgaacatggtcggcatagcttcggggctttccactctgggaaaaatcccgttcgcggccggtttcggctgcttttcatcgcggcgggtattcgatcaatttttcctttcccgcaactacgcgcgccttaacgtannagtaacaggcaccgacccgggcgtaaccgccgcgtttaacggcggaacccacatgccctttgaggaacttgccctgatgagggttgtccccggtttaacggttcttgagccgtcggaccccgcttcctgcgccgcattcgtccgcatgatggccgaagactacggctgccattatctgcgtattccgcgcaaacctgttccgtatctttatcaggaaaacgaaacttttaaattcggcaaggcaaggcttttaaaagaaggaaaagacctgtgctttgctgcgcttggcagtctcatggtaaatcaatctctaaaagcctgcgaaaaccttgcctcatctggtatcagcgcgggtgttcttgatgtacttacgctcaagcccatagactgtaacgctattctggagcaagccggtaaggtacgcgctattatcagcgcggagaatgcccaaatcgcaggtggtctcggaggcgctgttgcggaaattctcgcggagaacggctgcctctgcaagtttgctcggattggtatccatgacgagtttggcgaagtgggaacgcaggactacctgactgatcgctttgggcttgatgttggaagtcttgtgaaaaaagcgcaggaactgctgaaataa

SEQ ID NO: 34278 - protein, 312 aa, Unknown
  Obtained from environmental sample
  DOMAIN (181)...(303): Transketolase, C-terminal domain
  misc_feature (1)..(312): Xaa is any amino acid
MAEQKEMRMAYVDTLMALAEKNKNIVVLEADLMSCTNTGIFKKTYPDRFINCGIAEANMVGIASGLSTLGKIPFAAGFGCFSSRRVFDQFFLSRNYARLNVXVTGTDPGVTAAFNGGTHMPFEELALMRVVPGLTVLEPSDPASCAAFVRMMAEDYGCHYLRIPRKPVPYLYQENETFKFGKARLLKEGKDLCFAALGSLMVNQSLKACENLASSGISAGVLDVLTLKPIDCNAILEQAGKVRAIISAENAQIAGGLGGAVAEILAENGCLCKFARIGIHDEFGEVGTQDYLTDRFGLDVGSLVKKAQELLK

SEQ ID NO: 34279 - DNA, 342 bp, Unknown
  Obtained from environmental sample
  misc_feature (1)..(342): n is a, c, g, or t
atgtttgtgtctattgcgatagacccgggatcggaggggcggggaaaggaattggctgatcttttgggtcagtacgggtttaagagagttcagcgctttctttgggaatctacaacggtatctgtcgataccctgaaccggctaaaacgggatctggacaaagccaccgacggctttgacaaactcaggttttttcagtttccaatggaagggactttggtgcttagctccttaagagagaaaaaatggcgtcgcatggtggctgtagacagtgaagaaggtaagagccctcccgcgccggcaagagcgcctgtgaaaaaaatcaatatccgaaggatgtaa

SEQ ID NO: 34280 - protein, 113 aa, Unknown
  Obtained from environmental sample
  misc_feature (1)..(113): Xaa is any amino acid
MFVSIAIDPGSEGRGKELADLLGQYGFKRVQRFLWESTTVSVDTLNRLKRDLDKATDGFDKLRFFQFPMEGTLVLSSLREKKWRRMVAVDSEEGKSPPAPARAPVKKINIRRM

SEQ ID NO: 34281 - DNA, 978 bp, Unknown
  Obtained from environmental sample
  misc_feature (1)..(978): n is a, c, g, or t
atgggggagttaaaaggcctaaagaaccgcctggaaccctggaaaaagcttcttaaagacatggaagacctccaaactctttacgagcttgccgccgaagaaaaagatgaatcccaaagccccgaaatagaggccgctcttaaagagcttcttggccagtacgaaaagcagaccattttagaacttatgggcggggaggtagaccggaacggatgcttccttacggtacattcaggcgcggggggaaccgaagcctgcgactggtcgcaaatgctttaccgtatgtaccttcgctgggccgagcgccggggctttgccctggaagaagaagaccggctggaggccgaaggcggcataaagtcagtcacggtaaaaatcgagggggaattcgcctacggctaccttaaaggcgaaagcggagtccaccggcttgtgcggatttcccccttcgacgcaaatgcccgccgccacacttccttcgcttcggtttacgttttcccggttattgatgattccatcgaggtggaaatccgcccggaagatctcaaggtggatacctaccgttcagggggcgcaggcggccagcacgtaaacaaaaccgacagcgccgtcaggtttacccatcttcccacagggatagtggtagcctgccagaatgagaggagtcagataaaaaaccgcgcaattgccatgagcattctaaaagcaaggctttacgagcattacaggcaggaaaaggaaaaggacaacgaaaggtttgcccaggaaaaaaaagatatttcctggggtaaccagatccgttcatatgtgtttcaaccgtatacaatggtaaaggacgcaaggacgaaaactgaaacaggtaatatccaggcggttatggacggggatattgatccttttatcgaggaatatctgcgctttgcctggaataacaaccaaaaaatagcgctttctaagcctgttgaggaaaaggaatga

SEQ ID NO: 34282 - protein, 325 aa, Unknown
  Obtained from environmental sample
  DOMAIN (29)...(138): PCRF domain
  misc_feature (1)..(325): Xaa is any amino acid
MGELKGLKNRLEPWKKLLKDMEDLQTLYELAAEEKDESQSPEIEAALKELLGQYEKQTILELMGGEVDRNGCFLTVHSGAGGTEACDWSQMLYRMYLRWAERRGFALEEEDRLEAEGGIKSVTVKIEGEFAYGYLKGESGVHRLVRISPFDANARRHTSFASVYVFPVIDDSIEVEIRPEDLKVDTYRSGGAGGQHVNKTDSAVRFTHLPTGIVVACQNERSQIKNRAIAMSILKARLYEHYRQEKEKDNERFAQEKKDISWGNQIRSYVFQPYTMVKDARTKTETGNIQAVMDGDIDPFIEEYLRFAWNNNQKIALSKPVEEKE

SEQ ID NO: 34283 - DNA, 588 bp, Unknown
  Obtained from environmental sample
  misc_feature (1)..(588): n is a, c, g, or t
ttggggggcagcatgggcggcgtcatcgaagccatcagcgtcaaaaaaaagatgttctttgaaattgaggacacaccgtatcactgcctcgacgcggaagtctctacgccgacggcgcggggcgggcagacgctggtccgactaaagatgaggaacctgctcactagggccgtcttcgacaagacgttcaaggcgggcgagaagttccgcgagcctgacctggcgctggttcaggcgagctacctgtacagcgactccgacggctcccacttcatggatcaggagacctacgagacgctttcgctgaacgacgaaatggtgggcgacgcgctggactttctggtggaaggtcagatcatccaggtgcagaagttcaacgggaaccccataggcttgcagatacccaaccatgtggaacttacggtgtcgtacaccgagccgggcgcgcgcggcgacacggcctccggcggcgtcaccaagcccgccaagctggagaccggcatcgagattcgcgtcccccttttcataaaggagggcgaaaaggtgaaggtcaacaccgagacaagggaatttgcgggcagggcttag

SEQ ID NO: 34284 - protein, 195 aa, Unknown
  Obtained from environmental sample
  DOMAIN (10)...(69): Elongation factor P (EF-P) KOW-like domain
  misc_feature (1)..(195): Xaa is any amino acid
MGGSMGGVIEAISVKKKMFFEIEDTPYHCLDAEVSTPTARGGQTLVRLKMRNLLTRAVFDKTFKAGEKFREPDLALVQASYLYSDSDGSHFMDQETYETLSLNDEMVGDALDFLVEGQIIQVQKFNGNPIGLQIPNHVELTVSYTEPGARGDTASGGVTKPAKLETGIEIRVPLFIKEGEKVKVNTETREFAGRA

SEQ ID NO: 34285 - DNA, 525 bp, Unknown
  Obtained from environmental sample
  misc_feature (1)..(525): n is a, c, g, or t
gtgttggggaactggagacccaaaaactgtgtctgttatgtgacggggacccacgagtactattcgggcgacgcaatgaactgggtggaggtcttcaaccagatgcactggtgcgtgctgatgaacgacaatgtctttatccagcgcaacgacgccaagatggtggtcttgggtgtacccgactccaccagcaagggggacaggggcgcgggccccaagaccaacctgaacagggcgctggtcgaggcgcccaagggtgtgcccagaatactcctgaaccacaaaccaaaggaattctttgagacggagagggccggcatagccctgcaactgtctggccacacgcacggcggtcagtatttcccgtggagcgtgttaatcccgctgttctgggactaccccgctggcctcaagcggtacaagcgcatgtggatatacaccagcaccggcaccggcttctggggccccccgaaccgcttcctgagaccaaaggaactgactctgctggtgctgaagaaaacttag

SEQ ID NO: 34286 - protein, 174 aa, Unknown
  Obtained from environmental sample
  misc_feature (1)..(174): Xaa is any amino acid
MLGNWRPKNCVCYVTGTHEYYSGDAMNWVEVFNQMHWCVLMNDNVFIQRNDAKMVVLGVPDSTSKGDRGAGPKTNLNRALVEAPKGVPRILLNHKPKEFFETERAGIALQLSGHTHGGQYFPWSVLIPLFWDYPAGLKRYKRMWIYTSTGTGFWGPPNRFLRPKELTLLVLKKT

SEQ ID NO: 34287 - DNA, 636 bp, Unknown
  Obtained from environmental sample
  misc_feature (1)..(636): n is a, c, g, or t
atgagtaggacgtctgatattaccagaaagacaaaagagactgacattagcatcaagttgaatattgacggaaccggcattgcgaaactggattacccaatcggttttatggggcacatgcttaatacctttgcccgccacgggctttttgatctggaaatcgccgcaaagggcgatcttgaagttgaccagcaccaccttgttgaggatacgggaatcgttctgggccagtgcttcgcgaaagcgttaggtgaaaaaagaggaatacggcgcagcggggattgtcttttccccatggacgagacccttgcccgcgccgcggttgatattggcggccgcagttttttgttttttgacggtcagcttggagccgcgcctttaatcgccgcttctgataatacggacaaacctttccaatttcagacagacaccattgaggatttttggcagggttttgtcggcgcggcgggctgtaacctgcatctggaaatcatccgcggcagaagcgaccatcacaaaatagaggccatgttcaaggcggccgcgcgttccctcaggctggcctgcgaaattgacgaacgcgcgcgcgatgtaatcccctcgacaaaaggttctcttccgggagtgaatgtatga

SEQ ID NO: 34288 - protein, 211 aa, Unknown
  Obtained from environmental sample
  DOMAIN (34)...(186): Imidazoleglycerol-phosphate dehydratase
  misc_feature (1)..(211): Xaa is any amino acid
MSRTSDITRKTKETDISIKLNIDGTGIAKLDYPIGFMGHMLNTFARHGLFDLEIAAKGDLEVDQHHLVEDTGIVLGQCFAKALGEKRGIRRSGDCLFPMDETLARAAVDIGGRSFLFFDGQLGAAPLIAASDNTDKPFQFQTDTIEDFWQGFVGAAGCNLHLEIIRGRSDHHKIEAMFKAAARSLRLACEIDERARDVIPSTKGSLPGVNV

SEQ ID NO: 34289 - DNA, 381 bp, Unknown
  Obtained from environmental sample
  misc_feature (1)..(381): n is a, c, g, or t
atggtcgccgcatctgaccgttcggctgtgattttctcgctgtctccaggcagcgaccatgattctccgcaaggagagcagctgcttgagcgaatgcagcggttgccggagcaaatctatatgcttatggataaggcctacgagggcgatgagatgagggctaaggttgttgagaaaggcttcattcccgtggtgcctccgaaaagcaatcgcaaagagccatgggaatacgacaaggaacgatacaagcagcgcaatgaaatagagcgatattttctccgtcttaaacgctttcgcagaattttcacgcgatacgacaagctggattctgtgttttctggatttatattttttgcaatggttatagatactatcttttag

SEQ ID NO: 34290 - protein, 126 aa, Unknown
  Obtained from environmental sample
  DOMAIN (2)...(122): Transposase DDE domain
  misc_feature (1)..(126): Xaa is any amino acid
MVAASDRSAVIFSLSPGSDHDSPQGEQLLERMQRLPEQIYMLMDKAYEGDEMRAKVVEKGFIPVVPPKSNRKEPWEYDKERYKQRNEIERYFLRLKRFRRIFTRYDKLDSVFSGFIFFAMVIDTIF

SEQ ID NO: 34291 - DNA, 444 bp, Unknown
  Obtained from environmental sample
  misc_feature (1)..(444): n is a, c, g, or t
atgagtttggaaaacaacaaaaactttgacgcattaaaacaggaaacgcaaaaattcaaggatagttccggcaacgagaagaaaaaaatccttgttgttgatgacgacactattcatcttgaaatggtggaaaatgtactatcaaaaaattatgaagtgtctaccgcgaaatcgggtaaagaagcgctcggtttgttctatcaggggcttgttccgcaattaacattactggacttgataatgcccggaatggacggatggaatacttatgacagaataagagccataagcggcttgcacgacaccccggttgcgtttttcacggcttcaagcgatccgaaagacataaagcacgcgaaggaaatgggcgcggttgattatttcaaaaagccatttgaagcgggcgatctgatatacaggatagagaaaatcatcggaaaatga

SEQ ID NO: 34292 - protein, 147 aa, Unknown
  Obtained from environmental sample
  DOMAIN (28)...(142): Response regulator receiver domain
  misc_feature (1)..(147): Xaa is any amino acid
MSLENNKNFDALKQETQKFKDSSGNEKKKILVVDDDTIHLEMVENVLSKNYEVSTAKSGKEALGLFYQGLVPQLTLLDLIMPGMDGWNTYDRIRAISGLHDTPVAFFTASSDPKDIKHAKEMGAVDYFKKPFEAGDLIYRIEKIIGK

SEQ ID NO: 34293 - DNA, 372 bp, Unknown
  Obtained from environmental sample
  misc_feature (1)..(372): n is a, c, g, or t
atggtatggcgcatgaacaaaaaagccttaattgcaatgagcggcggcgttgacagttccgtagccgcataccttttaaaacagcgtggctttgactgtaccggcataaccatgaagttgtttgaaaatgaggatataggggcaagcggggataaaaaatgctgttccctggaagacgtggcggacgcgcgtaatgtggcctattccatgggcatctcttattatgtttgtaattttacacaggatttcagggaacgggttatcggccggtttattgaaagctaccaaaacggcgcgacgccaaacccctgcattgactgcaaccgttatataaaatttgaaaaattgctttgcccgggcaaaacagcttga

SEQ ID NO: 34294 - protein, 123 aa, Unknown
  Obtained from environmental sample
  SIGNAL (1)...(23)
  DOMAIN (7)...(123): tRNA methyl transferase
  misc_feature (1)..(123): Xaa is any amino acid
MVWRMNKKALIAMSGGVDSSVAAYLLKQRGFDCTGITMKLFENEDIGASGDKKCCSLEDVADARNVAYSMGISYYVCNFTQDFRERVIGRFIESYQNGATPNPCIDCNRYIKFEKLLCPGKTA

SEQ ID NO: 34295 - DNA, 447 bp, Unknown
  Obtained from environmental sample
  misc_feature (1)..(447): n is a, c, g, or t
atgggcccgaatatagacgaggccttggaaataacccggtatatatacgtccgcatactggaaggcgaccaaggggaaaacgtggccctgggcttggtggccttccgcaacagcgtggaggcccggaccaaggtggaatacaccagcaaggtcatctcgcccctcaagaaggccctggcccgccaggaactggaaggggccctggcccaggtgaaagaggccacggcttccacccattctttcagcgaggattccctggccggggtgaaaacggccattgacgagttggattgggagggctatgagggccgggtcatcatcctggtcaccgatgccggccccctgcccatcaccgatccatatgtttccaccatgatcagcctgcagggcatggccgaccgcgccataaagaagaacatccaacctggaggcccgaatatgcagtag

SEQ ID NO: 34296 - protein, 148 aa, Unknown
  Obtained from environmental sample
  misc_feature (1)..(148): Xaa is any amino acid
MGPNIDEALEITRYIYVRILEGDQGENVALGLVAFRNSVEARTKVEYTSKVISPLKKALARQELEGALAQVKEATASTHSFSEDSLAGVKTAIDELDWEGYEGRVIILVTDAGPLPITDPYVSTMISLQGMADRAIKKNIQPGGPNMQ

SEQ ID NO: 34297 - DNA, 990 bp, Unknown
  Obtained from environmental sample
  misc_feature (1)..(990): n is a, c, g, or t
atggacaaagacaaggaatttgttgacgagcttaagacgcggttcgagtacttgaggacggtccgggccaagcgcgaagcggactggaaggaagcgcaggccttcgtggcgccttctttgtacagctgggacaaccctaacgaaaaaaaccccaagaggcccagcaggttcacgagccggcccaccaattacctgaagacgctccgctccggaatctgcggctattcgatatcgcctaacatctcatggctcaagctggggttcgaggaagacggccacaatgaaaaatacggcgcgaaggactggctggaagccgtggagaaagcgctttacgcggagtttaacaggtccaacctttacccgcaggcctcaaggttcgttgaaaacgcggcgacctacgggcacgcggtaatgctcatagacgagcagctgtccgacaacaagctgcggtttaccaaccttaacgcgaacgagatttggctggacgtgaacgaatacgacgaagtggacgccgtcttcaggcgctacaacatgacgctaaagaacgccgcggcgtttttcggcgaggacaagctgcacgacacgctcaagctggacctgaaagacaagaagaaatggaataacgacgtcacaataatccacgcggtttaccgccgggaagacgccgacgaagagtctccgtcgtcgaagaagatgccttacgcgtccgtgtacgtagacgagagccgcgacttccttatcgaggagggcggctacagggaatttcctttcgcggtgtttttgtgggaccctgtgaacggcacgccctacggggagtcgccggcgttatacgcgctgtccgacataaagcttcttaacatcgtccacgaatcggaaataaaaatagtgcagatggccgcggaacccgcgctgaacgtcccggaagatctgaaaggaaacacgaacgtggtgccgggagggttcaatatttcacggaaaaagaccagataa

SEQ ID NO: 34298 - protein, 329 aa, Unknown
  Obtained from environmental sample
  misc_feature (1)..(329): Xaa is any amino acid
MDKDKEFVDELKTRFEYLRTVRAKREADWKEAQAFVAPSLYSWDNPNEKNPKRPSRFTSRPTNYLKTLRSGICGYSISPNISWLKLGFEEDGHNEKYGAKDWLEAVEKALYAEFNRSNLYPQASRFVENAATYGHAVMLIDEQLSDNKLRFTNLNANEIWLDVNEYDEVDAVFRRYNMTLKNAAAFFGEDKLHDTLKLDLKDKKKWNNDVTIIHAVYRREDADEESPSSKKMPYASVYVDESRDFLIEEGGYREFPFAVFLWDPVNGTPYGESPALYALSDIKLLNIVHESEIKIVQMAAEPALNVPEDLKGNTNVVPGGFNISRKKTR

SEQ ID NO: 34299 - DNA, 798 bp, Unknown
  Obtained from environmental sample
  misc_feature (1)..(798): n is a, c, g, or t
gtggaaatcttcggcgaatcttcacgcgggctttgtaacggcatctacagcttcattgccgctatgggtataagctggccggctcccgggcaggaaaaactccccaattcggaagccggccttgcgtgcgacaacgccagcgagccctccccttctgaagataaagacctttttccggtttcataccggcgttttgtgccgtccgggaagaaagatctcaaacaaatgctggaaaactgcgaagctttcgccgcatgggcaggccgaaaccgctatgacgccctggttatccccctggcggcatttgttttagaaagagaaaaggtaaagcagcttgaaaaatttgccggggaatacggcattgctctggaagccggagggcatgaactcagttcccttgtaccgcgaaaagcgttttttttacaccgggattattttcgcatggaagacggcaaaaggaagaaggatcatcacttctgcccgaccagccctggcgcaatacgcctcatcggcgaagaagcggaaaaattgttccgggcggcggataatataaagatctttcacctttggcctgataacggggcggaaaccgcgtggtgcgcgtgccctacctgcagggcctttaccacacaggaacagtgccgcatgggcgttaacgccgccgcggatgtccttgcggccataaagcctgacgccttgataactttttatgaaaaatccggcgaggatggcaaaatccccatgagaaaaaacacacttaaaatggagaaaccgcctgagtcagaaattaccgattaa

SEQ ID NO: 34300 - protein, 265 aa, Unknown
  Obtained from environmental sample
  misc_feature (1)..(265): Xaa is any amino acid
MEIFGESSRGLCNGIYSFIAAMGISWPAPGQEKLPNSEAGLACDNASEPSPSEDKDLFPVSYRRFVPSGKKDLKQMLENCEAFAAWAGRNRYDALVIPLAAFVLEREKVKQLEKFAGEYGIALEAGGHELSSLVPRKAFFLHRDYFRMEDGKRKKDHHFCPTSPGAIRLIGEEAEKLFRAADNIKIFHLWPDNGAETAWCACPTCRAFTTQEQCRMGVNAAADVLAAIKPDALITFYEKSGEDGKIPMRKNTLKMEKPPESEITD

SEQ ID NO: 34301 - DNA, 822 bp, Unknown
  Obtained from environmental sample
  misc_feature (1)..(822): n is a, c, g, or t
gtgtacgaattgtttcagggaaatttaaaacgttacgccggaaattacacctcttacgaaaaagtgcgcaatgtcgagcttgcttcccttgttaaacgctatgaggaacagcaggaagaaattattaaaaccgaggcacttatccgccgtttccgttacaaggcgagcaaggcggctttcgcgcaggaactgatcaaacgccttgagaaaatggagcgaattgaaattcccgaatcgttaaaaaagataaacattactttcccgccgccgccccattccgggaatatcgcactcacgctggagggcgtcgggaaatgttacggggagcacagggcgctttcaaacgtggaactttgtcttgaagcgggagaaaggcttgttgtcgcgggtccaaacggagccggtaaaagcacgcttttgcgcattatcgcgggagcagataaagatttcgaaggaaatgtaaaatacggctccggtattcgcgccggttatttttcccagaccgaggcggaagaacctaccgcgctcgcttctaaccttgcggacgcccaaaatacgcaggttttggattttatggaagcgggagcgccttcagctcttatcccaaagttacgcgacatgctgggcgcgtttttgttccgcggagacgacgtttacaaaagcatttcggttttaagcggaggagagcgaagccgcctcgctcttctgaaaatgctgttaaaaccgcttaatcttcttatccttgacgagccgacaaatcatcttgatcttacctcaaagacatactgctggacgctcttaccaatttcggcggaacaataa

SEQ ID NO: 34302 - protein, 273 aa, Unknown
  Obtained from environmental sample
  DOMAIN (123)...(273): ABC transporter
  misc_feature (1)..(273): Xaa is any amino acid
MYELFQGNLKRYAGNYTSYEKVRNVELASLVKRYEEQQEEIIKTEALIRRFRYKASKAAFAQELIKRLEKMERIEIPESLKKINITFPPPPHSGNIALTLEGVGKCYGEHRALSNVELCLEAGERLVVAGPNGAGKSTLLRIIAGADKDFEGNVKYGSGIRAGYFSQTEAEEPTALASNLADAQNTQVLDFMEAGAPSALIPKLRDMLGAFLFRGDDVYKSISVLSGGERSRLALLKMLLKPLNLLILDEPTNHLDLTSKTYCWTLLPISAEQ

SEQ ID NO: 34303 - DNA, 555 bp, Unknown
  Obtained from environmental sample
  misc_feature (1)..(555): n is a, c, g, or t
gtgcgaaaaacaaaagtaaagcgcgtggcggcagggacgcaaaaagagttaagcggctattggaacgccgtcgatgtaaaaattgtctgtgaaactttggttaaggattgcctttcaagcgcaagagttgagcaggaaatcagggcaaggggaaacaaaaaaccggttgttattgtcggcagatttaaaaatgccagcgatgaacaaatcgacacggaaattattacttccatcatggaaaacgcaatctttaacagcggcaaacttgactttgtcgccggcggagatacaagagccgatctgcgcgcggaaagacaggatcaacagggtggcaacacaagcgaagcgacaactgcggctctaggcaaggaaataggcgctaattttatgatgacaggctcggtaagaacaatagttgacagatcgggaaaccgcagcgtcagaacatattttgttaccgcggaacttacaaatattgagactaacgcgagaatgtggataggtcaggacaattctattacaaaagaaattacaagacctaaaaacaaactttaa

SEQ ID NO: 34304 - protein, 184 aa, Unknown
  Obtained from environmental sample
  misc_feature (1)..(184): Xaa is any amino acid
MRKTKVKRVAAGTQKELSGYWNAVDVKIVCETLVKDCLSSARVEQEIRARGNKKPVVIVGRFKNASDEQIDTEIITSIMENAIFNSGKLDFVAGGDTRADLRAERQDQQGGNTSEATTAALGKEIGANFMMTGSVRTIVDRSGNRSVRTYFVTAELTNIETNARMWIGQDNSITKEITRPKNKL

SEQ ID NO: 34305 - DNA, 1095 bp, Unknown
  Obtained from environmental sample
  misc_feature (1)..(1095): n is a, c, g, or t
atggctgcgaaaacaaactgcaaagacaaaatgaaactcaaatggctgaacaaggatgcttcatttgaccgccttgttttagcaggcgatattggcggaaccaatacaaatttggctctggtaggcataaaaggcgaaaaactcaccattgttgtagaggctgtttttccgtctggcgaaattgacgggcttgccgaacccataaaagagcttttcagcgcggcaaagcaagagaaagcagatttggtagcaagcaaaggttgtgtgtgtgcggctggacctgttgcgcaaaacgtgtgcaaaatgacaaatttgagttgggatataaatggcaacgaactgtcaaaagaattaggcatagagataagtgtaatcaacgattttttgggaataagctatggcataccagctttggatgtggataatccagaacagatttttgcctttaagcacacagacggttcaatttgcgcgcctcgcaaagcaaccaaagccgtgattggtccgggaaccggtttgggcgcgggatatttagcatgggatggcaaaagctacattccaaattcctccgaaggcgggcatttaacttttgctccctttgatgaagaaagccagtctttcagagattatatggtaaagcggctcggcgaagttcccgatgttgaagtgctggtttctggcacaggaattcaaaatctttatgagtggcacagagacacaaaaggcttgccaaaaagcgatgcgtggacagaaattgaaaatgcaaaaccaaccgacagaccaaagctaatttccaaactttcagattcagatcctattgctgcttctatgctacgcctattcgtaaaaatgctggctcgctacgcaggcgatatttccacgcttcttttgccttttggaggtttatatttggcgggtggggttgcgcaaaaagaacttcgctggcttgttggcgacaatctctttatgaaatattacgaaatggcttacaacaaaaacataaagccacttttgatgncaacacctgtgtatttaataaaagattattccattagcttgtatggcgcagcaaatgcgtgtttaaaactgaggtag

SEQ ID NO: 34306 - protein, 364 aa, Unknown
  Obtained from environmental sample
  DOMAIN (27)...(363): Glucokinase
  misc_feature (1)..(364): Xaa is any amino acid
MAAKTNCKDKMKLKWLNKDASFDRLVLAGDIGGTNTNLALVGIKGEKLTIVVEAVFPSGEIDGLAEPIKELFSAAKQEKADLVASKGCVCAAGPVAQNVCKMTNLSWDINGNELSKELGIEISVINDFLGISYGIPALDVDNPEQIFAFKHTDGSICAPRKATKAVIGPGTGLGAGYLAWDGKSYIPNSSEGGHLTFAPFDEESQSFRDYMVKRLGEVPDVEVLVSGTGIQNLYEWHRDTKGLPKSDAWTEIENAKPTDRPKLISKLSDSDPIAASMLRLFVKMLARYAGDISTLLLPFGGLYLAGGVAQKELRWLVGDNLFMKYYEMAYNKNIKPLLMXTPVYLIKDYSISLYGAANACLKLR

SEQ ID NO: 34307 - DNA, 906 bp, Unknown
  Obtained from environmental sample
  misc_feature (1)..(906): n is a, c, g, or t
atggcgacggccgagaacgaatcagaaaatagaagtatagagaacgggttacaactcgctatccctaacaatatactgttttcatcgaaatacgatgacaggcaagctgtcgttttgtatttcgaggacaaacggcttgcgaatattaccgaggcaaaaaccgcacaggggcttcaaactgaaattgaagaaaaccgaaagttagaacactatcagaatgttggaaataaactggaacagcacctgttaaatctaaagaccagacgctctctagcactaaccgaggataatgatcagtctcttgccaaaaccattgataaatggtttgaggaatttgaaaaaaacctaaaacatctgtttgaaggtgattttgagcagttacttttcgactcaaataaaaataaattttccattcaacaaaacggaaaaccaccattcacatttcaaacactttcagcgggttacaaggcaattttcgatgtttacgccgatctgctcatgcggacggaatactttagcataagtccaaccgaattggagggagttgtatttattgatgaaattgattcacacctgcacatttcgctccaacgtttaatattgccgttttttattgaatcgttccccaaagtgcaatttattgttactactcattcaccctttgtgcttatgtcaacaaaagacatcctcgtttttgatttgggaaaggaagcgccttacagtatctcanaggtaaaatcacaaaacgaaatacttaacgattatttaggcgtaccaaccgcaatgccggtttgggcggaacggagcttaactgaaattattggtaaatacctgaaccgcgaaccggataaaatatctcttgcggcgttgaaagaagaattgataaacgccggattagaagaataa

SEQ ID NO: 34308 - protein, 301 aa, Unknown
  Obtained from environmental sample
  misc_feature (1)..(301): Xaa is any amino acid
MATAENESENRSIENGLQLAIPNNILFSSKYDDRQAVVLYFEDKRLANITEAKTAQGLQTEIEENRKLEHYQNVGNKLEQHLLNLKTRRSLALTEDNDQSLAKTIDKWFEEFEKNLKHLFEGDFEQLLFDSNKNKFSIQQNGKPPFTFQTLSAGYKAIFDVYADLLMRTEYFSISPTELEGVVFIDEIDSHLHISLQRLILPFFIESFPKVQFIVTTHSPFVLMSTKDILVFDLGKEAPYSISXVKSQNEILNDYLGVPTAMPVWAERSLTEIIGKYLNREPDKISLAALKEELINAGLEE

SEQ ID NO: 34309 - DNA, 555 bp, Unknown
  Obtained from environmental sample
  misc_feature (1)..(555): n is a, c, g, or t
atgaccgaccaattacaggaaatcggcgcacggttgggggcattacgggatgttttcgacattactgttgaaaatatggcgcagaaaatgaatgtttccgttgatgaatactcggcgtatgaacacgggcagcgggatttttcgttcagctttttacaaaatgccgcgcaaattttcaacgtggatgtagtggacattatttcaggcgaatcgccaaaacttaccaaatgcgctttggtcagaaatggggaagggttcgacattgaacgccggaaagcgtatgactacaagcatcttgcctttactttcagcaacaagaaggcggatccatttatggtaacggtggaaccaaaatctggagagaagccggtgcttcactcgcatgaggggcaggagtttgactatatgctttccggtaaaatggaattttactttgacgatatagtttacgaacttaatgaaggcgacagcgtgtatttcgactcgggcgtgcctcatgccatgaaagctgtaggcggtcaggcggcaaagtttcttgccatagtaataaaataa

SEQ ID NO: 34310 - protein, 184 aa, Unknown
  Obtained from environmental sample
  DOMAIN (12)...(66): Helix-turn-helix
  misc_feature (1)..(184): Xaa is any amino acid
MTDQLQEIGARLGALRDVFDITVENMAQKMNVSVDEYSAYEHGQRDFSFSFLQNAAQIFNVDVVDIISGESPKLTKCALVRNGEGFDIERRKAYDYKHLAFTFSNKKADPFMVTVEPKSGEKPVLHSHEGQEFDYMLSGKMEFYFDDIVYELNEGDSVYFDSGVPHAMKAVGGQAAKFLAIVIK

SEQ ID NO: 34311 - DNA, 1110 bp, Unknown
  Obtained from environmental sample
  misc_feature (1)..(1110): n is a, c, g, or t
atgccaaaacataaagtaatagtaatgtactccggcggcttagacagcacaatcgccgtccatcttctgatgtctcagggcctggatgtaacagcgctccacttcagaatgcctttcaacgtaggcgtcggcacctcccccaatgaagttatggggtacgccgacgctttgggcgttccgttacgcgtagaggaagagggtgaggagtttgtggatatggtccgcaacccccgcttcggctacggcaaaaacgccaacccctgtatcgactgccgtatacaccgccttaagatggcggcaaagatcatggaggagatgggcgcggtctgcctcgcaacgggcgaggtggccggccaacgccccatgtcgcagaagatctacacgatgatgaggatagagaaacacgccggccttaagggaaagttgctgcgcccgctctccgcaaaactgctgccgcccacggaggcggaggaggcggggatcatcgacagggaaaaactgcttgacatatcgggaagaagccgcgccgttcagctggcgtacgcgaaacagcacggtttgcgctccagctcgcccggcggcggttgcctgttgacgaatgtagagacggccgctagattcaccgagctgatggcgcacaacccgcggttcacgttggaagagttcaaattattggcttacggccgccacttcaggaggccgtccgggtatcggttgattgtctcgcgggacggggatgaaaacgacagaatagagaggatatgccgcctttcggagcggcaggatatatcggccccgtggatggacgtatcaaagaagcgtgatgtattgatacagaatccgccgagtcaagacacgtcaaagcggatgcctaaaatccatctgttctatctgcgcgatactaccgggccgatagccgtgggattaggcgatccggacgaatccgatttgcaattcagcgcctcggccgtagtgcgcttctcgcgtctgcgcggcgaaggtcaggcggcggtagcggtgagcgggtgcggagttgacaaggtggtagaggcgggggccgccggtgaagaggagcttgacaagtgtcgcatctgttcggctaaccgctga

SEQ ID NO: 34312 - protein, 369 aa, Unknown
  Obtained from environmental sample
  DOMAIN (1)...(169): Thiamine biosynthesis protein (ThiI)
  misc_feature (1)..(369): Xaa is any amino acid
MPKHKVIVMYSGGLDSTIAVHLLMSQGLDVTALHFRMPFNVGVGTSPNEVMGYADALGVPLRVEEEGEEFVDMVRNPRFGYGKNANPCIDCRIHRLKMAAKIMEEMGAVCLATGEVAGQRPMSQKIYTMMRIEKHAGLKGKLLRPLSAKLLPPTEAEEAGIIDREKLLDISGRSRAVQLAYAKQHGLRSSSPGGGCLLTNVETAARFTELMAHNPRFTLEEFKLLAYGRHFRRPSGYRLIVSRDGDENDRIERICRLSERQDISAPWMDVSKKRDVLIQNPPSQDTSKRMPKIHLFYLRDTTGPIAVGLGDPDESDLQFSASAVVRFSRLRGEGQAAVAVSGCGVDKVVEAGAAGEEELDKCRICSANR

SEQ ID NO: 34313 - DNA, 399 bp, Unknown
  Obtained from environmental sample
  misc_feature (1)..(399): n is a, c, g, or t
ttgcactattacgactntgagccaaaggggtttgagtggatagactgcaacgattgggagcagagcattctcggtttcataaggaaaggccccgatgattttgaccggatgctgatagtgttgaatttcacgccggagccgcgccgcggttaccacgtgggcgtgccggtggcgggtttctgggaggagatattcaacagcgacgcggcggaatacggcgggagcggcgtgggcaacgcgggcgggatggaaacggaattgaagccgtggcacggtcacaaccaatcgttgctgctgacgttgccgccgctgggagcggtgctgttcaagattaggaaaccggaaccgaagacggcggaggataagaatactgtcggacaaaacgatgccaaaacataa

SEQ ID NO: 34314 - protein, 132 aa, Unknown
  Obtained from environmental sample
  misc_feature (1)..(132): Xaa is any amino acid
MHYYDXEPKGFEWIDCNDWEQSILGFIRKGPDDFDRMLIVLNFTPEPRRGYHVGVPVAGFWEEIFNSDAAEYGGSGVGNAGGMETELKPWHGHNQSLLLTLPPLGAVLFKIRKPEPKTAEDKNTVGQNDAKT

SEQ ID NO: 34315 - DNA, 879 bp, Unknown
  Obtained from environmental sample
  misc_feature (1)..(879): n is a, c, g, or t
ttgaaaggaaagtcatatatatacccctcattgatcaatacccatgatcatttacagggaaattaccgcccgtcggtaggcccaaaggcgggtaactactaccttacatggcagccntgggacaatgacctgaaagcctcgaatacattcaaggaacgatccaacnttagcagggaggatctttacgcgctgtccggctacaagtgcctcttttccggtgttaccaccgtcaacgaccatttcccgcaaaaactcaacagtgagattttgcctaccctgccgatccgggcatttcttgaatacgggcttgcccatgaatgttcttcgtatgatcttaaatggggcgacgggatagagattgagcatgaccgggcggtaaaaaacaagtggcctttcataacccacctttgtgagggttttgacgaagaagctatgcacggcatacagacgcttgaaaaactaaaggtactggacagccactgccttcttgttcactgtatcgctttcagcgatgccgacataaaaacagtggcaaaggccggggcaagcgtttcgtggtgcggcttttcaaatatgtttatgttcaatgtcacggcaaaaatccgcaagatgattaaagccggagtaaatgtcaccatcgggacggattcatcggcaagcggctcggcaaacctgcttgccgaactcaaatacgaccgtgaactgtaccgttccatgtacggcgaggatctgccggcaaaaaaaatattcgaaatgattacgtataacgcggcaaaggctttctggatggaggacaggattggaacgctggacgagggcaagctgggtgatattctgatactgaaagccaggcatgacgatccttacgaaaacctgtaa

SEQ ID NO: 34316 - protein, 292 aa, Unknown
  Obtained from environmental sample
  DOMAIN (6)...(282): Amidohydrolase family
  misc_feature (1)..(292): Xaa is any amino acid
MKGKSYIYPSLINTHDHLQGNYRPSVGPKAGNYYLTWQPWDNDLKASNTFKERSNXSREDLYALSGYKCLFSGVTTVNDHFPQKLNSEILPTLPIRAFLEYGLAHECSSYDLKWGDGIEIEHDRAVKNKWPFITHLCEGFDEEAMHGIQTLEKLKVLDSHCLLVHCIAFSDADIKTVAKAGASVSWCGFSNMFMFNVTAKIRKMIKAGVNVTIGTDSSASGSANLLAELKYDRELYRSMYGEDLPAKKIFEMITYNAAKAFWMEDRIGTLDEGKLGDILILKARHDDPYENL

SEQ ID NO: 34317 - DNA, 735 bp, Unknown
  Obtained from environmental sample
  misc_feature (1)..(735): n is a, c, g, or t
atgttgcgtaaccagatacccgtccgaacctcacactggaacattgattctccgggctacatggaagcggacaccgtcgcgcattgcggcaacaacttggccggcgagttcgtttggagtcttactatgacggacatccacactggttggacggtttgtcgggcggtttggaataagagcgccgagggcattgtctcgcaaatcgccgacattgaacggaacctgccatttgaactgctcggcttcgactgcgacaacggggcggaattcattaaccacagcatgatgcgcttcctgacgaataggcccaaacccgtcgaattcacgcgttccagaccgtacaaaaagaacgacaacgcccatgtagaacagaaaaactggattcacgctcggcagctttttggatactacaggatcgacgacccgaacgcagtcgctttgatcaacgacctatatgctacagaatggtctctttaccaaaactattactgcccttctcaaaaactcataaccaaaaccaaaataggtagcaaatactgcaaaacttacgaaaaacccattaccacgtatcaaagactccttaactccaacacaataacggcggaacaaaagactttggtcacagatatttacaaatcctttaacccgtttattctaaaaaaaagtatcaacacaaaattaaatgctatttttaaacttatttcggttacttctattttgaggcaacaaggttaa

SEQ ID NO: 34318 - protein, 244 aa, Unknown
  Obtained from environmental sample
  DOMAIN (13)...(170): Integrase core domain
  misc_feature (1)..(244): Xaa is any amino acid
MLRNQIPVRTSHWNIDSPGYMEADTVAHCGNNLAGEFVWSLTMTDIHTGWTVCRAVWNKSAEGIVSQIADIERNLPFELLGFDCDNGAEFINHSMMRFLTNRPKPVEFTRSRPYKKNDNAHVEQKNWIHARQLFGYYRIDDPNAVALINDLYATEWSLYQNYYCPSQKLITKTKIGSKYCKTYEKPITTYQRLLNSNTITAEQKTLVTDIYKSFNPFILKKSINTKLNAIFKLISVTSILRQQG

SEQ ID NO: 34319 - DNA, 1008 bp, Unknown
  Obtained from environmental sample
  misc_feature (1)..(1008): n is a, c, g, or t
atgaaaaagataaaggttttttcggtacttataatcatattgttaatttgcggatgcggatcaaagccgcagtcaaatgaaggagtcgctcctaaggcaagatatttgtatccgaaggattatatggctgacccctccgcccatgtttttaacggtaaagtgtatatttatccttcccacgactggagaagcggcataacgtcgaatggtaacggcgaagcttttcaaatgaaagactatcatgtgttctcgatggacgatgtggaaaacggcgaagtaaccgagcatgggaaaatattggatcttaaagatattccttgggcgacaagccaattatgggctcctgatgttgcgtttaaaaacggcaagtattatttttattttcccggaagagataaaaataatatttttcgtatcggcgtagcaatagccgatcgccccgaaggaccgtttattcccgagagcgagccgattaaaggaagctacagtatcgatccctgcgcttttgaagacaacggcgcatattatttgtactttggcggaacgggaagcagccctgcaggttcatcgtattcttccgctcgtgtcgttaagttaagcgacgatatgctgcaatttgccgaagaaccaaaacccgttgttcttttgaacaaagacggcaaacctattggttcttcttctagctatcaattttttgaagctccgtggatgcataaatacaacggaaaatactatttttcctattccaccggtcatactcattatttatgttatgcgataagcgataacccttacggaccgtttacatatcagggaattattttaactcctgtagtaggctggactacccatcattcaattgtcgagttcaagggaaagtggtggctgttttttcacgacagccgaccgtcaggcggagtagactggcttagaagcataaaggtaattgaattgagatacaacgaagacgggacaattcaaacgattaaaggcggcggttcttggtaa

SEQ ID NO: 34320 - protein, 335 aa, Unknown
  Obtained from environmental sample
  SIGNAL (1)...(25)
  DOMAIN (35)...(326): Glycosyl hydrolases family 43
  misc_feature (1)..(335): Xaa is any amino acid
MKKIKVFSVLIIILLICGCGSKPQSNEGVAPKARYLYPKDYMADPSAHVFNGKVYIYPSHDWRSGITSNGNGEAFQMKDYHVFSMDDVENGEVTEHGKILDLKDIPWATSQLWAPDVAFKNGKYYFYFPGRDKNNIFRIGVAIADRPEGPFIPESEPIKGSYSIDPCAFEDNGAYYLYFGGTGSSPAGSSYSSARVVKLSDDMLQFAEEPKPVVLLNKDGKPIGSSSSYQFFEAPWMHKYNGKYYFSYSTGHTHYLCYAISDNPYGPFTYQGIILTPVVGWTTHHSIVEFKGKWWLFFHDSRPSGGVDWLRSIKVIELRYNEDGTIQTIKGGGSW

SEQ ID NO: 34321 - DNA, 819 bp, Unknown
  Obtained from environmental sample
  misc_feature (1)..(819): n is a, c, g, or t
gtgcatgccgcgattgactaccttggcagggttaaggccgcgtccgcggcgccggtttttcggacgcttcttgaaagcggggaaaaacgttttatgaattcggccttccgcgcccttggtcaggtcagtggaaatgaccgtgacgagatcgccgaataccttgtcgatttctacgaaaaccgcggcgttgccgatgaaaaccaccgtgatataatcgccgctttgggcgcttccggttcacccagggccgtgccgttccttgccggccttgccgatgacaacggaacgcgcccggccctgcgaatagcggcccttgacgctattgccaaaatcggcgatccctcgggacttgacgcgacgcttgcctgcgtttcctcaaaagaccccaatatcagggctgccgcgattggcgcgctggggcctttttcggggtcagccgttgatgaggcgattcttgacgcgttccgggattctttctataagacccgcattgcggcggcgcaggcaagccgccagcgtaaattagccgcatccttaccctaccttaaattccgcgcggagcgcgacgatgttcccacggtaaaggaagaggcaatccgcgctcttggagcgatctcggacgctggcgcgtccgggagcaccgacgcggtaaagattcttgaggaattgtttgtctcgcgaaaaaacagcgaccgtgtgcgtattgtagcgggcgagatgctcatgcagaaccagccggagcaatttcttgacgcttttatcaaggaactggacgaggcaaagcagaaaaaccagactagtctgtacaacggtttttga

SEQ ID NO: 34322 - protein, 272 aa, Unknown
  Obtained from environmental sample
  misc_feature (1)..(272): Xaa is any amino acid
MHAAIDYLGRVKAASAAPVFRTLLESGEKRFMNSAFRALGQVSGNDRDEIAEYLVDFYENRGVADENHRDIIAALGASGSPRAVPFLAGLADDNGTRPALRIAALDAIAKIGDPSGLDATLACVSSKDPNIRAAAIGALGPFSGSAVDEAILDAFRDSFYKTRIAAAQASRQRKLAASLPYLKFRAERDDVPTVKEEAIRALGAISDAGASGSTDAVKILEELFVSRKNSDRVRIVAGEMLMQNQPEQFLDAFIKELDEAKQKNQTSLYNGF

SEQ ID NO: 34323 - DNA, 924 bp, Unknown
  Obtained from environmental sample
  misc_feature (1)..(924): n is a, c, g, or t
gtgcgcacgacaatatccgatatggggcctcttcttctctctcgtatccttgatctgaatgaaacgcagagcggtattttacagataatattcaagatcgccgatgacaacgggctgttgttaatcgacttaaaggatctgcgcgcaatgatgcagtttgcgtacgataacgcgaaggaactgtctgcggaatacggtaatatctcaacgcaaagcgtgggcaccattcaacggaatcttttaacgctggcctcaaacggaggggatatctttttcggcgaaccggctcttgatatgcgcgattggcttgactgtgatgaatccgggcgcggctttatcaatattctggattgcgtaaagctttttcaaagcccgcagctttattcgactttcctcctgtggatgctttcggctctctacgagatgatgccggaggtcggcgaccttgaaaagcccagaatggtattcttttttgacgaggcgcacattctgtttaatgaggcaccgaaggcccttctgcaaaaaatcgagcaggtggcgcgtcttatccgctccaaaggcgtgggcatttattttataacgcagtcgccgtccgatattccggacaccgttttatcgcagttgggtaataaaattcagcatgcgctacgggcatatacgccaaaggatcagaaggcggtaaaagccgctgcggcctcattccgatccaaccccgatttttccagcgaacaggttttgggcgagctttccaccggcgaagcgctcatatccctgcttgacgaaaaaggcgcgccgcagatcgtacagcgcgcgttcatgctgccgcccaggagttttataggccccgccgaaccggatcgcataagcggccttatcaaaagctgtccgctgtacccaaaatacaaagaggctcggccgatctga

SEQ ID NO: 34324 - protein, 307 aa, Unknown
  Obtained from environmental sample
  DOMAIN (1)...(307): Bacterial protein of unknown function (DUF853)
  misc_feature (1)..(307): Xaa is any amino acid
MRTTISDMGPLLLSRILDLNETQSGILQIIFKIADDNGLLLIDLKDLRAMMQFAYDNAKELSAEYGNISTQSVGTIQRNLLTLASNGGDIFFGEPALDMRDWLDCDESGRGFINILDCVKLFQSPQLYSTFLLWMLSALYEMMPEVGDLEKPRMVFFFDEAHILFNEAPKALLQKIEQVARLIRSKGVGIYFITQSPSDIPDTVLSQLGNKIQHALRAYTPKDQKAVKAAAASFRSNPDFSSEQVLGELSTGEALISLLDEKGAPQIVQRAFMLPPRSFIGPAEPDRISGLIKSCPLYPKYKEARPI

SEQ ID NO: 34325 - DNA, 960 bp, Unknown
  Obtained from environmental sample
  misc_feature (1)..(960): n is a, c, g, or t
ttggccgagccgttgatgagcgcggaaaaatttgacgagcaccgcattgaaaaattgccgatagtagacggtgaaggccgcctgaccgggctgattaccgtaacggatatgggaaaacatgaaagccatcctcacgcggcaactgacaaatcaggccggctgattgtaggggcggcggtatccccgcaggattatgtgacgcggctgcctctgttaaaagacgcgcgggtagattttgtagtgctggatacggcccacggcgattcaaagaatgtcatggaagcggttaaaaatattaaaaaagaatttaacattcccgtgattggcgggaatgttgcgtcaaaagagggaacccgccgcctgattgacgcgggcgctgacgcggtaaaagtcggcattggtcccggctcaatctgcaccacgcggattgtcgcgggcattggcgtgccgcagtttaccgcggtattggactgcgccgaagaagcggcaaagtcgggtattcccgttattgccgacggcggcataaagttctccggcgatattaccaaagccataggcgccggggccagtgtagtgatgatcggcaatctcttcgccggactcaaggaggcgccgggcagagaaataatttttgacggcagaattttcaaggaataccgaggcatgggcagcatgggcgccattgccgacggagccggcgaccgttaccaaatgggcaaagatgaagagccggttcccgaaggcatagagggccgcgttccctacaagggcgagctgtctacctacatgaaccagcttatttcaggcctccgcaagggaatgggctactgcggctgtcacaatatcgaggaattaaaaaaacacggcaaatttgtaaaaattaccgccgccggtttacgggaaagccacgcccacgatattaccatcacccaggaagctcccaattattcgcgggcttag

SEQ ID NO: 34326 - protein, 319 aa, Unknown
  Obtained from environmental sample
  DOMAIN (10)...(305): IMP dehydrogenase / GMP reductase domain
  misc_feature (1)..(319): Xaa is any amino acid
MAEPLMSAEKFDEHRIEKLPIVDGEGRLTGLITVTDMGKHESHPHAATDKSGRLIVGAAVSPQDYVTRLPLLKDARVDFVVLDTAHGDSKNVMEAVKNIKKEFNIPVIGGNVASKEGTRRLIDAGADAVKVGIGPGSICTTRIVAGIGVPQFTAVLDCAEEAAKSGIPVIADGGIKFSGDITKAIGAGASVVMIGNLFAGLKEAPGREIIFDGRIFKEYRGMGSMGAIADGAGDRYQMGKDEEPVPEGIEGRVPYKGELSTYMNQLISGLRKGMGYCGCHNIEELKKHGKFVKITAAGLRESHAHDITITQEAPNYSRA

SEQ ID NO: 34327 - DNA, 492 bp, Unknown
  Obtained from environmental sample
  misc_feature (1)..(492): n is a, c, g, or t
atggcgcccatgctgcccatgcctcggtattccttgaaaattctgccgtcaaaaattatttctctgcccggcgcctccttgagtccggcgaagagattgccgatcatcactacactggccccggcgcctatggctttggtaatatcgccggagaactttatgccgccgtcggcaataacgggaatacccgactttgccgcttcttcggcgcagtccaataccgcggtaaactgcggcacgccaatgcccgcgacaatccgcgtggtgcagattgagccgggaccaatgccgacttttaccgcgtcagcgcccgcgtcaatcaggcggcgggttccctcttttgacgcaacattcccgccaatcacgggaatgttaaattcttttttaatatttttaaccgcttccatgacattctttgaatcgccgtgggccgtatccagcactacaaaatctacccgcgcgtcttttaacagaggcagccgcgtcacataa

SEQ ID NO: 34328 - protein, 163 aa, Unknown
  Obtained from environmental sample
  misc_feature (1)..(163): Xaa is any amino acid
MAPMLPMPRYSLKILPSKIISLPGASLSPAKRLPIITTLAPAPMALVISPENFMPPSAITGIPDFAASSAQSNTAVNCGTPMPATIRVVQIEPGPMPTFTASAPASIRRRVPSFDATFPPITGMLNSFLIFLTASMTFFESPWAVSSTTKSTRASFNRGSRVT

SEQ ID NO: 34329 - DNA, 540 bp, Unknown
  Obtained from environmental sample
  misc_feature (1)..(540): n is a, c, g, or t
atgaatatatggtttgccaccaacaatacccataaaaaaacagaacttagcgccattcttaacgtaaatttgaagatcccgtccgaagaaggtttatcatttgagcctgatgaaacaggagcgtcttttggtgataatgccctgattaaggcgagggcgttgcaaaaactcataggcgggaacgaacctgtcatagccgatgattccggtttgtgcgtggacgcccttgacggcagaccgggcgtattgtccgcccgttacggtatggagaacggacagaaactgacaagcgcaaaacagaatatcatgcttcttgacgaattaggggataataccaaacgaaacgcgagatttgtttgcgctatggtacttctttatggtaacgaccgtttttttcttgttcaagaaacacttgagggggaaattgtaaaaaagagcggaataaaaggagaaggcggttttggttatgatcctattttttggataccgtcccttggacgtacccttgccgagctttctctggaagaaaaaaatacttga

SEQ ID NO: 34330 - protein, 179 aa, Unknown
  Obtained from environmental sample
  DOMAIN (3)...(178): Ham1 family
  misc_feature (1)..(179): Xaa is any amino acid
MNIWFATNNTHKKTELSAILNVNLKIPSEEGLSFEPDETGASFGDNALIKARALQKLIGGNEPVIADDSGLCVDALDGRPGVLSARYGMENGQKLTSAKQNIMLLDELGDNTKRNARFVCAMVLLYGNDRFFLVQETLEGEIVKKSGIKGEGGFGYDPIFWIPSLGRTLAELSLEEKNT

SEQ ID NO: 34331 - DNA, 348 bp, Unknown
  Obtained from environmental sample
  misc_feature (1)..(348): n is a, c, g, or t
gtgtacgccgtagaaaaaatgattccgcaggattctcttgaagccattcatatctttttccccgacccgtggcccaagaaaagacaccgtaaacgccgccttgtacagcgtccttttacggaaaccctagccgaccgtttaaaaccgggcggctacttatacatggtaacggactgggaagactacgccatacacgttcttgaagagcttaccgcgaccgccgctttaaaaaacgcctacgaaagttttgccccgcctcaaaaatggcggcctgtaacaaaatttgaacaaaaggggctgactaaggaacacgtaattagggaaatttattttacaaaatctcattaa

SEQ ID NO: 34332 - protein, 115 aa, Unknown
  Obtained from environmental sample
  DOMAIN (1)...(114): Putative methyltransferase
  misc_feature (1)..(115): Xaa is any amino acid
MYAVEKMIPQDSLEAIHIFFPDPWPKKRHRKRRLVQRPFTETLADRLKPGGYLYMVTDWEDYAIHVLEELTATAALKNAYESFAPPQKWRPVTKFEQKGLTKEHVIREIYFTKSH

SEQ ID NO: 34333 - DNA, 768 bp, Unknown
  Obtained from environmental sample
  misc_feature (1)..(768): n is a, c, g, or t
atgctgaggcaaaagggcggcattggctccgtcgtcgattcgcagaaggcaaatttagttgccgcctgcgtgtttaaggacaacgcaaaaaaaccaaaaacagtaacggatctaaggctttccgtcaacatacctgaaaaggagttgatcgattcggaaaccaggtttaaggcagaggcggcatacctgatcagggaggtaatctgcaaacgactgtctgaaagcatagacagggaaataaacacggagggcaatgactctgacgattttctggacagactcctgaaccagcggttggaaataaaaccatctgatctggagcaatatctgcaaaatatcgacgggaatgacgaaattgaagcaatccgcggcaacggcttttccgtcaccgccaacatgattgtctcaatactcaacacggttaaccttgagtgcggatttctggaaaatctgaaagaaaagcgtgaaattttgatccgcgaatacgaagataccgatgaagccgtcctgccggatgagcattaccaaataaggctgcgttatttcagcaaagcgcggctttctgaagaacgcgaagtttacgataagcggctcaggattttaggcggcgaaacacagcgcctttgggatctgctggaagtgatttatcaggattcaaaatcggtttttaaggtaaatgattttgaggatcttgccagaaaaaacagaagccgcataaatgatcagataaaaaatgggacactcccttacgagccccaaaggccatag

SEQ ID NO: 34334 - protein, 255 aa, Unknown
  Obtained from environmental sample
  misc_feature (1)..(255): Xaa is any amino acid
MLRQKGGIGSVVDSQKANLVAACVFKDNAKKPKTVTDLRLSVNIPEKELIDSETRFKAEAAYLIREVICKRLSESIDREINTEGNDSDDFLDRLLNQRLEIKPSDLEQYLQNIDGNDEIEAIRGNGFSVTANMIVSILNTVNLECGFLENLKEKREILIREYEDTDEAVLPDEHYQIRLRYFSKARLSEEREVYDKRLRILGGETQRLWDLLEVIYQDSKSVFKVNDFEDLARKNRSRINDQIKNGTLPYEPQRP

SEQ ID NO: 34335 - DNA, 717 bp, Unknown
  Obtained from environmental sample
  misc_feature (1)..(717): n is a, c, g, or t
atgagttttaacgcgatcctgccgggcggaacggaaacaaccatacgcatactttccacaaaggacaatattcttattgggcagtgtatcgaagaagaaaaaatccagccgggaaagcttccgtcaggaagcaagcttcccgagataacccttttccagggccttccaaggggcgctaagatggacctcatagtacgccagtcagcggaagcgggcgtttctgtaattgcgccttttaagggcgaatactcgcaaggggcgggcgataaagaatacggccaaaagctcaagcgctgggagcgtatcgttaaagaagcccgccagcaaagcggctccgttacggaaaccataattatgcctccttgcggctttgacgccctgcttgaatattgggaatccctcaaggtaaaatatacccgtcctctgagcctggtactgcaccaggaacctcttgaaaagggaacttttcatggttatcttagaaatgatcctgattttattgtttttgctgtaggccccgaaggaggtttctcccccggagagctgagacggtttttaaacacaggttttaagcctcttttaatgggcaataccattttaagaaccgaaaccgccgccttatacggtatcgcggcaatacgaaccatccttttggagagcgaagcttggaaaacaagccagacagaatcatactcctcagaatcccgcttgacatag

SEQ ID NO: 34336 - protein, 238 aa, Unknown
  Obtained from environmental sample
  DOMAIN (5)...(215): Protein of unknown function (DUF558)
  misc_feature (1)..(238): Xaa is any amino acid
MSFNAILPGGTETTIRILSTKDNILIGQCIEEEKIQPGKLPSGSKLPEITLFQGLPRGAKMDLIVRQSAEAGVSVIAPFKGEYSQGAGDKEYGQKLKRWERIVKEARQQSGSVTETIIMPPCGFDALLEYWESLKVKYTRPLSLVLHQEPLEKGTFHGYLRNDPDFIVFAVGPEGGFSPGELRRFLNTGFKPLLMGNTILRTETAALYGIAAIRTILLESEAWKTSQTESYSSESRLT

SEQ ID NO: 34337 - DNA, 651 bp, Unknown
  Obtained from environmental sample
  misc_feature (1)..(651): n is a, c, g, or t
ttggaaaacaagccagacagaatcatactcctcagaatcccgcttgacatagtttcacccgaggagttgcctgaaataattaccaatttggttcctaatgataaagacccctacgaatcacaggaaaagcgaaacattgttctcctttcgctctgggatctactcaaggcaagaagaaacagcgaataccgcgattatttgttcaacgcggttttggttatccccatctctaaaagccttgtttcaggggcaaggtttattaccggtaaaaaactctaccggtatatgcccttcaagtttgtcatttcccttttgagtattctggaaaaacgggaatacccactttttctccgcggcggtaaaagccagatattaaaaaaggcagaaaaaaacatccgcgcaacttttcccggccttaaaattgtaggccgctgcgagggcaagatccgaaaacaggaagaagcggcggtaatagaagcgataagaaagtcttcgccttccattctactggccggcaggggcgtccgtggaaaagaactctggatagccagaaactcaaaccgcctcaactcgggtttccgtcttcgctgcagcgatctttttgacgtgttcgccgaaaaccagcaccgccccagagtgcggatcctctag

SEQ ID NO: 34338 - protein, 216 aa, Unknown
  Obtained from environmental sample
  DOMAIN (65)...(215): Glycosyl transferase WecB/TagA/CpsF family
  misc_feature (1)..(216): Xaa is any amino acid
MENKPDRIILLRIPLDIVSPEELPEIITNLVPNDKDPYESQEKRNIVLLSLWDLLKARRNSEYRDYLFNAVLVIPISKSLVSGARFITGKKLYRYMPFKFVISLLSILEKREYPLFLRGGKSQILKKAEKNIRATFPGLKIVGRCEGKIRKQEEAAVIEAIRKSSPSILLAGRGVRGKELWIARNSNRLNSGFRLRCSDLFDVFAENQHRPRVRIL

SEQ ID NO: 34339 - DNA, 738 bp, Unknown
  Obtained from environmental sample
  misc_feature (1)..(738): n is a, c, g, or t
atgatggaggaattatcccgcctgaaaaaagctgttaatccggatgaaatgcttttagttgcagactctatgacaggccagtccgccgccgacatcgccaaaacatttgacgaaaaaatcgggctaacgggagtaatacttacaaaattcgattctgacacacgcggcggcgcagcgctttcgcttaaaacaataacgggcaaaccgttaaaatttacgggtacaggtgaaaagcccgaagattttgaacctttccacccggatcgcatcgccggacgaatactcggtatgggtgatgttgtaagccttgtagaaaaagcgcaggaggtaattgatcagaaagaagcgattgaactccagaaaaaaatggagaaagaaaattttacccttgatgactggcttaaccagcttcgcgctgtaaaaaaaatgggttcactccaatctatgctggaaatgattccgggaatgcagggacagattagcgaaggtgacattgacaaagaagaattgaaacatcaggaagcaatactaagctccatgacacgcaaggagcgcgctaaccatttaatcataggacctacgcgcagaagccgtatagcaagaggttccggcacatcggttgcggaagtagcgcgtcttataaaaaagtttgagaaaatgcgcggcatgatgaaaaaaatggcaaaaggcgcaaggggcggaggaatgcctaatataccgggaatgttctccggttaa

SEQ ID NO: 34340 - protein, 245 aa, Unknown
  Obtained from environmental sample
  DOMAIN (1)...(96): SRP54-type protein, GTPase domain
  misc_feature (1)..(245): Xaa is any amino acid
MMEELSRLKKAVNPDEMLLVADSMTGQSAADIAKTFDEKIGLTGVILTKFDSDTRGGAALSLKTITGKPLKFTGTGEKPEDFEPFHPDRIAGRILGMGDVVSLVEKAQEVIDQKEAIELQKKMEKENFTLDDWLNQLRAVKKMGSLQSMLEMIPGMQGQISEGDIDKEELKHQEAILSSMTRKERANHLIIGPTRRSRIARGSGTSVAEVARLIKKFEKMRGMMKKMAKGARGGGMPNIPGMFSG

SEQ ID NO: 34341 - DNA, 921 bp, Unknown
  Obtained from environmental sample
  misc_feature (1)..(921): n is a, c, g, or t
atgacggccaatattaattccgtaaccaaaaccctgatagaaaacagcaaaaatgttgccgaattaacagaagcgtcaggaaacggaaaaaccggggttcaaacagtggcggagaaaatacaggaaatagcgagggactccgaggggcttttggaaatcaacgcggttatggacaatatcgccagccagactaatttgctttcgatgaacgcggcgatagaagcggcccacgccggagaagcgggaaaagggtttgccgttgtcgccgacgagattcgcaagcttgcggaatcgtcaagcgagcagtcgaaaacgacggctgggatgctgaaaaagataaaggcgtccatagacagcattacggcctcttcaaacgaggttatttcccgctttgaggctattgatacgggagtaaaaacggtttctacgcatgaactgagcatccgcaacgcgatggaagaacaggaagcgggcggaaagcagatactggactccatgggccgcctgaaagagataagcgtaacggtgaaaaaaggcgcgggtgaaatgctggaatcgggggataaccttaacaggcagacctctgagttcatagaaatcagcaatgagtcgatgaacggcatgaacgagatagtgaacggggcaatgaaggagataaaaagcgcggtaacccttgtagacgaaatgagcgccgagaacagccgtaatttcgaagatctaaaggcggaatcgtcaaaattcaaagtagaaacaggcaacgagaagaaaaaggttctcgtgattgatgatgaggaaactgttcttacgctgacaaagagcgtactgcaaaataattatgacgttaccacagccagttcgggcaaacaggctttgaaaatgttattcaggggctggttccccatttggtgttgctggatttga

SEQ ID NO: 34342 - protein, 306 aa, Unknown
  Obtained from environmental sample
  DOMAIN (1)...(250): Methyl-accepting chemotaxis protein (MCP) signaling domain
  misc_feature (1)..(306): Xaa is any amino acid
MTANINSVTKTLIENSKNVAELTEASGNGKTGVQTVAEKIQEIARDSEGLLEINAVMDNIASQTNLLSMNAAIEAAHAGEAGKGFAVVADEIRKLAESSSEQSKTTAGMLKKIKASIDSITASSNEVISRFEAIDTGVKTVSTHELSIRNAMEEQEAGGKQILDSMGRLKEISVTVKKGAGEMLESGDNLNRQTSEFIEISNESMNGMNEIVNGAMKEIKSAVTLVDEMSAENSRNFEDLKAESSKFKVETGNEKKKVLVIDDEETVLTLTKSVLQNNYDVTTASSGKQALKMLFRGWFPIWCCWI

SEQ ID NO: 34343 - DNA, 660 bp, Unknown
  Obtained from environmental sample
  misc_feature (1)..(660): n is a, c, g, or t
ttgcctgtttctactttgaattttgacgattccgcctttagatcttcgaaattacggctgttctcggcgctcatttcgtctacaagggttaccgcgctttttatctccttcattgccccgttcactatctcgttcatgccgttcatcgactcattgctgatttctatgaactcagaggtctgcctgttaaggttatcccccgattccagcatttcacccgcgccttttttcaccgttacgcttatctctttcaggcggcccatggagtccagtatctgctttccgcccgcttcctgttcttccatcgcgttgcggatgctcagttcatgcgtagaaaccgtttttactcccgtatcaatagcctcaaagcgggaaataacctcgtttgaagaggccgtaatgctgtctatggacgcctttatctttttcagcatcccagccgtcgttttcgactgctcgcttgacgattccgcaagcttgcgaatctcgtcggcgacaacggcaaacccttttcccgcttctccggcgtgggccgcttctatcgccgcgttcatcgaaagcaaattagtctggctggcgatattgtccataaccgcgttgatttccaaaagcccctcggagtccctcgctatttcctgtattttctccgccactgtttga

SEQ ID NO: 34344 - protein, 219 aa, Unknown
  Obtained from environmental sample
  misc_feature (1)..(219): Xaa is any amino acid
MPVSTLNFDDSAFRSSKLRLFSALISSTRVTALFISFIAPFTISFMPFIDSLLISMNSEVCLLRLSPDSSISPAPFFTVTLISFRRPMESSICFPPASCSSIALRMLSSCVETVFTPVSIASKREITSFEEAVMLSMDAFIFFSIPAVVFDCSLDDSASLRISSATTANPFPASPAWAASIAAFIESKLVWLAILSITALISKSPSESLAISCIFSATV

SEQ ID NO: 34345 - DNA, 648 bp, Unknown
  Obtained from environmental sample
  misc_feature (1)..(648): n is a, c, g, or t
gtggggatttccccggaacagcagaaaacgcttttcacggcttacaaccaggccgacagcgccgtagcgaaaaatttcggcggtaccggccttgggctgttcatcgccaaacggattgtggaactgatgcagggaacgatacgggttgagtcggaaccgggcaagggcgcgaaatttacatttaccataaaagcgaaacaggggacgcggaaaactgcgtcttcaaacgctccaacctcggatataaaagccgccgatttacatttacagggttataccatattggtcgcggaagacatggactttaaccgtgaagtcctttccaaatatcttgaaaggaccggcgtaaccattgattttgccgaaaacggcaaaatagccattgacaagttcaaagagaatccggataaatacacagtgattttcatggacattaacatgccggaaatgaacggtgacgaggcggcaaaactaataagggcgcttgatataaagaaggcgaaggagatacctattatcgcaatgaccgcggatgtttttaaggaagacatcgacaaatgcctggccgcgggcatgaacgatcacatcccaaagccggttgtcccgaaaatgatactcgcgaagctcaaacaatatatgggagtatga

SEQ ID NO: 34346 - protein, 215 aa, Unknown
  Obtained from environmental sample
  DOMAIN (1)...(66): Histidine kinase-, DNA gyrase B-, and HSP90-like ATPase
  misc_feature (1)..(215): Xaa is any amino acid
MGISPEQQKTLFTAYNQADSAVAKNFGGTGLGLFIAKRIVELMQGTIRVESEPGKGAKFTFTIKAKQGTRKTASSNAPTSDIKAADLHLQGYTILVAEDMDFNREVLSKYLERTGVTIDFAENGKIAIDKFKENPDKYTVIFMDINMPEMNGDEAAKLIRALDIKKAKEIPIIAMTADVFKEDIDKCLAAGMNDHIPKPVVPKMILAKLKQYMGV

SEQ ID NO: 34347 - DNA, 633 bp, Unknown
  Obtained from environmental sample
  misc_feature (1)..(633): n is a, c, g, or t
atgatttatattaccccttaccctaaaggatcaaccacaatgcgcaaactcatactgactacggcggctgtcgcggcggcgattgcgggggctttcgccggagagccgtctttcggaacgttcaccgacaacagggacgggcagacgtacaagacggtgaaaattgggacgcagacttggatggcggagaatatcaattatcagaccaaaggcgggtcttggtgctatgagaacagtgctgatagttgcaagaagtacggcagactgtacgattggatgaccgctaaaactgtctgtcctaaaggatggaagttgccgtctcgcgaggattggaatagattgattgcgacggcgggcggaaaagggattgcgggtaagaggttgaaatcaaagatcggtcggaacgaaaacggtaacggtaccgacaattacggattttcggctctgctcggcggtttccgtttctctgtaggtagttcttacgtttccggcagtctcggcggcttctggtggacggcaacggagaacggcggcagtgccgtctaccgaatcatacactacagcggcgactacgtggacgaggacgacgacgacaagagcaacggcttctcggttcgttgtgttgccgactga

SEQ ID NO: 34348 - protein, 210 aa, Unknown
  Obtained from environmental sample
  SIGNAL (1)...(29)
  misc_feature (1)..(210): Xaa is any amino acid
MIYITPYPKGSTTMRKLILTTAAVAAAIAGAFAGEPSFGTFTDNRDGQTYKTVKIGTQTWMAENINYQTKGGSWCYENSADSCKKYGRLYDWMTAKTVCPKGWKLPSREDWNRLIATAGGKGIAGKRLKSKIGRNENGNGTDNYGFSALLGGFRFSVGSSYVSGSLGGFWWTATENGGSAVYRIIHYSGDYVDEDDDDKSNGFSVRCVAD

SEQ ID NO: 34349 - DNA, 591 bp, Unknown
  Obtained from environmental sample
  misc_feature (1)..(591): n is a, c, g, or t
gtgctgagtttggctcgctttttcacgggttatgttttagcggccgcactggggttgagtttggggctttactttgggcattttctaaatgcttggcgttttgtgaatcccattgttcaatttcttcgccctatttcgccaatcgcatggcttccctttgtggtgctgtggtttggaataggggatgttcccgctgttataattgtgtttatagcagcattttttccaattttgctcacaacagtattggcggtgagcaaaatagaccgcaattatcttaaagtagcaaagaatttcgggttatcaaaattccacattttcacaaaaattatcatacctgccgcatttccgcatatcacaacagggtttcacattgcaatcggttcagcctgggtgttcatcgttgcgggagagatggtaggcgctcagtctgggcttggttttttaattgtggacgcaaggcaaaatatacgagcggacttgctgatgtctgcaatggtggtaattgggcttttgggattactgctagactggctttttagccttgcggaaaaacatatctacgcaaagcaagggataacaaaagattaa

SEQ ID NO: 34350 - protein, 196 aa, Unknown
  Obtained from environmental sample
  DOMAIN (2)...(189): Binding-protein-dependent transport system inner membrane component
  misc_feature (1)..(196): Xaa is any amino acid
MLSLARFFTGYVLAAALGLSLGLYFGHFLNAWRFVNPIVQFLRPISPIAWLPFVVLWFGIGDVPAVIIVFIAAFFPILLTTVLAVSKIDRNYLKVAKNFGLSKFHIFTKIIIPAAFPHITTGFHIAIGSAWVFIVAGEMVGAQSGLGFLIVDARQNIRADLLMSAMVVIGLLGLLLDWLFSLAEKHIYAKQGITKD

SEQ ID NO: 34351 - DNA, 381 bp, Unknown
  Obtained from environmental sample
  misc_feature (1)..(381): n is a, c, g, or t
atggcttttggcaattgtaccagcataaccttaccgaacaatattaccagcattgatgattgcctttttataggttgtaccagtcttcccagcataaacataccgaacggcgttacaagcattgcgagtgaagctttttcaggttgcaccagccttgaaagcgtaaccatacctgcagccgtaaccagcattgggagtaaagcttttggcgattgcgccagccttaccagcgtaaagtttttaggcacgatttcttcaaactggtttgacacaaatgcgttcaccggttctggtaacttgcgtgataagtattttgacgcaagtggaggaatagggacgtatgtaagggcaaaaggcggttcagtgtggacgaaacaataa

SEQ ID NO: 34352 - protein, 126 aa, Unknown
  Obtained from environmental sample
  misc_feature (1)..(126): Xaa is any amino acid
MAFGNCTSITLPNNITSIDDCLFIGCTSLPSINIPNGVTSIASEAFSGCTSLESVTIPAAVTSIGSKAFGDCASLTSVKFLGTISSNWFDTNAFTGSGNLRDKYFDASGGIGTYVRAKGGSVWTKQ

SEQ ID NO: 34353 - DNA, 813 bp, Unknown
  Obtained from environmental sample
  misc_feature (1)..(813): n is a, c, g, or t
gtgcgcctgagcggggggaaaatcgccgaagtccgccgcgccccaaacggcggcctggcactcaaaggcgaatgcgcggaatggatagacggcggcggcaagatacttatgcccggcatggtaaactgccattgccacggggacatgactctggcgcggggcctcggcgacggcatgaccctgcttgagcagattgaggcgttccgttcccataactggttctatcaatttattaccgatgacgacaggtactatgcgcggcagcttgcctactgcgagtcgcttttggcgggcgttacttttatttgcgaaaatatgtactggagtttgggaaaccgttccgttcaggcgatgaaggaaaccggcattaaaggcgcgttggttgaagacatccgcttcgatttcgccgattccgattccctgctgagcgatcgggcgttgggggaattctccgccgtctgccgtgaaagcggcatcgttcccgttatcgggcttccggcggaggaggattgggaaacgggccgcctgcataaaatgtataataaacttaaaaacattaacgccctgcaaacgcttcatctggcggagaatgcgtggcgtgtgaatatcattaaagaaaaatacggcgtaacgccgattgaataccttgcccgcgaaagcttactccatgaccggctgatcggctcccatgtcgtatgcgccgccgaaaacgaaatcaggctgctgaaagagtcaaacgtaaaggttgccaatacgcccctgtgcgaggtgaagatcgccgacggcgttgcccccgttcccgaaaatggttag

SEQ ID NO: 34354 - protein, 270 aa, Unknown
  Obtained from environmental sample
  misc_feature (1)..(270): Xaa is any amino acid
MRLSGGKIAEVRRAPNGGLALKGECAEWIDGGGKILMPGMVNCHCHGDMTLARGLGDGMTLLEQIEAFRSHNWFYQFITDDDRYYARQLAYCESLLAGVTFICENMYWSLGNRSVQAMKETGIKGALVEDIRFDFADSDSLLSDRALGEFSAVCRESGIVPVIGLPAEEDWETGRLHKMYNKLKNINALQTLHLAENAWRVNIIKEKYGVTPIEYLARESLLHDRLIGSHVVCAAENEIRLLKESNVKVANTPLCEVKIADGVAPVPENG

SEQ ID NO: 34355 - DNA, 867 bp, Unknown
  Obtained from environmental sample
  misc_feature (1)..(867): n is a, c, g, or t
atgaaaaatagaatcaggttcttgtggtttattgttcttgcgacagtaatagttatttcttttccttcatgtaaaggttctaaatccaaagctgacagcgatgactttaccgtggcgaatagcgatcaatggaaagaaacaatcaatgccattatgagcggtggcgataacaagactcacaccgtaaatgttaccgaagattttaacataccggggactactgtcaatacctttggcagtctgaacggcattaccataaccattaccggagataaaaaaatatctctggctgagggttcaatcggatccctgctccgtgtcggcggcggccaaacagttattttacaagacgttgaccttcaggggaataaaaccaataaatatcctctggtctatataaacggtaaagccatcatcatgcggggcagtgcttccgtatccggcaacgcgcggcgcggtgtgtatattaccgaaggaacctttaccatgaaagacgactcctctgtattcgataataccgtcaccggcaccagcggcggcggagtgtatgtcggcggaggtactttcataatacaggacaatgcctcggttaagggcaataccgctacttttaccataggcagaaataacactattgtcggtgcggaaggtggcggggtgtatatcgcttcaggcggtgtcgtcatcatggagggcggttctgtgaacggtaataatagtgtatccggcgccggagtttatattgccaacggcggttccttccgggcaataggcggttctttgtacggcaatactgccgagaacaacggcggcggaatgtacattacctggcgcggttcttccctcatggctcgtgccgaattctga

SEQ ID NO: 34356 - protein, 288 aa, Unknown
  Obtained from environmental sample
  SIGNAL (1)...(25)
  misc_feature (1)..(288): Xaa is any amino acid
MKNRIRFLWFIVLATVIVISFPSCKGSKSKADSDDFTVANSDQWKETINAIMSGGDNKTHTVNVTEDFNIPGTTVNTFGSLNGITITITGDKKISLAEGSIGSLLRVGGGQTVILQDVDLQGNKTNKYPLVYINGKAIIMRGSASVSGNARRGVYITEGTFTMKDDSSVFDNTVTGTSGGGVYVGGGTFIIQDNASVKGNTATFTIGRNNTIVGAEGGGVYIASGGVVIMEGGSVNGNNSVSGAGVYIANGGSFRAIGGSLYGNTAENNGGGMYITWRGSSLMARAEF

SEQ ID NO: 34357 - DNA, 534 bp, Unknown
  Obtained from environmental sample
  misc_feature (1)..(534): n is a, c, g, or t
atggataataattatactcagattttcaaaactaccgccgtttcgggcctgtccgcgcatgaatgggctaagataaagtcaaataaattgtcatttttgccgcaattattcgattattgcaaggccaacgcctgcggtaaatacaacaaatcatgggcatgtccgccggcttgcggatcaatggaagaacagagggaaaaaattaaaagcagtgaagatattttggtttttacgacaaagcataaactggaggatcctttcgaccacgagggtatgacgcgggccagggaacaacatacccttctgacgcaggaactaaggaagaaatttgagaacgcgcatctttacggcgccggggcgtgccctgtctgcgccgtttgcgcctaccctgcaccctgcccctttcccgaaaaaatgataggctccgtcgaggcggccgggatcgacgtgacagaattaagcaaggcggccggcatcgcctacaacaacggccctaataccgtaacctatttttcgataatactgttgaaataa

SEQ ID NO: 34358 - protein, 177 aa, Unknown
  Obtained from environmental sample
  misc_feature (1)..(177): Xaa is any amino acid
MDNNYTQIFKTTAVSGLSAHEWAKIKSNKLSFLPQLFDYCKANACGKYNKSWACPPACGSMEEQREKIKSSEDILVFTTKHKLEDPFDHEGMTRAREQHTLLTQELRKKFENAHLYGAGACPVCAVCAYPAPCPFPEKMIGSVEAAGIDVTELSKAAGIAYNNGPNTVTYFSIILLK

SEQ ID NO: 34359 - DNA, 687 bp, Unknown
  Obtained from environmental sample
  misc_feature (1)..(687): n is a, c, g, or t
atggaaagcagtcaagtcaatgaatttttaaaaaaatactcaacgcttctttgtgaaagggacatgatcgaaaatgagctctaccttaaattcgatgtaaagcgcggattaagggatataagcggaaaaggcgtgcttgtgggcttaactgaaatttccgaaattgtttctcatttaatcgaaaacggcaattatgtgccctgtgaaggcaaactttactaccgtggaatagatgttgaagatatagtaaaaggcttttgggacgacaagcgttttggctttgaggaagtgtgttttctcctgctgttcgggcatttgccgaacaaaaacgagaacaaggaattttccgaccttctggaagaaaatacggctttacctgagaattttgtccgcgatacaatcatgaacgccgcgagcaaggacatgatgaattccctcgcgaaaagcgtgctgaccctctacgcttatgatgacaacgccgacgatatttctatcgagaatgttttacggcagtcggtaagccctatagcccagtttcccctgctcgctgtttacggatataagtcgtacgcccatttacacggacaacagagcctttgtaatccatccgccccctgcagggttgtccatccccccaaaaaatcctttaaaagcgttcgttccgattccacatttttccagttttga

SEQ ID NO: 34360 - protein, 228 aa, Unknown
  Obtained from environmental sample
  misc_feature (1)..(228): Xaa is any amino acid
MESSQVNEFLKKYSTLLCERDMIENELYLKFDVKRGLRDISGKGVLVGLTEISEIVSHLIENGNYVPCEGKLYYRGIDVEDIVKGFWDDKRFGFEEVCFLLLFGHLPNKNENKEFSDLLEENTALPENFVRDTIMNAASKDMMNSLAKSVLTLYAYDDNADDISIENVLRQSVSPIAQFPLLAVYGYKSYAHLHGQQSLCNPSAPCRVVHPPKKSFKSVRSDSTFFQF

SEQ ID NO: 34361 - DNA, 399 bp, Unknown
  Obtained from environmental sample
  misc_feature (1)..(399): n is a, c, g, or t
gtggtgataaaaaaaaagaaaaaaaaaaaaaggttttctctccccccccccccaaaaaaaaaaacaccggggggggggggatatttttttttttttttggggggccccttttccttcaaaaaaaaagggggggtttttttcccccgccccccccccccccccgggggaaattatttttttttttggggtgggggggaaaatcccccccccgccttttttttttttttttctccccggtggggggggggcctttttgggggggcccaaaaagggcccctcccccccccaaaaattgtttttttttttgggaaaagggggccccccccggggtttgaaaaattgggagttttttcccccccccccttttttggcccttcaaaaaggggggcaaggttttaa

SEQ ID NO: 34362 - protein, 132 aa, Unknown
  Obtained from environmental sample
  misc_feature (1)..(132): Xaa is any amino acid
MVIKKKKKKKRFSLPPPPKKKTPGGGGYFFFFLGGPFSFKKKGGVFFPRPPPPPGGNYFFFWGGGENPPPAFFFFFSPRWGGGLFGGAQKGPLPPPKIVFFFGKRGPPPGFEKLGVFSPPPFFGPSKRGARF

SEQ ID NO: 34363 - DNA, 570 bp, Unknown
  Obtained from environmental sample
  misc_feature (1)..(570): n is a, c, g, or t
ttgtcaggccttccgagggacaacctgcaatccctgaactttacccgcagaggcaggggcaatatatattacaccgtttccctgcgttacgcgataccgtttgagcttcaaaccttccgcgatgagggcatcggtgtttttatgagtatttatgatataaataccaacgaggaaatcaggggaaccgccctgcaaaacggaaaaacctaccgcgcaagggtaagggtgtcctcaaaccgggaccggtactacgtcgctctgcgcgttcccgttccttccggcgcggagattctggacgcgacgtttgttaccaccgcttcctacggagacaagggcggtacaagcgggaatgaacagatacgttcaagttcatggttaagccaccagtatattatggacaacgaggttcaatatttctgggatcgattttacaggggagaatcaacggtaagtttccttttccgaacggcaaggaggggagtgtatcccacgccgccggttcaggcggagtgtatgtatgaagcggaaattttcggacgcggttcggggcttctttatactattgagtag

SEQ ID NO: 34364 - protein, 189 aa, Unknown
  Obtained from environmental sample
  misc_feature (1)..(189): Xaa is any amino acid
MSGLPRDNLQSLNFTRRGRGNIYYTVSLRYAIPFELQTFRDEGIGVFMSIYDINTNEEIRGTALQNGKTYRARVRVSSNRDRYYVALRVPVPSGAEILDATFVTTASYGDKGGTSGNEQIRSSSWLSHQYIMDNEVQYFWDRFYRGESTVSFLFRTARRGVYPTPPVQAECMYEAEIFGRGSGLLYTIE

SEQ ID NO: 34365 - DNA, 768 bp, Unknown
  Obtained from environmental sample
  misc_feature (1)..(768): n is a, c, g, or t
gtgaggggaaacaagggcggaaagggaatcattcccttttacggattcatctccgcgctcgcactcgatccaattgaaaagaaacccctgtatcattttaaacctcgcacaaagatactctcactcggttttgccggctgcaatctccattgccctttttgccagaattggcatatctcccaaaatacggacataccgggaaagtggatgcaaccgggtgaaataatttccgccgctcttaaacaggataccccttccatcgcttacacatactcggagcctcttgttcatattgaatatattttggactgcatgacgcttgcacgcaggcacggaatagccaatgtgctggtaacgaacggctgtatcaaagcggaagccgccgccgaaattttaaaacttaccgacgcagccaacgtagacttaaaaactttttcgcaagaaacatacaaaaaaacactgaacggcgatttgcagaccgtacttgattttatcgggctttgccacaagatgggagttcatctggaaattacaactcttgtcgtgcctgatttaaatgactcaggagaagaacttggcaaagctgtggattttatcgcttccatcagtaaagagatcccatggcacctgacggcatatcatcccgattaccgatggaacgctccgcccaccaatcnncgcgtttataagagaaataaaaaaccgcgccgccaaaaaacttgcctttgtctatgccggaaatattgccggcgcggctttgccgggtga

SEQ ID NO: 34366 - protein, 255 aa, Unknown
  Obtained from environmental sample
  DOMAIN (41)...(199): Radical SAM superfamily
  misc_feature (1)..(255): Xaa is any amino acid
MRGNKGGKGIIPFYGFISALALDPIEKKPLYHFKPRTKILSLGFAGCNLHCPFCQNWHISQNTDIPGKWMQPGEIISAALKQDTPSIAYTYSEPLVHIEYILDCMTLARRHGIANVLVTNGCIKAEAAAEILKLTDAANVDLKTFSQETYKKTLNGDLQTVLDFIGLCHKMGVHLEITTLVVPDLNDSGEELGKAVDFIASISKEIPWHLTAYHPDYRWNAPPTNXRVYKRNKKPRRQKTCLCLCRKYCRRGFAG

SEQ ID NO: 34367 - DNA, 318 bp, Unknown
  Obtained from environmental sample
  misc_feature (1)..(318): n is a, c, g, or t
atgcgttatgcggatggtagcagaggcacgtcaagcccttatgatagccccacagcagggaattttttgagagctaaaagtggttggaacgagaatggcaatggcgaggataaatttagcttttcggctctgccgggtggtctcggcgattccgatggcagtttccgccatattggcaactacggctactggtggagtgcctcggagtacgatgctgacggtgcctactaccggcgcatgagctacaacggcgagtatgcacgctgggtcaacatcggtaagagtttcttgttcagtgttcgttgcgtgaaggattga

SEQ ID NO: 34368 - protein, 105 aa, Unknown
  Obtained from environmental sample
  misc_feature (1)..(105): Xaa is any amino acid
MRYADGSRGTSSPYDSPTAGNFLRAKSGWNENGNGEDKFSFSALPGGLGDSDGSFRHIGNYGYWWSASEYDADGAYYRRMSYNGEYARWVNIGKSFLFSVRCVKD

SEQ ID NO: 34369 - DNA, 837 bp, Unknown
  Obtained from environmental sample
  misc_feature (1)..(837): n is a, c, g, or t
atggtaaagttagagaacgtttatttcttcggcgaggggaaagccgaaggcgaagcgaagatgaaagagctgcttggaggcaaaggagcgaacctcgcggagatgactaatcttggaattccggttcctccgggtttcacgatttctacggaagtttgcgcggcttattatcagaataataaaaagtatcccgccggggtcaaagaagaagtcgagatcgtgctcaagaggctggagaaagtgatgaagaaaaagctgggcgatccgaacgatcccctgctggtttccgtgcgctcgggcgcggcagcttccatgcccggcatgatggacgcgatacttaaccttgggattaacgaccaggcggtacaggggcttgccaacaagacaaagagcccgcgcttcgcatgggacacgtacaggcgcttcatccagatgtacggcgacgtggtaatgggcgttgctcaagatcatttcgaggaagtcttaagctcggtcatgaagaagaacggctttgaacaggatacccagcttactgcgaaagaccttgaacacgttgtcgaggagtacaaaaaagtcgtgcgccagtacagcggcaaggatttcccgcaggatccgcataaacagctctggggcgcgattaacgcagtcttaggatcgtggatgaatgagcgcgcgattaaataccgcgatatcaataacatacacggcctgaaaggaacggcggtcaacgtacagtcgatggtcttcggcaacttcggcgaggactccggcgccggcgtgtgcttcagccgcgatccttcgaccggcataatattttctacggcgacttccttatga

SEQ ID NO: 34370 - protein, 278 aa, Unknown
  Obtained from environmental sample
  DOMAIN (5)...(278): Pyruvate phosphate dikinase, PEP/pyruvate binding domain
  misc_feature (1)..(278): Xaa is any amino acid
MVKLENVYFFGEGKAEGEAKMKELLGGKGANLAEMTNLGIPVPPGFTISTEVCAAYYQNNKKYPAGVKEEVEIVLKRLEKVMKKKLGDPNDPLLVSVRSGAAASMPGMMDAILNLGINDQAVQGLANKTKSPRFAWDTYRRFIQMYGDVVMGVAQDHFEEVLSSVMKKNGFEQDTQLTAKDLEHVVEEYKKVVRQYSGKDFPQDPHKQLWGAINAVLGSWMNERAIKYRDINNIHGLKGTAVNVQSMVFGNFGEDSGAGVCFSRDPSTGIIFSTATSL

SEQ ID NO: 34371 - DNA, 558 bp, Unknown
  Obtained from environmental sample
  misc_feature (1)..(558): n is a, c, g, or t
ttgaaactacatttcctctaccgttcttccggtttctgcaacacatatctgctcggcagcggaggagaagcgtctcccggagaggcaattattgtagaccccggcctgatggactcaaacctcctcaacatgatcgaagaaaacaactattcactaaggggagttctgattacccatgatcatccccaccatgttcaggggctcagggcaattctgcggatctatgataccgaggtcttcgcgataaatccggttgtcgaggaataccacacaacactgataagggacggagacaaaataaacatagggtcgtttaaaactgaggtcttttccgttcccggacattccgccgattccgccatattcaggattgaccgttttctttttacaggcgatgtcataagcgcctgccgtttgggaagtaccgcaagctcatattcggcggcaacccagacaagcgccatcatcaggaaaatcctttccctgcccggagattataccattcttccggggcacggcccccctttcttgcttgaagccgaacgccgtttcacatag

SEQ ID NO: 34372 - protein, 185 aa, Unknown
  Obtained from environmental sample
  DOMAIN (12)...(172): Metallo-beta-lactamase superfamily
  misc_feature (1)..(185): Xaa is any amino acid
MKLHFLYRSSGFCNTYLLGSGGEASPGEAIIVDPGLMDSNLLNMIEENNYSLRGVLITHDHPHHVQGLRAILRIYDTEVFAINPVVEEYHTTLIRDGDKINIGSFKTEVFSVPGHSADSAIFRIDRFLFTGDVISACRLGSTASSYSAATQTSAIIRKILSLPGDYTILPGHGPPFLLEAERRFT

SEQ ID NO: 34373 - DNA, 363 bp, Unknown
  Obtained from environmental sample
  misc_feature (1)..(363): n is a, c, g, or t
atgtgcctttttaccggggcggttctgcgaatgtccttttttaatttcgcggcactctcctcctgtgatttctcttccggggatatgcaatttatgtcaatggcgggagccacaatccgggattgcacatttgagggatcggagcttgtgaacatcaattttggggggggctttataatcgattcaactttcaacaagaccaatctgtacaacagccgctttataggcgcaaatatcgcgagaaccgatttcattgactgtaacctgaaacacacctggttcctgaaaacacgccgggaagatatttcctttaaagcatcaaatacggccgaagccatttttgaaatgggggactttgtttga

SEQ ID NO: 34374 - protein, 120 aa, Unknown
  Obtained from environmental sample
  misc_feature (1)..(120): Xaa is any amino acid
MCLFTGAVLRMSFFNFAALSSCDFSSGDMQFMSMAGATIRDCTFEGSELVNINFGGGFIIDSTFNKTNLYNSRFIGANIARTDFIDCNLKHTWFLKTRREDISFKASNTAEAIFEMGDFV

SEQ ID NO: 34375 - DNA, 792 bp, Unknown
  Obtained from environmental sample
  misc_feature (1)..(792): n is a, c, g, or t
atgaatattgagataacaaatgtcagtaaaaaattcggcaattttgttgccctgaatgacataagcataaacattcccaaaggggaaatcatagctctactaggaccttctggctgcggtaaaaccacgctcttgcgaattatagcgggtttggaaactcctgattctggcgtgataaaattctttggggaagatttcaccaataaaaaggtaaaagacaggaaagtgggatttgtatttcagcattacgctcttttcaagcacatgaacgtatttgagaacatcgcttttgggcttcgcatacgtcctaggaaagtacgccctgataaaaaaactatacatgaaaatgttatgcgtctcgtttcccttgttcagcttgagagttttgtgaaccgcttcccttcggagctttctggcgggcagaggcagcgcgttgcgcttgcgagagcacttgccgttgagcctaccgtgttgctgctagatgaacccttcggtgctcttgatgccaaagttcgcaaggaactcaggctttggcttcgccgcttgcacgacgaaattcacgttacaagtatttttgtaactcacgaccaagacgaggctcttgaagtttcggactcaatagtcattgtgaacaaagggaaaattgagcagataggaagtccagaagcggtatgcgactatccagcaaatccgtttgtcaccgagtttttaagcgatgtgaacagacctttagtaaaaaataagaaaaaaaaattgtttgatgtgataaatgacggtcggcaagggatttaa

SEQ ID NO: 34376 - protein, 263 aa, Unknown
  Obtained from environmental sample
  DOMAIN (28)...(213): ABC transporter
  misc_feature (1)..(263): Xaa is any amino acid
MNIEITNVSKKFGNFVALNDISINIPKGEIIALLGPSGCGKTTLLRIIAGLETPDSGVIKFFGEDFTNKKVKDRKVGFVFQHYALFKHMNVFENIAFGLRIRPRKVRPDKKTIHENVMRLVSLVQLESFVNRFPSELSGGQRQRVALARALAVEPTVLLLDEPFGALDAKVRKELRLWLRRLHDEIHVTSIFVTHDQDEALEVSDSIVIVNKGKIEQIGSPEAVCDYPANPFVTEFLSDVNRPLVKNKKKKLFDVINDGRQGI

SEQ ID NO: 34377 - DNA, 309 bp, Unknown
  Obtained from environmental sample
  misc_feature (1)..(309): n is a, c, g, or t
atggctttgaagcttaaaaaatgggatgtaacggaacacatggacaacgaggagtttatttccgagtatctaaaagcggcctttgaaagcggggacattcctgaaatcacccgcgccctgtccgatgtcgcccgcgcccgcaacatgaccgacctcgctgcgaaaatgggcatcacccgccaagggctttacaaaaccctctccgaaaacggcaaccccgaattcgccaccatccaaaaactcattgccgccctgggcttgcaaatgagcataattacaccagctaacactgtggggaaaggggcataa

SEQ ID NO: 34378 - protein, 102 aa, Unknown
  Obtained from environmental sample
  DOMAIN (40)...(92): Helix-turn-helix
  misc_feature (1)..(102): Xaa is any amino acid
MALKLKKWDVTEHMDNEEFISEYLKAAFESGDIPEITRALSDVARARNMTDLAAKMGITRQGLYKTLSENGNPEFATIQKLIAALGLQMSIITPANTVGKGA

SEQ ID NO: 34379 - DNA, 924 bp, Unknown
  Obtained from environmental sample
  misc_feature (1)..(924): n is a, c, g, or t
ttgcacgacatattcattgacaataacaaggtcgccacggacgttaaaatagacgatgatgttaaaacctacccggcaaatccgaggagccacaaagtctcggtaaacgggtattaccctgccggaacgttgttttcttacggcgaagccgatgtaaccgtaatcaaggggcagaaggccaaatgcgacataactatgaaagctcccacagctaccgttacagatattacctataccgcaagtccaaacgttgtcaaaaacacaacagctatcaactttacgtttagcgcggctgtttccggcttaacggcaagcgagattactgtagcaaacggaacaggcgctgctaccaaagggacgcttacagaaaacagcggcacaagctggtcgctggcaattaccgtagacaccgccggaactgtaagcgtcagcattaacaaaaccggcattgaaagcggggtcaaaacagtggcggtcgctgtccagggtgacggcagttccacaaagccatttttgatattcgataaagatgacttatcccatatcggcaaacccgcatctggcgattatgccgcttggcctttagacaagtattacaaacagatggataacatcgacctttcctctataggcaactgggagccgattggaaatttaagcgaccccttcaccggaagctatgacggaaacggacataccatcagtagcctcaaaattactagcgcaaccgccaatggtgtgggcttgttcggctgtatcgattacggggcaattgtgaaaagcgtcggcgttgtaaactgtaatatcaacgttaccgtcaacgtagtcggcggcgtggtgggggacagcgacgacacctgcacggtgcaaaactgctatttcactggcactatttcaggtggtaatccctgtgccgaattctga

SEQ ID NO: 34380 - protein, 307 aa, Unknown
  Obtained from environmental sample
  misc_feature (1)..(307): Xaa is any amino acid
MHDIFIDNNKVATDVKIDDDVKTYPANPRSHKVSVNGYYPAGTLFSYGEADVTVIKGQKAKCDITMKAPTATVTDITYTASPNVVKNTTAINFTFSAAVSGLTASEITVANGTGAATKGTLTENSGTSWSLAITVDTAGTVSVSINKTGIESGVKTVAVAVQGDGSSTKPFLIFDKDDLSHIGKPASGDYAAWPLDKYYKQMDNIDLSSIGNWEPIGNLSDPFTGSYDGNGHTISSLKITSATANGVGLFGCIDYGAIVKSVGVVNCNINVTVNVVGGVVGDSDDTCTVQNCYFTGTISGGNPCAEF

SEQ ID NO: 34381 - DNA, 1233 bp, Unknown
  Obtained from environmental sample
  misc_feature (1)..(1233): n is a, c, g, or t
ttggccgagagggaacgccccctttcacagtcaacctggtccgtattcatggaaagccaggatcgtgacctgcgccgccgcgcctacgaaatgttctataattgttttgaatcccacaagactacgcttgccagcctttattcggggtcggtaaaacaggacgtgatcaaggcgcgggttcgcggtttttcgtcggcgcgggccgcggctcttttccccgacaacgtagatgagtccgtgtatgacaatctcgtcgccacggtcggtaaaaatcttgacgccctgcaccgttactacaaactgcgaaaaaaagcgctcgggctctctgaactcaggcactacgacgtgtacacgccgcttgtcaaatccgttaaaataaaaacaagctggaacgaggctgtcgatcatgtttccgcggcgcttgccccgttaggcgatgagtacgtaagcaccctgcgtacagggctattgggccgctgggcggaccgctatgagaacaagggcaagcgttccggcgctttttccgccggcagttttacgggcgatccctacatattgatgaattacaaggaagattcaatccgcgacgtgtttaccctcgcccacgagggcggccactcgatgcattcatggtactcggccaaatccaacccttttatgcactacaactacacgatttttgaggccgaagttgccagcaccttcaatgaggaactgcttttccatcatcttgaaaaaaactcaaacaacaaagaaatgcgcctgtatctcgtcaacaaacgggccgacgagcttctcgcaaccctgtaccgccagaccatgttcgccgaattcgagtccgtaacccaccggcttgaggaagaaggcaccccgctgacggtggaactgctccgctctgaataccgcaagctgctggaaaaatacttcggccctgaaatggtatttgaagaggcgagcgacatggaagggctgcgcataccccatttttaccgggccttttacgtatacaagtacgcaaccggcatatcggcgtccattgcccttgcccaaagggttctctcgggcggccagcgggagcgcgaagactatttcgcctttctcaagtcgggcggctcgcgtttccccatcgaatcgcttaagatcgccggcgtggacatgagcgcccccgaacctgtgcgcgccgcctgccgtactttcagcggccttgttgacgaactggagaagatgctgtaa

SEQ ID NO: 34382 - protein, 410 aa, Unknown
  Obtained from environmental sample
  DOMAIN (15)...(398): Peptidase family M3
  misc_feature (1)..(410): Xaa is any amino acid
MAERERPLSQSTWSVFMESQDRDLRRRAYEMFYNCFESHKTTLASLYSGSVKQDVIKARVRGFSSARAAALFPDNVDESVYDNLVATVGKNLDALHRYYKLRKKALGLSELRHYDVYTPLVKSVKIKTSWNEAVDHVSAALAPLGDEYVSTLRTGLLGRWADRYENKGKRSGAFSAGSFTGDPYILMNYKEDSIRDVFTLAHEGGHSMHSWYSAKSNPFMHYNYTIFEAEVASTFNEELLFHHLEKNSNNKEMRLYLVNKRADELLATLYRQTMFAEFESVTHRLEEEGTPLTVELLRSEYRKLLEKYFGPEMVFEEASDMEGLRIPHFYRAFYVYKYATGISASIALAQRVLSGGQREREDYFAFLKSGGSRFPIESLKIAGVDMSAPEPVRAACRTFSGLVDELEKML

SEQ ID NO: 34383 - DNA, 1041 bp, Unknown
  Obtained from environmental sample
  misc_feature (1)..(1041): n is a, c, g, or t
ttggcaaaacttaaaggccacgccgccatcggccatgtgctttattcgacatgcggcgcgaacgtcatggaaaacgtacagccctttataagccggttcaaacttggctctattgccgtcgcccataacggcaatcttaccaacgcggacgtcgtgcgggaattgctggaggacgccggcattggttttaccacttccagcgacagcgaagtcattgtcaacctgattgcgaaaaattacaaaaagggcctggaaaaggcctttaccgatacggtcaagtttatcaagggctcttacgcgctgatagtgttaacggatgacactctggtaggggcgcgggatccgaacgggattcgcccgctttgcctgggaaaaatcgccgacgggtcaaacggaggcaagcacggcgatagtggcggctggattctttcaagcgagtcctgcgcgatagaggcggcgggcggcgcgtttgtccgcgacattgagccgggcgaattggttataattaaccgcgaacaggtgctttcatacagtttttgcgaaaaaaccagacgcgccgtttgttcttttgagtatgtttattttgcccgtccggacagcgttattgacggcaacgacgtgtaccactccagaattcgcgctggtgaaattctggccagggaattccgcgttccggcggatcttgttatcggggttcccgattccggcattcccgcggcaatcggttacggcagggcgaccggcacgcccttcggcattggtatagtaaaaaacaagtacattggccgcacatttatctatccggatcagtcaatacgggagaggaccgtttcgcttaagcattttattatccgcagcgaagtctgcggcaagcgcgtcctgcttattgacgattcaattgtccgcggcacaacaagccgccgcctggttgcgttcttaaaagcgcgggcgcgaaagaagtacacatacggatttcttcaccgcctgtatgtttcccctgttatttcggtattgatacgcctcatcgcaaggatcttataa

SEQ ID NO: 34384 - protein, 346 aa, Unknown
  Obtained from environmental sample
  DOMAIN (199)...(342): Phosphoribosyl transferase domain
  misc_feature (1)..(346): Xaa is any amino acid
MAKLKGHAAIGHVLYSTCGANVMENVQPFISRFKLGSIAVAHNGNLTNADVVRELLEDAGIGFTTSSDSEVIVNLIAKNYKKGLEKAFTDTVKFIKGSYALIVLTDDTLVGARDPNGIRPLCLGKIADGSNGGKHGDSGGWILSSESCAIEAAGGAFVRDIEPGELVIINREQVLSYSFCEKTRRAVCSFEYVYFARPDSVIDGNDVYHSRIRAGEILAREFRVPADLVIGVPDSGIPAAIGYGRATGTPFGIGIVKNKYIGRTFIYPDQSIRERTVSLKHFIIRSEVCGKRVLLIDDSIVRGTTSRRLVAFLKARARKKYTYGFLHRLYVSPVISVLIRLIARIL

SEQ ID NO: 34385 - DNA, 495 bp, Unknown
  Obtained from environmental sample
  misc_feature (1)..(495): n is a, c, g, or t
ttggaaatttttcttttcatccgcagatacccanctttggaacacgcaggagaagtttccgagtatgtggtttctcagtatctttggggcgctttcgattcgatacatattgtgtatacccatatgttcagcatggtaaaactactcccgactaaacatcagataattccccttgtaaaagaaaaaatccaaaatgatattttcgaaatcggcggcgaaaagagagtggatttaaaatttgaattcataccgtccacaggagcggtttttgacgttctggttcctcagtatataaagggcgttatttacggagcgatggtagaagcatacgcgagtgaacagagctcgcgcatgaaggcgatggacgaggcctccaaaaacgcagaagatatgctcgcatctctgaaaataaattacaaccgcgcgcggcaggcgggcattacgcaggaaatggcggaaataacgggcggttctactgcgttagccgatcactag

SEQ ID NO: 34386 - protein, 164 aa, Unknown
  Obtained from environmental sample
  DOMAIN (1)...(161): ATP synthase
  misc_feature (1)..(164): Xaa is any amino acid
MEIFLFIRRYPXLEHAGEVSEYVVSQYLWGAFDSIHIVYTHMFSMVKLLPTKHQIIPLVKEKIQNDIFEIGGEKRVDLKFEFIPSTGAVFDVLVPQYIKGVIYGAMVEAYASEQSSRMKAMDEASKNAEDMLASLKINYNRARQAGITQEMAEITGGSTALADH

SEQ ID NO: 34387 - DNA, 1095 bp, Unknown
  Obtained from environmental sample
  misc_feature (1)..(1095): n is a, c, g, or t
atgcacgacggagcatgggatttccttaccaagcctgtcaatctggatcatctttcaatgctggtaaaacgggctctggaaaacagggaacttgtactgcgtcaccgggaactggaagccgatctggagcgcggccgcctttcctccagcatgattggcaagtcaaccgttatgcgaaaggtcttcgacactataagccgcgtcgcgcctaccaaagcctctgtcctgattaccggtgaatccggcgttggcaaagaactggtcgccgccgccatccacgagctttccccccgcaagggtaagcctctggttaaagtgcactgcgccgcgctttcggaaaacctccttgaaagcgaattgtttggccatgaaaaaggggcgtttacaggcgctgtctcacggcgtcgggggcgctttgaacttgcaaacggcgggacactttttctcgacgaaataggcgagatagaccagaacatacagataaagctgctgcgtgttttacaggagcgccaatttgagcgcgtcggcggtgaagaaaccgttgaaacagatgtccgccttgtcgccgccaccaacaaagacctaaaagccgaaatagaaaaaggcaatttccgcgaagacctctacttccgccttaatgtggtgagcatcaatgttcccccattacgcgaaagaaaggacgacattcccctgatagcggccagcttcctgaaggaaatcgccgccgaaaacggcaaaaccatcgaaggcatccacgaaaaggcgtattcacggctttacgcctacgactggcccgcaatatccgcgagcttcgcaactgcatcgaaagcgccgttgtcatgtgccgcaaaccgatcattgccgtggacgatctgccccccgccctgcaatcatattctgacgatgaaggctgggtgcgcgtacctctggattgcactcttgaggatgccgagaaaatcattatcaaagcggcgattggttttcacaagaacaagaccaaagccgccgaagtcctgggcatcggacgaaagacgctgcataggaaaattttggaggagtgacaggaatcagattcctcgggcaacccggatttga

SEQ ID NO: 34388 - protein, 364 aa, Unknown
  Obtained from environmental sample
  DOMAIN (70)...(215): ATPase family associated with various cellular activities (AAA)
  misc_feature (1)..(364): Xaa is any amino acid
MHDGAWDFLTKPVNLDHLSMLVKRALENRELVLRHRELEADLERGRLSSSMIGKSTVMRKVFDTISRVAPTKASVLITGESGVGKELVAAAIHELSPRKGKPLVKVHCAALSENLLESELFGHEKGAFTGAVSRRRGRFELANGGTLFLDEIGEIDQNIQIKLLRVLQERQFERVGGEETVETDVRLVAATNKDLKAEIEKGNFREDLYFRLNVVSINVPPLRERKDDIPLIAASFLKEIAAENGKTIEGIHEKAYSRLYAYDWPAISASFATASKAPLSCAANRSLPWTICPPPCNHILTMKAGCAYLWIALLRMPRKSLSKRRLVFTRTRPKPPKSWASDERRCIGKFWRSDRNQIPRATRI

SEQ ID NO: 34389 - DNA, 492 bp, Unknown
  Obtained from environmental sample
  misc_feature (1)..(492): n is a, c, g, or t
atgactacgccgaatcccggaataactgccgcgggaatcgcaatccntgctgtattgggaatnttatccgttctttcggtactggacgccatgaaaattataattacggaaaggaagaaaggaatagaatggctgcctttaattgtttcgggatactttattattcttctttcgcataatttaatagagcagtttcacttaagtttttcaagcgcggtaataagcatcatttacgcgcttacggcgctggcgtggatcatcttcggctttgtgcgccgttttgtttttatccgccgctttgggctggctcttgcgattttcgcggtcataaaacttttccttttggacttaaccgggcttacccaggggttcagaatattgtcgtatttcgcgcttggcatatcccttttagggatttcgtttgtatatcaatatttcagcaaacggctggagttaaaagaaggaatgatcattcatgaagaaaaaaaataa

SEQ ID NO: 34390 - protein, 163 aa, Unknown
  Obtained from environmental sample
  SIGNAL (1)...(26)
  misc_feature (1)..(163): Xaa is any amino acid
MTTPNPGITAAGIAIXAVLGXLSVLSVLDAMKIIITERKKGIEWLPLIVSGYFIILLSHNLIEQFHLSFSSAVISIIYALTALAWIIFGFVRRFVFIRRFGLALAIFAVIKLFLLDLTGLTQGFRILSYFALGISLLGISFVYQYFSKRLELKEGMIIHEEKK

SEQ ID NO: 34391 - DNA, 1026 bp, Unknown
  Obtained from environmental sample
  misc_feature (1)..(1026): n is a, c, g, or t
ttgttaccacacactaccgaaaggagaaccgttatgaaaaagaataacctgaaaggcacaaaaaagtatagtcatttaagccttgaggaacgagaagaaatagcaatcggtcttgaaaatgggaaaaaacaacatgaaattgctttattattaggacgtaatccaagcactatttccagagaaataaaaagaaataatccttctataagagatgtaaagtatagggcaaacagagcgcagttaaaagccgatgaaagaaagttaataacccataaaaaacaaagaattcccaacaaaaaattaagacggtttatctgtaaactgatcaaagcgggatattcacccgaaattatcgcttttaaggcatttgaaaaaaatgaaaaatggaaaaccaattatgagactatatatcaatggatataccatgaccgccatgatttaattccttttttaaccaaaagccacagaaaacgaaggaaaagaggctctagtaaacaaaaacgtcttcctaaagtaccaaacaggacaatgatcgaaaaacgtccgttatatgtaaacgcgcgttctcgtatcggtcattgggaaatagatacggctatatccagacagagcaaagcggcgataatggttttagtggaacgtcgcacaagatacattattattaaaaaattattagcaaaaacagcatttgaaatgcataacgctacggtaaaaagcttaaaagatttttccccaaaagtaagaaaaagtataacgtatgataacggtactgaaaacgctttacatgaacgtacaaataacaaactgcaaactaaatcatatttttgtaatccctatcatagttgggaaaaaggaacagttgaaaatcttatcggtattatcagaagattttatcctaaaaaaactgactggaaaaatattacacaatgggacttgaataaagtcgcaagatacattaataatagacctatgaagctgttaggcttcaaaacgccttatcaggttttcgttgcacttgctgcttga

SEQ ID NO: 34392 - protein, 341 aa, Unknown
  Obtained from environmental sample
  DOMAIN (186)...(337): Integrase core domain
  misc_feature (1)..(341): Xaa is any amino acid
MLPHTTERRTVMKKNNLKGTKKYSHLSLEEREEIAIGLENGKKQHEIALLLGRNPSTISREIKRNNPSIRDVKYRANRAQLKADERKLITHKKQRIPNKKLRRFICKLIKAGYSPEIIAFKAFEKNEKWKTNYETIYQWIYHDRHDLIPFLTKSHRKRRKRGSSKQKRLPKVPNRTMIEKRPLYVNARSRIGHWEIDTAISRQSKAAIMVLVERRTRYIIIKKLLAKTAFEMHNATVKSLKDFSPKVRKSITYDNGTENALHERTNNKLQTKSYFCNPYHSWEKGTVENLIGIIRRFYPKKTDWKNITQWDLNKVARYINNRPMKLLGFKTPYQVFVALAA

SEQ ID NO: 34393 - DNA, 1722 bp, Unknown
  Obtained from environmental sample
  misc_feature (1)..(1722): n is a, c, g, or t
atggtattgctggcaagtgacccggacagggaaggagaagcaattgcctggcatttgaaaaacgcgatcctgtcaaagctggagtccctgcccgttcagaggatcagttttaacgaagtaacccccgttgccataagggaagccgtcgcgcacccgcgtccaattgatgaggcccttgtcgaatcgcagaaggcccgcagggtgctggacagactggtcgggtacagcctttcgcccttactgtggaaaaaagttaagaacggactttccgcgggcagggtacaatctgtcgccctccgcttgatctgtgaacgggaaaaggaagtcgaatcctttatcccggatgaatactggagcctggacgcggattttaagattggcaggtcaaactttaccgcgcagcttgtaaaatggaacaacgcaaaaccggaactgccccatgaagcggcggcaaaggcaatcatcgacgctcttgcgggagccgattgcgaagtgagcgatattaaagaaactgataaaacaatcaagccaaaacccccgtttatcacgtcggaactgcaaaagaccgccgcaaaccggctgggttatacgtcacggaagacaatgcaggttgcccagcagctttacgaaggcgtgaatatcggccttacccgcatcggtcttatcacctatatgagaaccgattcggtgcgtgtgtcagaaacggccattgaagagcttcgggaatggcttggcaagaatcatcccaaagagcttcccgaaaaagcgctggagtatagctccgggaaaaaagcccaggacgcgcacgaggcgatacgcccgacttatgtcagctatactcccgactcggtcgccgaatacctgaaccgggaccagctcaggctgtacacgataatctgggaacgctttgtttcaagccagatgaccagcgccaaaacccgcaccgtcagcgttgagataaaggctgtctcgggcaagggggaggaagggctgttcagggtttccgggacaaaacttgttgaaaaaggtttttacaaagttatcaaactgctttcatcaaaagaagacaaggggaatccgtatcccccgcttaaagcaggggacaaggtcactattgaaaaattccatcccgagcagcattttacccagggcccgccccgttatacggaggcttccattatcgacattttgcgggagaaggaaataggcaggccctcgacttacgcgcccattatttcggtgctgctggaccgctattatgttacgcggtcaaacaagcagcttgtccccaccctgctgggaaagaaaatttgcgagatgctggttgaatattttcccggttatgttgatgttgattttacggcctctatggaatcaaagctggacaaggtagaggaaagccagttgaaatggcccgatatgctcaaggaattctgggggcctttcaaagcccaggttgacgaggtcggcaaatcactggagtccttcaagggttccctggacgagccgacggactatgtatgcgagaaatgcggcaagcccattgtgaaaaaactgggccgcaacggatttttcctcgcctgcacgggctttccggaatgccgcaatacaaggtcggttccccttgccgtctgccccaaatgcggcggcgatgtcgtcgcgcggaaaacaaaaggcagggggaaaggaattttacggctgcgccaattatccggaatgtga

SEQ ID NO: 34394 - protein, 573 aa, Unknown
  Obtained from environmental sample
  DOMAIN (505)...(543): Topoisomerase DNA binding C4 zinc finger
  misc_feature (1)..(573): Xaa is any amino acid
MVLLASDPDREGEAIAWHLKNAILSKLESLPVQRISFNEVTPVAIREAVAHPRPIDEALVESQKARRVLDRLVGYSLSPLLWKKVKNGLSAGRVQSVALRLICEREKEVESFIPDEYWSLDADFKIGRSNFTAQLVKWNNAKPELPHEAAAKAIIDALAGADCEVSDIKETDKTIKPKPPFITSELQKTAANRLGYTSRKTMQVAQQLYEGVNIGLTRIGLITYMRTDSVRVSETAIEELREWLGKNHPKELPEKALEYSSGKKAQDAHEAIRPTYVSYTPDSVAEYLNRDQLRLYTIIWERFVSSQMTSAKTRTVSVEIKAVSGKGEEGLFRVSGTKLVEKGFYKVIKLLSSKEDKGNPYPPLKAGDKVTIEKFHPEQHFTQGPPRYTEASIIDILREKEIGRPSTYAPIISVLLDRYYVTRSNKQLVPTLLGKKICEMLVEYFPGYVDVDFTASMESKLDKVEESQLKWPDMLKEFWGPFKAQVDEVGKSLESFKGSLDEPTDYVCEKCGKPIVKKLGRNGFFLACTGFPECRNTRSVPLAVCPKCGGDVVARKTKGRGKGILRLRQLSGM

SEQ ID NO: 34395 - DNA, 885 bp, Unknown
  Obtained from environmental sample
  misc_feature (1)..(885): n is a, c, g, or t
gtgtttcccaagtacagattggccgagaggcgattgacctctctttacgggaaaaacagcttgcaaataactcttgaacgttcacggcaatttccatctgtcggtaaaatagtgctgttggcagggtcagaaggggctttgcctgtttttgaggggctcaatatcgacaaaagagcatcctggacagtcaaagatatgcttgaagcgctttccgcccattccgaaggctttgatctgacctattttgcctgggccgactgtccttttttggatccggagcttgcaaaaaggcttgcggacaggcatttacgctatgccgccgaatattcttatgctgacggctggccttacggtattgcccccgaattgctttcacccggtaccgccgccatactagccaaaatcctcaaagatgacgataacggtccggtcgaacgggattccctgttctcagtgatacaaaaagacatcaacgcgtttgatattgagacggaaatatcatccatagacctgcgctgccaccgtctgaggctctgcgccgacagcaagcgtaacttgctcctgttgaggcgttttgcccatgataaaatccctgataccgccgccattgagcgcattatcgcggaaaagccggagattctcaggactcttccggcattttatccgattcaggtctatggcggctgtcctcagacttgcgctttctgcccctggccgaaagcaggcggcgccaaaaatggcgtggcaattacagaacgacgtgattttatggaagctgagcgcttcgattcacttctggaaaagatcgccgtgttttcaggagacgcagtcatagacctttccctttggggagagctttccctccatccccaaaaatggaactga

SEQ ID NO: 34396 - protein, 294 aa, Unknown
  Obtained from environmental sample
  misc_feature (1)..(294): Xaa is any amino acid
MFPKYRLAERRLTSLYGKNSLQITLERSRQFPSVGKIVLLAGSEGALPVFEGLNIDKRASWTVKDMLEALSAHSEGFDLTYFAWADCPFLDPELAKRLADRHLRYAAEYSYADGWPYGIAPELLSPGTAAILAKILKDDDNGPVERDSLFSVIQKDINAFDIETEISSIDLRCHRLRLCADSKRNLLLLRRFAHDKIPDTAAIERIIAEKPEILRTLPAFYPIQVYGGCPQTCAFCPWPKAGGAKNGVAITERRDFMEAERFDSLLEKIAVFSGDAVIDLSLWGELSLHPQKWN

SEQ ID NO: 34397 - DNA, 459 bp, Unknown
  Obtained from environmental sample
  misc_feature (1)..(459): n is a, c, g, or t
ttgtccttttctatgtacttcctgtactcgtcgagcgtagtggcccctatggtgcgcagttcaccccgtgcgagcataggcttcagcatgttcccggcgtctaccgcaccctccgccgacccggcgcccacgacggtgtgcagctcgtcgatgaagagtatgacgtctccgcgttcggtgacctcctgcagcaccgcctttaggcgctcctcgaactcgccccggaacttcgccccggcgatcagcgcgcccatatcgagcgacactacggatttgctcttgagaccctccggcacgtcgccgcggatgatgcgtagcgccagcccctccgcgatggccgtcttgccgacgccggggtcgcctatcagcaccgggttgttcttggtccggcgcgagagtatctgtatcatccgccggatctcgtcgtcgcggcctatcaccgggtctaatttgccgtga

SEQ ID NO: 34398 - protein, 152 aa, Unknown
  Obtained from environmental sample
  misc_feature (1)..(152): Xaa is any amino acid
MSFSMYFLYSSSVVAPMVRSSPRASIGFSMFPASTAPSADPAPTTVCSSSMKSMTSPRSVTSCSTAFRRSSNSPRNFAPAISAPISSDTTDLLLRPSGTSPRMMRSASPSAMAVLPTPGSPISTGLFLVRRESICIIRRISSSRPITGSNLP

SEQ ID NO: 34399 - DNA, 894 bp, Unknown
  Obtained from environmental sample
  misc_feature (1)..(894): n is a, c, g, or t
atgtcttttgacgacgtcgtcgggcaggaacacattacaaatacgcttaaaaggtcgattttggctgataaagtggcgcattcctatattttcaccggaacgcgcggggtaggaaaaaccacgaccgcgcgaattttggcgagagcgctcaactgcgaaaaaggtcctacgcctcaaccgtgcggggagtgcggcagttgcaaagcggctataagcggctcgaatttcaacgtcgtagagtttgacgcggcgtccaacagcggcgtaaacgacgttaaagaattgatggaatcggtaaattacgttcctgtcggcaacggctctaactttcgcgtttttttaatagacgaagcgcattctttgtctaaacaggcgtggaattcgctccttaaaacccttgaagaaccgccggcgaacgtcgtttttatttttgcgactaccgagccggaaaagataccgcaaacgattctttcccgctctataagatttgattttcgtcctatcggcgaagaggcgatttttaagcagttggtaaaaatatgcgatacggaacttattaaattcgaggagaatacgctgcgtttgatagcgcgaaaggcgaacggtagcatgcgtgattctctttcgcttctggaacaagtccgctcttactgcgaagaagaattaaacgagcggcaagcccgcgaagttttggggcttatttccgtcgagacctacgtaaaaattttggaattggcgagtgagcgtaaaatccccgaaattttggaaatctttgacaattcgttaaacgacggctatgacgtttcggaatttatcgacggatttatggaatttttgcgttcgcttttgttttttttcgataaagggaaatgcgccgcaggacggttcgactaa

SEQ ID NO: 34400 - protein, 297 aa, Unknown
  Obtained from environmental sample
  DOMAIN (28)...(220): ATPase family associated with various cellular activities (AAA)
  misc_feature (1)..(297): Xaa is any amino acid
MSFDDVVGQEHITNTLKRSILADKVAHSYIFTGTRGVGKTTTARILARALNCEKGPTPQPCGECGSCKAAISGSNFNVVEFDAASNSGVNDVKELMESVNYVPVGNGSNFRVFLIDEAHSLSKQAWNSLLKTLEEPPANVVFIFATTEPEKIPQTILSRSIRFDFRPIGEEAIFKQLVKICDTELIKFEENTLRLIARKANGSMRDSLSLLEQVRSYCEEELNERQAREVLGLISVETYVKILELASERKIPEILEIFDNSLNDGYDVSEFIDGFMEFLRSLLFFFDKGKCAAGRFD

SEQ ID NO: 34401 - DNA, 615 bp, Unknown
  Obtained from environmental sample
  misc_feature (1)..(615): n is a, c, g, or t
atgcggggaggcgctgtaatggcttctgctaagagtgatgttaaaggcgctgtaaagggcgatttaaagggctatgagccccgtctgaaaaagatttacagggagcagattgccccagagctgataaaagaattcggctataagacgcccatgcagactccaaaacttgaaaaaatcattgtaagcatgggcgtaggcgaggcgctgcaaaacaaaaaactgctggatgcggctattgatgaccttaccctgataaccgggcaaaaagcggtaaagaccaaagcgcgcaaaagcattgcgaatttcaaaatcagggccggccaggaaatcggcgcaaaagtaactcttaggggagcgatgatgtatgagttttttgacagacttgtgaatgtcgctcttccccgtgttaaggatttccgtgggatcaaccaaaacgctttcgatgggcacgggaattattccctgggacttactgaacagatcatatttccggagatcgactttgataaaattgagcgcgtagccggacttaatatcgcgatagttacaacggcaagaacggacgcggaagccaaagctttcctcgccaagttcggtatgccattcagaaaataa

SEQ ID NO: 34402 - protein, 204 aa, Unknown
  Obtained from environmental sample
  DOMAIN (49)...(105): Ribosomal protein L5
  misc_feature (1)..(204): Xaa is any amino acid
MRGGAVMASAKSDVKGAVKGDLKGYEPRLKKIYREQIAPELIKEFGYKTPMQTPKLEKIIVSMGVGEALQNKKLLDAAIDDLTLITGQKAVKTKARKSIANFKIRAGQEIGAKVTLRGAMMYEFFDRLVNVALPRVKDFRGINQNAFDGHGNYSLGLTEQIIFPEIDFDKIERVAGLNIAIVTTARTDAEAKAFLAKFGMPFRK

SEQ ID NO: 34403 - DNA, 324 bp, Unknown
  Obtained from environmental sample
  misc_feature (1)..(324): n is a, c, g, or t
atggcccaggcagtgcataaatttaaaataaagaaagaagatacagttcaggttatcacgggaaaagacaagggtaaacgaggcagagttctcagaatcctgcacgataaagaccgtgttcttgttgaaggcgtgaacattgtaaaaaaagcaaagaaaaaaagaagtcagcaggatcgaggcggcattattgaaatagaagcggctcttcattcttccaatgttatgatcgtctgcaaaaaatgcggtccgtcccgtatcggatataaaaaagacggaaaagacaaaaccagaattgncaggaaatgcggggaggcgctgtaa

SEQ ID NO: 34404 - protein, 107 aa, Unknown
  Obtained from environmental sample
  DOMAIN (10)...(43): KOW motif
  misc_feature (1)..(107): Xaa is any amino acid
MAQAVHKFKIKKEDTVQVITGKDKGKRGRVLRILHDKDRVLVEGVNIVKKAKKKRSQQDRGGIIEIEAALHSSNVMIVCKKCGPSRIGYKKDGKDKTRIXRKCGEAL

SEQ ID NO: 34405 - DNA, 372 bp, Unknown
  Obtained from environmental sample
  misc_feature (1)..(372): n is a, c, g, or t
atgattcaagtggaaaccttcctgaatgtggcggataattcaggcgtaaaacttgcccagtgtattaaggtgctgggaggaactcacaggagatatgcgaaaatcggcgatattgttgtggtggcggtaaaagaagccctgcctacatcaacaattaaaaaaggctctgtggaaaaagcggtggtggtgcgtacacataaagaataccgccgtcccgacggtacttacatcaggtttgatgataatgcctgtgtaattattgacgctgcgttaaacccaaaaggaaaacgtatcttcgggccggtagcaagagaattaagggaaagaagcgagtttatgaaaattgtttcccttgccccggaggtattgtaa

SEQ ID NO: 34406 - protein, 123 aa, Unknown
  Obtained from environmental sample
  DOMAIN (1)...(123): Ribosomal protein L14p/L23e
  misc_feature (1)..(123): Xaa is any amino acid
MIQVETFLNVADNSGVKLAQCIKVLGGTHRRYAKIGDIVVVAVKEALPTSTIKKGSVEKAVVVRTHKEYRRPDGTYIRFDDNACVIIDAALNPKGKRIFGPVARELRERSEFMKIVSLAPEVL

SEQ ID NO: 34407 - DNA, 879 bp, Unknown
  Obtained from environmental sample
  misc_feature (1)..(879): n is a, c, g, or t
gtgaagccgcatgcgggcggcgccgggaagcggaacatgggaaccctgtattccggtcccatggcaatttggtttaccctgttcttccttgcgcctattatcataataataatttacagtttccttaagaaagggctgtacggcggcgtggagccggaattttcacttgacgcttaccagtatttgggcgacgggatttttctgagcatcacgcttcgcaccattattacttcggccgtcgccactgttatcactatcttaatcgccctgccatgcggttatttcatggcaaaaagcaaaaatcaaacttttctccttttgcttatcattattcccttctggacaaattttttgatccgcgtgtttgcgtggatgaacattttggggaaccagggtttccttaacgaatttctgatccgcatcgggctgattaacgactatctccactttctctataaccaaaaagtagtgatactggtgctggtgtatatgtacctgccctacgcgatattgccgctgttctccagtatagacaaattcgatttttccctgctggaagccgcgcgtgatttgggtgcaaacaagttcgtcgccctggtcagggtgatgctgcctaatatacggggcggtatttttacggcggtgttgtttacgtttattcccatttttggcgcttacgcggtgccgcttctggtggggggtaaggactcctacatgctggggaatatcatcgccgaccagttgtccaagtcgcgcaactggccccgcgccgcggcgatttcgatggtgcttaccctggtgacaacggttggcgtattgctgatgatgaacgtccagaggcgggacgcttcaaggctgactgaggcgaaaaaatcatga

SEQ ID NO: 34408 - protein, 292 aa, Unknown
  Obtained from environmental sample
  DOMAIN (71)...(288): Binding-protein-dependent transport system inner membrane component
  misc_feature (1)..(292): Xaa is any amino acid
MKPHAGGAGKRNMGTLYSGPMAIWFTLFFLAPIIIIIIYSFLKKGLYGGVEPEFSLDAYQYLGDGIFLSITLRTIITSAVATVITILIALPCGYFMAKSKNQTFLLLLIIIPFWTNFLIRVFAWMNILGNQGFLNEFLIRIGLINDYLHFLYNQKVVILVLVYMYLPYAILPLFSSIDKFDFSLLEAARDLGANKFVALVRVMLPNIRGGIFTAVLFTFIPIFGAYAVPLLVGGKDSYMLGNIIADQLSKSRNWPRAAAISMVLTLVTTVGVLLMMNVQRRDASRLTEAKKS

SEQ ID NO: 34409 - DNA, 372 bp, Unknown
  Obtained from environmental sample
  misc_feature (1)..(372): n is a, c, g, or t
gtgcagggttaccccgaaggagtgtatgaggaaatcgcggacaatccccagcttattaaagatacgtttttctttattcccaaggaaggcggtccggcctatcttgacagtatgtgcattcttaaaggctcaaagaatatcgaccttgcctacaagttcatcaattttatccaccgcccggaaatatacgccgagtttgtcgacagcttcaaattccccgctacagcgaatattcccgcccgccaattcgtaaaagaagattcaatgtactctgccgaagatcttgtcaataccgagttgaaagacgatcttggtgaagcgctggatctttacaacgatgcctggtttaactcaatcagggttggggaataa

SEQ ID NO: 34410 - protein, 123 aa, Unknown
  Obtained from environmental sample
  misc_feature (1)..(123): Xaa is any amino acid
MQGYPEGVYEEIADNPQLIKDTFFFIPKEGGPAYLDSMCILKGSKNIDLAYKFINFIHRPEIYAEFVDSFKFPATANIPARQFVKEDSMYSAEDLVNTELKDDLGEALDLYNDAWFNSIRVGE

SEQ ID NO: 34411 - DNA, 621 bp, Unknown
  Obtained from environmental sample
  misc_feature (1)..(621): n is a, c, g, or t
atgaaaataaaaaggaatatcatcttgttttcatttttggcgggtctgctgtccgccacggtattgggctgcggcagaaaagagcggcttttcatttttaactggacatactacaccccgcaatcggtcattgagaaatttgaaaaagagtacaatgttacggtactctacgatgaatttgcctccaatgaagacatgtactcaaagattaaggccgggggtacgggctatgacatcgtgttcccgtcaggggattatgtgtctatcatgatccaccagaatatgcttgagaaaatcgacaagtccaagctgagcaacctgggcaacatcgatcctgcggtgctgagacagtcaactttcgatccgaatatggactattcgattccttattaccacggcgccgccggtgtgctggtcaataccgcgagggtgcctaattttgaaaggagctggtccatattcagccgcgcggatctccgcaaccgcatgactatgctggacgatatgcgggaagtgatgggcgacgctcttaaattcctcggttactcggtaaacaccacaaaccccgcgcagattaacgcggctaaagacctgatcaacaattcctggaaacccaattaa

SEQ ID NO: 34412 - protein, 206 aa, Unknown
  Obtained from environmental sample
  SIGNAL (1)...(23)
  misc_feature (1)..(206): Xaa is any amino acid
MKIKRNIILFSFLAGLLSATVLGCGRKERLFIFNWTYYTPQSVIEKFEKEYNVTVLYDEFASNEDMYSKIKAGGTGYDIVFPSGDYVSIMIHQNMLEKIDKSKLSNLGNIDPAVLRQSTFDPNMDYSIPYYHGAAGVLVNTARVPNFERSWSIFSRADLRNRMTMLDDMREVMGDALKFLGYSVNTTNPAQINAAKDLINNSWKPN

SEQ ID NO: 34413 - DNA, 615 bp, Unknown
  Obtained from environmental sample
  misc_feature (1)..(615): n is a, c, g, or t
atgaagaatctcaaagtatccgcgaaattgctggtaggtttcggtgtttccgccgcttttttgctgatggtcggcgttgttagtatcatcagtttgtacaatcttaacgatgaatataacgacgctatcacggaacatggcatgccgttgggcgatgccgcgcacgttttggaggctgtccataccatacgcgccgaaataaggggcagcatcctctttaccggcaataaggataaggttatagagtttagaaatgatatagaaaggcagtttaagcagtttgaggaggccacggggaaattcggcaaggctctcgatagtcatcccagcgccaaagcgttgatgaccgaggctatggacaaatacgatagagttttcaaaccgagcgtgcgtaaaatattggatggcgccgagaggggagcgccgaaagaggagttgctctcggaaatgctctccaacacgacgccgacggtggatttgatttcgacaaacatgagaaagtgtacggattttgatttggaggagttgcacgaatctgtgacaatcggggtcagactcgccacaacggttattgttatcatggttattcttacagtgctgtgctcgccgccataa

SEQ ID NO: 34414 - protein, 204 aa, Unknown
  Obtained from environmental sample
  SIGNAL (1)...(28)
  misc_feature (1)..(204): Xaa is any amino acid
MKNLKVSAKLLVGFGVSAAFLLMVGVVSIISLYNLNDEYNDAITEHGMPLGDAAHVLEAVHTIRAEIRGSILFTGNKDKVIEFRNDIERQFKQFEEATGKFGKALDSHPSAKALMTEAMDKYDRVFKPSVRKILDGAERGAPKEELLSEMLSNTTPTVDLISTNMRKCTDFDLEELHESVTIGVRLATTVIVIMVILTVLCSPP

SEQ ID NO: 34415 - DNA, 555 bp, Unknown
  Obtained from environmental sample
  misc_feature (1)..(555): n is a, c, g, or t
gtgggtggcggagggcctgcgcggatatggcagaacgcttatcgggaagtttcagcgggtggcgtaaaagacgaagaagcggactggatagggattatggctacaagactgaacgcgcaattaataaaagcgattatgggcgagtggtgcgcgcaggaagtggttacaaacccgcgcgaggttgaccctctgacggggcatgtgcttgtagccgccggctggaaaccggggttttctacagattacgacgcggtactgttagctgaacgttttggcgccaaaatgctgataaacctttcaaatatagaaaaagtttacacggcggatccaaagatcgatccaaatgcccgtccaatcgataaaataacatgggctgattttagagttatggtcggcgatgaatgggttcccgggaaaaatgttccgtttgatccggttgccagccgccatgcggagaaaatcggcttaaaagttatttgcgccgccggcaaaaatcttgacaacttaagaaaaattcttaatgatgaagattttaccggtactacaatttattaa

SEQ ID NO: 34416 - protein, 184 aa, Unknown
  Obtained from environmental sample
  DOMAIN (1)...(162): Amino acid kinase family
  misc_feature (1)..(184): Xaa is any amino acid
MGGGGPARIWQNAYREVSAGGVKDEEADWIGIMATRLNAQLIKAIMGEWCAQEVVTNPREVDPLTGHVLVAAGWKPGFSTDYDAVLLAERFGAKMLINLSNIEKVYTADPKIDPNARPIDKITWADFRVMVGDEWVPGKNVPFDPVASRHAEKIGLKVICAAGKNLDNLRKILNDEDFTGTTIY

SEQ ID NO: 34417 - DNA, 579 bp, Unknown
  Obtained from environmental sample
  misc_feature (1)..(579): n is a, c, g, or t
atgggcagggaacaaaacccgtatttaaaagcaaaagccatatatgagtggataattagcaatatgcagatttcagatttggcgttttactccgatcttattgacgcgttggaacggaaacaagccgatccatacgcagccgccatactttataccgcaatggcccgcgccgcaggcgttccgtgtattcctgtcgccggcgttttaataaatcagaatggaaagacagtccgccattattggacagaattctggatagacggttttggctggctgccggttgatcccgcaatgggcgcgggagtttttcaaataaaagacattgcgaaccagcgctctgatgatgagccgttaagcgcccgtgatttggcgaacttttactttggcaacttggacaaccagcgcataacgttctcaaggggggagactgtcctttcacagattgaaagccgaggaaggcttgtttcgcgtcctcagtcatactcactgcaaaatgtttgggaagaatccgtaggagggcttgagtcctattccagcctttggggagatattgttattagcggtgtttatgtgcagtag

SEQ ID NO: 34418 - protein, 192 aa, Unknown
  Obtained from environmental sample
  DOMAIN (39)...(97): Transglutaminase-like superfamily
  misc_feature (1)..(192): Xaa is any amino acid
MGREQNPYLKAKAIYEWIISNMQISDLAFYSDLIDALERKQADPYAAAILYTAMARAAGVPCIPVAGVLINQNGKTVRHYWTEFWIDGFGWLPVDPAMGAGVFQIKDIANQRSDDEPLSARDLANFYFGNLDNQRITFSRGETVLSQIESRGRLVSRPQSYSLQNVWEESVGGLESYSSLWGDIVISGVYVQ

SEQ ID NO: 34419 - DNA, 792 bp, Unknown
  Obtained from environmental sample
  misc_feature (1)..(792): n is a, c, g, or t
atggctcagttggcagagcggcacactcgtaatgtgcaggtcccgggttcgattcccggttctggcttaaattatgtaataaggaatatcaaaatgttacttaccatttccggcatattgattaatgtatcaaaaaaaagcgtaaaagaaatgcgcctctacgttaagccgccaaacggggaagtaacggtttccgctccgctatctatgagtaatgaggaaattgaactttttgcgcgttcaaaaatcagttggataaaaaaacatgtcgaaaaatttgataaccagccccgccattccaagcgtaagtatgtttcaggtgaaacgctgtatgtgtgggggaagccgtattatttgcaaaccgagtacgggagcagaaattcgcttgtgttatcaggcggcaaggcaatcttcactgtccgaagaaatagcgatgccgcgcagcgtgaaaaatttattagagagtggtatcgtaagcagttaaaagaagaaatagagcggcttcttccgaaatgggaaaaaattacgggattaaattgcaaggttttgcaaataaaatatatgactagccgctgggggtcttgtaaacctaaagccagaaaaatatgcctgaatttacagcttgcaaaaaaaacgcctgaatgccttgaatacattatcctgcatgagcttgttcacattttggaaaaacgccacaacgaacgattctattcgctgttggataaatatatgccgacgtggagagaaataaggtctacgctgaataatcagacgctcgactatctggaataa

SEQ ID NO: 34420 - protein, 263 aa, Unknown
  Obtained from environmental sample
  DOMAIN (51)...(257): Protein of unknown function DUF45
  misc_feature (1)..(263): Xaa is any amino acid
MAQLAERHTRNVQVPGSIPGSGLNYVIRNIKMLLTISGILINVSKKSVKEMRLYVKPPNGEVTVSAPLSMSNEEIELFARSKISWIKKHVEKFDNQPRHSKRKYVSGETLYVWGKPYYLQTEYGSRNSLVLSGGKAIFTVRRNSDAAQREKFIREWYRKQLKEEIERLLPKWEKITGLNCKVLQIKYMTSRWGSCKPKARKICLNLQLAKKTPECLEYIILHELVHILEKRHNERFYSLLDKYMPTWREIRSTLNNQTLDYLE

SEQ ID NO: 34421 - DNA, 876 bp, Unknown
  Obtained from environmental sample
  misc_feature (1)..(876): n is a, c, g, or t
atgacggcaacggcaaatgacctcaatttctttctgcatggcgacatgacactggacaatgtcgacctgaacatgaaattggaaattgccgacgtcaatttcaaaatgaacggcatcagcctgctgaccggggcgcatatcggccttgtctcggtagttgacgcagacctgaaaaacaaggtgttcaccctgaaggaagaccgcttcaacctgaatgaaattattctgaaatttgcaggttcggtacggatgcccggcgacatcagcgtcgacatgaccttcgcggccgaaaaaacggattttaagagcgttctggggcttgttccggccatatatatgaagaattttgaatcgataacaacaacaggcagcttcaccctgtcaggctatgtaaagggcgtctacaacgataaacagatgcccaacgcgggagtaagcctggcaatagacaacgccatgttcaaatatcccgacctgcccaaatcggtaaacaatatcaacgtcaaagccaacgcatattacgacggcgcagtgtttgacaaaacgacgcttgacgtggaaaaactgcatttcgagatggccggcaacccctttgacgcggaactgcgcgtaaagactccggcgagcgacatgcaggttgcggcaaagtttttgggcaagatcgactttaactccctgcttgacattattccgttagacgacatcgccctgaagggcctgctggaatgtgatcttgcgcttgcgggacggatgtcagccctggaaaacaagcaatacgaagactttgacgccaaaggcatgctgaaactcagcggcattgattttaaaagccgcgaatttcccgcaggctgtaaaaatcgcgggcacgcgccttga

SEQ ID NO: 34422 - protein, 291 aa, Unknown
  Obtained from environmental sample
  misc_feature (1)..(291): Xaa is any amino acid
MTATANDLNFFLHGDMTLDNVDLNMKLEIADVNFKMNGISLLTGAHIGLVSVVDADLKNKVFTLKEDRFNLNEIILKFAGSVRMPGDISVDMTFAAEKTDFKSVLGLVPAIYMKNFESITTTGSFTLSGYVKGVYNDKQMPNAGVSLAIDNAMFKYPDLPKSVNNINVKANAYYDGAVFDKTTLDVEKLHFEMAGNPFDAELRVKTPASDMQVAAKFLGKIDFNSLLDIIPLDDIALKGLLECDLALAGRMSALENKQYEDFDAKGMLKLSGIDFKSREFPAGCKNRGHAP

SEQ ID NO: 34423 - DNA, 1245 bp, Unknown
  Obtained from environmental sample
  misc_feature (1)..(1245): n is a, c, g, or t
atgatgatgaaaaaatcatttggccttctgggcgaaaagctgggccatagcttctcgccgctgatccacaggcagttgggggaatacgattatttattgtacgaagtatcccccgcagaccttgattcgttcatgacggaaaggcatttcgacgggataaacgtaaccatcccctataagcaggcggtaatgccttactgcgcgacgttttcgaatgaggcgcagatgatcggcagcgtgaacacgatcataaaagatagcgatggagcattgcacggacacaacacggatcatcatggttttcgtgtgatgctggaacagggcgggatcgatccgaacggaaaaaaagtgctggtgctgggcgacgggggatcggcgcggacagtgagggcggtattgggcgctctttgcgcacgcgagattgtaacgatctcccgtcggggggaaaaccactacggtaatatcgagcggcattataacgccgagatcatcgtgaatacaacgcctgtcggtatgtatcctgacaatggctcaagtcccctgagccttcctggctttgagcgactaacgggtgtggccgatttgatttacaatcccacgcgaaccatgctgttgctcgaagccggacggcttggcgttccctgcgtgaatggtctttacatgctggtggcccaggcagagatggcaagccgcttgtttttggcctggcaggcccatgaacctgccaggccggaattggtagaaaggattaccgtccttattctgagagaaacgcagaacatcgcccttatcggtatgcccggctgtgggaaaagcaccgttggccgcctacttgcacggacgatgggacggcctttctcggatatagacgagctgattgtgacggcagcgggtaagagcatcccacaaattttcgccgaagacggagaagaaaagttccgccagcacgaaacgcgcatactcggcgaagaagccaaaaagagtggtatggtactggcgacaggcggcggcgtggtaacgcggccggaaaatctcgacctattgcggcaaaacagcttaattgtgtatctgaaacgcgaattaaacgagcttattaccgatggccggccgctatccagcggcgtaggtgttcaggctctcgccgaacagcggctaccattatacgaagcatggagcgattgcgccgttcaggtagaagcgaaaccggagctgacgtctgcgcggattcgggaggcagtagggtaa

SEQ ID NO: 34424 - protein, 414 aa, Unknown
  Obtained from environmental sample
  DOMAIN (101)...(205): Shikimate / quinate 5-dehydrogenase
  misc_feature (1)..(414): Xaa is any amino acid
MMMKKSFGLLGEKLGHSFSPLIHRQLGEYDYLLYEVSPADLDSFMTERHFDGINVTIPYKQAVMPYCATFSNEAQMIGSVNTIIKDSDGALHGHNTDHHGFRVMLEQGGIDPNGKKVLVLGDGGSARTVRAVLGALCAREIVTISRRGENHYGNIERHYNAEIIVNTTPVGMYPDNGSSPLSLPGFERLTGVADLIYNPTRTMLLLEAGRLGVPCVNGLYMLVAQAEMASRLFLAWQAHEPARPELVERITVLILRETQNIALIGMPGCGKSTVGRLLARTMGRPFSDIDELIVTAAGKSIPQIFAEDGEEKFRQHETRILGEEAKKSGMVLATGGGVVTRPENLDLLRQNSLIVYLKRELNELITDGRPLSSGVGVQALAEQRLPLYEAWSDCAVQVEAKPELTSARIREAVG

SEQ ID NO: 34425 - DNA, 321 bp, Unknown
  Obtained from environmental sample
  misc_feature (1)..(321): n is a, c, g, or t
ttgcgcctgcaaatcgggaaattggacgggctttcggaggcggaactggaacgggttaaattggtgttggcgaataaaatcacgaatgaaggggaaattgtgattgcttcggaagaggaacgctcccagcggataaaccttgaaagggcgtattttcgcatagaagctcttattgcctcggcggctagactgcctaaaaagcggcaacccacaaagccaagcaaagcggctagggagaggcggtttgaggcgaaaaagaggcagggagcgaaaaagacggaaagggggcaaaaaaagcacccgcagggtgtagatgaataa

SEQ ID NO: 34426 - protein, 106 aa, Unknown
  Obtained from environmental sample
  misc_feature (1)..(106): Xaa is any amino acid
MRLQIGKLDGLSEAELERVKLVLANKITNEGEIVIASEEERSQRINLERAYFRIEALIASAARLPKKRQPTKPSKAARERRFEAKKRQGAKKTERGQKKHPQGVDE

SEQ ID NO: 34427 - DNA, 360 bp, Unknown
  Obtained from environmental sample
  misc_feature (1)..(360): n is a, c, g, or t
atgttgagagtcgacgacaaagaaaaaatgctgatcctctccgagtacggctacggcaaacgcatcgaatttacggaatttactccgcacggacgaggaaccggcggacagaaaatctacacagtagcggaaaaaacaggcgaaattgtaggctgcgtaacagtgttggataatgaggatataatgtgcatcacaagccaaggcaagtcgataaagttgaaagtaaacgatatccgcataatgggacgagccgcccaaggcgtacgcatattaagtatagataagcccgattttgtaatcggcgtagacagaatagtaaaagaagacgaagccgcagacaaagccgaaaaagcggagtaa

SEQ ID NO: 34428 - protein, 119 aa, Unknown
  Obtained from environmental sample
  DOMAIN (7)...(57): DNA gyrase C-terminal domain, beta-propeller
  misc_feature (1)..(119): Xaa is any amino acid
MLRVDDKEKMLILSEYGYGKRIEFTEFTPHGRGTGGQKIYTVAEKTGEIVGCVTVLDNEDIMCITSQGKSIKLKVNDIRIMGRAAQGVRILSIDKPDFVIGVDRIVKEDEAADKAEKAE

SEQ ID NO: 34429 - DNA, 645 bp, Unknown
  Obtained from environmental sample
  misc_feature (1)..(645): n is a, c, g, or t
ttgtgccgttatatgaatgattatgtagcggaaaaaataaaacagtttcctgaaaaattaataggttttgccgttgttcctcccggaggcgtgaaacacggcaaagaaacggcaaaagagatagaacgatgttttaacaacggacttaaaggagtaggggaactttttcccgaagggcagagttttgatcttattaacgaaaaagcgacttccggtttaacaggcgcgtgtaaggaacttggaatgccgttacttctgcacgcaaacgaaactgtcggtcattattatccgggaaagacaagtatacaaatgcaagacatagaaaaatttatactgaataatcccgatttaaaaataattcttgcccattggggcggcgggatatttatctacgagacaatgaaagaaatcaaggcaagttttagcaatgtgtactatgacatcgccgttaccccgtatctttttgacgagcgaatttaccgcgcggcgaaggcgttgggtttatgcgaaaaaattatctttggcagcgacttcccgcttctgccgccttcgcgctacataaaaggactggaaaacagcgggctttctgaagaggataaaaatctgatacttgggataaacgcgcagagactatttaatttatag

SEQ ID NO: 34430 - protein, 214 aa, Unknown
  Obtained from environmental sample
  DOMAIN (2)...(214): Amidohydrolase
  misc_feature (1)..(214): Xaa is any amino acid
MCRYMNDYVAEKIKQFPEKLIGFAVVPPGGVKHGKETAKEIERCFNNGLKGVGELFPEGQSFDLINEKATSGLTGACKELGMPLLLHANETVGHYYPGKTSIQMQDIEKFILNNPDLKIILAHWGGGIFIYETMKEIKASFSNVYYDIAVTPYLFDERIYRAAKALGLCEKIIFGSDFPLLPPSRYIKGLENSGLSEEDKNLILGINAQRLFNL

SEQ ID NO: 34431 - DNA, 312 bp, Unknown
  Obtained from environmental sample
  misc_feature (1)..(312): n is a, c, g, or t
gtgctatgcggcggtgcaacgcggacaaaatgggaaatgaggggtttgggtgcttttatgaccaatagactgaaatggctgcttcttccactggcggcgatggcgctggatttggcatcgaaagcttgggtgcttaaatcattgaagcccggcgagcaaattgagatcatcgaaaatttcttctatttgaagcccagcttcaacgctggcgccatttttggcatcatgcaggacacaaacccttggatccgcactccccttttgctggcggcgggccttggcgcgcttggctacttcgggtgggaatcctaa

SEQ ID NO: 34432 - protein, 103 aa, Unknown
  Obtained from environmental sample
  misc_feature (1)..(103): Xaa is any amino acid
MLCGGATRTKWEMRGLGAFMTNRLKWLLLPLAAMALDLASKAWVLKSLKPGEQIEIIENFFYLKPSFNAGAIFGIMQDTNPWIRTPLLLAAGLGALGYFGWES

SEQ ID NO: 34433 - DNA, 603 bp, Unknown
  Obtained from environmental sample
  misc_feature (1)..(603): n is a, c, g, or t
atgctgggcttttgccaactggatctatcgggcaggtattttgaaatcatcaaagaccggctgtactgcgatgacacagcgtccgcaaggcgccaatcgtgcaggtcggtttgctgcgaactggcgcacggcctatgcgtgctgctgtcccccataatcagctttaccgctgatgaggcatgggaatttttgccgggcgttgaaaaaacggttttcgagcagcgcttcccgcaagtaggggatatgcctgtattggaaaactggcgcagattttgggaaatccgcgaggccgtgcaagccgcgatggaaccccaccgcgcttcaaaggccattgggaccagcttggacgcgcatgtgcgtttgacgctgcccgattcggacgtccaaatgctcaacgcattgagcgaaaagctggaggacttatttgtggtatcgggcatcgaactcgccaagggcgaagcattagacgtggctgtcgagccgcacggcggcacacgctgcccgcgctgctggaaccactctggcggcgcagggagcggcgaagacgcggatctgtgtcctaggtgctatgcggcggtgcaacgcggacaaaatgggaaatga

SEQ ID NO: 34434 - protein, 200 aa, Unknown
  Obtained from environmental sample
  DOMAIN (164)...(192): Zinc finger found in FPG and IleRS
  misc_feature (1)..(200): Xaa is any amino acid
MLGFCQLDLSGRYFEIIKDRLYCDDTASARRQSCRSVCCELAHGLCVLLSPIISFTADEAWEFLPGVEKTVFEQRFPQVGDMPVLENWRRFWEIREAVQAAMEPHRASKAIGTSLDAHVRLTLPDSDVQMLNALSEKLEDLFVVSGIELAKGEALDVAVEPHGGTRCPRCWNHSGGAGSGEDADLCPRCYAAVQRGQNGK

SEQ ID NO: 34435 - DNA, 570 bp, Unknown
  Obtained from environmental sample
  misc_feature (1)..(570): n is a, c, g, or t
atgccaaaaatttatgcagcaaagtttgcagatggaacgcattgggtaggcaataactggccagattgcgaagcacttgtaagcggacaaacgggcgttaaatacaaatcttttgcaacaatggacgatgcagaggcttggattagcggaaagaagcagaaaatgaaggggctttacgtttatgtggatggctcttttatgccacatagcgagtatgccggctggtcttgggttgccgtggatgatggtgtggaaatagctaaagcctctggtacaaccccccgccctgcttttagcaggaacatagatggcgaactatatgctgcgtggcaggcgatggagtttttagcaaagaaaaaacgcaaaggcactatctgccacgattacgagggcgttgcctgctgggcaacgggtcagtggaatgccaacagcacggtttctcaaatttatgtgaatagaattgccgatataaaagtctgggcaaaattcaaaaaagttacagcccatagcaatgatgaatggaacgataaagcagacaagctggcaaaggaagctttgacggggaagtaa

SEQ ID NO: 34436 - protein, 189 aa, Unknown
  Obtained from environmental sample
  DOMAIN (55)...(187): RNase H
  misc_feature (1)..(189): Xaa is any amino acid
MPKIYAAKFADGTHWVGNNWPDCEALVSGQTGVKYKSFATMDDAEAWISGKKQKMKGLYVYVDGSFMPHSEYAGWSWVAVDDGVEIAKASGTTPRPAFSRNIDGELYAAWQAMEFLAKKKRKGTICHDYEGVACWATGQWNANSTVSQIYVNRIADIKVWAKFKKVTAHSNDEWNDKADKLAKEALTGK

SEQ ID NO: 34437 - DNA, 441 bp, Unknown
  Obtained from environmental sample
  misc_feature (1)..(441): n is a, c, g, or t
atgaaaaaaacggaagagactcccctgcactggtctcagcacaaggaaaaagccgcggggtattggcatttaaaacttcttctggttttattcaggttgtttccaaccgttatccttcgcgttatcgcgtttcccgtcggttttttctattttcttttttcaaaaaaagcaagaaatgagtcaaaacgttttttacaaaaggccgctccttttgtcacacaacatggtatcgcaaaaaaatgccgttctccttttggccccttaaggcatattatttccttctcccttaccctggtggaaaaaattgagtcatggggaggaaagtttcagtttaagaacgttcattttcaaaatgatgacatagaagaacttataagcgatttggaaaacaagaagggagtttttttaattacttcccatcttgggaatatcgaactttaa

SEQ ID NO: 34438 - protein, 146 aa, Unknown
  Obtained from environmental sample
  misc_feature (1)..(146): Xaa is any amino acid
MKKTEETPLHWSQHKEKAAGYWHLKLLLVLFRLFPTVILRVIAFPVGFFYFLFSKKARNESKRFLQKAAPFVTQHGIAKKCRSPFGPLRHIISFSLTLVEKIESWGGKFQFKNVHFQNDDIEELISDLENKKGVFLITSHLGNIEL

SEQ ID NO: 34439 - DNA, 411 bp, Unknown
  Obtained from environmental sample
  misc_feature (1)..(411): n is a, c, g, or t
atgatcatttgcggatatcctgaatttgatgaaaccgctccaaggggcagggtaaacggacggaagatttctaatttttgggctgccgtggttacgctctcaacagagctaaaggacgcgctgtgcggatttcgggtatatcccgtggacgcgtcattgcgcataacacggtgtcctttttttgacaagcgtatgggttttgacacggaaattcttgtgcgcctgtactggaaaaaagtatttccgatatttcatcccataaaagtaatttacccgtctgacgggatttccaatttccgtatggttagggataatatccgtatcagttttatgttcagcaggttgtgtgtgggtatgattctgcgcctgcctttgttgatttccagaaaaatcaaacgcgagaaaaaatga

SEQ ID NO: 34440 - protein, 136 aa, Unknown
  Obtained from environmental sample
  misc_feature (1)..(136): Xaa is any amino acid
MIICGYPEFDETAPRGRVNGRKISNFWAAVVTLSTELKDALCGFRVYPVDASLRITRCPFFDKRMGFDTEILVRLYWKKVFPIFHPIKVIYPSDGISNFRMVRDNIRISFMFSRLCVGMILRLPLLISRKIKREKK

SEQ ID NO: 34441 - DNA, 921 bp, Unknown
  Obtained from environmental sample
  misc_feature (1)..(921): n is a, c, g, or t
ttgcgcttaagaggtcgaagtcggtggtgtgaagttaaaatcaaaatcattaaagtcaaaataaatatgtatactttaatatgcgaggtaagcgaggaacagctcgagatcgcttccgccatcggctatggatgcgggatgggcggatgcgtcgagggggcggcgtccggcgggcgggtatctttgactttttattttgaacgggaggaacaagccgcttccgcagccgccgcgtttggggagacgttgtccatcaatatccctactattggatacgttgacgacaagcaggattggaacgccaaatggcgggaatccatggaaccggcgncagtcgcggacggggtgtgggtgtcgcctgcgtggcttgaaccgccgtgtgaaggacgtaaagcttggattaagatcgagcctaaaatggccttcggaacaggccaccacgagacgacgcggcttgcggttaaggcgctcatagagggcgggggagcggtcgccgggaagtcggtgatagacatcggcacggggtcgggggtgctgtgcttcgcggcggattacttgggcgcgaaaagggcggtcggggtggagatcgacggggactgccgggagaatttggcggaaaatcttagggataatccgccgcacgcgggcgggaacgtcgcttttataataggaacgctggattcgatctgtatcaataaagatagattttttgatgtagtgattatgaatatgcttatcaccgaatcatccccgttattagaacagattatccacatcgtcaaaagagattccgtgttgatttggtcggggatactggttgccgaatcggaagaggtcattaacaccgcgagtagttttggattcaagctatcatcggtattgatagaaaacgagtggtggtgcgggacgtttactctgtaa

SEQ ID NO: 34442 - protein, 306 aa, Unknown
  Obtained from environmental sample
  DOMAIN (29)...(305): Ribosomal protein L11 methyltransferase (PrmA)
  misc_feature (1)..(306): Xaa is any amino acid
MRLRGRSRWCEVKIKIIKVKINMYTLICEVSEEQLEIASAIGYGCGMGGCVEGAASGGRVSLTFYFEREEQAASAAAAFGETLSINIPTIGYVDDKQDWNAKWRESMEPAXVADGVWVSPAWLEPPCEGRKAWIKIEPKMAFGTGHHETTRLAVKALIEGGGAVAGKSVIDIGTGSGVLCFAADYLGAKRAVGVEIDGDCRENLAENLRDNPPHAGGNVAFIIGTLDSICINKDRFFDVVIMNMLITESSPLLEQIIHIVKRDSVLIWSGILVAESEEVINTASSFGFKLSSVLIENEWWCGTFTL

SEQ ID NO: 34443 - DNA, 1257 bp, Unknown
  Obtained from environmental sample
  misc_feature (1)..(1257): n is a, c, g, or t
ttgtataaaaaatacgctgatgaactgataagcaagggacaggcctattactgcttctgtaccgcggagcgtattgataaagtacggcaggaacgcgaaaaagccaatttgtccggctatgacagacattgcagggttgtacccccagaggaagccgcgaaacgggccgccgccggagaggcgcacacaataaggcttaaaataccgcttggcgagaccacccgctttaccgatcaccttttgggcgatattgaatggaaaaacgacgacgtaaaccccgatcctgtcctgctcaagtccgacggctttcccacctaccatctggcgaacgtcgttgacgatcatttgatggagataagccacgtcatgcgcgcccaggagtggctcgcgtcaacgcccctccatgtaatcatgtacaaaagtttcggctgggaaccgcccgagtactgccaccttcctatggttatgggccaggacgggaaaaagctcagcaaaaggcacggcgcgaccagcattgacgaattcaggcggcagggctatctgcctgaggcgctaatcaactatatcgccctgctgggcgcgtcctatgaagaagcgcgtcccgagggacgcgtgcgtcctgaaggacgcattgatattttcagcctgagtgaattggaacaactgtttagcatagacaagctcaacaaggccccggcgatattcgattacaaaaagctggaatggttcaacggccagtacatcaggatgaaaagcgacgaggagcttgcagtcctctgtctgccctccgccatagaagcgggtcttttcggcacaaaaggggctgaacccacgtcggatcagaaaaaaaccttcattagtgccatgccccttatccgcgagcgccttacatatacccatgaagccccggaaaagctcgcctatttattcgcgcctcccgcgctgccctcccaagaggaatttatccccaaaaaggccgatcttgctgaaactatcaggcttttacggctggcgcgggacatggttaaccagcttgccaacgaggttaacgacattgcggctgaggcttacatcaaggaacaggccgaaaaagccgcggtcaagctgggcgatctgatgatgcccttgcgagtcgccatcacgggcagccgcgtcagccccccccttttcggctcgcttcggcttttaggcgcccaagagtcgctggcaagggtggaaacagccctggagcaattagcaatgagcaatgagcaatga

SEQ ID NO: 34444 - protein, 418 aa, Unknown
  Obtained from environmental sample
  DOMAIN (2)...(242): tRNA synthetases class I (E and Q), catalytic domain
  misc_feature (1)..(418): Xaa is any amino acid
MYKKYADELISKGQAYYCFCTAERIDKVRQEREKANLSGYDRHCRVVPPEEAAKRAAAGEAHTIRLKIPLGETTRFTDHLLGDIEWKNDDVNPDPVLLKSDGFPTYHLANVVDDHLMEISHVMRAQEWLASTPLHVIMYKSFGWEPPEYCHLPMVMGQDGKKLSKRHGATSIDEFRRQGYLPEALINYIALLGASYEEARPEGRVRPEGRIDIFSLSELEQLFSIDKLNKAPAIFDYKKLEWFNGQYIRMKSDEELAVLCLPSAIEAGLFGTKGAEPTSDQKKTFISAMPLIRERLTYTHEAPEKLAYLFAPPALPSQEEFIPKKADLAETIRLLRLARDMVNQLANEVNDIAAEAYIKEQAEKAAVKLGDLMMPLRVAITGSRVSPPLFGSLRLLGAQESLARVETALEQLAMSNEQ

SEQ ID NO: 34445 - DNA, 432 bp, Unknown
  Obtained from environmental sample
  misc_feature (1)..(432): n is a, c, g, or t
atgaatctaggaacactaatcggcgtacttggcgccatgacgatggttattggctctatccttctttccggcaactcgattatggccttcgtagacatcccttctctcgcgctggtacttgttggttcttatttcgcgcttatgattgccttttcactgtcagacgcgctgtcggtttttgccgctatcaaacttaccttcaagcagcaggtattcaatcaacagggcgttatccagaaaatgatggctttttccgagaaagcccgccgcgaaggacttttggcgctggaagacgaactggaagaccttgacgatgaatttatgaaaaagggcctgcgcctgatggttgacggtaccgacgcggcggttatccgcgacctgatggaactggaattatcccagatgcaaaaccggcacntccttcaaaattaa

SEQ ID NO: 34446 - protein, 143 aa, Unknown
  Obtained from environmental sample
  SIGNAL (1)...(29)
  misc_feature (1)..(143): Xaa is any amino acid
MNLGTLIGVLGAMTMVIGSILLSGNSIMAFVDIPSLALVLVGSYFALMIAFSLSDALSVFAAIKLTFKQQVFNQQGVIQKMMAFSEKARREGLLALEDELEDLDDEFMKKGLRLMVDGTDAAVIRDLMELELSQMQNRHXLQN

SEQ ID NO: 34447 - DNA, 648 bp, Unknown
  Obtained from environmental sample
  misc_feature (1)..(648): n is a, c, g, or t
ttgggcgcggaggctccggctgcgggcggaccgaccacctttgtcgtaaacttctcgaataacggcaccctgctctccgcggaagacggggcaggcaatgtttccggcaccggccaggtacagatgaacgtggcctacgatgtgcagaccgccacccccaacgcggacggaacccccgtcaggcaggaatttgtcctggatttgggacaggtcggcggctttacccgttccatcacccagtacgccgaacaaagctcttccaaagcggtcgagcaggacggcagaacgatgggctatcttgagaacttcaagatcgattcatcgggcgtgattaccggcgttttttccaacggcaccaccagggcgctggcccaggtagccgtagccacttttgccaatcagggagggttggaaaaagcgggcgataatactttccgtatgtccaacaactccggacttgccaatatcgggccgtcaggcgccgccggcaaagctgaaattgtcgccggcgttttggaaatgtccaacgttgacatggcggatcagtttaccgacatgatcgtcacccagaggggcttccaggccaactcacggaccatacaaaccgcagatcagcttttgcaggaactgctgagcctgaagcggtaa

SEQ ID NO: 34448 - protein, 215 aa, Unknown
  Obtained from environmental sample
  DOMAIN (175)...(213): Domain of unknown function (DUF1078)
  misc_feature (1)..(215): Xaa is any amino acid
MGAEAPAAGGPTTFVVNFSNNGTLLSAEDGAGNVSGTGQVQMNVAYDVQTATPNADGTPVRQEFVLDLGQVGGFTRSITQYAEQSSSKAVEQDGRTMGYLENFKIDSSGVITGVFSNGTTRALAQVAVATFANQGGLEKAGDNTFRMSNNSGLANIGPSGAAGKAEIVAGVLEMSNVDMADQFTDMIVTQRGFQANSRTIQTADQLLQELLSLKR

SEQ ID NO: 34449 - DNA, 645 bp, Unknown
  Obtained from environmental sample
  misc_feature (1)..(645): n is a, c, g, or t
ttgcaagacggtttctgctccgtgcaagcgccgtcgagcgggtgggtcgtggcgatgctcgggcttcgcgacggcgagcgcgttcttgacatgtgcagcgcccccggcggcaaggccacgctcatggcggaacttgtcggcgacgcggggtttgtagccgcctgcgacagcggccggtggaagatgaagatgttggcggaagccgtagcggcgcagagccttagaaacgtccggctcgtggtatgcgacagcgtagacccgccatttgccggcacatttgacaaggtgctgttagacgccccgtgcagcggcagcggagtcctgcaacgccatcccgacgggcgtttcgtccgcaccgccgaagatattgccggcagggcgctgatacagcgcgaactgcttgacagcgcggcaaaattagtaagttacgaagggatactcgtctactccacgtgttcgcttgaacccgaggagaacgaacaccaaataaaatggtttttaaacgaacaccctgagttcaaattagatcacccgccggacgccatcccggcaatgtacatagacgacgacgactgcctacgaataacgccgtacaaacacaacatggacggtatgttcgcggcgcgcttcaaaaaatgtttatga

SEQ ID NO: 34450 - protein, 214 aa, Unknown
  Obtained from environmental sample
  DOMAIN (1)...(211): NOL1/NOP2/sun family
  misc_feature (1)..(214): Xaa is any amino acid
MQDGFCSVQAPSSGWVVAMLGLRDGERVLDMCSAPGGKATLMAELVGDAGFVAACDSGRWKMKMLAEAVAAQSLRNVRLVVCDSVDPPFAGTFDKVLLDAPCSGSGVLQRHPDGRFVRTAEDIAGRALIQRELLDSAAKLVSYEGILVYSTCSLEPEENEHQIKWFLNEHPEFKLDHPPDAIPAMYIDDDDCLRITPYKHNMDGMFAARFKKCL

SEQ ID NO: 34451 - DNA, 852 bp, Unknown
  Obtained from environmental sample
  misc_feature (1)..(852): n is a, c, g, or t
gtgaagaatgggactgtcgatattttaagcggcgaattcagggaacatagacaagaggacatgattacgaaaattgccaatgtggactatgatccaaatgccgattgcccgatgtggaagaagtttgtccgtgaaataatggattataaagcggaaataataaagtttgtccagactgcggcggggtggtctttgtccggcgacatttcagaacagacgatgttcattctgtacggtactggcgcaaacggaaaatcaacctttttgaatacgattatgtatatattgggcgattacgcgaccgcaacacctaccgaaacatttatgaaaaaaacaggggataatttttcaaatgacgttgcccgtctgcggagtacccggtttgttacgacgaccgaagttgagcaggggcggcggctgtccgaaccgctaattaaaaagataacaggcaatgacgaaatgactgcacggtttttgtatggggagttttttaatttcaagcctactttcaagattttcatggcgactaaccacaagcctgtgattaaaggcactgatcacggaatatggcggcggataaagctaatccctttcaccgaaaggataccggaagaaaaacaggacaagcatttggaattgaaactgcgggaagaggcaagcggtatccttaactggctgttggaagggatagaaaactggaagcaggaacggctgaaaacgccgaaggctgtattgttcgccactgacgaatacaggggggagatggacgttatcgggaatttcataaaggaaaaatgcggccaaaaaaaggagatggcaactccaattaaaagctatacaggcatattctga

SEQ ID NO: 34452 - protein, 283 aa, Unknown
  Obtained from environmental sample
  DOMAIN (2)...(278): Poxvirus D5 protein-like
  misc_feature (1)..(283): Xaa is any amino acid
MKNGTVDILSGEFREHRQEDMITKIANVDYDPNADCPMWKKFVREIMDYKAEIIKFVQTAAGWSLSGDISEQTMFILYGTGANGKSTFLNTIMYILGDYATATPTETFMKKTGDNFSNDVARLRSTRFVTTTEVEQGRRLSEPLIKKITGNDEMTARFLYGEFFNFKPTFKIFMATNHKPVIKGTDHGIWRRIKLIPFTERIPEEKQDKHLELKLREEASGILNWLLEGIENWKQERLKTPKAVLFATDEYRGEMDVIGNFIKEKCGQKKEMATPIKSYTGIF

SEQ ID NO: 34453 - DNA, 510 bp, Unknown
  Obtained from environmental sample
  misc_feature (1)..(510): n is a, c, g, or t
atggccgagtatgtaatgggtttggcaggatttttcttttttgtggcagttaaaatcattattcccttttatctggagatgcattctctggtgggactgctccttgcggcgataatattctggacgctggcattgacgctggtcgcttttcagttttttttcgctattcgcgcccggctggataccaagccgcttaaaataatcaaaaagtgttttattgttttttttgacaaccccggattttcgatttttaccctgttatataccatcgtaaccttgatcatatcggctgtttttgcttttcttataccgggcccggcgggaatgcttctttttttggatgaagcgctgcgtctgcgcctgatgaaatacgactggctggaagccaacccgcccgccgaaggttcccccaaacggagggctattccctgggatgtaatattaattgaagaacgggaaaagactggctcaagaacactgcgaaatttaatttttccctggaaagattag

SEQ ID NO: 34454 - protein, 169 aa, Unknown
  Obtained from environmental sample
  misc_feature (1)..(169): Xaa is any amino acid
MAEYVMGLAGFFFFVAVKIIIPFYLEMHSLVGLLLAAIIFWTLALTLVAFQFFFAIRARLDTKPLKIIKKCFIVFFDNPGFSIFTLLYTIVTLIISAVFAFLIPGPAGMLLFLDEALRLRLMKYDWLEANPPAEGSPKRRAIPWDVILIEEREKTGSRTLRNLIFPWKD

SEQ ID NO: 34455 - DNA, 792 bp, Unknown
  Obtained from environmental sample
  misc_feature (1)..(792): n is a, c, g, or t
atggagacacttggaaaaggtggctttggaactgtttttaaatataaacataaattgttagattatgatttcgctataaaaatatttcatccaagcccatttgttgaggatgaggaaaatgcagagaaccgtttctttcgagaagccaaaattttgtttgaactgaatcatgaaaacattattcgtgtgtatgatgtaggtcgtattaacggtaggccatttatccgcatggaatttattaatggtgatacgttacaaagttttatttcaaagaatggtattgtttcttttgatcgttcccaaaaacatattatcgctatattaaatggtttacgctacgcacatgaaaaaaaggttattcatagggatttgaaaccaacaaacgttatggttacaataggcaaaatcaaaataattgattttggtataagtgcatatttggaacatgaaaatcacacaaaattaacaaaaaccggtgagaatgttgtaagtggattatatactgatcctatgctcaatattgatcctaaattgaaagatatccgaagtgatatatattctgttggtgcaatatggtattatttactaactggacgcccccctacaagcgatgctagagattttctattcaaaacaaacaaagacatcacagaacttcaaagttcaattatttttaaatgccttgggagtgatctcaatgatcgttaccaatcatgcaatgaaattttaaatttgcttcaatcatcaaccgcgaaaatattcaaacaaatttcatatcgtcaaatcggctaa

SEQ ID NO: 34456 - protein, 263 aa, Unknown
  Obtained from environmental sample
  DOMAIN (1)...(246): Protein tyrosine kinase
  misc_feature (1)..(263): Xaa is any amino acid
METLGKGGFGTVFKYKHKLLDYDFAIKIFHPSPFVEDEENAENRFFREAKILFELNHENIIRVYDVGRINGRPFIRMEFINGDTLQSFISKNGIVSFDRSQKHIIAILNGLRYAHEKKVIHRDLKPTNVMVTIGKIKIIDFGISAYLEHENHTKLTKTGENVVSGLYTDPMLNIDPKLKDIRSDIYSVGAIWYYLLTGRPPTSDARDFLFKTNKDITELQSSIIFKCLGSDLNDRYQSCNEILNLLQSSTAKIFKQISYRQIG

SEQ ID NO: 34457 - DNA, 888 bp, Unknown
  Obtained from environmental sample
  misc_feature (1)..(888): n is a, c, g, or t
ttggaaggggatatagtacgacacagcgtcgatatgtataaacaaaccatgaatctgccgtcttcaggcagcggcgcaggtagcggcgcaggtagcggcgcaggtagcggcgcaaataacggcgtaaatatttccgcaaaatctcttgcaaaaaatcctcctgcgggttttttaaaagaaacagaaaaatttaaacttcctgttctcacccccgaaggcgagccatcgcaggattcaaaatacagacgggtagcgaaatttcttattttaatcggcagcgaacaagcggctgaaattttagcagaacttgatcccgaacaaatcaacgaaatatcaaaagaaatcgccttggttaaggttattaaaccggaagaaaaagaccaaatactcgcggaatttcattctctgttttccaaaccatttaattattacggatcatcgcgcggcggaatagaaactgcgcgccgtattctttatgcggcgaaaggtcccgaagaaggagaggaaattcttaacagagcgattccaaaatcgaaggataatcttttcggttttttggaagagtattccgcagaacagcttgtaatgcttttaaaaaacgaaacggatcaaacggcggcgcttttgctttccagaatgacggctaaactttccgcggaaatattaagtaaacttccgccgcaccgcaaggctgtaatcttaaaacgaatagcgcatcagagtgaagtctctcctgaagtgcttgaacaagtctcagccgctatgaaagaaaaaatcagaaacgtaagcgttgtttccaatgatataaaaattgacggtatgcaggctttaacggcgattctaaagcaaggagattattctttcggcgacaaattaattacgagatag

SEQ ID NO: 34458 - protein, 295 aa, Unknown
  Obtained from environmental sample
  misc_feature (1)..(295): Xaa is any amino acid
MEGDIVRHSVDMYKQTMNLPSSGSGAGSGAGSGAGSGANNGVNISAKSLAKNPPAGFLKETEKFKLPVLTPEGEPSQDSKYRRVAKFLILIGSEQAAEILAELDPEQINEISKEIALVKVIKPEEKDQILAEFHSLFSKPFNYYGSSRGGIETARRILYAAKGPEEGEEILNRAIPKSKDNLFGFLEEYSAEQLVMLLKNETDQTAALLLSRMTAKLSAEILSKLPPHRKAVILKRIAHQSEVSPEVLEQVSAAMKEKIRNVSVVSNDIKIDGMQALTAILKQGDYSFGDKLITR

SEQ ID NO: 34459 - DNA, 828 bp, Unknown
  Obtained from environmental sample
  misc_feature (1)..(828): n is a, c, g, or t
atggccgtagccagtctgtttgcctatttaaaagaccttttccccgaaagtctgcccgacggcgccgcgatgccggtagttgcctgcgacgatacctccgccaatcctgaggcggtttttcaggcgctctcttccattgacgtcatggcggttatcggcgcgccgctttatgtcgaaggccacttgtggggggtgatgtgcgtggaacaaaatggcacaccccgcgtgtggacggaaaatgaaaaggaatttgtcgccatgacggcgagcaccatcgcgggcgtcatcatgcgcgacatctataccataaagcttaaggacgcgctgcataaggcgatggaagcgagcaaggcgaaaagcgaattcctctccaacatgagccacgaaatgcgtacgcccttgaacgcgataaccggcatgacggcaatcggcagaaacgcgaaggacatggaacgcaaggactacgccctcggcaaaatccaggacgcttcgacgcatctgctcggcgtgatcaacgatgtgctcgacatgtcgaaaatcgaagcgaatatgctgaaattgtcctccgttgagtttagttttgaaaaggttctgaaaaaagtcgttgagttggtcaacttcagggtggacgagaaacgccaaaaactttcggtgcgcattgacagcgccatccccgccattctggcgggggacgaccagcgcttggttcaggttattatcaatctgctgggaaacgccgtcaagttcacgcccgaaaacggttccgtcaccctcgacgcgcgccttgcgggcgaagagacggcctctgcacgatacaaatttcggtaa

SEQ ID NO: 34460 - protein, 275 aa, Unknown
  Obtained from environmental sample
  DOMAIN (1)...(96): GAF domain
  misc_feature (1)..(275): Xaa is any amino acid
MAVASLFAYLKDLFPESLPDGAAMPVVACDDTSANPEAVFQALSSIDVMAVIGAPLYVEGHLWGVMCVEQNGTPRVWTENEKEFVAMTASTIAGVIMRDIYTIKLKDALHKAMEASKAKSEFLSNMSHEMRTPLNAITGMTAIGRNAKDMERKDYALGKIQDASTHLLGVINDVLDMSKIEANMLKLSSVEFSFEKVLKKVVELVNFRVDEKRQKLSVRIDSAIPAILAGDDQRLVQVIINLLGNAVKFTPENGSVTLDARLAGEETASARYKFR

SEQ ID NO: 34461 - DNA, 480 bp, Unknown
  Obtained from environmental sample
  misc_feature (1)..(480): n is a, c, g, or t
ttgacagaatcggcacgagggacattcccttttgccgccatcgccagttccgatctttcccgttgcgtggaaaccgcacagcttgtcaggggagaacgcgacattcccctggtgctggaacccgctttccgcgaactgtccttgggagcatgggaaggacgcactccggatgagatcggggaacgctttcccggcgcctatgccgaacggggcaaggatatggcccgcttccggcctgagggcggggagtccttcgcggacctggctgaacgggtcctgcccgtcttcggcgcatggacccggcagtatgcggggcgaaatttgctcatcgtggcccatgcgggagtcaatcgcgtcattcttgcgcgctgtatggccctagccttgcggcatgtgctggatattccccagccgtacgcctgctgcgcccaggtaggcagtgaatttttacgggacgactcttcacctgccctttggtga

SEQ ID NO: 34462 - protein, 159 aa, Unknown
  Obtained from environmental sample
  DOMAIN (1)...(120): Phosphoglycerate mutase family
  misc_feature (1)..(159): Xaa is any amino acid
MTESARGTFPFAAIASSDLSRCVETAQLVRGERDIPLVLEPAFRELSLGAWEGRTPDEIGERFPGAYAERGKDMARFRPEGGESFADLAERVLPVFGAWTRQYAGRNLLIVAHAGVNRVILARCMALALRHVLDIPQPYACCAQVGSEFLRDDSSPALW

SEQ ID NO: 34463 - DNA, 381 bp, Unknown
  Obtained from environmental sample
  misc_feature (1)..(381): n is a, c, g, or t
gtgctgttggttgaagacatcgagattaaccgcgagattgtgctggccctgcttgagccgacgcggcttgagatcgactgcgcggaaaacggcgcggaggctgtccgtatgtttgccgaagcgcccgacaagtatgatctcatcttcatggatgtgcagatgcccggtatggacgggtatgaggcgacgcggcttatcagggcgctggacgttccccgcgccggaaccgtcccgattttggccatgactgccaacgtattccaggaagatatcgaaaaatgcctccaggccggcatgaacaaccatatcgggaaaccgttggatttggatgaggttctggacaaactgcatacgtatttgtcttcaccaaagggcaggtga

SEQ ID NO: 34464 - protein, 126 aa, Unknown
  Obtained from environmental sample
  DOMAIN (2)...(117): Response regulator receiver domain
  misc_feature (1)..(126): Xaa is any amino acid
MLLVEDIEINREIVLALLEPTRLEIDCAENGAEAVRMFAEAPDKYDLIFMDVQMPGMDGYEATRLIRALDVPRAGTVPILAMTANVFQEDIEKCLQAGMNNHIGKPLDLDEVLDKLHTYLSSPKGR

SEQ ID NO: 34465 - DNA, 786 bp, Unknown
  Obtained from environmental sample
  misc_feature (1)..(786): n is a, c, g, or t
atgtatcagatcggcacgagttgctatgggaaaatttatgaaaaagccacaaaagatgcgaaagcaggaaagccctggaacacagccagaatgatagacgaggcagctaaaacgcccctctgtttccatcccggagagcaatggatgtacgggttttcccatgatgtactgggccggcttatagaagttatctcaggtgaaactctgggcgaatatttggaggaaacaatttccaagcctctggggcttaaagatacggcgttttatgtgcctcaggagaaacagaacagggtagtgacgccttacggccttggttcaaacggactggaaaaagtaaaggacgagggcaatgataacgcggctcccaatcccccggtctttgagtcgggcggcggaggcctttgttcaactatggatgattgcgccaaatatgcccaaatgctgcttaataatggcaagctgggaaacgagcgcgtcctttccagaaagaccatagagcttatcaggacaaaccattgcgaaacatcgatgctaaaacctgcattttttggccacatggccggctatggatacggcctgggcgtaagaaccatgttaagcactgccgaatcgggactcaacggttcttttggcgaatgggcgtgggatggttatatgggtaccttttactgcgtggatccaactgaggaaatgacagcccttttctttatccagctcgtatcgcagatcaacagcgatcttcagcgcggatttgttcagaccgtatacggagctattgatgattag

SEQ ID NO: 34466 - protein, 261 aa, Unknown
  Obtained from environmental sample
  DOMAIN (9)...(258): Beta-lactamase
  misc_feature (1)..(261): Xaa is any amino acid
MYQIGTSCYGKIYEKATKDAKAGKPWNTARMIDEAAKTPLCFHPGEQWMYGFSHDVLGRLIEVISGETLGEYLEETISKPLGLKDTAFYVPQEKQNRVVTPYGLGSNGLEKVKDEGNDNAAPNPPVFESGGGGLCSTMDDCAKYAQMLLNNGKLGNERVLSRKTIELIRTNHCETSMLKPAFFGHMAGYGYGLGVRTMLSTAESGLNGSFGEWAWDGYMGTFYCVDPTEEMTALFFIQLVSQINSDLQRGFVQTVYGAIDD

SEQ ID NO: 34467 - DNA, 699 bp, Unknown
  Obtained from environmental sample
  misc_feature (1)..(699): n is a, c, g, or t
gtgtctgctggaaaaaccatgaagaaaccggaaaccgccaaagtacggtgggacgcgattttccgcagactgagcgcatggcgcgttgagctttccggcgcggacccttcggttagcctcgtagcggaacagtaccggcacaacccctgggtggtgctggtttccactattttgagccttcgtaccaaggacgaagtaaccgtggcggcctcaaaacggctgcttgagcaagcgcctggccctgcagaaatggccgccatgaaagcggataaagtcgccgcccttgcctaccccgccggattttaccggaccaaggcggcaaaccttaaaaaaatcgccgctattcttcttgagcgctacaacggggaagtgccctcggacatgaacgcccttcttggtctgccgggcgtgggcagaaaaaccgccaacctggtacttatcgaagcctttgacctgcccggcatttgcgtggacattcacgtacaccgcataacgaaccgttgcggctgggtcagcaccaaaaacccggaagaaaccgaaatgacattgcgcaaaatccttccccaaaaatactggaaaagcatcaacgcccttttggtcctgtacggccagaatctctgccgccccgttagccctttctgctcccgctgcgttattaaagactactgtgcccgcgcgggaatagagaggtcaaggtga

SEQ ID NO: 34468 - protein, 232 aa, Unknown
  Obtained from environmental sample
  DOMAIN (119)...(148): Helix-hairpin-helix motif
  misc_feature (1)..(232): Xaa is any amino acid
MSAGKTMKKPETAKVRWDAIFRRLSAWRVELSGADPSVSLVAEQYRHNPWVVLVSTILSLRTKDEVTVAASKRLLEQAPGPAEMAAMKADKVAALAYPAGFYRTKAANLKKIAAILLERYNGEVPSDMNALLGLPGVGRKTANLVLIEAFDLPGICVDIHVHRITNRCGWVSTKNPEETEMTLRKILPQKYWKSINALLVLYGQNLCRPVSPFCSRCVIKDYCARAGIERSR

SEQ ID NO: 34469 - DNA, 477 bp, Unknown
  Obtained from environmental sample
  misc_feature (1)..(477): n is a, c, g, or t
atgattcgggtcggccttgggcaggatttgcaccgcctggcaagagggcggccgtttctgctgggcggggtcgagattcccgcgcccaggggggaggtgggacattctgacggcgacgcgctggcccacgcaataacagacgcggttttgggggccgctggacttggagacatcggagagatgtttcccccttcggatccggcctggaaagacgcggattccatggcgctgttgcgcaccgcttttttccgagtaaaacaggccggctggcatctagtcaaccttgactgcgtaataatctgcgaaaaccccaaagtgcttccctttagggaagcgatccgcaattccctgtcctcggcgctggaagttccggcagagcggattttccttaaaggcaaaacaaatgagggactggggccggtgggcaaaggcagggcggttgaggttctggccctgtgtctgctggaaaaaccatga

SEQ ID NO: 34470 - protein, 158 aa, Unknown
  Obtained from environmental sample
  DOMAIN (2)...(158): YgbB family
  misc_feature (1)..(158): Xaa is any amino acid
MIRVGLGQDLHRLARGRPFLLGGVEIPAPRGEVGHSDGDALAHAITDAVLGAAGLGDIGEMFPPSDPAWKDADSMALLRTAFFRVKQAGWHLVNLDCVIICENPKVLPFREAIRNSLSSALEVPAERIFLKGKTNEGLGPVGKGRAVEVLALCLLEKP

SEQ ID NO: 34471 - DNA, 453 bp, Unknown
  Obtained from environmental sample
  misc_feature (1)..(453): n is a, c, g, or t
atgatggacggctttcattggtcactgcatgggcatagattcagatacaatagcgaagtatggggcggaagcgatgtaaagcatcgtggtgtttgccccagtggttggcatttgcccagcgatgctgagtgggatgcgttgatgacagcagttggcggttcatcaactgctggcaagcatttgaaggcaaaagacggctggtatagttgtggtccttcaggttctggcaagagttattcgtgcgaggatacgcatggattttcggctctgcctggcggctacggctattccggtggcagtttcagcaatgtcggcagcgacggcggtggtagtgcttccgaggacggtagcaacagcgcctaccgccggtatatgtattacaactacgagtacgccctctaccactacctcaataagagctacttgttctctgtccgttgtttgcaggactga

SEQ ID NO: 34472 - protein, 150 aa, Unknown
  Obtained from environmental sample
  misc_feature (1)..(150): Xaa is any amino acid
MMDGFHWSLHGHRFRYNSEVWGGSDVKHRGVCPSGWHLPSDAEWDALMTAVGGSSTAGKHLKAKDGWYSCGPSGSGKSYSCEDTHGFSALPGGYGYSGGSFSNVGSDGGGSASEDGSNSAYRRYMYYNYEYALYHYLNKSYLFSVRCLQD

SEQ ID NO: 34473 - DNA, 516 bp, Unknown
  Obtained from environmental sample
  misc_feature (1)..(516): n is a, c, g, or t
ttgacaatgagggtctgggccgaagaaaaaaaactcggcagcgcggagattctttttaccatgccttttaccgaatgggagctcgtgctgggcaaatttctatcctgtttcacgctgttattcgctatggtcttgctcaccgtccctgttccgttaagccttttgccgcttgggtattttgacggcggggtgatcttctgcgaatacgcggggactttgttcctgggcgcaagcgccaccgccctgggggttttcctatcgggcgtttccaaaaaccaggcagccgcgtttgtggggagcgtggtcgtgctgcttgcggtaatgcttgtgcatcaactgacggcgagccttccttccggtcttgcggcctttctcaattacatttccctggcttttcattttgaaagcttctcgcgcgggcttttggacagccgtgatatggctttcttcctgataactacgattctctttttgtttctcaacacgcagtcccttgtatatagaaggtggaaatag

SEQ ID NO: 34474 - protein, 171 aa, Unknown
  Obtained from environmental sample
  misc_feature (1)..(171): Xaa is any amino acid
MTMRVWAEEKKLGSAEILFTMPFTEWELVLGKFLSCFTLLFAMVLLTVPVPLSLLPLGYFDGGVIFCEYAGTLFLGASATALGVFLSGVSKNQAAAFVGSVVVLLAVMLVHQLTASLPSGLAAFLNYISLAFHFESFSRGLLDSRDMAFFLITTILFLFLNTQSLVYRRWK

SEQ ID NO: 34475 - DNA, 816 bp, Unknown
  Obtained from environmental sample
  misc_feature (1)..(816): n is a, c, g, or t
gtggataccagaagggcatttgaggccagaaaaatgcaggatatagggcttcttgcaatgctggccaattacggagttgtggttcgcgaatcgctggtgaatgatgtgctggcgcttaacataacattccagactcaaaccagaaacggtacggttattcaaaccatgaggtatccacagtggctttatatttctgaacagatgggtaaccctgatcatcccctgactgcccgcttcatgggtctggatctctactgggcgagtcctcttgaattggatccccctcaaggcgtttcagcggatattcttttttccagttcaccccaggcatggctgcagactgaaaggtttatcaccaatcccaattattattcacaatttgaaaatgaagcggactatacccgcgggaccaaaatactgggcgcgtccctttcagggactttcccaagcgcttttcagtggcgaagcgagccggttcttagaaagccttcccggctgatcgttgtcgggaactcgcatttcgccggctcaattatgcaggccaaccgaggagccgaaagaaacctggatttcctgattaaggcggcagactggctttccaatgacgaagatattgtcgcaatccgcgggcgtcaggcgcaggcgggcaggcttgaccgcatagccgaccgcgctaaaagagacagggcaatggccttctcccgcacaattaacacgatcattattccccttggggtaatttttgcgggactttttctgaactggaaacgaagggcgaaaacttcgaaggcaaaaggatatggcattgacgtataa

SEQ ID NO: 34476 - protein, 271 aa, Unknown
  Obtained from environmental sample
  misc_feature (1)..(271): Xaa is any amino acid
MDTRRAFEARKMQDIGLLAMLANYGVVVRESLVNDVLALNITFQTQTRNGTVIQTMRYPQWLYISEQMGNPDHPLTARFMGLDLYWASPLELDPPQGVSADILFSSSPQAWLQTERFITNPNYYSQFENEADYTRGTKILGASLSGTFPSAFQWRSEPVLRKPSRLIVVGNSHFAGSIMQANRGAERNLDFLIKAADWLSNDEDIVAIRGRQAQAGRLDRIADRAKRDRAMAFSRTINTIIIPLGVIFAGLFLNWKRRAKTSKAKGYGIDV

SEQ ID NO: 34477 - DNA, 1608 bp, Unknown
  Obtained from environmental sample
  misc_feature (1)..(1608): n is a, c, g, or t
atgtcaactatgaaacgaagattgatcacatccgccctgccctacgtgaacaatgtcccccacttgggaaacttgattcaggttctgtccgccgacgcgtttgcccgattctgccgtttgaggggttacgaaaccctttatatttgcggcaccgatgaatacggcaccgctacggaaacacgcgccgcggaagaggggataagccccagggaactgtgcgaccgctacttcacaatccatgatgacgtttaccgctggtttaatatttcctttgacaaattcgggcgcacctctacccccatccagacggaggtaacccaggatatattccttaaacttgacgcggccggcttcatttccgaaaaaacaattgagcagttgtactgcgggcaatgcgggcgtttcctggctgaccgctttatcaggggagtttgccccaactgcggctccgacgaagcgcggggcgaccaatgcgaagcctgcggcaaactcctcgaccccaccgacctgaaaaccccccgctgctccacctgcggctccactccaacgctgaaacccacaagccacctttatatagaccttccggtgataaaaaacaagctcagggattggatcaaaatcgcaagcgagaaaggattctgggcgaacaacgccgtgcagataacccaggcatggatccgcgacggccttagggaacgcgcaattacccgcgaccttaaatggggcatacccgtacccaagcccggttatgaaaacaaggttttctacgtatggtttgacgctccaatcggctatatttccataacgggaacgttaggtgaagaaaaaggaaattggcgtgattttgtaaattattggtggaaaagtccgaacgacgttgagttgtttcagtttatcggcaaggacaatattccgtttcatacggtaattttcccgtccagtcttttgggaagcggtgaaaaatggacaatgttacatcatatgtccagcacagagtaccttaactatgaaaacggaaaattttctaaatccagaggaataggcgtctttggaacagacgctaaagagactggaatacccgccgacgtatggcgtttttatgtctattacaacagaccggaaaaatccgacgccatgtttacatggagcgactttcaggagaaagtaaacggagagcttataggcaacctcggcaacttggtaaaccgcacgctctcctttgttacacgctactatgacggcgtaatccccgaaggaaagagcgacggcgctttctgggcggaagcggtaaagaaggaaaaatcaatcacggaaaaacttgacagagccgaattaagagacgcttttagggaaatttttgaattatcctcgtttgcgaataaatattttcaggacaatgagccgtggcgtttacgcaatgacgatcccgaaaaagcgaaagccgttatacgagaccttacctacattgtccgtgatttctcggtattgatagagccttatatgccgcaagcggcgggaaaaatcgcttcgttcttcggtctaaacacagggaaaatcttgatggaaagacatcggaaaagcggaaggcatnnctcgtgccgattctga

SEQ ID NO: 34478 - protein, 535 aa, Unknown
  Obtained from environmental sample
  misc_feature (1)..(535): Xaa is any amino acid
MSTMKRRLITSALPYVNNVPHLGNLIQVLSADAFARFCRLRGYETLYICGTDEYGTATETRAAEEGISPRELCDRYFTIHDDVYRWFNISFDKFGRTSTPIQTEVTQDIFLKLDAAGFISEKTIEQLYCGQCGRFLADRFIRGVCPNCGSDEARGDQCEACGKLLDPTDLKTPRCSTCGSTPTLKPTSHLYIDLPVIKNKLRDWIKIASEKGFWANNAVQITQAWIRDGLRERAITRDLKWGIPVPKPGYENKVFYVWFDAPIGYISITGTLGEEKGNWRDFVNYWWKSPNDVELFQFIGKDNIPFHTVIFPSSLLGSGEKWTMLHHMSSTEYLNYENGKFSKSRGIGVFGTDAKETGIPADVWRFYVYYNRPEKSDAMFTWSDFQEKVNGELIGNLGNLVNRTLSFVTRYYDGVIPEGKSDGAFWAEAVKKEKSITEKLDRAELRDAFREIFELSSFANKYFQDNEPWRLRNDDPEKAKAVIRDLTYIVRDFSVLIEPYMPQAAGKIASFFGLNTGKILMERHRKSGRHXSCRF

SEQ ID NO: 34479 - DNA, 519 bp, Unknown
  Obtained from environmental sample
  misc_feature (1)..(519): n is a, c, g, or t
atggagtttattaaaagtattgcagcagctgaactttctgtgtgtgaggacgcggattcgtttttgcagtcggctttgtggggacgctttaaagcccgctttggctgggaggcaagggccttttctattaactggtaccgggggggcgataagcccctgcttgccctttcccgacgcattgcgcctttcctttccatgacatacattccctggggacctgagtttcccgccgattttcctgatgatccccatttacgcgccgaggctgcggctgaactcgccctcgccctgaggcctttccttcgctcggcgtttatccgctttgaccctgtttggttcgactctaacggggggatgcccctgccgccaagtggcaagttcaggaggtcgggcgcggacatacagccgcctgacactgtccttgtcgatttaacgccgccccttgatgatatactcgccgctatgaaacccaaatgccgctacaatatcggcctgctcaaaaacctcggccgaatctga

SEQ ID NO: 34480 - protein, 172 aa, Unknown
  Obtained from environmental sample
  misc_feature (1)..(172): Xaa is any amino acid
MEFIKSIAAAELSVCEDADSFLQSALWGRFKARFGWEARAFSINWYRGGDKPLLALSRRIAPFLSMTYIPWGPEFPADFPDDPHLRAEAAAELALALRPFLRSAFIRFDPVWFDSNGGMPLPPSGKFRRSGADIQPPDTVLVDLTPPLDDILAAMKPKCRYNIGLLKNLGRI

SEQ ID NO: 34481 - DNA, 996 bp, Unknown
  Obtained from environmental sample
  misc_feature (1)..(996): n is a, c, g, or t
ttgcccgatcaggttttctgggagaacgtgagaaaatttgaaaaatccattacagaaaaacttgagcgcgtggaactgagggacgcctttcgcgagatcttcgagctttcctcgtacgcgaataaatatnttcaggacgcggagccctggcgcctcaggacggaagcccccgccagagcccaggcggtaatccgcgatcttgcccatattgtgcgcgacattgcaatcctgattgatccctttatgccccagatcgccacaaggatcatctcgtttttcggccttccctttggggaaacctttgactggaaaaatttaggcagcgccaacgggcttgacccgttccatgaaataaaaagcgaagtgctcttttccaaacttgaagacgatttaatcaattccctcagggaacgtttttcgggcagccagaaggacaggcagaatgaaagctcggttgaagcggctgttttgtccgccagaaaagccgctattgagcaaaccattgatctgcgggttgcgaaaattgagaaagtggaaaagcatccaaaggcggacaagctgtacatcatcaatcttgaaataggcgaagggacaagcgggacgagggaggaaaggaccatcgtttccggccttgtggatttttatacagaagaacaactgctgggcaaaaaaattatcgttgcgtataacctcaaaccggcaaaactcaggggcgttgaatccagggggatgctgcttgccgccggtgatcacaacggcccggagtccgccaaagaacgctgcgaggtgcttgactcaggcgacgcccccacaggaacccgccttctcccccaaggcgcagttgccggaaatgccccggctgaaatcaatatagaaactttcctgtcatatccgataacggtcaaggatttttcagtgcaatacaacggaacccccctctgcctcaacggcaaaccggtgcgaacaagcgttattggggaaggggaagtacattaa

SEQ ID NO: 34482 - protein, 331 aa, Unknown
  Obtained from environmental sample
  DOMAIN (170)...(274): Putative tRNA binding domain
  misc_feature (1)..(331): Xaa is any amino acid
MPDQVFWENVRKFEKSITEKLERVELRDAFREIFELSSYANKYXQDAEPWRLRTEAPARAQAVIRDLAHIVRDIAILIDPFMPQIATRIISFFGLPFGETFDWKNLGSANGLDPFHEIKSEVLFSKLEDDLINSLRERFSGSQKDRQNESSVEAAVLSARKAAIEQTIDLRVAKIEKVEKHPKADKLYIINLEIGEGTSGTREERTIVSGLVDFYTEEQLLGKKIIVAYNLKPAKLRGVESRGMLLAAGDHNGPESAKERCEVLDSGDAPTGTRLLPQGAVAGNAPAEINIETFLSYPITVKDFSVQYNGTPLCLNGKPVRTSVIGEGEVH

SEQ ID NO: 34483 - DNA, 642 bp, Unknown
  Obtained from environmental sample
  misc_feature (1)..(642): n is a, c, g, or t
atggcaaaacgccggcttaaaaagattaaatcattaatccctgttactcaaaatgattctcttttggacattggctgcgcttatggtccgttcctcgcggccgcaaaagaaaaagggttttccccttgcggtattgagcccgccagggaagctgtccgccatgtgcagaaaaaactgcggctcacagtagtgcacggggctttccccaacacatggttcccggttcctacctcacaatcgggtcaatatgaggttgttactttatggtatgtcatcgaacattttgaagactgtttaaaagctttatctgaaatacggaaagtacttgaaacagacggcattcttgctttttcaaccccttctttttcaggtatctcagggcgttcctctctttacaaattccttgaaaaaaatcccgcggatcactttacaatatggtcacccaaaatgtgtaaaaaagcgctttcacttgcggggtttaaagtaaaaaaaatagtaattagcggtcaccaccccgaacgttttcggttttttaggatactcgccggcagcaaaataagtccgttttattggattcttttcctgataagtaaaatattccggcttggagatactttcgaggtttacgctgttaagaagtaa

SEQ ID NO: 34484 - protein, 213 aa, Unknown
  Obtained from environmental sample
  DOMAIN (22)...(117): Methyltransferase domain
  misc_feature (1)..(213): Xaa is any amino acid
MAKRRLKKIKSLIPVTQNDSLLDIGCAYGPFLAAAKEKGFSPCGIEPAREAVRHVQKKLRLTVVHGAFPNTWFPVPTSQSGQYEVVTLWYVIEHFEDCLKALSEIRKVLETDGILAFSTPSFSGISGRSSLYKFLEKNPADHFTIWSPKMCKKALSLAGFKVKKIVISGHHPERFRFFRILAGSKISPFYWILFLISKIFRLGDTFEVYAVKK

SEQ ID NO: 34485 - DNA, 867 bp, Unknown
  Obtained from environmental sample
  misc_feature (1)..(867): n is a, c, g, or t
ttgggttttggcgctatgcgcctgcccatgaaagaggttgacggcaagaaaatcgttgacgacgatcttgccgtccctctcatgcaaaaagcgtttgacatgggcattaactatgtcgataccgcgccgctttactgtgaaacgttaagcgaagtttcagtcggcaaggcgttaaagggctggcgcgacaaagtttacctgtccacgaagaaccccatagaggacgcggatggcgatcactggatggaaaggctggaaaaatcgcttaaaaaactcgacaccgactacatagacttttatcatttttggggcatctcgttaaaaagttttgaatcatggcagggcttaaagttcggccctcttgaggccgcgtacaaagcaaaagagcaggggcttataaagcatatttctttttcgtaccacgacgcagcggaaaattataaaaagatcgtagactcaggacactttgaaacgactctggttcaatataatatgcttgaccgttcaaatgaagagaacatcgcctatgcgaagtccaaagggctcggcgtcgtggtaatggggcctgtcggcggcggcaggctgggcgctccaagcgaaaaaatacaggggctgttgaaaaacaagcttgccagtaccgcggaaatggccctgcgctttgtacttgcaaacgaaaatatagacatggctctttccggcatgggcgatctgaacatgttaaaggaaaattttgaaatagcttcccgcaccggacacttaacggaagacgaactgaaacacattaagacaatgatggaagaaaacaaaatctcgccaagttgtactgcacgggttgtaattactgcaaaccatgtccgcagggcatag

SEQ ID NO: 34486 - protein, 288 aa, Unknown
  Obtained from environmental sample
  DOMAIN (12)...(266): Aldo/keto reductase family
  misc_feature (1)..(288): Xaa is any amino acid
MGFGAMRLPMKEVDGKKIVDDDLAVPLMQKAFDMGINYVDTAPLYCETLSEVSVGKALKGWRDKVYLSTKNPIEDADGDHWMERLEKSLKKLDTDYIDFYHFWGISLKSFESWQGLKFGPLEAAYKAKEQGLIKHISFSYHDAAENYKKIVDSGHFETTLVQYNMLDRSNEENIAYAKSKGLGVVVMGPVGGGRLGAPSEKIQGLLKNKLASTAEMALRFVLANENIDMALSGMGDLNMLKENFEIASRTGHLTEDELKHIKTMMEENKISPSCTARVVITANHVRRA

SEQ ID NO: 34487 - DNA, 369 bp, Unknown
  Obtained from environmental sample
  misc_feature (1)..(369): n is a, c, g, or t
ttgttatgcggcgcttacggaaatggcagtctctacgtgctgacaatcccggacgctttcgccgatttgtataacctgcccgccgaaacgctcgctgttttacgccgggaatttaagctgcccataacgctggaatgcgcgggccgcgtgtctctgttcccctatgacaacgatacttttatcttgcagtcattccttgacaggccggagcgggtgcgcgtccgaattaacaggccgaacgcatcgcttacatcactgttaaaaccaagaatgcgcccctttgacatagtccgctccggtgagaacgaaagtgtttttgatattcacataatgccagggcattacatggtattcaggattgaaggatag

SEQ ID NO: 34488 - protein, 122 aa, Unknown
  Obtained from environmental sample
  misc_feature (1)..(122): Xaa is any amino acid
MLCGAYGNGSLYVLTIPDAFADLYNLPAETLAVLRREFKLPITLECAGRVSLFPYDNDTFILQSFLDRPERVRVRINRPNASLTSLLKPRMRPFDIVRSGENESVFDIHIMPGHYMVFRIEG

SEQ ID NO: 34489 - DNA, 642 bp, Unknown
  Obtained from environmental sample
  misc_feature (1)..(642): n is a, c, g, or t
atggttaacaagattgcccgtggggcagacctcgaagagagggtttcccggctgcttaaacaggtgggtttacggcccgaatacctgcggcgttacccccacgcgttctcgggaggcgaacggcagcggatcggcattgcccgggcgctggccctgaacccccgcctcgtggttgccgatgaggcggtctctgccctggacgtgtcagtgcaggcccagactctcaacctcttgcaggaactccagaaggagttctccctgacctatattttcgtggcccataacctgagcgtggtgaagcatatctgcgacagggtggcggtaatgtatgtgggccgccttgtggaactggcggataccaggaacctctacttcaaccccaaacacccttatacagaggcactcatgtccgctgtgcccaagccggatccccggctcaggcgcaggaccgaaaggatccggcttgaaggggaagtggcggatccggcgaacccgcccccgggttgttacttccatccccggtgccgttatgtgaaagaacgctgcaaactcgaagtccctgccatccgcgatgtggggggcgggcatctttgctcgtgtcattttgccgaagatctgaagctcaaaggagttgaggtatga

SEQ ID NO: 34490 - protein, 213 aa, Unknown
  Obtained from environmental sample
  DOMAIN (2)...(112): ABC transporter
  misc_feature (1)..(213): Xaa is any amino acid
MVNKIARGADLEERVSRLLKQVGLRPEYLRRYPHAFSGGERQRIGIARALALNPRLVVADEAVSALDVSVQAQTLNLLQELQKEFSLTYIFVAHNLSVVKHICDRVAVMYVGRLVELADTRNLYFNPKHPYTEALMSAVPKPDPRLRRRTERIRLEGEVADPANPPPGCYFHPRCRYVKERCKLEVPAIRDVGGGHLCSCHFAEDLKLKGVEV

SEQ ID NO: 34491 - DNA, 852 bp, Unknown
  Obtained from environmental sample
  misc_feature (1)..(852): n is a, c, g, or t
atgacgacagccggcgcgggcatatattcacaggacaggctgataggtatttccacaatagactgggaaatagatgaagtaatcagggaattaaccgatataaagcctacaaaaaacagttttattttattgtccgtgcctgagaaggattatgtgatttcaagtacgcgcgacggcattgacgcgggcgcttcaataaaaagccttccctggaatataaacgccgattctttttcgttagacgacattaactatctgagcttcgggcgttccatggataacggatggcttttgtccgtgcaaattcctaaacttgagatttttaacgaggtggaaaaacaaaatagccgtttctcgctgattatagcgcttgcggcggtggtgatgacggtcctggcgtattgccttatttcaaaatttgtcaacgcgcccataaagcggctgactcaggatgtctcccggctttcgcttggccatcttgatactcacattgaaataaactcaaatgatgaattgggcctgctggcaaaaacatttaataaaatgacttgcgatctgaaaaactccatcgaagaaaacacccgcgagcgcgcggagaaagagaggatcagcgcggagcttgaggtggcggcggctatacaggccagtatgcttcccaatatttttccgcccttccccgaaagaaccgaatttgacctgtacgcatccatgattccggcaaaggnagttggcggcgatttttatgatttctatttaattgataaagataatctggcggtggttatcgccgacgtttcangcaagggcgttccggcccgcgttattcatgatgattacgaaaaccatgcttaa

SEQ ID NO: 34492 - protein, 283 aa, Unknown
  Obtained from environmental sample
  DOMAIN (119)...(188): HAMP domain
  misc_feature (1)..(283): Xaa is any amino acid
MTTAGAGIYSQDRLIGISTIDWEIDEVIRELTDIKPTKNSFILLSVPEKDYVISSTRDGIDAGASIKSLPWNINADSFSLDDINYLSFGRSMDNGWLLSVQIPKLEIFNEVEKQNSRFSLIIALAAVVMTVLAYCLISKFVNAPIKRLTQDVSRLSLGHLDTHIEINSNDELGLLAKTFNKMTCDLKNSIEENTRERAEKERISAELEVAAAIQASMLPNIFPPFPERTEFDLYASMIPAKXVGGDFYDFYLIDKDNLAVVIADVSXKGVPARVIHDDYENHA

SEQ ID NO: 34493 - DNA, 423 bp, Unknown
  Obtained from environmental sample
  misc_feature (1)..(423): n is a, c, g, or t
gtggttcttattactgacggcgagaacaacgcagggacaattcatcctgagtccgcggcggccatgctgggtgagatgggcgtttcactttgggttgtaggagttggatctttcggggaagtccccgtcaactatgtggatccaattacaaaaatgcgccgtaccggtacatttgagtcgcgttataacactgaggatctaaaaagcattgccgacaaggcgcatgggcaatgggttcacgcgcctcaggcggaagctctggcagcggcgttttcgcagcttgaccaaagggaaatgatcatacgcaggtctatccccatgagaagggaagaacctctttacgttgtctttgtaatcgcggcagccgcgctgctttggggggtgcgtttcgtaaggcgttacgttctgggggctcttctttga

SEQ ID NO: 34494 - protein, 140 aa, Unknown
  Obtained from environmental sample
  misc_feature (1)..(140): Xaa is any amino acid
MVLITDGENNAGTIHPESAAAMLGEMGVSLWVVGVGSFGEVPVNYVDPITKMRRTGTFESRYNTEDLKSIADKAHGQWVHAPQAEALAAAFSQLDQREMIIRRSIPMRREEPLYVVFVIAAAALLWGVRFVRRYVLGALL

SEQ ID NO: 34495 - DNA, 675 bp, Unknown
  Obtained from environmental sample
  misc_feature (1)..(675): n is a, c, g, or t
ttgatggcagaggggaattttcgcgcgggcccttgccggaaaaagccggatgcaagagaaggggaatcatggaaaacattttgccttaatttctttggcgaagaatacgcgaacaggggatgggcaatgcaattacacatatcggcgattcgcagcgcaaacagcgccatgcttgcctcggtaggccccgacacgggtttcgacgcggtggcggattaccccgtcgcggaaaagctcgcccgttttctggacatactggcctcgcggggcaaactgcccaagactatcctctacagtcttaacttcaaggacctgtacccgatggcgacgatcatgggcagcttccagggcgagacggacccggcaaaaaccgccttgcccggcaagattcagcttggctccggctggtggttcctggatcacatagacggcatggaagcgcagatgaagctgctggggaataccggtttgttgtcacgttttgtgggaatgttaaccgattcgcgcagcttcctttcctatccgcggcatgaatatttccgccgcgtactctgcaatatccttggaacttgggccgaaaacggcgaaatccccaatgactttgaactgcttggaaacatggtaagggatatttctttcaggaacgcgcggcgttattttttaaataacaaataa

SEQ ID NO: 34496 - protein, 224 aa, Unknown
  Obtained from environmental sample
  DOMAIN (1)...(222): Glucuronate isomerase
  misc_feature (1)..(224): Xaa is any amino acid
MMAEGNFRAGPCRKKPDAREGESWKTFCLNFFGEEYANRGWAMQLHISAIRSANSAMLASVGPDTGFDAVADYPVAEKLARFLDILASRGKLPKTILYSLNFKDLYPMATIMGSFQGETDPAKTALPGKIQLGSGWWFLDHIDGMEAQMKLLGNTGLLSRFVGMLTDSRSFLSYPRHEYFRRVLCNILGTWAENGEIPNDFELLGNMVRDISFRNARRYFLNNK

SEQ ID NO: 34497 - DNA, 825 bp, Unknown
  Obtained from environmental sample
  misc_feature (1)..(825): n is a, c, g, or t
atgggcctcgcgatttccaggcatctggttgaattgatgggcgggcgtatctgggttgactccgagcttggcatgggcgcgacctttggctttactttcctggccaaacctggtgatgagagtgagaacaaaatcctttcaaataattcttactgggccaataaacgcgcgctggttgtggacgacgcccccaatattctcgtattcttccgtagcgaggcgtcgcggctttccatttcctgcgatgtcatgttaagcggagaggctgcgattgagcagatcgaaaaaaacggcctttacgacatttattttatcgactggaagatgcagggcatgaacggtattgaaaccgccggaaagatcaagggactgaacgccggaaagccgaggccatcaatagtcattatgtcatccgccgctgaatggaagcttatagaggcggacgccaaagctgccggcgttgaatattatttacagaagccgctgttccgttccgatattgttgattgtcttaacaattttttcggcctgaagaatattgaagagagtcaggcgcaggaaataaaagataattttgagggttttcgtatcctgcttgttgaagacatagagataaaccgagaaattgtgcttgcctatctggaaccgaccgggctgacgatagactgcgcagtaaacggaaaggccgccgtgaaaatgtttacaagcgcggaaaaaccctacgatatgatttttatggatctgcaaatgcccgagatggacggttatgaggccactcaaaaaatagggcttctggaacagggacggcgaaggaagttccgataa

SEQ ID NO: 34498 - protein, 274 aa, Unknown
  Obtained from environmental sample
  DOMAIN (55)...(172): Response regulator receiver domain
  misc_feature (1)..(274): Xaa is any amino acid
MGLAISRHLVELMGGRIWVDSELGMGATFGFTFLAKPGDESENKILSNNSYWANKRALVVDDAPNILVFFRSEASRLSISCDVMLSGEAAIEQIEKNGLYDIYFIDWKMQGMNGIETAGKIKGLNAGKPRPSIVIMSSAAEWKLIEADAKAAGVEYYLQKPLFRSDIVDCLNNFFGLKNIEESQAQEIKDNFEGFRILLVEDIEINREIVLAYLEPTGLTIDCAVNGKAAVKMFTSAEKPYDMIFMDLQMPEMDGYEATQKIGLLEQGRRRKFR

SEQ ID NO: 34499 - DNA, 786 bp, Unknown
  Obtained from environmental sample
  misc_feature (1)..(786): n is a, c, g, or t
ttgtttgccgaaggtaagtattgtaatgtttgggtggaacgaggcagcggcgtaagtaaagatcaggcgaaaactgtcgctaataaatacgacaaagaaatccatgggttaatgattaacgcctttggaattgaaaatccttcttatgatggcataactttcactgatataatgaaagtcgcggattatttaggcgatggggacgataaactctgtattcttcttatggatataaaagatgattataaagccggaataaatgaatcttttgtcgccggttatttttggtctggtaatttttatgatgtgtcagggtcaaataagtgtgatatgatctatttagatacttatcctggaatgggaattagggatagacatattgaaaatgtgtttatcacgctcgcccatgaaatgcaacatatgattaaccgtgtcaccagaatagtgctgtcgccaaacggaagtatatttaccgcttctatggatacatggattgacgaagggctttcatccgccgcggaatatattgtcagtgacggaaaacattcaaaagaaaggatagactggtataatgagaacggcgatagtaaagccaaaattaaggggttaattgatcaaggcaataatttttttgtttgggataaccatacgacaaatgcaaatccgtatccagtattggatgattatgcgaccgtttatctttttttccagtggcttaggctccaaagggagatgaggtatatcgtgatattatttcctcaaataatagtaattatcaggcaatag

SEQ ID NO: 34500 - protein, 261 aa, Unknown
  Obtained from environmental sample
  misc_feature (1)..(261): Xaa is any amino acid
MFAEGKYCNVWVERGSGVSKDQAKTVANKYDKEIHGLMINAFGIENPSYDGITFTDIMKVADYLGDGDDKLCILLMDIKDDYKAGINESFVAGYFWSGNFYDVSGSNKCDMIYLDTYPGMGIRDRHIENVFITLAHEMQHMINRVTRIVLSPNGSIFTASMDTWIDEGLSSAAEYIVSDGKHSKERIDWYNENGDSKAKIKGLIDQGNNFFVWDNHTTNANPYPVLDDYATVYLFFQWLRLQREMRYIVILFPQIIVIIRQ

SEQ ID NO: 34501 - DNA, 1101 bp, Unknown
  Obtained from environmental sample
  misc_feature (1)..(1101): n is a, c, g, or t
atgaagaaaatggcaaaaacgaagaaaattgtaagaaaaacatataaaaaccgcaaaaaaaatgggttttctgaccctgttcaggcatttttgctggttggggcgcttgtggctgtttcggctttaatttcctgcgccgtaattgccgttcattccagccttaataagggaaacaccgctttgcagaaaagtgagtcaggacagccggaaattgttgaagcggtagaggaaattatttccgaaaaacctgagccgcagcgcgttgaagttcccacccctgatgtagaaaaaaaagagactgtttcaactccaaataaaaaacaagttccgccaaagaaattgccgaccgttaagcagacacagcccgttcaaaataacgagcctgtcgtgactaccgtttccgccgttatcaatcctaaggttccggttgaaaataaggggactttggtttttataattgacgatgccggaaataatttaaaagagctagaaccttttttgcgtattcaatttccatttacaattgccgtattgccaggccttccacattcggctgaagcggcgaagcgcataagggagagcgggaaagaggtgattttgcatcagccgatggaagccataggcgggcagaatccaggcccccaagcgatttattccggcatgagcgcgagtgaaatccgagccgtattaaagcgcaatatagaggaagtcgggccgattacgggaatgaataatcatcaaggatcaaaaataacgatggacacagccgccgtagaaacgatacttgctttttgcgccgaaaataatttgctttttctcgattccagaacaacagccgatacggtagttccctcggcggcgcaaaaacttggaattaaaatcggcgagagggatacgtttatcgataacgaacaaaacagagagtcgatgattcgatacatcgtaagcggtctcgcgaaggcccgaaaaaccggcagtacggtaatgataggccacacatggtcgcccgaactcgctcccattcttgccgagcaatatccgaagttaatcgatcagggttatactataaagaccgccggtgatataataagatcgaaatga

SEQ ID NO: 34502 - protein, 366 aa, Unknown
  Obtained from environmental sample
  DOMAIN (151)...(364): Divergent polysaccharide deacetylase
  misc_feature (1)..(366): Xaa is any amino acid
MKKMAKTKKIVRKTYKNRKKNGFSDPVQAFLLVGALVAVSALISCAVIAVHSSLNKGNTALQKSESGQPEIVEAVEEIISEKPEPQRVEVPTPDVEKKETVSTPNKKQVPPKKLPTVKQTQPVQNNEPVVTTVSAVINPKVPVENKGTLVFIIDDAGNNLKELEPFLRIQFPFTIAVLPGLPHSAEAAKRIRESGKEVILHQPMEAIGGQNPGPQAIYSGMSASEIRAVLKRNIEEVGPITGMNNHQGSKITMDTAAVETILAFCAENNLLFLDSRTTADTVVPSAAQKLGIKIGERDTFIDNEQNRESMIRYIVSGLAKARKTGSTVMIGHTWSPELAPILAEQYPKLIDQGYTIKTAGDIIRSK

SEQ ID NO: 34503 - DNA, 888 bp, Unknown
  Obtained from environmental sample
  misc_feature (1)..(888): n is a, c, g, or t
ttgaaatggaggaggcatttaaaaatgcagcaggaacacaaaatactgtatcgggttgaaagcgggtcacaactctatgggacaactaccgaaaaaagcgatgtggattatacttctgtttttatgccgacagcttacgatttgttctctttgcagaaatgcgagtacattgacaacagcacgaaatcctcaaccgaggagagacgtaacacggcagaggatactgatgaccagcaacattcccttcaacgatacgtgcatcttgtaattcatggaaacccgaatttgcttgaaatccttttttgtaaaaagccggtattcgaagaccctgtgtttacacctttgaaagaaaacgccagccggttgatttctaggaaggtgtacgattcttttactggctttgcgacttcccaaagaaaaaaattagaatataaatcaaaacggtttaaccagttaaggattgctttagggttttttgaaactgaataccctcagtcattattgaatgactctaaagcgaatttaggcatacccgccgcagaatggctgaacaagaatcttaccgagtataagggcgataaatcgcatacaaaatcttttcatgaagggcttccactaaagactatctacgaaaaagtaaaatcagaatatgaaggttacggttggcgggtgcatactgacacttttgaaacattaggatatgatgtcaagttcggagcccatgccgtccgtctttttcatgaaggcatccagttgctgactaccggcgttcttgaatttccaataacaggtcaagcctacgatgacataatggctattcggcgaggagaagttcccctgaagaattttataaaatttgtgatcggtatgagaaggaactcgcgataa

SEQ ID NO: 34504 - protein, 295 aa, Unknown
  Obtained from environmental sample
  misc_feature (1)..(295): Xaa is any amino acid
MKWRRHLKMQQEHKILYRVESGSQLYGTTTEKSDVDYTSVFMPTAYDLFSLQKCEYIDNSTKSSTEERRNTAEDTDDQQHSLQRYVHLVIHGNPNLLEILFCKKPVFEDPVFTPLKENASRLISRKVYDSFTGFATSQRKKLEYKSKRFNQLRIALGFFETEYPQSLLNDSKANLGIPAAEWLNKNLTEYKGDKSHTKSFHEGLPLKTIYEKVKSEYEGYGWRVHTDTFETLGYDVKFGAHAVRLFHEGIQLLTTGVLEFPITGQAYDDIMAIRRGEVPLKNFIKFVIGMRRNSR

SEQ ID NO: 34505 - DNA, 690 bp, Unknown
  Obtained from environmental sample
  misc_feature (1)..(690): n is a, c, g, or t
atgatcagatcggccgagaacacaggggactttagtcccaagggactaaagtccccaagcgctcatcaaaccaaaagtttgaaacctgttaaaaagacggttaaaaagatacccaaaaaagtaacttgggacgatgtacaggcaggtttcaaagaacttgaaaaatctcaaaaagaagcatgggcagccatacgggaaacccaacaggctcaaaaagaaagccaaaaagcccgagatgaggcatggaaagccataagagaaacccaaaaaaatctcggcggacttagcaatagatttggctctatggttgagcatatactgacccccggcctcccccaaaaattcaaaaaatttggctatacatttacccgcatagccagttacaaatacgccgcgggcgtctgggcccaaattgacggtatgcttgaaaacggcacgcaggcaatggctgttgaagttaaatttacccttaggcagacggatattgacgaccacattgtacgcatggaaaaagtgcgaaaattcgccgatgataacggcgacaaaagacaattcataggagcgatagccgctataaataccgatgaatccgccagagaatacgccctgaaaaaagggctttttgtcattgaaccgagaggcgaagatgtcaaagttacaaaaccggagaatgaagtgagggtttggtaa

SEQ ID NO: 34506 - protein, 229 aa, Unknown
  Obtained from environmental sample
  misc_feature (1)..(229): Xaa is any amino acid
MIRSAENTGDFSPKGLKSPSAHQTKSLKPVKKTVKKIPKKVTWDDVQAGFKELEKSQKEAWAAIRETQQAQKESQKARDEAWKAIRETQKNLGGLSNRFGSMVEHILTPGLPQKFKKFGYTFTRIASYKYAAGVWAQIDGMLENGTQAMAVEVKFTLRQTDIDDHIVRMEKVRKFADDNGDKRQFIGAIAAINTDESAREYALKKGLFVIEPRGEDVKVTKPENEVRVW

SEQ ID NO: 34507 - DNA, 879 bp, Unknown
  Obtained from environmental sample
  misc_feature (1)..(879): n is a, c, g, or t
atgacggaaggacagttaaacatatatgttataaacaaaatgattgttaccgcgttaaaatacctggtcgcgctggcgcttattatgttcgcggtaatcccgtttttctggattgtcgccacttcttttaatccggcccgctccctgttgggagcgcggctgattcctcctgcgcttacaataaacaactaccgggatttggttaccaataccaatctggatttcagcaaatggatgattaattcctttaaaatatcggtaatttccgtaatgataattgtgtttctcacatgcacttcggcctacgcgctgtctcgcttcaggtttaaaggcaaacagggagtaatgtttgggattatgatcctgaacattttccccggaattctcgccatgatcgccatttttatcatgatgcagcaaatcggcaattactttccctttattggccttaacacgcacggcggcttaatctgtatatatgtcgcgggatccatgagcatcaacgtactgatggttaagtcgtacattgacaccatttcgaaagaattggatgaatcggcaattattgaaggggccaattattggcaaattttctggaaaattatttttccggtgataaagccgatggtgatcaccgttgccattctcgcgtttatgagcacctatggcgattttgtaatcgcaaatctgcttcttaaaggaaacgataaaattaccgtaatggtaggtattttccagtttacccagcagcgctttgacactaactggggaatagtgacagccggcacagtgctggcggcgattcccgtagtggtgttattctttgcgtctcaaaaatatataatcggcggagttatgctgggagccataaaagaataa

SEQ ID NO: 34508 - protein, 292 aa, Unknown
  Obtained from environmental sample
  DOMAIN (75)...(287): Binding-protein-dependent transport system inner membrane component
  misc_feature (1)..(292): Xaa is any amino acid
MTEGQLNIYVINKMIVTALKYLVALALIMFAVIPFFWIVATSFNPARSLLGARLIPPALTINNYRDLVTNTNLDFSKWMINSFKISVISVMIIVFLTCTSAYALSRFRFKGKQGVMFGIMILNIFPGILAMIAIFIMMQQIGNYFPFIGLNTHGGLICIYVAGSMSINVLMVKSYIDTISKELDESAIIEGANYWQIFWKIIFPVIKPMVITVAILAFMSTYGDFVIANLLLKGNDKITVMVGIFQFTQQRFDTNWGIVTAGTVLAAIPVVVLFFASQKYIIGGVMLGAIKE

SEQ ID NO: 34509 - DNA, 804 bp, Unknown
  Obtained from environmental sample
  misc_feature (1)..(804): n is a, c, g, or t
ttgggcaagacccttgcgcccgggtattttacgggcatagctggaaaaaattacacgcggtttttgagcacaccgggttacttaaaaccgattttcggcattcttgtctggaacataatattttcacttttttccgtgctgataagttttggcctcggcatgatgatcgccntgctctttgaagatttaaaatacaggcgccttatacggacattgctcatcgtgccttatcctattcccgtattggtttccattatggtgtggaagggcctgcttaatgaaaacatgggactggtcacgacggtaatcaccaatattttcggctcttcccccaagttctttaccgacttgaattggacccgttttgccttaatcctgatcaacgtgtatttatcatacccctatttttatgtgcttacatccggggcgctgaaggccatccccaaagacctatttgaagcggcgtcaattgacggcgcgagaccctttacggtggtgcgaaaaatcgttttaccgctggtaatgcgtattctttccccgctggtgattgcttctttctgttttaactttaataactttacccttgtctggggcttcaacgccggaggacccccaatggcggatacggcggtgccaatgggttattcggatctgcttatctcgtttatttaccgtctgggctttagttcgtctaacgcggccgattatggcttctccgcggccattaccgtaatgctgtttattctggtggcgctgatggtgtttttccagaccatgaataccaaaaccatcaaggaatcataa

SEQ ID NO: 34510 - protein, 267 aa, Unknown
  Obtained from environmental sample
  DOMAIN (31)...(266): Binding-protein-dependent transport system inner membrane component
  misc_feature (1)..(267): Xaa is any amino acid
MGKTLAPGYFTGIAGKNYTRFLSTPGYLKPIFGILVWNIIFSLFSVLISFGLGMMIAXLFEDLKYRRLIRTLLIVPYPIPVLVSIMVWKGLLNENMGLVTTVITNIFGSSPKFFTDLNWTRFALILINVYLSYPYFYVLTSGALKAIPKDLFEAASIDGARPFTVVRKIVLPLVMRILSPLVIASFCFNFNNFTLVWGFNAGGPPMADTAVPMGYSDLLISFIYRLGFSSSNAADYGFSAAITVMLFILVALMVFFQTMNTKTIKES

SEQ ID NO: 34511 - DNA, 861 bp, Unknown
  Obtained from environmental sample
  misc_feature (1)..(861): n is a, c, g, or t
atgagggacggcaaagtggtgaatacgtcgcccgcgtcttcccttacaatggacaaaatcatcaccatgatggtcgggcgcgaactgagcaatgtttacccgccaaaggataatgtgcccggagacgtggtgtttaaggtggaagggcttacggccatgtaccggaatttaaaagacatctcctttgagctgcgcaaaggggaaatactgggagtggcgggacttgtaggttcggggcgcaccgagcttctggagggcatcttcgggcttgttaccttaaaatcgggaaagctatataaagacggcgcggagataaaaaccgggaatccgggacgcgccatgaaacacggcctggctatggtcacggaggagcggcgcgctaccgggattttcggcatcctgaacatcctggacaatgttgtaatagccaatctcaagagctacaagcgcatgaatttgtatatcagcggaaaaaaaatgaaagccgacactgcctgggccataaaagccttaaggataaaaacgcccagccagcgaaccttgatacgttcgctgtccggcggcaaccagcaaaaggccattttcgggcggtggatgctgacgaacccgaatgtgctgctgcttgacgaaccgacccgcggcatagacgtgggcgcgaaatacgagatataccagcttatgatcgatctggcgaaacagggggattccattatcatggtgtccagtgaattgccggaattgctgggagtctgtgacaggataatagtaatgtccggaggttacaagaccggcgatctggacgcaagaagacaantcaggaagaaatatgactctgggcgcgaaatacgcataacacaataa

SEQ ID NO: 34512 - protein, 286 aa, Unknown
  Obtained from environmental sample
  DOMAIN (67)...(260): ABC transporter
  misc_feature (1)..(286): Xaa is any amino acid
MRDGKVVNTSPASSLTMDKIITMMVGRELSNVYPPKDNVPGDVVFKVEGLTAMYRNLKDISFELRKGEILGVAGLVGSGRTELLEGIFGLVTLKSGKLYKDGAEIKTGNPGRAMKHGLAMVTEERRATGIFGILNILDNVVIANLKSYKRMNLYISGKKMKADTAWAIKALRIKTPSQRTLIRSLSGGNQQKAIFGRWMLTNPNVLLLDEPTRGIDVGAKYEIYQLMIDLAKQGDSIIMVSSELPELLGVCDRIIVMSGGYKTGDLDARRQXRKKYDSGREIRITQ

SEQ ID NO: 34513 - DNA, 348 bp, Unknown
  Obtained from environmental sample
  misc_feature (1)..(348): n is a, c, g, or t
ttgtgttatgcgtatttcgcgcccagagtcatatttcttcctganttgtcttcttgcgtccagatcgccggtcttgtaacctccggacattactattatcctgtcacagactcccagcaattccggcaattcactggacaccatgataatggaatccccctgtttcgccagatcgatcataagctggtatatctcgtatttcgcgcccacgtctatgccgcgggtcggttcgtcaagcagcagcacattcgggttcgtcagcatccaccgcccgaaaatggccttttgctggttgccgccggacagcgaacgtatcaaggttcgctggctgggcgtttttatccttaa

SEQ ID NO: 34514 - protein, 115 aa, Unknown
  Obtained from environmental sample
  misc_feature (1)..(115): Xaa is any amino acid
MCYAYFAPRVIFLPXLSSCVQIAGLVTSGHYYYPVTDSQQFRQFTGHHDNGIPLFRQIDHKLVYLVFRAHVYAAGRFVKQQHIRVRQHPPPENGLLLVAAGQRTYQGSLAGRFYP

SEQ ID NO: 34515 - DNA, 978 bp, Unknown
  Obtained from environmental sample
  misc_feature (1)..(978): n is a, c, g, or t
atggacaaattgtatctgcgccgatgggaaatcgggtctgctgcgcagcccgggtctgctgcgcagcccaaggctgtggtgcatatactgcacggaatggcggaacactcacagcgttacagccgtcttgcggaaaaactctgcggggccggaattgaagtatgggccgcggatcagaggggacacggaaaaaccgcggatttaaacgtcaatgcccccggtaaaggcggaatattggggcactgcgccgataatgatacctttgaacaaatcgcctgcgacgcgctcagtataaaccaaacaatactaaagacacacccggggattcctctgttcctgatgggtcattcctggggttcttttatcgcgcagcattatatcgaaaaccatgactgcaaggatctcgcaggatgcatactctccggtacaaggggaccaggcggaataattatcaacgcggggattcccttaatgatctttctggccgctgtccgcggccccagacgcgggtcgtcgatatcgcgcgcgctggccgacgggccttataaccggcctttccgccccaaccgcacgccttttgactggatttcatgtgatgaagccgaagtagatgcctatgtcaatgatcctctatgcgggtttctctgctcatcgggtttctaccgtgatctgacaaagggcctgcgtcagattcaccgtaaaaaagctatgacccggatccgccgggatctgcctgtttatatcttttgcggcagcaatgatcccgtcgggaatatgggagccagcccggcggcgctggtcaacgcatatcgctcactgggattacagaactttgaatttgtacagtacaccggagccaggcacgagacgttaaacgaaatcaaccgtgaagaagtaatgggcggtttgtctgcgtggataattaagataataacaatgagcaatgagcaatggaagaagggaacagtgaaacaataa

SEQ ID NO: 34516 - protein, 325 aa, Unknown
  Obtained from environmental sample
  DOMAIN (52)...(302): alpha/beta hydrolase fold
  misc_feature (1)..(325): Xaa is any amino acid
MDKLYLRRWEIGSAAQPGSAAQPKAVVHILHGMAEHSQRYSRLAEKLCGAGIEVWAADQRGHGKTADLNVNAPGKGGILGHCADNDTFEQIACDALSINQTILKTHPGIPLFLMGHSWGSFIAQHYIENHDCKDLAGCILSGTRGPGGIIINAGIPLMIFLAAVRGPRRGSSISRALADGPYNRPFRPNRTPFDWISCDEAEVDAYVNDPLCGFLCSSGFYRDLTKGLRQIHRKKAMTRIRRDLPVYIFCGSNDPVGNMGASPAALVNAYRSLGLQNFEFVQYTGARHETLNEINREEVMGGLSAWIIKIITMSNEQWKKGTVKQ

SEQ ID NO: 34517 - DNA, 711 bp, Unknown
  Obtained from environmental sample
  misc_feature (1)..(711): n is a, c, g, or t
ttgaccaatttgatgacgatttggatactttattggggttataaccttatggaaatacttattaatgaactctcactaaatgggcagtttgattctgttgaacattttgttatgacaggattaaaagcgtttattaaggtaatcaatgatattgattatcaatttgactcactatataaaaaatctgatttttttcaagccaaagtaactccacagcacacaatttacgataccataattggaaatatgtctagacaatacgatgaaataagaaagtttaaatcacaattgtcgagactctttgataatcctttttgggagaataatccaaaacattccgcaaataacgtttatttatataatgagaaaaacatatgtggtttttcattagccgaagcatgtgaaagagataatattattatttcttttccacataacgattttacgtcaactcaactttcggtatttaaagatgagtatgaaattatagttgataatttgcttgaacaaggacaacttattgaaatatcttatcaacgaaattgtattccattttatttatattgtgaaaaaatattttttaattctaaattgaatttctctaaaattgattcgagagatggatttactctaatcaaaaacgaagaagaatctttgttttttggaggattaaaanattttctgagttacatggacgcaaattttagttga

SEQ ID NO: 34518 - protein, 236 aa, Unknown
  Obtained from environmental sample
  misc_feature (1)..(236): Xaa is any amino acid
MTNLMTIWILYWGYNLMEILINELSLNGQFDSVEHFVMTGLKAFIKVINDIDYQFDSLYKKSDFFQAKVTPQHTIYDTIIGNMSRQYDEIRKFKSQLSRLFDNPFWENNPKHSANNVYLYNEKNICGFSLAEACERDNIIISFPHNDFTSTQLSVFKDEYEIIVDNLLEQGQLIEISYQRNCIPFYLYCEKIFFNSKLNFSKIDSRDGFTLIKNEEESLFFGGLKXFLSYMDANFS

SEQ ID NO: 34519 - DNA, 696 bp, Unknown
  Obtained from environmental sample
  misc_feature (1)..(696): n is a, c, g, or t
atgggagccggtattcaaacctgcagaaaacttatcgacgacggctggattggcgtccccatagcggcgacggcggcaatgatgaaacgcggccctgaaagttggcaccccgatactgaatttttctacaaagaaggcggagggccgatgttcgatgtggggccatactacataaccgcgctggtcagtcttctaggacctgtttccagagttaccggaagcgctaaaattacttcccctgtccgtactatcacaaacaaacaacgatacggcgatattattaacgtggaagttcctacgcacattgccggcgtccttgacttcgcgagcggcgcggtcggcactattgtaacaagtttcgacatatattcgcataccttgcccttcatagaaatttacggaaccgaaggcacgcttaaagtccccgatcccaacaccttcggcggccctgtaattgtccggcgtttcaacgacgaagaatggtacaaaataccgctgttaaaagcatatccggaaaattccagaggactcggaattaccgacatggcggaagcgattgaagaaaaccgcccgcaccgcgccaatgccgagatggcttaccatgtgctggacataatgcacggcatacacgacgcctcgtccgcgggaaagcacatcanactcaaaagcaaatgcaaacgccccgcggcttgttag

SEQ ID NO: 34520 - protein, 231 aa, Unknown
  Obtained from environmental sample
  misc_feature (1)..(231): Xaa is any amino acid
MGAGIQTCRKLIDDGWIGVPIAATAAMMKRGPESWHPDTEFFYKEGGGPMFDVGPYYITALVSLLGPVSRVTGSAKITSPVRTITNKQRYGDIINVEVPTHIAGVLDFASGAVGTIVTSFDIYSHTLPFIEIYGTEGTLKVPDPNTFGGPVIVRRFNDEEWYKIPLLKAYPENSRGLGITDMAEAIEENRPHRANAEMAYHVLDIMHGIHDASSAGKHIXLKSKCKRPAAC

SEQ ID NO: 34521 - DNA, 1089 bp, Unknown
  Obtained from environmental sample
  misc_feature (1)..(1089): n is a, c, g, or t
atggaagttgctaacagcgttacaaaaagattcggcatattgacggcgggcggcgattgtcccggtctgaatgccgctatacgtggtatctgccgggctgcccatgaccgttacggcatggaaattatcggtatagccaacggctttcgaggccttattgacgaagatgtcagaatactcagacctgaagatattaccggtattcttacacgcggcgggacaattctcggctcaagcagggaaaaaccttttgcgcctaccagcgacgatgatgtaatagataaagtttcagcgataaaagaaacatacgcaaaacttgggctggattgtcttgttgtactgggaggaaacggcactaatacaaccggttataaactttcgcgcgagggtcttaatataattggccttcccaaaacaattgataacgatattttcggcacagataanactttcggttttgattccgcgttaactatcggtacggaagctatagaccgccttcactctaccgcgcagagccacagccgtatcattgttatcgagttaatggggcataaggcgggctggcttgccctgtactcgggggttgcaggcggcggcgatgttattttattaccggaaattccctacaatgtaaaagccatcggcaaacacctggaagaccgggcaaaatcaggcaaaaccttttctattgtcgttgttgccgagggcgctctctcaatagaagaagcaaaaatggacaaacacgaactgaaaaaataccgcgccgaaaacggtccctcggtcggctatcgcgttgccaaaaagatagagaatgaaacaggcatggaaacccgcgctaccgttctgggctatgtgcagcgcggcggtactccgagcgcggccgaccgtattcttgccacaagcctcggcacgatggcggcggacattctcgccaaaggcgagtacggtcacatggtcgctcttgacggagacaaaataactacagttaatttaagtattcccgaatctaaagtaaaacccgtaccggaagatcactacatgatcgataccgccattgccgtggggacttgtatggggatcgattaa

SEQ ID NO: 34522 - protein, 362 aa, Unknown
  Obtained from environmental sample
  DOMAIN (9)...(313): Phosphofructokinase
  misc_feature (1)..(362): Xaa is any amino acid
MEVANSVTKRFGILTAGGDCPGLNAAIRGICRAAHDRYGMEIIGIANGFRGLIDEDVRILRPEDITGILTRGGTILGSSREKPFAPTSDDDVIDKVSAIKETYAKLGLDCLVVLGGNGTNTTGYKLSREGLNIIGLPKTIDNDIFGTDXTFGFDSALTIGTEAIDRLHSTAQSHSRIIVIELMGHKAGWLALYSGVAGGGDVILLPEIPYNVKAIGKHLEDRAKSGKTFSIVVVAEGALSIEEAKMDKHELKKYRAENGPSVGYRVAKKIENETGMETRATVLGYVQRGGTPSAADRILATSLGTMAADILAKGEYGHMVALDGDKITTVNLSIPESKVKPVPEDHYMIDTAIAVGTCMGID

SEQ ID NO: 34523 - DNA, 741 bp, Unknown
  Obtained from environmental sample
  misc_feature (1)..(741): n is a, c, g, or t
atgcgcatggacgattcaagatattttctttacataaacctccttaaagaagaattgattccggctgccggatgcactgagcctgtggcgcttgcctatgccgccgctctcgccagaaaagagcttggggcgccgcccgatcgggttctggtagaagtaagcgcgaacataataaagaacgttaaaagcgtggttgttcccaataccggcggactaaagggaataaaagcagcagcagccgcgggcatcgtcgcgggagtaagcgaaaagaaactggaagtaatttccgttgtaagcgaaaatcaaaaggaagagctgcgcctgtttatgaagaccgccgccattgaagcgcggcttgcggataccgaaaaaattttcgacattatagtcaccctttgggccggtcaggattacgcgaaagtaaggctgaccgactatcatacaaacatcgctcttattgaacggaacgggaagacgattttttctatcgaagaaaaaaacagcgaaaaagaagccggcagggaagcggaagtcagcctggatgtggaatccattgtggattttgcggataccgtccgccttgaggacgtagaaacacttattgaacgacagattgcgtataacaaggcaatttccgatgaagggctcaagggtaattacggggccaacatcgggaagacattcagaaagacttacgggaacgacatcaggataagggcgaaagccgccgctctccgataa

SEQ ID NO: 34524 - protein, 246 aa, Unknown
  Obtained from environmental sample
  DOMAIN (7)...(242): Protein of unknown function (DUF1063)
  misc_feature (1)..(246): Xaa is any amino acid
MRMDDSRYFLYINLLKEELIPAAGCTEPVALAYAAALARKELGAPPDRVLVEVSANIIKNVKSVVVPNTGGLKGIKAAAAAGIVAGVSEKKLEVISVVSENQKEELRLFMKTAAIEARLADTEKIFDIIVTLWAGQDYAKVRLTDYHTNIALIERNGKTIFSIEEKNSEKEAGREAEVSLDVESIVDFADTVRLEDVETLIERQIAYNKAISDEGLKGNYGANIGKTFRKTYGNDIRIRAKAAALR

SEQ ID NO: 34525 - DNA, 960 bp, Unknown
  Obtained from environmental sample
  misc_feature (1)..(960): n is a, c, g, or t
atgcctttatctatccaaagccctaatctttttgcttttgtttctgcaaacgcagaaaggattacaggcgcaaatagtcttttgaaacttcgcaggggagcgcgctcggcggctgtgggcacggcggctttgccggtacaaaacgatttagcatcacttgttcaaaatcctttgcaactttcagttttagaaaaattatccctagcttttacgcacgtatcttattttgaagagacttcttataatggtgttgttatggctttgccgctaaaagatgctggtgctataggctttgcagcatcccgctttggagcaagcgatataccccatataaaagaaaatgagcttcctgaacttctagaaggtgatggttataatacaatgagcatttccgactggcttttcacaagtgcatggggaaaaaaatttggcaaatggaatttggcttttgctctgcatttattgaaaagagaattagaccaaagcggctggggttttcgctctgatattgccgcaggctatgaattttcaaaaaaacttatgttagccagcataattaaaggttggacttcgtctgcggttaaatgggagagcgactattttgaatattcctctccagaggcttatgcggcatttaaattcagagaaccatttccatatttttatggaaacttaaacttctactggcaaagcacagggattttgcattcggaatcggaagaagaaaccagaatttttaaaaatcccataaactggtttttagccagcagtgctggcatggaatttgaaacaaatttttctttggctttaagagcgggctttgtaaaaattaaagatgcgagcagcttaactcttggagcaggcattaaacctctttccagactctcggcagattacgctctccaaatgcacaatgatctttcaaatgttcaccgaatttcaataactgccactttctaa

SEQ ID NO: 34526 - protein, 319 aa, Unknown
  Obtained from environmental sample
  misc_feature (1)..(319): Xaa is any amino acid
MPLSIQSPNLFAFVSANAERITGANSLLKLRRGARSAAVGTAALPVQNDLASLVQNPLQLSVLEKLSLAFTHVSYFEETSYNGVVMALPLKDAGAIGFAASRFGASDIPHIKENELPELLEGDGYNTMSISDWLFTSAWGKKFGKWNLAFALHLLKRELDQSGWGFRSDIAAGYEFSKKLMLASIIKGWTSSAVKWESDYFEYSSPEAYAAFKFREPFPYFYGNLNFYWQSTGILHSESEEETRIFKNPINWFLASSAGMEFETNFSLALRAGFVKIKDASSLTLGAGIKPLSRLSADYALQMHNDLSNVHRISITATF

SEQ ID NO: 34527 - DNA, 939 bp, Unknown
  Obtained from environmental sample
  misc_feature (1)..(939): n is a, c, g, or t
atgttaaataacgcggtagaaagcgcgccatgccgcaaacgccatacttcacaatgccgatacacgcacatctgccaaatacaaaaagccccccgctgtccgcccatgaattatttttataaaatgactacaataatcgacttccacacccacttcttcccgcccgaacttgccgagcgggcaatctcgcggctgatagagaacgccgcgccgactatcgccatgaaaaaccacaccaacggcacggtgggcggcctcatcgagagcatgagggtgggcggggtcgacaagtccgtcacccttccggtggccaccaagccgtcgcaggtgtccacgataaacatgggcgtcgccgaaaccggctccgcctatcccggtataatccaattcggcgccatgcatcccgagatggagggcttcgagacggagatcgacttcctgtccgcgcacggcataaagggcatcaagctgcacccggagtaccaatacagctacgtagacgacccaaaagccttccctatgtacgaaaaactcgcctcggcgggtctaatcgtcgtcttccactccggcaaggaccccggccctttcacaaacgatcacgccctgcccccagcgctccgcaaaatccacgaaaacttcccgacgctgaagatggtaacggcgcatttgggcggatggatggtctggaaagaggtcgaggagacgctggccggattagatatatttttcgacacctcagccatctacaaactgctcccgccggaagatttcgtccgtatttgccggaagcacggcatagaaaaaatcctattcggcagcgattcaccttggtatgatcaagggggaagcgtagagtggataaagcgcagcggtctaaatgataatgaaatagaagccgttttcggcacgaacgctgagaggttgctggggatgtgttga

SEQ ID NO: 34528 - protein, 312 aa, Unknown
  Obtained from environmental sample
  DOMAIN (46)...(311): Amidohydrolase
  misc_feature (1)..(312): Xaa is any amino acid
MLNNAVESAPCRKRHTSQCRYTHICQIQKAPRCPPMNYFYKMTTIIDFHTHFFPPELAERAISRLIENAAPTIAMKNHTNGTVGGLIESMRVGGVDKSVTLPVATKPSQVSTINMGVAETGSAYPGIIQFGAMHPEMEGFETEIDFLSAHGIKGIKLHPEYQYSYVDDPKAFPMYEKLASAGLIVVFHSGKDPGPFTNDHALPPALRKIHENFPTLKMVTAHLGGWMVWKEVEETLAGLDIFFDTSAIYKLLPPEDFVRICRKHGIEKILFGSDSPWYDQGGSVEWIKRSGLNDNEIEAVFGTNAERLLGMC

SEQ ID NO: 34529 - DNA, 459 bp, Unknown
  Obtained from environmental sample
  misc_feature (1)..(459): n is a, c, g, or t
gtggacgatttgataagccttgatacaattacaggcaaagtggaatccataggagtaaaaacgaccaggattcgttccgtaacaggcgaacagattattgtttcaaacagcgatttgctggaaagcagagttaccaattttaaaaggatgcaggagagacgcataacctttggcatcagtgttagcaacgaaaccgcaaaagaaaatttgcaggaaatagtagcaatagtaaaaggcattatagaaaaccaaagcaatgctcgttttgaccgaggtcatttgaaaggtttttccgcaagctcggtggaatatgagtttgtgttttgggtaaccaaaccagaatatataacttatatggatgttcaagaaaaaataaatttagccatactggatgcctttgccgaaaaaaatataagcatggcacatccggcacagaaggtgttactggggaaaacttag

SEQ ID NO: 34530 - protein, 152 aa, Unknown
  Obtained from environmental sample
  DOMAIN (1)...(141): Mechanosensitive ion channel
  misc_feature (1)..(152): Xaa is any amino acid
MDDLISLDTITGKVESIGVKTTRIRSVTGEQIIVSNSDLLESRVTNFKRMQERRITFGISVSNETAKENLQEIVAIVKGIIENQSNARFDRGHLKGFSASSVEYEFVFWVTKPEYITYMDVQEKINLAILDAFAEKNISMAHPAQKVLLGKT

SEQ ID NO: 34531 - DNA, 495 bp, Unknown
  Obtained from environmental sample
  misc_feature (1)..(495): n is a, c, g, or t
atggacttaatcattgactgctcccgcaaaggcgttaatttagggctttactcaaacgacaccaattacgaactctgcgacccaaatgcaaaaggcgatgagttaaaacctttgctagataaattgcttgcagaaaacaattttgaaattgaacaagtaaagcgtgttttggtaacacttggtcctggcagcttcacgggcattcgtgctggtattgctttttgcgagggcttgtgttttagcggcaaaagaaccttgcacggaatttccacattaaaagcattggctatatcgcacggcaaagagataattttgcacgcaagggcaaatttttattatgttggaaatgaggatagcgaaaccctaaagcaatttgaaaacaaacccgaaacccacgaatacctgcccataaccccatttgcaaagctaatagaccatattcccccctcccgcattcaaaaagcaaactatttggcaaatccatacccctcttaa

SEQ ID NO: 34532 - protein, 164 aa, Unknown
  Obtained from environmental sample
  DOMAIN (24)...(162): Glycoprotease family
  misc_feature (1)..(164): Xaa is any amino acid
MDLIIDCSRKGVNLGLYSNDTNYELCDPNAKGDELKPLLDKLLAENNFEIEQVKRVLVTLGPGSFTGIRAGIAFCEGLCFSGKRTLHGISTLKALAISHGKEIILHARANFYYVGNEDSETLKQFENKPETHEYLPITPFAKLIDHIPPSRIQKANYLANPYPS

SEQ ID NO: 34533 - DNA, 837 bp, Unknown
  Obtained from environmental sample
  misc_feature (1)..(837): n is a, c, g, or t
gtggggttgctctatgggtgtggaggagacgtgttcaatgaaattttgaattttaagctgtttggcataatagatgtccgcttttcggattttgtggatatatttttcatctcgtgcgcaatatattgttttttcttgcttttcaagggaacccgtgccgttcaaatgttttttggcgtggttttgattacggtaatttggtttctttcacaactttttgatttgcgtgggctaacttggttgataggcagtttgagtgccttgggcgtggtggcaatagttatagtgtttcagcccgaaattagaggcatgctaacgagaatagggcagatggccaatgtattcaggctcagaaatgtatttttcaaacacagcggactggaagatataactgcaaagatagtagattccgttttggaattgcaaagaaaaggctacggagcattgattgtgctggaaaagagggttggcttaaaatcttatattgattcgggcgaagtgataaatggcgacttttccaaaaaacttttatgtaccattttttatcccggaaccgctttgcacgatggtgcggtgatagttttgggaaataaaattatagcggcgggttgcgtgctgcctatgccaaccggaaccgccgccgccgagcaatccggcggaatgcggcacagggcggcaaaagccctagctctggaaacagatgcttttgtgatagttgtgtctgaggaaacgggctacatctcaatagcttaccgcgatagcttccgtacaaggcagagcaaaagggaattggaagaagaaataaaacgccattggaaagaactttatgaaaactga

SEQ ID NO: 34534 - protein, 278 aa, Unknown
  Obtained from environmental sample
  DOMAIN (134)...(256): Domain of unknown function DUF147
  misc_feature (1)..(278): Xaa is any amino acid
MGLLYGCGGDVFNEILNFKLFGIIDVRFSDFVDIFFISCAIYCFFLLFKGTRAVQMFFGVVLITVIWFLSQLFDLRGLTWLIGSLSALGVVAIVIVFQPEIRGMLTRIGQMANVFRLRNVFFKHSGLEDITAKIVDSVLELQRKGYGALIVLEKRVGLKSYIDSGEVINGDFSKKLLCTIFYPGTALHDGAVIVLGNKIIAAGCVLPMPTGTAAAEQSGGMRHRAAKALALETDAFVIVVSEETGYISIAYRDSFRTRQSKRELEEEIKRHWKELYEN

SEQ ID NO: 34535 - DNA, 318 bp, Unknown
  Obtained from environmental sample
  misc_feature (1)..(318): n is a, c, g, or t
atggaatgctctttcttctgcgccagaacgccgccagttttaaggcatcctagccaaatttatgagatgtgttttgaagggtttgttctgttgggaatcctttatgctttgtggaaaattctcccgaagctgagaaatcacgttatggctctttatttgataggatatggtacagcgaggttttttatagagttctttagggaaccagatgcgcacatcggtttgaatttcctagatatgagtcgggggcaaatgctgtgttctgcaatgattttgagtggggttgctctatgggtgtggaggagacgtgttcaatga

SEQ ID NO: 34536 - protein, 105 aa, Unknown
  Obtained from environmental sample
  misc_feature (1)..(105): Xaa is any amino acid
MECSFFCARTPPVLRHPSQIYEMCFEGFVLLGILYALWKILPKLRNHVMALYLIGYGTARFFIEFFREPDAHIGLNFLDMSRGQMLCSAMILSGVALWVWRRRVQ

SEQ ID NO: 34537 - DNA, 1599 bp, Unknown
  Obtained from environmental sample
  misc_feature (1)..(1599): n is a, c, g, or t
gtgaaaggattggctgccaaaacaggcaacccacgttttgcctgggacgcttaccgtcgatttattcagatgtacggcgatgttgttatgggcgtcccttcaaaacattttgaggaagcaatcggagcgataaaaaaagagagggatcttaaacttgatacggaacttaacgccgctgatttggaaaagctggtgaccgaatacaagaagatagtcaaaaattcggcgaaaaaagattttccgcaaaatccccttgaacagctctggggcgcgattaacgcggtctttggatcatggatgaatgaaagggccataaaatacaggcagctcaacgaaattaagaatataaaaggcactgcggtaaatgttcaggcgatggttttcggcaacttcggggatgattcgggaaccggggtttgctttagccgggatccttcgaccggggtaaaagaattttacggcgagtatttgatgaacgcccagggagaagacgtggtagccgggatacgtaccccggaaaaaatcacgactctcgcgaaagaaaacaaattgatctatgaccagcttgtcggaattaagaataagcttgagaaacatttccgggatatgcaggacatggaatttactgtccagcagggaaagctctttttgcttcaaacacgaaacggaaagcgcacaggggctgcggcggtaaaatgcgcggtggatatggtcgccgaaaaattaatcacaaaggaagaggctgtgttcagggttacccccgcccttttggatcagcttttgcacccaatgattcccgccgaagccttgaagtcggcagtgcccattacaaagggccttaacgcgtctcccggagccgcctgcggaaggatcgttttcaacgcctcggacgctgaagccttgaatgagaagggcgagaaggtactccttgtgagggacgaaaccagcccggaagatataggcggcatggtggcatcacagggcatcctcacttctaccggcgggatgaccagtcacgcggctgtagttgcccgcggaatgggaaccccatgcgtagccggcgcaaaagaaataattattcagggtaacactatgacaatagggtccaatacctttaacgagggggattggattacgattgacgggtctaccggccaagtttttggcggaaagcttcctctgataacccccgaagaagtatcaaaagaaatggacaccttcctcaaatggtgcgatgaaatctgtgccgcctcaaagcgcggacgtttatcgggatttcaagtctgggccaacgcggatcagcctgcggacgcaaaacgggctttccaattcggagctcagggaatagggctttgccgcaccgagcatatgtttttcgataaggaaaagctaatacatttccgcgcgatgattgtttccgatactgcgggagagcgcanagaagcctttgagaanatcccctccccttcacagaaggactttttaggtatcttcaaggccatggaaggaaaaccggtaaccatcaggcttttgggatccccctctcatgaantcgtcccccatacaccggaggagacacaggattggctgattttctga

SEQ ID NO: 34538 - protein, 532 aa, Unknown
  Obtained from environmental sample
  DOMAIN (286)...(385): PEP-utilising enzyme, mobile domain
  misc_feature (1)..(532): Xaa is any amino acid
MKGLAAKTGNPRFAWDAYRRFIQMYGDVVMGVPSKHFEEAIGAIKKERDLKLDTELNAADLEKLVTEYKKIVKNSAKKDFPQNPLEQLWGAINAVFGSWMNERAIKYRQLNEIKNIKGTAVNVQAMVFGNFGDDSGTGVCFSRDPSTGVKEFYGEYLMNAQGEDVVAGIRTPEKITTLAKENKLIYDQLVGIKNKLEKHFRDMQDMEFTVQQGKLFLLQTRNGKRTGAAAVKCAVDMVAEKLITKEEAVFRVTPALLDQLLHPMIPAEALKSAVPITKGLNASPGAACGRIVFNASDAEALNEKGEKVLLVRDETSPEDIGGMVASQGILTSTGGMTSHAAVVARGMGTPCVAGAKEIIIQGNTMTIGSNTFNEGDWITIDGSTGQVFGGKLPLITPEEVSKEMDTFLKWCDEICAASKRGRLSGFQVWANADQPADAKRAFQFGAQGIGLCRTEHMFFDKEKLIHFRAMIVSDTAGERXEAFEXIPSPSQKDFLGIFKAMEGKPVTIRLLGSPSHEXVPHTPEETQDWLIF

SEQ ID NO: 34539 - DNA, 555 bp, Unknown
  Obtained from environmental sample
  misc_feature (1)..(555): n is a, c, g, or t
atgaagaacacgcgaaaaacgaagataattctgttactcgccgcggctttgggcttaacctcggtatttgccggcggatcctcggaaaactcagacgccgacaacaggcaggctgtattttcaaacggcatttttcgtatcaccacaggcggaagatatgttttatccgggaaacatgaagggcaagtccttattcaggccacaagaaacgatgtggttgaattggtgcttgacaacctgactctccataatccgaacgggcccgccatatacgcgccccgctcccaaaaggtggaattgattttggcggacggatcggcaagtacaatttccgacggtaaacatccaaacgatgaaaacaatgccgtaatcttcatacagcatgatttgattatttccggcaacggaaccttaaatattaccggcaacttccagcacggcattcgcgcccaggataccctcaccgtaaaaggcggtgtaattaatataaaagcgtccggcgacgcgctgcggggccgtgacgcggtgatcactcggccgctcggccgaatctga

SEQ ID NO: 34540 - protein, 184 aa, Unknown
  Obtained from environmental sample
  SIGNAL (1)...(24)
  misc_feature (1)..(184): Xaa is any amino acid
MKNTRKTKIILLLAAALGLTSVFAGGSSENSDADNRQAVFSNGIFRITTGGRYVLSGKHEGQVLIQATRNDVVELVLDNLTLHNPNGPAIYAPRSQKVELILADGSASTISDGKHPNDENNAVIFIQHDLIISGNGTLNITGNFQHGIRAQDTLTVKGGVINIKASGDALRGRDAVITRPLGRI

SEQ ID NO: 34541 - DNA, 1188 bp, Unknown
  Obtained from environmental sample
  misc_feature (1)..(1188): n is a, c, g, or t
ttgccattcctcttaacattactcattatatatgatatttttaaaaaatacatgtggcgcgtacaacttcataaaataaattacgatgaaagagagtatcaggctgttaaagaggtactcgattccggctggttaagtatcagcgaaaaaactcttgctttcgaggccgctttttctgtctttcttgggaatgggacaaaatgccttgccctttcaaattgtaccgccgccttgcacatggcacttcttgcccttaatataaaagaagacgatgaaataattactccttctttaacctttattgccgaccaaaatgttacccaaatggcgggtgcaaaaaacgtacttgcggatatttcttcaatggaagattggtcggtcgatcctgtcgatattgaagctcggattacacctgcgacaaaagctgtgatgatagtccactatgcgggttttgcctgtgatatggagcgcataaccgccctttgcaaaaaacacaaattactccttattgaagactgcgcccattcaccgggagccgattacaagggacagcctctcggcacttttggcgacatatcggctttcagtttttttgcaaataaaaacatcgcggttggcgagggcggcatggttgttacgcgcaatgcggatttatatgaaaaactgcgtcttttgcgttctcacggaatgtccgtcccctcttttgaccgctacaagggcagagcagtctcttacgacgtacagtcgccgggattgaattaccgtattcatgaaataagttccgcccttgggcttgtccagcttaaaaagttagaagacgcgaatgaaaaaagaaaaaaactcgttgaacactactacggccgtcttgataaagttccgtccgtctcaatccctttcaggtctttttcacgcggaaaaccgaattatcacataatgccgattttgctttcagagaaaattgacagggcggcggttatagaatcaatgaaacaggacggagttcaaaccagtatccattaccccgcgattcagaatttcagcgcatacaaggacaaagtaaactccacgccgaaagccgaatatgtctgcgcccacgaattaactttgcctttgtatccgactatgacgacggaagaagttgatattgtgtgtgatgctctggtcagcggaattgagaagagcggataa

SEQ ID NO: 34542 - protein, 395 aa, Unknown
  Obtained from environmental sample
  DOMAIN (23)...(387): Aminotransferase class I and II
  misc_feature (1)..(395): Xaa is any amino acid
MPFLLTLLIIYDIFKKYMWRVQLHKINYDEREYQAVKEVLDSGWLSISEKTLAFEAAFSVFLGNGTKCLALSNCTAALHMALLALNIKEDDEIITPSLTFIADQNVTQMAGAKNVLADISSMEDWSVDPVDIEARITPATKAVMIVHYAGFACDMERITALCKKHKLLLIEDCAHSPGADYKGQPLGTFGDISAFSFFANKNIAVGEGGMVVTRNADLYEKLRLLRSHGMSVPSFDRYKGRAVSYDVQSPGLNYRIHEISSALGLVQLKKLEDANEKRKKLVEHYYGRLDKVPSVSIPFRSFSRGKPNYHIMPILLSEKIDRAAVIESMKQDGVQTSIHYPAIQNFSAYKDKVNSTPKAEYVCAHELTLPLYPTMTTEEVDIVCDALVSGIEKSG

SEQ ID NO: 34543 - DNA, 930 bp, Unknown
  Obtained from environmental sample
  misc_feature (1)..(930): n is a, c, g, or t
atggccgagcggccgagcggcacgagaataaagatcaaccttgcgggcgtcggggattttggtcggatgattctgcggcctgaagggctggacccaaaaactgccaaagctctcttaaaggacgcagccgaaaaaaatgacgggactgctattttgaatcttgccgcttttgtttcggaaatgaaagcgatgaacctccccaacacctgcttctgcgattgcacggcaagcgaagaggtagccggtttgtacgcggaaatcttacaatcttccatcccgatagtaactcccaataagcgggccaactcaggctctctggattattataaaacccttacgagattttccaaagccaggggcattccttatttatacgagaccacagtttgcgcaggccttccggttatatcgacattaagggatctgttcctttcaggggacaaggtaaggcgcattgaagctgtgctttcgggaactctgagttatatcttcaataattttgacggctcaaaatcattttcagcccttttaagggaagcaaaaagcaaaggctttaccgagcctgacccgagggatgatttgaacgccgtagacgccgccagaaaggctgttatcctggcgcgggaatgcggcttaaacatggaattttcagaggttgaaattgagcccattctgcctcttgcctgctttaaagcagacggggtagaggctttcttcaaagagctggaaaaatccgacagggattttgagaggcgccgcagtgaagccgccgccgaaggaaaaaccctgcgttatgtggcggtaatcgaaaaagactgcgcgaaattatcccttcgcaaggaaaaggccggcagcccattcctaaccctgatcgacgcggacaacattgtcgtcataaccaccgatcgctattcaccccttccatggtga

SEQ ID NO: 34544 - protein, 309 aa, Unknown
  Obtained from environmental sample
  DOMAIN (1)...(126): Homoserine dehydrogenase, NAD binding domain
  misc_feature (1)..(309): Xaa is any amino acid
MAERPSGTRIKINLAGVGDFGRMILRPEGLDPKTAKALLKDAAEKNDGTAILNLAAFVSEMKAMNLPNTCFCDCTASEEVAGLYAEILQSSIPIVTPNKRANSGSLDYYKTLTRFSKARGIPYLYETTVCAGLPVISTLRDLFLSGDKVRRIEAVLSGTLSYIFNNFDGSKSFSALLREAKSKGFTEPDPRDDLNAVDAARKAVILARECGLNMEFSEVEIEPILPLACFKADGVEAFFKELEKSDRDFERRRSEAAAEGKTLRYVAVIEKDCAKLSLRKEKAGSPFLTLIDADNIVVITTDRYSPLPW

SEQ ID NO: 34545 - DNA, 456 bp, Unknown
  Obtained from environmental sample
  misc_feature (1)..(456): n is a, c, g, or t
ttgcggttcctgaatatgttcgacacgcactgccatttacaggatgataggatatccgcccgagcgggcgatatagtcgcagccgccaaccgcgccggtgttacgaggatgctctgttgcggcagcggcgccgcggattgggacggcgtcgcgcgtatcggggcggcgtacgcggacaggggagcggtctgcgcctacggggtgcacccattttatgtcaaaagcgttgatctcggcgataataagtgggaggatgatctttccggacgccttgcaggcgatccatcggcggccgtgggcgagatcgggctcgatcacaccgtanacccgcggcgacgacgacaagcaggcggaaatcttcgtacgccaactgcgtatcgcggagcggtacgaactcccggtaccaatccactcccgcaaggccttcgggactatcttatcgatactacgggatag

SEQ ID NO: 34546 - protein, 151 aa, Unknown
  Obtained from environmental sample
  DOMAIN (6)...(151): TatD related DNase
  misc_feature (1)..(151): Xaa is any amino acid
MRFLNMFDTHCHLQDDRISARAGDIVAAANRAGVTRMLCCGSGAADWDGVARIGAAYADRGAVCAYGVHPFYVKSVDLGDNKWEDDLSGRLAGDPSAAVGEIGLDHTVXPRRRRQAGGNLRTPTAYRGAVRTPGTNPLPQGLRDYLIDTTG

SEQ ID NO: 34547 - DNA, 612 bp, Unknown
  Obtained from environmental sample
  misc_feature (1)..(612): n is a, c, g, or t
gtgcttgggcacggacatcttgaccacgccaacggcgcttatcaatttgaggaagcgtggatacatgaggcagattatgaactatgccgccttcacacgtcggaagaataccgtcagatagcccttaaacaaataaaagaatacggcattaaagcgccggatgattttaagcccgatgaatacctaaaagccggaaccggcaatttgaaaaaaatgaaagacggtaaaatattcgatcttggcggtttgcacatagaagtgataggcatgggcggacataccgcaggttctataggaatcctcgccaaagaacccaaagtgctgctgacaagtgattcggcgactcctcaggtttggatgtttaagatagagtcattgtccgtcaaagagtatatagccatgctggaacgcgtcgttcagcttgatttcgacaattttattacagggcatacggacgtaatatttcctaaatccgaatttaataaatatataaatgccgcgcgtcatatttctattgagaaatccgtacctttcaagtatcaccctgagttgaaagggcttctttacagcgaagacggcgtagagattgtgttcagtgaggctaaattatag

SEQ ID NO: 34548 - protein, 203 aa, Unknown
  Obtained from environmental sample
  misc_feature (1)..(203): Xaa is any amino acid
MLGHGHLDHANGAYQFEEAWIHEADYELCRLHTSEEYRQIALKQIKEYGIKAPDDFKPDEYLKAGTGNLKKMKDGKIFDLGGLHIEVIGMGGHTAGSIGILAKEPKVLLTSDSATPQVWMFKIESLSVKEYIAMLERVVQLDFDNFITGHTDVIFPKSEFNKYINAARHISIEKSVPFKYHPELKGLLYSEDGVEIVFSEAKL

SEQ ID NO: 34549 - DNA, 357 bp, Unknown
  Obtained from environmental sample
  misc_feature (1)..(357): n is a, c, g, or t
atggctgataatatgctaaaatacaaaaatttctacggcagcgttgaattttctgcagatgatgaatgtttctttggaaaacttataggaaccgacgatcttgtaacttttgaaggagaaagcgttgacactctcaaaaaggccttttccgaagctgtagaagattacattatattatgcaaaaaagcaggaaaagaaacgcaaaaatcttataaaggttcatttaatattcgtttgccgcctgatctgcataaggaagcggcggttatcgcgagcagggaagggatctcattaaacgcatttgtagaaaaagcaatatatgcgcaggttcattcaaaaacaagcgcggaggtttag

SEQ ID NO: 34550 - protein, 118 aa, Unknown
  Obtained from environmental sample
  DOMAIN (56)...(106): HicB family
  misc_feature (1)..(118): Xaa is any amino acid
MADNMLKYKNFYGSVEFSADDECFFGKLIGTDDLVTFEGESVDTLKKAFSEAVEDYIILCKKAGKETQKSYKGSFNIRLPPDLHKEAAVIASREGISLNAFVEKAIYAQVHSKTSAEV

SEQ ID NO: 34551 - DNA, 411 bp, Unknown
  Obtained from environmental sample
  misc_feature (1)..(411): n is a, c, g, or t
atgaaaacacgttttgctccaagtccaacaggatatttgcacaaagggcatatttggagtgcgctctgtgttgccgctgttgcaaaagaaaaaaacgcctctattcatttgagaattgaagaccacgataaattgcgttgttcaaagcatttttcggatattataaaaaaagatttggagtggcttggttttgagtggcaaagcgagagcattcaaagcgagcgatatgaaatttatgaaaagtattttgaaatgttgcagaaaaaaaatttgctatatgaattctataaaaccgataaacccaaaattatgctgaaaaatccagaaggcgaagattttgccattaaggatgctctagagcaatggacatatcaatttgccgttgtaattgacgatttgaagagggtatag

SEQ ID NO: 34552 - protein, 136 aa, Unknown
  Obtained from environmental sample
  DOMAIN (2)...(135): tRNA synthetases class I (E and Q), catalytic domain
  misc_feature (1)..(136): Xaa is any amino acid
MKTRFAPSPTGYLHKGHIWSALCVAAVAKEKNASIHLRIEDHDKLRCSKHFSDIIKKDLEWLGFEWQSESIQSERYEIYEKYFEMLQKKNLLYEFYKTDKPKIMLKNPEGEDFAIKDALEQWTYQFAVVIDDLKRV

SEQ ID NO: 34553 - DNA, 531 bp, Unknown
  Obtained from environmental sample
  misc_feature (1)..(531): n is a, c, g, or t
ttggaagcaaaacgctatgagcgggaaaatatatggaaccttccaggtgattatgtgtggggaagtttgcatcgctggattggcatggcgaatgttcatttaagggcagagcgtttgcagggaaaagaattgtccctgccatttttgggtgttttggattatgtattcggtcgcaacaactggggcatagcaatgctcgcatctgctaatttgccatatagcattcgcaatgtttacaacggaatttaccgcttaaccaaagtttttcccacaggtgctttatcagaaggtccgggggacaaggcgactcatttggaaatgcaaaaatattttaccattccaaaaaacaactcctttgataaattcaacacaaaagccggagtgttttacgataatgccgatgattttatgattcaagaaagcaccataggtgggcagggagatttgctccttatgcttgcgcttgcttctgctaaaaacctctctccaaaagcggaccccggaactgttccgcgccgcacgcaaaaatga

SEQ ID NO: 34554 - protein, 176 aa, Unknown
  Obtained from environmental sample
  misc_feature (1)..(176): Xaa is any amino acid
MEAKRYERENIWNLPGDYVWGSLHRWIGMANVHLRAERLQGKELSLPFLGVLDYVFGRNNWGIAMLASANLPYSIRNVYNGIYRLTKVFPTGALSEGPGDKATHLEMQKYFTIPKNNSFDKFNTKAGVFYDNADDFMIQESTIGGQGDLLLMLALASAKNLSPKADPGTVPRRTQK

SEQ ID NO: 34555 - DNA, 855 bp, Unknown
  Obtained from environmental sample
  misc_feature (1)..(855): n is a, c, g, or t
atgaaaaatttgatggatttctgtatcggcaccccgacttactggctggtaggttttggcattatgttcggaaccggcaggattatcggcaacattgactttatggttaccgggaattacgacgcaattgcccctgccggcgttcctttgcccgccttcctgatctttcaaacggtgttctgcgctacagctgcgacaatcgtatcgggagcgatggcggagaggacaaagttttcggcttactgtctttacagttttatcatcagcgccgtgatttacccgatctcaggccactggatatggggcggcggctggcttcaacagcttaatttccatgactttgcgggttctaccgcggtacatatggtcggcggcgtagcgtctttagtcggcgcggcaattgtcggtccccgtatcggaaaatatgacaaatgcgacaaagacggaaggcccacgaagggcagcaagcctagggcaatccccggacacagcctgacgcttggcgcgctcggcgttttcattctctggttctgctggttcggttttaacggcggttctactgtttccatggagaaagtcattgaagatggagttgtcactaataacatctatggcgccggtaaaatttttgttactacaaaccttgcggcggcaaccgcggcggtctttaccatgtttattacatggatcaaatacaaaaagcctgacgtgtcaatgacgcttaacggcgcacttgccggtcttgttgcaatcaccgcgggatgcgacgtcgtatcacctttcggcgcgttctgcattggtatcgttgcggcgtttgtaattgtattcggcattgagtttgttgaaaagtattga

SEQ ID NO: 34556 - protein, 284 aa, Unknown
  Obtained from environmental sample
  DOMAIN (1)...(284): Ammonium Transporter Family
  misc_feature (1)..(284): Xaa is any amino acid
MKNLMDFCIGTPTYWLVGFGIMFGTGRIIGNIDFMVTGNYDAIAPAGVPLPAFLIFQTVFCATAATIVSGAMAERTKFSAYCLYSFIISAVIYPISGHWIWGGGWLQQLNFHDFAGSTAVHMVGGVASLVGAAIVGPRIGKYDKCDKDGRPTKGSKPRAIPGHSLTLGALGVFILWFCWFGFNGGSTVSMEKVIEDGVVTNNIYGAGKIFVTTNLAAATAAVFTMFITWIKYKKPDVSMTLNGALAGLVAITAGCDVVSPFGAFCIGIVAAFVIVFGIEFVEKY

SEQ ID NO: 34557 - DNA, 738 bp, Unknown
  Obtained from environmental sample
  misc_feature (1)..(738): n is a, c, g, or t
ttgaagattgacgatcctgtcggggcaatcggcgtacacggtcttgccggagcggcgggaacaattcttaccggtatattcgcccttgacggcggactggtatacggcggcggatgggcgatggttggagttcaggctctcggcgttgttgctgtagccgcatgggtcgcgataaccatgggcatcgtctttacgataatcaagaaaacaatgggactgcgcgtttcaccagccgaagaaattgccggtttggatattacggaacacaacattgaaagcagctatgcagactttatggtatctacctccattgaggctgataaggacgccgtagttccggctaatgtggcggttcctgttgtaaacaactcgaagcccggcgcgaagatgacgaagataacggtcatcaccaatcagaataaactcaccctgcttcacgcggctcttgacaagataggcattaccggcctgacggttaccaatgttcttggtcacgggatgcagaagggccatgtggaatattaccgcggcgctccggtcaatatccggctgctgcccaaggttcaggttgacataatcgtaagcaagatacctacgcaaactgtaatagatgccattaaaaaggtattgtatacaggaaaagtgggcgacggcaagatatttatttacgatgttgaaaacgtcgttaaggtccgcaccggcgaacaaggttacgacgcgttacaggataacgaataa

SEQ ID NO: 34558 - protein, 245 aa, Unknown
  Obtained from environmental sample
  DOMAIN (133)...(234): Nitrogen regulatory protein P-II
  misc_feature (1)..(245): Xaa is any amino acid
MKIDDPVGAIGVHGLAGAAGTILTGIFALDGGLVYGGGWAMVGVQALGVVAVAAWVAITMGIVFTIIKKTMGLRVSPAEEIAGLDITEHNIESSYADFMVSTSIEADKDAVVPANVAVPVVNNSKPGAKMTKITVITNQNKLTLLHAALDKIGITGLTVTNVLGHGMQKGHVEYYRGAPVNIRLLPKVQVDIIVSKIPTQTVIDAIKKVLYTGKVGDGKIFIYDVENVVKVRTGEQGYDALQDNE

SEQ ID NO: 34559 - DNA, 606 bp, Unknown
  Obtained from environmental sample
  misc_feature (1)..(606): n is a, c, g, or t
atgaccggtaaaaatgtgacaattaacggaacgccgggaaatgcgttaggcgcttattttaacggcggaaccattacggtaaacggcaatgcgcaggacgccgtcggtgatacgatgaatgacggcgagattatcattcacggtagcgcgggcgacgcgctgggctacgccatgcggggcgggaaaatatacgtccgcgacaatgccggatacagggttggtattcacatgaaagaatacaaagaaaaaaaaccggtaatcgtcattggcggcagggcgggaagtttcctgggtgaataccttgccggcggactcattgtggttctgggcataggctgccataatgagatccccgtatggtattttaccggaaccggaatgcacggcggaaaaatattcatcaggaccgacaaagaactttcttcgcttcctgcgcaggtcattgaggatgtagccaaagatgatgatttgcgcgagattgcgccctatgtcagcgagtttgcgggttattttggcatggacgccaaacagcttatgaaagacagatattatgtgttaaaacccaacgcgaagaacccgtataaacagctgtatacggcgaattag

SEQ ID NO: 34560 - protein, 201 aa, Unknown
  Obtained from environmental sample
  DOMAIN (1)...(170): GXGXG motif
  misc_feature (1)..(201): Xaa is any amino acid
MTGKNVTINGTPGNALGAYFNGGTITVNGNAQDAVGDTMNDGEIIIHGSAGDALGYAMRGGKIYVRDNAGYRVGIHMKEYKEKKPVIVIGGRAGSFLGEYLAGGLIVVLGIGCHNEIPVWYFTGTGMHGGKIFIRTDKELSSLPAQVIEDVAKDDDLREIAPYVSEFAGYFGMDAKQLMKDRYYVLKPNAKNPYKQLYTAN

SEQ ID NO: 34561 - DNA, 780 bp, Unknown
  Obtained from environmental sample
  misc_feature (1)..(780): n is a, c, g, or t
atgctgcgcccgactgccgttatttccaacgtttcggcccatcgatggaccgatgacgtgccggtgctgtttgccgaagtgaaccatcaccacgcggacattattcccgacagcgggaaaaagcgcggctgggacaagggctttatagcggttaaacccaactgctccattcagagctacacaacggcgctatacgcgctgataagagcgggatacgaaatcaggcgacttatcgtcagcacccttcaggcagtgtccggcgcgggttatcccggcgttccaagcctcgacatgatcgacaacgttattccctacatcggcggggaggaagaaaagtcagagctggagccgctaaagattcttgggtcaattaacggaggcgtttttaagaacgccgaattgccgaaaatctccgcccactgtaaccgcgttcccgtaactgacgggcacactgcctgcgtcagcctggagttcggtgaaaacaagccatcggtggatgaggtaaaaaaaatatggactgattttaaaagtcttccgcaagagctggatcttccgacggcccctcagcggcctatcattgtactggaagataatgatcgcccccagccacggaaggacagggacgcagacaaggctatggcggtaactatcggacgggtgaggccctgcaatgtctttgacctccgctttgtgggcctttcccacaacactgtccgtggcgcggcggggggaggcatacttaacgcggaacttttaaaacacaaaggatatttaggttaa

SEQ ID NO: 34562 - protein, 259 aa, Unknown
  Obtained from environmental sample
  DOMAIN (64)...(239): Semialdehyde dehydrogenase, dimerisation domain
  misc_feature (1)..(259): Xaa is any amino acid
MLRPTAVISNVSAHRWTDDVPVLFAEVNHHHADIIPDSGKKRGWDKGFIAVKPNCSIQSYTTALYALIRAGYEIRRLIVSTLQAVSGAGYPGVPSLDMIDNVIPYIGGEEEKSELEPLKILGSINGGVFKNAELPKISAHCNRVPVTDGHTACVSLEFGENKPSVDEVKKIWTDFKSLPQELDLPTAPQRPIIVLEDNDRPQPRKDRDADKAMAVTIGRVRPCNVFDLRFVGLSHNTVRGAAGGGILNAELLKHKGYLG

SEQ ID NO: 34563 - DNA, 1104 bp, Unknown
  Obtained from environmental sample
  misc_feature (1)..(1104): n is a, c, g, or t
atggcaggtgatggcatattaagccaagacgaaatagatttgctcaccaagagcttgctcggcggtgggggtggtgatactccggctccggctccggccgctgcgccagtggctgttgaaaatacggcagaagcagcaagaccttttttcaaagtactttgcgaacaggcatccagcgttgttacaaccgtgctttcccgtgccgttgattttcagcttcaatggctcgttgcaggtgaaaattcagttataccagatgaattgacaaaccagagcctttacataggtgttgatgttaaaaaaactgtagtgggaaaaatgttttttgccataagcaagtcagaggtggcaactctttccgaccttatgctcatgggttctggtcattccgattataccgatgaacacaaagatgcaatttgcgaaataataaatcaaataactggttcctgcataacggtgatggattcccagattcatttagcactggattttggacaggcttcagttagtgattttagcggaaaaaatgatgattttaaaggctgtgcagttgcaactgttctagttaaaatagaagaattccccgatagaaaaatattaatagttttggacagcagtttgttcccggcaataagatcaaaaatatcttccaaaatgtcttatgccagtgcagacacaagccttgcaagtcttgggctttcttcaactccagcatttgctgcacctgcccccagcggcggcggcgatatttctggtggcggcggcggtggtggtgctccagttgcggctcctcctcttcttgcaccgcaacattcgggtggaccttttggctccacaggtaataaagctcttgatttgctaatggatattgaactgccaatagtcatagaacttggcagaactcaaatgagcctaaagcgaattctagagcttggccccggtgccattgttgaaatggacaggcttgccggagaaccagttgatattttaatcaacggaaaagttgttgcgcgtggcgaagttgttgttgttgatgaaaactttggcgtacgcattcttgcccttgtttctccagaagagagattaaaacttttgagataa

SEQ ID NO: 34564 - protein, 367 aa, Unknown
  Obtained from environmental sample
  DOMAIN (284)...(360): Surface presentation of antigens (SPOA) protein
  misc_feature (1)..(367): Xaa is any amino acid
MAGDGILSQDEIDLLTKSLLGGGGGDTPAPAPAAAPVAVENTAEAARPFFKVLCEQASSVVTTVLSRAVDFQLQWLVAGENSVIPDELTNQSLYIGVDVKKTVVGKMFFAISKSEVATLSDLMLMGSGHSDYTDEHKDAICEIINQITGSCITVMDSQIHLALDFGQASVSDFSGKNDDFKGCAVATVLVKIEEFPDRKILIVLDSSLFPAIRSKISSKMSYASADTSLASLGLSSTPAFAAPAPSGGGDISGGGGGGGAPVAAPPLLAPQHSGGPFGSTGNKALDLLMDIELPIVIELGRTQMSLKRILELGPGAIVEMDRLAGEPVDILINGKVVARGEVVVVDENFGVRILALVSPEERLKLLR

SEQ ID NO: 34565 - DNA, 849 bp, Unknown
  Obtained from environmental sample
  misc_feature (1)..(849): n is a, c, g, or t
atgttaatcttcccagcacaagatgctaaaaccataattcgccttgcgctaaacgaagatgttcgcacaggcgattatacaagtttatggactttgccagcagagcaagttcaaacagcaaagctcattgcaaaagaagatggagttgtggcagggcttcctataattgaactagttttttccgaactaggcggcaaagttaaaattgaaacttatgttcaagacggcgacaagattgaagttggcactcaaattgcaagtataacaggcgaaacaaaaactctcttatgcggtgaacgggttatgctcaattttttgcagcagttgtctggagttgcaacaatcacaaataaattcgcaagtgctctcaaaggtggcaaaacaaaagttttagatacacgcaaaacaataccaggtttcagaactctgcaaaaatacgcagtgcttgccggtggcggctcaaatcatcgcatgggtttgtgggatatggttttggtgaaagacaatcacattgccgcagcaggcggagttttagaggcgtgggaagctgtaaaaaaacaaaatacccaaaacctgaaagttgaaattgaggtggagaatttggaacaattgaaattacttttggggcgcggagttaatcgcattatgctggacaatatgaacaatgatttaatgcgcgaagcggttaaaattgtaaaagagagcggcgacccagtggaactggaagccagcggaaacatgacattagaaagagtaatggaactctcagatattgggttggactttatttctgtaggtgctttgacgcacagtgtaaaagcattagatatatctatgagaataaaatga

SEQ ID NO: 34566 - protein, 282 aa, Unknown
  Obtained from environmental sample
  DOMAIN (21)...(110): Quinolinate phosphoribosyl transferase, N-terminal domain
  misc_feature (1)..(282): Xaa is any amino acid
MLIFPAQDAKTIIRLALNEDVRTGDYTSLWTLPAEQVQTAKLIAKEDGVVAGLPIIELVFSELGGKVKIETYVQDGDKIEVGTQIASITGETKTLLCGERVMLNFLQQLSGVATITNKFASALKGGKTKVLDTRKTIPGFRTLQKYAVLAGGGSNHRMGLWDMVLVKDNHIAAAGGVLEAWEAVKKQNTQNLKVEIEVENLEQLKLLLGRGVNRIMLDNMNNDLMREAVKIVKESGDPVELEASGNMTLERVMELSDIGLDFISVGALTHSVKALDISMRIK

SEQ ID NO: 34567 - DNA, 633 bp, Unknown
  Obtained from environmental sample
  misc_feature (1)..(633): n is a, c, g, or t
atggattctcagcttcatttggcacttgattttggacaggcttctgttagtgaatttagcggaaaaaatgaatttaaaggtggtgcggttgcaactgttttagttaagatagaagaatttccagataaaaaaatattaattgttttagaagatagtttattttcagcaataaaatcaaaaatttctactaaaatatcttatgccagtgcagacacaagccttgcaagtcttgggctttcttcatctccaacctcttctgtgcctgctgctggtggaggaggtattcctgccggtggcggtggtggtgctccggttgcggctcctcctgctcttacgccgatgcattctggtggtccctttggttctacaggtaataaagctcttgatttgctaatggatattgaactgccaatagttatagaacttggcagaacgcaaatgagtttaaaacgaattttagaacttggccccggagctattgttgaaatggacaggcttgctggtgaaccagttgatattttaataaacggaaaggttgttgcgcgtggcgaagttgttgttgttgacgaaaactttggcgtgcgcattatagctcttgtttctccagaagagagattgaaacttttgagatag

SEQ ID NO: 34568 - protein, 210 aa, Unknown
  Obtained from environmental sample
  DOMAIN (127)...(203): Surface presentation of antigens (SPOA) protein
  misc_feature (1)..(210): Xaa is any amino acid
MDSQLHLALDFGQASVSEFSGKNEFKGGAVATVLVKIEEFPDKKILIVLEDSLFSAIKSKISTKISYASADTSLASLGLSSSPTSSVPAAGGGGIPAGGGGGAPVAAPPALTPMHSGGPFGSTGNKALDLLMDIELPIVIELGRTQMSLKRILELGPGAIVEMDRLAGEPVDILINGKVVARGEVVVVDENFGVRIIALVSPEERLKLLR

SEQ ID NO: 34569 - DNA, 438 bp, Unknown
  Obtained from environmental sample
  misc_feature (1)..(438): n is a, c, g, or t
atgattgccgaagtttctcctattgttttgtacttgcgacatattatcggttttgacgatgttagcagaaagggattagaaggttctggtaaaccaataatttttatagaagaacctgaagcacatttacatccaaaggcacagactatattaatggagtgttttgttgaattagtaaagattggagccaagcttattattactagccacagtaattatatgttccagaaattgaataatttaatcgccgaaggaaaaatcgataaaacaataataaacggaataatattttctcaaggtagtaaaggtagtttttccagaataattccaataagtgaactcgggatggaagacaataatttcgttgaagttgcggaaaatttatataatgagaaacttcaaataatagaaaaaatggaagcggataatgttgaataa

SEQ ID NO: 34570 - protein, 145 aa, Unknown
  Obtained from environmental sample
  misc_feature (1)..(145): Xaa is any amino acid
MIAEVSPIVLYLRHIIGFDDVSRKGLEGSGKPIIFIEEPEAHLHPKAQTILMECFVELVKIGAKLIITSHSNYMFQKLNNLIAEGKIDKTIINGIIFSQGSKGSFSRIIPISELGMEDNNFVEVAENLYNEKLQIIEKMEADNVE

SEQ ID NO: 34571 - DNA, 336 bp, Unknown
  Obtained from environmental sample
  misc_feature (1)..(336): n is a, c, g, or t
gtggaaagaaaaatcaaagcaatctgcgaatggaagcgagtagaaatattggaaatgacgataatgcccgatcatatccatatggtagcgataatacccccgaagctggcagtagccgaattaatgggaataatgaaagggaaaacggcgatagccgttttccaacaccgaaaaaaccttcgaacgaaaccatactggggaaatcatttctggagccgcggctactgtgtcacgacggttgggatagatgaagaaaagatacgaagatacgtaaagtatcaggaagacgccgagcggctcagcgaagaccacgaactacaagaaggcctcttttag

SEQ ID NO: 34572 - protein, 111 aa, Unknown
  Obtained from environmental sample
  DOMAIN (3)...(87): Transposase IS200 like
  misc_feature (1)..(111): Xaa is any amino acid
MERKIKAICEWKRVEILEMTIMPDHIHMVAIIPPKLAVAELMGIMKGKTAIAVFQHRKNLRTKPYWGNHFWSRGYCVTTVGIDEEKIRRYVKYQEDAERLSEDHELQEGLF

SEQ ID NO: 34573 - DNA, 756 bp, Unknown
  Obtained from environmental sample
  misc_feature (1)..(756): n is a, c, g, or t
atgttgcaatttccggcacaggatgcccaaacgctgattcggcttgcgcttgccgaagatgttcgcactggcgattttacaagtttgtggactttgccagccaagcaggttcaaaccgcaacgcttatagcaaaggaaaacggaattgtcgctgggttgcctgtaataccgcttgtctttagcgaacttggcggcgatgttaaaatagatgcttttattaaagatggcgattctgttaaagtaggtgacaaaattgcaaccattacaggtgaaacaaaaacccttttgagcggtgaacgcgtgatgctgaattttttgcagcaattatccggtgtggcaaccatcacgggtaaattcgcagcggttctcaaaggcggtaaaacaaaagttttggatactcgtaaaacaattccgggttttagaaccttgcaaaaatatgcggttctcgcgggtggtggctcaaatcatcgcatgggtctgtgggatatggttttggtaaaggataatcacattgccgcagcgggcggtgttttggaagcgtggaacgcggttaaaaaacagaatacgcagaatttaaaagttgaaattgaggttgaaagcctagaacagttgaaattgcttttagggcttggcgttgaccgcataatgttggacaacatgagcaacgagattatgcgggaggctattcgcatagttcgtgaaagcggcgactcggttgagttagaagcgagcggcaatatgacttggaaagggtaa

SEQ ID NO: 34574 - protein, 251 aa, Unknown
  Obtained from environmental sample
  DOMAIN (21)...(110): Quinolinate phosphoribosyl transferase, N-terminal domain
  misc_feature (1)..(251): Xaa is any amino acid
MLQFPAQDAQTLIRLALAEDVRTGDFTSLWTLPAKQVQTATLIAKENGIVAGLPVIPLVFSELGGDVKIDAFIKDGDSVKVGDKIATITGETKTLLSGERVMLNFLQQLSGVATITGKFAAVLKGGKTKVLDTRKTIPGFRTLQKYAVLAGGGSNHRMGLWDMVLVKDNHIAAAGGVLEAWNAVKKQNTQNLKVEIEVESLEQLKLLLGLGVDRIMLDNMSNEIMREAIRIVRESGDSVELEASGNMTWKG

SEQ ID NO: 34575 - DNA, 906 bp, Unknown
  Obtained from environmental sample
  misc_feature (1)..(906): n is a, c, g, or t
ttggagttattatattttccgcaagcgcataagttcaagaaacatacattcagaggtatagtgcaaactgatataaaaagaataacccaaagcctgataagcctgccaaccttgccaacggttgtggcgcagctttttgaattggttgacgatgaaaaagttgaaagaaaggctttggagcaaatagtctccagcgatcctgttttagccgcaaggcttttgaaaaccaccaatgcgggtggcgaatcggtaaccggtattcacagtgcgataagcaaactcggctatgagcaggtaaaagatatgagccttgaaatttctatgtcaagggcttttgaacttaaaaactctgtaatagatttgcaaaaattctgggaccattgcacagcggttggcatagtagcccgcatagttgccagcgaatacgaaccggacttagcaaacgatgccttcacagcgggtcttttgcacgatattggcaaaatagtccttttgcaatatatgaacaaagaatttgagcaaacgataagtatgagcaaaacccgctcttgcgaattgtatttagcagaaaaagagcttttgggcgttgaccacggacaaataggttcttggctcgccgaaaattggcggctcccgcgcgccataaacgaggttatgcaataccaccacaacttggaaagggcagagataaacagaccccttgtaacccttgttagcttcgcagacgttttgtgccgaataataggtgctggagatggcggcaactacgctccccctgtattttcgcccgaacttgccagcgaactagccaaatggcgcataaatctggaaatgagtgctctccaaccccttatgctgatgtgcatagaggaactcaacaaaagaaaccttacgcagtacatgtaa

SEQ ID NO: 34576 - protein, 301 aa, Unknown
  Obtained from environmental sample
  DOMAIN (124)...(247): HD domain
  misc_feature (1)..(301): Xaa is any amino acid
MELLYFPQAHKFKKHTFRGIVQTDIKRITQSLISLPTLPTVVAQLFELVDDEKVERKALEQIVSSDPVLAARLLKTTNAGGESVTGIHSAISKLGYEQVKDMSLEISMSRAFELKNSVIDLQKFWDHCTAVGIVARIVASEYEPDLANDAFTAGLLHDIGKIVLLQYMNKEFEQTISMSKTRSCELYLAEKELLGVDHGQIGSWLAENWRLPRAINEVMQYHHNLERAEINRPLVTLVSFADVLCRIIGAGDGGNYAPPVFSPELASELAKWRINLEMSALQPLMLMCIEELNKRNLTQYM

SEQ ID NO: 34577 - DNA, 915 bp, Unknown
  Obtained from environmental sample
  misc_feature (1)..(915): n is a, c, g, or t
atgggatcccagttttcgctggaatacgccgactctgccggcgtcggcatgaccctgtattcgggcgtcaacagcgtggcgcttggcgtgtacggctatgagcttgcggataacgtccttgaagtgcattattcaatcggagacattgcccgcagctatattattcccccggccgcggcggaacaaagaatgttaacatttttggaaaaaatggaacgcgacgaccggcgcaaggttgaggcgagttaccggctctacgacatcaataatctgcgcacgggcgacgacaaaagccggctgcttgccgattatcccgatctcaaccggacaaaaatgtacgtgctgcgcgacactacccaggactatatgaaagaaacgatggaagagctgttcgcgcgggccggttacacctacgacgactattatgaggacgcttcccgccatacgccgtccggcggcgatgaaaaaccggcgtttaacataacgctgcgttatacgcttgacgagagatcgctgatactcagtgtgccttttgacaagatagcgtacagaaccgcgtaccccataacgcaattaacgctcctgccttttatgggggccggcggcgtaaatgacaagggctatatgctggtgccggacggcagcggggcgctgatatactttaacaacgganaacagaatcaaatcgcctataacaacaacgtgtacggctgggacgaggcgatgccgcgcgacgcggtgatcaacgacaaacaggccccctttccggcctttggcatagagaagaacgggacgccctgntatgcgtcattgaagaaggctctttctgcggcggggtacgcgccgatgtgtccggccggaacagttcctggaacagcgtgtacccgcgctttaccatggttcacggagcgataa

SEQ ID NO: 34578 - protein, 304 aa, Unknown
  Obtained from environmental sample
  misc_feature (1)..(304): Xaa is any amino acid
MGSQFSLEYADSAGVGMTLYSGVNSVALGVYGYELADNVLEVHYSIGDIARSYIIPPAAAEQRMLTFLEKMERDDRRKVEASYRLYDINNLRTGDDKSRLLADYPDLNRTKMYVLRDTTQDYMKETMEELFARAGYTYDDYYEDASRHTPSGGDEKPAFNITLRYTLDERSLILSVPFDKIAYRTAYPITQLTLLPFMGAGGVNDKGYMLVPDGSGALIYFNNGXQNQIAYNNNVYGWDEAMPRDAVINDKQAPFPAFGIEKNGTPXYASLKKALSAAGYAPMCPAGTVPGTACTRALPWFTER

SEQ ID NO: 34579 - DNA, 840 bp, Unknown
  Obtained from environmental sample
  misc_feature (1)..(840): n is a, c, g, or t
gtgtccggccggaacagttcctggaacagcgtgtacccgcgctttaccatggttcacggagcgataatagatattacaggccgttccgaccggtcggtatacctttatgaaagaagcctgcccgccggtgaaagcgccaccctgcgctataccccatgcgttggcaacggctattcgggcatggcaaaagaataccgttcatggctcacatgcaggtatccctcattgggtacgcgcaaagaagacggcgtgcccgttgccatagagcttgtcggcgcggtgaacaagacgcggcaccggctgggcataccttttgatctgcctttaaaacttacctcctataaagagtccgcgggcatgatagagaactttgcccaatggggctggaaaaacgtgaggataaaacttaccggctggtttaaccgcagcgttgatcattccgtgccgaacaaaattaaattaatacgcgaacttggcagtaaaaaagattttaagaatctggtatcagccgcggagaaaaacggctacgcggtttttccggatgttgatttcatgtatatgagggatgtcaaactctttggaggattcagcctgtaccgcgacgcggcccgctatgtaaaccgtaaacgggtggaaaaatacccctacagctttgtctggttcggcgaacgtgccaggtggggcaaactcagctaccttacccgtccggcctatatgatgtccctgatcgacaattttaaccgaaagatgtccgcgctgggcctgcgtaactttgctttcagaaacatgggcgcgaaactcgccggcgattaccatgaaaagcggctagtcagcccgtga

SEQ ID NO: 34580 - protein, 279 aa, Unknown
  Obtained from environmental sample
  misc_feature (1)..(279): Xaa is any amino acid
MSGRNSSWNSVYPRFTMVHGAIIDITGRSDRSVYLYERSLPAGESATLRYTPCVGNGYSGMAKEYRSWLTCRYPSLGTRKEDGVPVAIELVGAVNKTRHRLGIPFDLPLKLTSYKESAGMIENFAQWGWKNVRIKLTGWFNRSVDHSVPNKIKLIRELGSKKDFKNLVSAAEKNGYAVFPDVDFMYMRDVKLFGGFSLYRDAARYVNRKRVEKYPYSFVWFGERARWGKLSYLTRPAYMMSLIDNFNRKMSALGLRNFAFRNMGAKLAGDYHEKRLVSP

SEQ ID NO: 34581 - DNA, 429 bp, Unknown
  Obtained from environmental sample
  misc_feature (1)..(429): n is a, c, g, or t
atgcagttgatcagggcgccgggacaattcgacgttatagttacgtctaaccttttcggggacatactctccgacgaggcgtccgtgcttacaggttcaatcggaatgttggcgtcggcgagtcttggctctcccgcgcagacagggacaaggcccggaatgtacgagcccattcacggttccgcgccggacatcgccggaaaagacatcgccaatccgctcgcgacgattctttccgcggcaatgatgctccgctattcattcaatcttgagaaagaagccttgtccattgaagccgctgtaaacaatgtgctggatcagggattgaggacaggagacatagcaagcagaagctctgcaagcggcgaaaaaattgtgggtacaaaggcgatgggcgaagccgtactcaaagcgttggagaaattatga

SEQ ID NO: 34582 - protein, 142 aa, Unknown
  Obtained from environmental sample
  DOMAIN (1)...(135): Isocitrate/isopropylmalate dehydrogenase
  misc_feature (1)..(142): Xaa is any amino acid
MQLIRAPGQFDVIVTSNLFGDILSDEASVLTGSIGMLASASLGSPAQTGTRPGMYEPIHGSAPDIAGKDIANPLATILSAAMMLRYSFNLEKEALSIEAAVNNVLDQGLRTGDIASRSSASGEKIVGTKAMGEAVLKALEKL

SEQ ID NO: 34583 - DNA, 621 bp, Unknown
  Obtained from environmental sample
  misc_feature (1)..(621): n is a, c, g, or t
atgaggaatgaggaaggagagaaaatgaaatttacaatcgctgtaattccgggagacgggattgggcctgaggtgacggcgccggctcttaatgtccttgacgcggtaggaaaaaagtatgaccatgctttcaactacgtcgagctgttggctggcggacaggctattgataaaacaggggagccgcttccaaaggaaactcttgaaagggcgaaacagtgcgacgcgcttcttctgggcgcggtcggcgggcccaaatgggatatgcttcccggccatctccggcccgaaagggcgctgttgggccttcgcgcggggcttggcgttttcgcgaacctccggcccgccgctttgctcccccagttaaaatccgcctgcccggttaaagacgaagtccttatcgcaagcaacagcgaaggaaaagcggcttttgatttattgatcgtaagggaattaacaggcgggctttacttcggcaaacgagggcgaatcgacgaagcttcaaacggacacagccccggcgcggcttttgacaccgaaacatattcatggatggaaattgagcgcgtgctacgcgccggttacgaagccgcggcggcgcggcgtaaaaactctgcgtag

SEQ ID NO: 34584 - protein, 206 aa, Unknown
  Obtained from environmental sample
  DOMAIN (12)...(206): Isocitrate/isopropylmalate dehydrogenase
  misc_feature (1)..(206): Xaa is any amino acid
MRNEEGEKMKFTIAVIPGDGIGPEVTAPALNVLDAVGKKYDHAFNYVELLAGGQAIDKTGEPLPKETLERAKQCDALLLGAVGGPKWDMLPGHLRPERALLGLRAGLGVFANLRPAALLPQLKSACPVKDEVLIASNSEGKAAFDLLIVRELTGGLYFGKRGRIDEASNGHSPGAAFDTETYSWMEIERVLRAGYEAAAARRKNSA

SEQ ID NO: 34585 - DNA, 618 bp, Unknown
  Obtained from environmental sample
  misc_feature (1)..(618): n is a, c, g, or t
gtgttggaccattccctgcacgcctgcgattacgccgccgcaaacggctattctcacgaactgcgccttgccgccctgttacatgacatcgggaaaccgtccgtccgcgaaatggacgaaagcggcgtctggaaattctaccgtcacgaggaaataggcgcgtctatgtgtcgtcaactcctcagacggctgcgctatccaaacaatgtaatcgacagcgtttgccatttggtaaaggaacatatgtttcattacacggaagactggtcggccgccgccgtccgccggtttatcgctcgtgtcggcgaggcttctcttgaagacctgtatcttttacgccgggcggacgcttttgctctggcggggaaaaaaattgagcctataaaccttgcggcgcttgcggatagagtagaaaaagtccttgcgcagaaacacgcttttaccttgaaagaccttgccgtatcgggaaaagacctaatggcgattggaattgagggcggtaaaacaatggggataattttaaacgagcttctggaaaccgtgcttgacgatcctgcgcagaatacaaaggaaaaattgctggagattgcggaaaaaatttataaaagcataagataa

SEQ ID NO: 34586 - protein, 205 aa, Unknown
  Obtained from environmental sample
  DOMAIN (1)...(121): HD domain
  misc_feature (1)..(205): Xaa is any amino acid
MLDHSLHACDYAAANGYSHELRLAALLHDIGKPSVREMDESGVWKFYRHEEIGASMCRQLLRRLRYPNNVIDSVCHLVKEHMFHYTEDWSAAAVRRFIARVGEASLEDLYLLRRADAFALAGKKIEPINLAALADRVEKVLAQKHAFTLKDLAVSGKDLMAIGIEGGKTMGIILNELLETVLDDPAQNTKEKLLEIAEKIYKSIR

SEQ ID NO: 34587 - DNA, 489 bp, Unknown
  Obtained from environmental sample
  misc_feature (1)..(489): n is a, c, g, or t
atggattcacttgacgacatctcaaagcttttcgcttttccgcctgaccatgttattcgctatccgcacgaaaaggattttaccgatacggaacttgctttttcgcttgccgctgaaaaaggctgtgatgatatttggcttgttggcggcggtggcggcaggatagaccatctttttgccatacgctcactttttgaaagagaacgttttccgcgccgctggataacaggtgcggaagatatttgctgtatagacgcaaacacaccgtacaatgaattttcccgccgcattgcggtaaatgcctgtgtctctgtttttccgtttggctcaagtccgtggaaagcgtcaagcaaggggcttaaatggccgcttgacgctctaagttgggatcgcggtttcttcgggattagcaatgttgcggtagacggggatttttcaattaaagcggaagcgggaagatttatgataatactttctttggaggaataa

SEQ ID NO: 34588 - protein, 162 aa, Unknown
  Obtained from environmental sample
  DOMAIN (1)...(79): Thiamin pyrophosphokinase, catalytic domain
  misc_feature (1)..(162): Xaa is any amino acid
MDSLDDISKLFAFPPDHVIRYPHEKDFTDTELAFSLAAEKGCDDIWLVGGGGGRIDHLFAIRSLFERERFPRRWITGAEDICCIDANTPYNEFSRRIAVNACVSVFPFGSSPWKASSKGLKWPLDALSWDRGFFGISNVAVDGDFSIKAEAGRFMIILSLEE

SEQ ID NO: 34589 - DNA, 915 bp, Unknown
  Obtained from environmental sample
  misc_feature (1)..(915): n is a, c, g, or t
atgcgtcctgagcaggtggcagcggtggataagaccgttgaatatttcaggtcatcaatgaaagaaagccctgaccgtcgcgccaaattcctgtggaacgcaaagatgcgttttggaaagacgtttgcgtcgtatcagcttgctaagcgtatggaatttacgaagatattgatactgacatttaaaccggcggttcaaagcgcgtgggaagaggacatagctacccatgtggattttgaggggtggcagtttatcagtaaaaattccgagttaacttgggaaacggccaacaagaagaggccgatagtctgtttcggatcgtttcaggactttctaggtaagaatgatcacggtggtatcaaggcaaaaaatgagtgggttcataccacaaactgggatttggttatttttgatgaatatcattttggcgcgtggcgcgataacgccaaaaatctgtttgaggctgagaatgaggacgaatatgaatctattgatatagagaaatacaagagggaagaggctggtaatgcttttaatgaaacgtttttgccgataacagcgtcgcggtatttgtatttatcgggtacgccgtttagggctatatcatccggcgagtttattgaagatcaaatatataactggacatactctgatgaacaacgggcgaaaaaaaactggaataagccgtgtgaaaatccatacgcagcccttccacgcatggttttgatgacctataagattccggacagtattaaacagatagcgatgcagggggaatttgacgagtttgaccttaacatatttttttctgctgatggaaaagacaacgaggctaaatttaaatatgaggattacgtccaaaaatggcttgacctaatacgcggggcatatataggcactactatcgacaattaa

SEQ ID NO: 34590 - protein, 304 aa, Unknown
  Obtained from environmental sample
  DOMAIN (1)...(199): Type III restriction enzyme, res subunit
  misc_feature (1)..(304): Xaa is any amino acid
MRPEQVAAVDKTVEYFRSSMKESPDRRAKFLWNAKMRFGKTFASYQLAKRMEFTKILILTFKPAVQSAWEEDIATHVDFEGWQFISKNSELTWETANKKRPIVCFGSFQDFLGKNDHGGIKAKNEWVHTTNWDLVIFDEYHFGAWRDNAKNLFEAENEDEYESIDIEKYKREEAGNAFNETFLPITASRYLYLSGTPFRAISSGEFIEDQIYNWTYSDEQRAKKNWNKPCENPYAALPRMVLMTYKIPDSIKQIAMQGEFDEFDLNIFFSADGKDNEAKFKYEDYVQKWLDLIRGAYIGTTIDN

SEQ ID NO: 34591 - DNA, 969 bp, Unknown
  Obtained from environmental sample
  misc_feature (1)..(969): n is a, c, g, or t
ttggatgtgctcgctcttggcaatgatttatggctcagtacgtttgcaggtattgaacgctaccacgcagcgcaaaatcaagttgcatttttttacgaaaaacttttgcccgttttaaacattccagacctctatcatatatacacgggagtaacttttccgcttggcgactggggaacttggggtttatttgtgaatttcataagctttggtgaaacttttgtttctgatgaaataaatttggagcaagagggcagttcttttaacagttccgaaactgttgtaggtttgagctatggaacaaagctgaacaagaattggggcttgggactgagtttcaaatttttctattctgcactcagttctggggctgcattgaacgagccggatgcaaccactgcgagctatgcaatagatatcggtgttttggggcgcaatttgtttggtgtaaacgggcttagatttggtacggtgctcgcaaacataggtcctaatgtttactatgtggaaaaatccaacaactatcccattcctttaacctggcgttttggagtttcttacgatttaataaaactccccgaccatcgcataaccttgaacacggattacagcagaatggctatttacgaaaattccaaaggcgaggcagagcctttctacatttcttcttggaaatcttggttttatccagaaacagcagaatccggcgataaaactttagacaagctcaaaaaaacatttcaagagggtattttgagtttgggtgcagaatatgtttacgctggaacaatagctctaagagctggctacctccacgacaaaataggcagcaggcaagaattggatattggtcttggtgttatgctctccgatatgttgcaattagacattgcaagcgttcaaaatgtaagcagtttggaaggtgttagagacgggcaaatgagatttgcgggtttgttcagattttaa

SEQ ID NO: 34592 - protein, 322 aa, Unknown
  Obtained from environmental sample
  misc_feature (1)..(322): Xaa is any amino acid
MDVLALGNDLWLSTFAGIERYHAAQNQVAFFYEKLLPVLNIPDLYHIYTGVTFPLGDWGTWGLFVNFISFGETFVSDEINLEQEGSSFNSSETVVGLSYGTKLNKNWGLGLSFKFFYSALSSGAALNEPDATTASYAIDIGVLGRNLFGVNGLRFGTVLANIGPNVYYVEKSNNYPIPLTWRFGVSYDLIKLPDHRITLNTDYSRMAIYENSKGEAEPFYISSWKSWFYPETAESGDKTLDKLKKTFQEGILSLGAEYVYAGTIALRAGYLHDKIGSRQELDIGLGVMLSDMLQLDIASVQNVSSLEGVRDGQMRFAGLFRF

SEQ ID NO: 34593 - DNA, 960 bp, Unknown
  Obtained from environmental sample
  misc_feature (1)..(960): n is a, c, g, or t
ttgagagtaaagtttttgcctttacagcgtactagcgtattgtaccggaaagaattttccgataatccaaaaggaggttttatgcgatataaagaactttttactatttatcccagaaaattaagaaaagttacagtattttattatcaatgctatgacagtaacggtaatagagtatgcggtcactcaaccggacaacggacaaaaacagccgcgaaatcctattgtatggatttataccatagggggaaattaattccgggagataaatctgtcatgttcagggattttgccgaaggctggtgggatatcaatacttgtaagtatctggaatggcggcaaatacaaaatccgcttgcgccgtcaaccattgatcattacaaaaccagccttgaacttcatatcaagcctttcttcggaaaaatgagattaaatgcgatttcacccgaaattgttcaaaactggataatgcagctttcgcaaaaaggctataataattcgtccgttaatttacatattgcagcgctaaagatgatgatgaaagaagctgtgcgccttaaatatatttcgtcaaatccaatggaaaaaatcagaaagcttgtagcaaataacaaagaggtacaaatccttaaaaacgaagaagtacaaaaactttttcctgcggattggagggaaatttgggatagttatgaaatatatgtttttaataaacttgccgcctgtaccggaatgagattaggtgaaattaccggattgacaggcaaatatgtttttaaggatcacattcatgtttgtgaacaattttcaaaacaatacggcaaaagaccgctaaaaacaaaagattccagaaatatacccataacatcggggctgtacgatgaactgtcggttcttattaacaaaaagcggcgcggactttgttttttccaactcaggcgggaaagagcctattgcgcgtaa

SEQ ID NO: 34594 - protein, 319 aa, Unknown
  Obtained from environmental sample
  misc_feature (1)..(319): Xaa is any amino acid
MRVKFLPLQRTSVLYRKEFSDNPKGGFMRYKELFTIYPRKLRKVTVFYYQCYDSNGNRVCGHSTGQRTKTAAKSYCMDLYHRGKLIPGDKSVMFRDFAEGWWDINTCKYLEWRQIQNPLAPSTIDHYKTSLELHIKPFFGKMRLNAISPEIVQNWIMQLSQKGYNNSSVNLHIAALKMMMKEAVRLKYISSNPMEKIRKLVANNKEVQILKNEEVQKLFPADWREIWDSYEIYVFNKLAACTGMRLGEITGLTGKYVFKDHIHVCEQFSKQYGKRPLKTKDSRNIPITSGLYDELSVLINKKRRGLCFFQLRRERAYCA

SEQ ID NO: 34595 - DNA, 1122 bp, Unknown
  Obtained from environmental sample
  misc_feature (1)..(1122): n is a, c, g, or t
ttgggcaaaaatcgggttttnaggtnaattatgttccggggcgcaaaggaacatatcgacgctgtactaaaacggcatgatattgattcgtcctacaccccgactcaggagggtcctgtccgggttacaacatcgcagaatatatcttatgtagaaatggcggctttccatgtggcgagccggtttatgacattcctctccggcagcagggttgacgctgtaatcggcaactttgtaagggcaaggggcatcggcgtaattaacggcgtcgatacggagcatacgggtactgtcgataaaatctacacggactcgctaaaaagggtgttaaatttgggcatggttccgattcttccctgtatcggctggagtccgtcgggcaagccgtacaatgtgccgagcgacgaaatcgcccttgccgtctcgaaagcgcttggggcgatcaaattgttcattgtaacagccgccgacggcttgaatattacaagacttaccccaaaagaagcggaagaattgataaaaaaaggctccaacttcatgcgggaactgaaacttgccctaaaagccagtcaggaaggcgttcacagggcgcatattatcgatggaaggcaggaaggagccgttttaaaggagatttactccaacctaggtgtaggaacgatgatttataccgatgaatacgactcgatccgccccttacactccggggatttgcccgatattctgcgattaatggaacctttaatgcaaaaaggcgttcttgtcaggcggaaccctgaggaaatacaggaaaaaaaggacgctttctccgttttagatattgacggctctatccgcgcctgcggagcattggttgactggggcgaaaatcaaggggaaattgccgccgtagcgacagacccgaattataccgatctaggtcttggcagaaaaattgtcggcttcctaatcgaaaaggcaaaaaaaagcaaaatgaagcgcgtttttgtgcttaccactcaaacacaggactggtttgaatcgctgggttttaaagacgcgcctgtagacagtctgccggagaagaaacgcaaggtttatgatcaagcccggaaaagtaaggtctttgcgctggatttgtaa

SEQ ID NO: 34596 - protein, 373 aa, Unknown
  Obtained from environmental sample
  DOMAIN (8)...(201): Amino acid kinase family
  misc_feature (1)..(373): Xaa is any amino acid
MGKNRVXRXIMFRGAKEHIDAVLKRHDIDSSYTPTQEGPVRVTTSQNISYVEMAAFHVASRFMTFLSGSRVDAVIGNFVRARGIGVINGVDTEHTGTVDKIYTDSLKRVLNLGMVPILPCIGWSPSGKPYNVPSDEIALAVSKALGAIKLFIVTAADGLNITRLTPKEAEELIKKGSNFMRELKLALKASQEGVHRAHIIDGRQEGAVLKEIYSNLGVGTMIYTDEYDSIRPLHSGDLPDILRLMEPLMQKGVLVRRNPEEIQEKKDAFSVLDIDGSIRACGALVDWGENQGEIAAVATDPNYTDLGLGRKIVGFLIEKAKKSKMKRVFVLTTQTQDWFESLGFKDAPVDSLPEKKRKVYDQARKSKVFALDL

SEQ ID NO: 34597 - DNA, 597 bp, Unknown
  Obtained from environmental sample
  misc_feature (1)..(597): n is a, c, g, or t
ttggaaaatatgaacctgcttaaagaggcatctttaacagttggcagcgcactgctctttgcaaaaacaccgcagttcaaactacccgcctttattgtcaaagccggagcgtttgacgctgttgatataagtacaacccaatacaatgataaccgtgatattgctggaagactagcagacgttttcaggcagaccgttggcttcgttctatctaacctccatcatgttcaaggcgatcaaggtataaatagtgtgggaacaccggaaatatccgcagaatccatagaagaacttgtttctaacgcgcttatccaccgcgactattttatttccgcgccggtacgagtatttgtattccgcgatagggtagaaataatcagcccaggacacctaccaaacaacttaacggtcgaaaacatcaaatccgggaactcaaacgccagaaacccgacacttgcctcattcgcaaaccacctcctgccataccgcggctacggttcaggcattataagagccttgtctaaatatccgcatatagattttttagacgatagggaaggaaacttatttaaggtaacactgagacgaggcgtataa

SEQ ID NO: 34598 - protein, 198 aa, Unknown
  Obtained from environmental sample
  SIGNAL (1)...(21)
  misc_feature (1)..(198): Xaa is any amino acid
MENMNLLKEASLTVGSALLFAKTPQFKLPAFIVKAGAFDAVDISTTQYNDNRDIAGRLADVFRQTVGFVLSNLHHVQGDQGINSVGTPEISAESIEELVSNALIHRDYFISAPVRVFVFRDRVEIISPGHLPNNLTVENIKSGNSNARNPTLASFANHLLPYRGYGSGIIRALSKYPHIDFLDDREGNLFKVTLRRGV

SEQ ID NO: 34599 - DNA, 426 bp, Unknown
  Obtained from environmental sample
  misc_feature (1)..(426): n is a, c, g, or t
ttggaatacaagaaaaaactaatcgaagtcgccctcccgctcgaaaccataaacgccgaggccgctcgcgaaaaatctatacggcatgggcacccgtctacactgcacctatggtgggcaagacgaccgctcgcggcggcgagagcggtcatttgggcatctcttgttgacgatccgtcaagtctgccggagcagttccctacggaagaagaacaaaacgcagaacgtgaacgattgttcaagatattgtcggatttggttaaatgggaaaactccaataancaagagatactcgacgcggcgaaagccgagataatgaaatctacagacggggaaccgccggcgcttttggacccgttcgctgggcgaagggccataccgctgggagcgcaccgcctggngttggaagcacacgcagcgatttga

SEQ ID NO: 34600 - protein, 141 aa, Unknown
  Obtained from environmental sample
  DOMAIN (5)...(105): Protein of unknown function (DUF1156)
  misc_feature (1)..(141): Xaa is any amino acid
MEYKKKLIEVALPLETINAEAAREKSIRHGHPSTLHLWWARRPLAAARAVIWASLVDDPSSLPEQFPTEEEQNAERERLFKILSDLVKWENSNXQEILDAAKAEIMKSTDGEPPALLDPFAGRRAIPLGAHRLXLEAHAAI

SEQ ID NO: 34601 - DNA, 726 bp, Unknown
  Obtained from environmental sample
  misc_feature (1)..(726): n is a, c, g, or t
atgtcaaggcggagcagtcggaggtctacggccccatcaaaatcacttatcgcggcgagggcgcggcttgaaaaggcgccaaaggagcaagatcaaatgaaaatcgaaaagctggacgaaaccttggaggcggtattgtttgtgtcgggcgacggcatagctatcaacgacctcatggcgctgctcgaggttcagcggtcggaaatcaaggcgtccgccgagcggctcaaggccaagtacggcgagggctgcggtatcaacctcgtcagctacaacaacaagctgcaattttgttccaaccccgcttgcggcgaggcggtcgccgccgtgctcaaacccatcaaggaaaagcagttgacgcgcgccgctatggaggcaatggccgtcatcgcgtataagcagcccgtgaccaggctggaattggagcagatacgcggcgtcaattgcgattatgtgctgcaagtcctgctcaaacacaacctcatcgccgtgaccggacacaaggacgccgtgggcaagcccgcgctcttcggcaccacggaggagttcttgaaacgcttccaaatagaaagcgtggacaagctgcccgaatacgcccgcctgatagaggacatcaaaaacctaaacgccgatcgcgaaaaaagcctgtacaacgaatttgaaatccccgaggacgaatccggccccgacttcgactacgacgaanacgccgccgccgtggagtga

SEQ ID NO: 34602 - protein, 241 aa, Unknown
  Obtained from environmental sample
  DOMAIN (40)...(198): Putative transcriptional regulators (Ypuh-like)
  misc_feature (1)..(241): Xaa is any amino acid
MSRRSSRRSTAPSKSLIAARARLEKAPKEQDQMKIEKLDETLEAVLFVSGDGIAINDLMALLEVQRSEIKASAERLKAKYGEGCGINLVSYNNKLQFCSNPACGEAVAAVLKPIKEKQLTRAAMEAMAVIAYKQPVTRLELEQIRGVNCDYVLQVLLKHNLIAVTGHKDAVGKPALFGTTEEFLKRFQIESVDKLPEYARLIEDIKNLNADREKSLYNEFEIPEDESGPDFDYDEXAAAVE

SEQ ID NO: 34603 - DNA, 768 bp, Unknown
  Obtained from environmental sample
  misc_feature (1)..(768): n is a, c, g, or t
atgaaaataggtttatacggcgtttcacgctccggcaaaaattatttaattgataaagtggcagagcggacaaaaggtattcaatatatgcccggttcgataacgcttaaagcattagcaagagcggagtttaatgtggatttcagagatttgtcagaggggcataaaaatcttttgcggttcaaatttgcagacgaagttattaaacaagaaaaaaccggtgtacatattattgttgacggacactattctttcccccgaaaaaactgcaacggttatgatgtggtttttacggaagccgacagaaatttatacgatatatttatttatatgaatacaccgtctgcccgaattgccgtaaatgcaaatttgggcgaaatcggcagagaaaataccctttacgataccgttgcaatagacgagtggaaagcatatgaaatttgcgcactaaggcaagtttgccgtgagcttaataaagaactgattattattgacggcgaaatagaaagttgttgtgatttcctttgcgacttggtaagcggttcggagtatttgctagccggcaatattgttaaaacaattattgccgataatcaaattgctttggacaaatgtggtaccgttcttttgattgattgcgatagaacaataaccatgaacgatacgacttatgaattttgcaacgccgcaggaattgacaaaagcatattgaaagaaatttactgcggcgaatattattcggtttatcatttttatcgggcaaaataa

SEQ ID NO: 34604 - protein, 255 aa, Unknown
  Obtained from environmental sample
  misc_feature (1)..(255): Xaa is any amino acid
MKIGLYGVSRSGKNYLIDKVAERTKGIQYMPGSITLKALARAEFNVDFRDLSEGHKNLLRFKFADEVIKQEKTGVHIIVDGHYSFPRKNCNGYDVVFTEADRNLYDIFIYMNTPSARIAVNANLGEIGRENTLYDTVAIDEWKAYEICALRQVCRELNKELIIIDGEIESCCDFLCDLVSGSEYLLAGNIVKTIIADNQIALDKCGTVLLIDCDRTITMNDTTYEFCNAAGIDKSILKEIYCGEYYSVYHFYRAK

SEQ ID NO: 34605 - DNA, 1290 bp, Unknown
  Obtained from environmental sample
  misc_feature (1)..(1290): n is a, c, g, or t
gtggtccgggccttagacgatctgggaatctcatggatcgaagcggggaaccccgggagcaaccccaaggacatggaattcttccggcttgccgaaagcctcaaacttgaacatgcaaaactatgcgcctttggctctacccggaaaaaaggggtcaaggcaagtgaagatcccggcgtattaagcctgcttgaggcgcggactcaggctgtagtgatcttcggcaaaagctgggactttcatgtgacggaagtgttacgcgtaactcatgaggaaaaccttgccatgatcgcggaaacaatatcgtttcttaaagaaagcgggcggcaggttttttacgacgcggaacatttctttgacggctggaaagcaaaccccgaatacgcccttaccactctgaagaccgctatggaagcgggagcggagcgcataatactgtgcgacacaaacggcggaacattccccgacacgatagaaaaagcggttaaggaagcggcgaaaattatctgcgataacggcgcgtcatttaacgacgcgaaatgccttctcggcattcacgcgcacaacgatgccgacatggcaagcgcgaatacgataaccgccgttcttgcgggatgccgccatgttcagggaactcttgtcggcttcggcgagaggtgcggcaacacaagccttgcggcggttatgccaagccttgaaataaaacttggtttccgttgtctgcctgaaggaaaaatggaaatgctttccgagataacccaaattgtcgcggagacggcaaatgtcgccgtgccgggcaatatgccctatgtgggaagccacgctttcacccacaaggcgggaatgcacgcggacgggattttaaaattaagccgttcctttgaacatatcgatccttctcttgttgggaatgatcggcatatagtaatgagcgaagtcggcggacgctccgctatagcggagagagcgaagaagatagatcattccattacgagggatcaccctgttacgatctctcttgcgcaaaagttaaaaaatcttgaggcggatggctggcaatttgaaggagctgacggcagttttgatcttttggttcgccgagagcttgggcggtacaaaccgttgtttaacattgaggcttaccgcgtagtaagtgaacacccgacgggcgaaacaatcgcctgttcccacgcgtgggttaaagttcatgttgacggacaggaagaaatcgccgctgccgaaggagacggacctgtcaacgcaatggacggcgcattgcgcagggcgtga

SEQ ID NO: 34606 - protein, 429 aa, Unknown
  Obtained from environmental sample
  DOMAIN (1)...(262): HMGL-like
  misc_feature (1)..(429): Xaa is any amino acid
MVRALDDLGISWIEAGNPGSNPKDMEFFRLAESLKLEHAKLCAFGSTRKKGVKASEDPGVLSLLEARTQAVVIFGKSWDFHVTEVLRVTHEENLAMIAETISFLKESGRQVFYDAEHFFDGWKANPEYALTTLKTAMEAGAERIILCDTNGGTFPDTIEKAVKEAAKIICDNGASFNDAKCLLGIHAHNDADMASANTITAVLAGCRHVQGTLVGFGERCGNTSLAAVMPSLEIKLGFRCLPEGKMEMLSEITQIVAETANVAVPGNMPYVGSHAFTHKAGMHADGILKLSRSFEHIDPSLVGNDRHIVMSEVGGRSAIAERAKKIDHSITRDHPVTISLAQKLKNLEADGWQFEGADGSFDLLVRRELGRYKPLFNIEAYRVVSEHPTGETIACSHAWVKVHVDGQEEIAAAEGDGPVNAMDGALRRA

SEQ ID NO: 34607 - DNA, 1293 bp, Unknown
  Obtained from environmental sample
  misc_feature (1)..(1293): n is a, c, g, or t
ttgcagcggctggaacgccgcgttgtacaaaaagaagacgcgctggacaagaaagttgcccagattgaacggactgagcagtccctggctgacaaagaaaagcagtgccaggaacgggagaacgctctttccagggaagaggaacgctatcgggcggagcttgagcgaatttcggggttgagcgccgaagaagcgaaagccctgatcattaaggatttggagaacgaagccaggcacgacgcccaggctctgatcaacaagatcgagcaggaggcgaaccttgccggcgagaagaaagccaaggacatactggtagccaccatacagcgctttgcctccgaggtaaccggcgatgtcacggtgacgaccgtcaacctgcccaatgacgagatgaaaggccgcataatcgggcgggaaggccggaacatacgcaccctggaaacgcttaccggggtggacatcatcattgacgatacgccggaagcggtggttatctcatgctttgacccggttaggcgggaaatcgccaaggttgcccttgagcggcttatcctggacgggcgcatccacccggcgcgaatcgaggaaatcgttaccaaagtcagcaaggacacctcccagaagatctttgaggaaggggaaaaagtcctttttgacctgggtatacacaatatcaagcaggacgcgatacgcgccctgggacgcctgtacttccgcaccagctacggtcagaacgtacttcaacattcaaaggaagtggctatcatcgcgggcatgcttgccgccgaagtaggcgccaaccgcgatctcgcgaagcgcgccgcccttcttcacgacataggaaaaggaaacgaatcggactccgacntgaaccacgccgagataggcatggacatggcgcgcaaaatgggcgaagacccgcgcataatcaacgcgataggcagccatcacaacgacattgagccgacatgcattgaagcggtcatagtgcaaatagccgacgcgatttccgcggctcgcccgggagcgcgaaaagagaccctggacaactacataaaacgccttgaaaatcttgaaaacatcactaccggtttcgccggcgtagacaaagctttcgccatccaggccggccgcgagttgcgcatcatggtaaacaatgaagccgtaaacgacgagcagactagggaacttgcgaaggaaatcgccaagaagattgagaccgatctacgttatccgggccgtatcaagattacgatgataagggaaacaagaattacggagtacgcaagatag

SEQ ID NO: 34608 - protein, 430 aa, Unknown
  Obtained from environmental sample
  DOMAIN (121)...(180): KH domain
  misc_feature (1)..(430): Xaa is any amino acid
MQRLERRVVQKEDALDKKVAQIERTEQSLADKEKQCQERENALSREEERYRAELERISGLSAEEAKALIIKDLENEARHDAQALINKIEQEANLAGEKKAKDILVATIQRFASEVTGDVTVTTVNLPNDEMKGRIIGREGRNIRTLETLTGVDIIIDDTPEAVVISCFDPVRREIAKVALERLILDGRIHPARIEEIVTKVSKDTSQKIFEEGEKVLFDLGIHNIKQDAIRALGRLYFRTSYGQNVLQHSKEVAIIAGMLAAEVGANRDLAKRAALLHDIGKGNESDSDXNHAEIGMDMARKMGEDPRIINAIGSHHNDIEPTCIEAVIVQIADAISAARPGARKETLDNYIKRLENLENITTGFAGVDKAFAIQAGRELRIMVNNEAVNDEQTRELAKEIAKKIETDLRYPGRIKITMIRETRITEYAR

SEQ ID NO: 34609 - DNA, 1278 bp, Unknown
  Obtained from environmental sample
  misc_feature (1)..(1278): n is a, c, g, or t
atgaaagacctgctttcatggaacaatgaacatgataaattgaaaaggaaggcgcgtaacgtgaatattttacaactcctgcaaacctgcatccgctccattctccgtaaccgcatgagaagtcttttaacgtcgctgggagtaatcattggcgtaggctccgtcatcacaatggtcgcccttggtgagggttcgcagaaggcgatagaagagcggattaccgcgatgggaaccaacctgcttcaaataatgccgcgccgtcaggcaagcagatcgggacaagctgtaatgatgcgcgtaagcgccttcactaaaaatgacattcaaaaactgcgcgatgaatccagtttcgcggcggcggtttcgggtcttgttcaaagcaatgtaaatgttaccgggagtcttggaaacgcgcaggtttcagttcaaggcgtggaaccggattttattcttgcgcgtaactggactataggacagggatatttttttgacgatgaagatatgcgcctgcggaacagggtggcggttttaggcggcactacggcgaagaatttatttggagacgcgaattccgcgcttggggagcagatacggataggaacgaattatttttcggttgtaggaatattggaaagcaagggggcgggtcttggcggaaacgatcaggacgatgttgtaatggtgccgttagacaccgccatgacgcgccttgcgaattcgcgtaacatcaatcagattgttatgagcgttgtaagcaaagattacatggacgcggcgaaaaaagaagcggagtttattttgcgtgaatcgcgcagaattcccgaaggagccgcctccgattttgaaataatgagctgggcggacataattgacatggcgtccgccacgtcaaaaacattaaccatgctgttagccgccattgccggcatatcgctcttagtcggtggcatcggtattatgaacattatgctggtctccgttactgaacgcacccgcgaaatcggcattagaatggcggtaggcggacgcaagaaagatattctactgcaatttcttaccgagtccgtaatattgagccttatgggagggattatcggtattggtttgtccgttctcgcgtgccgcatactgacaatgaggggggcttacacggctataaacccgtttgtcgttatgattgccgttcttttcgccgcctttgtcggaataatttttggttattacccggcgttgaaagccgcacggttgtatccgatagacgctttgaggtatgaataa

SEQ ID NO: 34610 - protein, 425 aa, Unknown
  Obtained from environmental sample
  DOMAIN (243)...(418): Predicted permease
  misc_feature (1)..(425): Xaa is any amino acid
MKDLLSWNNEHDKLKRKARNVNILQLLQTCIRSILRNRMRSLLTSLGVIIGVGSVITMVALGEGSQKAIEERITAMGTNLLQIMPRRQASRSGQAVMMRVSAFTKNDIQKLRDESSFAAAVSGLVQSNVNVTGSLGNAQVSVQGVEPDFILARNWTIGQGYFFDDEDMRLRNRVAVLGGTTAKNLFGDANSALGEQIRIGTNYFSVVGILESKGAGLGGNDQDDVVMVPLDTAMTRLANSRNINQIVMSVVSKDYMDAAKKEAEFILRESRRIPEGAASDFEIMSWADIIDMASATSKTLTMLLAAIAGISLLVGGIGIMNIMLVSVTERTREIGIRMAVGGRKKDILLQFLTESVILSLMGGIIGIGLSVLACRILTMRGAYTAINPFVVMIAVLFAAFVGIIFGYYPALKAARLYPIDALRYE

SEQ ID NO: 34611 - DNA, 387 bp, Unknown
  Obtained from environmental sample
  misc_feature (1)..(387): n is a, c, g, or t
gtggccaaggtgcaggacgaaataaaaaatggtgcctcgtttgaatctctcgtggcaacttattccaatagcccaagcaagggtacaggtggagaccttggctggatagagaaagggctcctgctgaaagcaatcgaagacacagccatcgcactaaagcccgatgaagttggcagtccaattgagaccgacaaagacttcattctcgtacagttgatcgccgccgaattggacggggtaaagccatttgaatccgtgaaggacgatattatcaggaaattgcaggagccaaaggccgaaaatgccaaaatgcactacttgcagtctcagaggcttcgcgccaatatccgctatctcgtccccaaggagcagatcatcaaaggatag

SEQ ID NO: 34612 - protein, 128 aa, Unknown
  Obtained from environmental sample
  DOMAIN (3)...(74): PPIC-type PPIASE domain
  misc_feature (1)..(128): Xaa is any amino acid
MAKVQDEIKNGASFESLVATYSNSPSKGTGGDLGWIEKGLLLKAIEDTAIALKPDEVGSPIETDKDFILVQLIAAELDGVKPFESVKDDIIRKLQEPKAENAKMHYLQSQRLRANIRYLVPKEQIIKG

SEQ ID NO: 34613 - DNA, 321 bp, Unknown
  Obtained from environmental sample
  misc_feature (1)..(321): n is a, c, g, or t
atgaggctcgatctctttctcaaaactacgcatctagttaagcgcagggaattggcaaaggagctgtgcgatgagggcatggtgagggtcaacggctcccccaagaaggcttctgccgaagtgtccgctggggacgaacttgtcttccctgtttacaacaggctgctaaaggtaaaaatattggacgtgccaaagggcagcctgccaaagggcagccagtggtcgttcattgaaatattggaagaaaagcgcttcgccttggatgacggctatggcgaggacacattcaggccagcgatcaaaccgaccacatttcattga

SEQ ID NO: 34614 - protein, 106 aa, Unknown
  Obtained from environmental sample
  DOMAIN (1)...(47): S4 domain
  misc_feature (1)..(106): Xaa is any amino acid
MRLDLFLKTTHLVKRRELAKELCDEGMVRVNGSPKKASAEVSAGDELVFPVYNRLLKVKILDVPKGSLPKGSQWSFIEILEEKRFALDDGYGEDTFRPAIKPTTFH

SEQ ID NO: 34615 - DNA, 735 bp, Unknown
  Obtained from environmental sample
  misc_feature (1)..(735): n is a, c, g, or t
atggccgagactgatgatcctggccaagaaagtttaaagaccaaacgcaaggtggtaaccaagcttttggaaacgggattgtttccctatacccgccggtacctccgtacctttgacaaccactttaacactattggtcttgtggggatgaacgaatgtatcctgaattttctgggccgggacattaccattgccgacaaggacggtcaggactttgccctttcggtcctggactttatgcgaaaaaaacttgccgacttccaggaagaaacgggggaactttttaacctggaggccactccggcggaatctacatcctacagactggcaaaacacgacaaacaacgttacagcgacatcatcagttccggcaccgccgagcccttctataccaattcaacccagcttcccgtaatgcagaccgaagatatctttgacgccctggaccttcaggaaacgctgcaatgcgcctataccggaggtacggtgttccatgcctttgtcggtgaagccatagaagactggcgggtctgccgggacttggtaaaaaccatcgcctgcaattaccggatcccctactttacgatttctccaactttttcggtctgccccattcacggctaccttaaaggggaacagtttttttgtcctgtgtgcagggaagaagaaaaagaacggcttaacaagcgcattgccgccctggaaaaagaacgggaagaggcgatggctgtttga

SEQ ID NO: 34616 - protein, 244 aa, Unknown
  Obtained from environmental sample
  misc_feature (1)..(244): Xaa is any amino acid
MAETDDPGQESLKTKRKVVTKLLETGLFPYTRRYLRTFDNHFNTIGLVGMNECILNFLGRDITIADKDGQDFALSVLDFMRKKLADFQEETGELFNLEATPAESTSYRLAKHDKQRYSDIISSGTAEPFYTNSTQLPVMQTEDIFDALDLQETLQCAYTGGTVFHAFVGEAIEDWRVCRDLVKTIACNYRIPYFTISPTFSVCPIHGYLKGEQFFCPVCREEEKERLNKRIAALEKEREEAMAV

SEQ ID NO: 34617 - DNA, 495 bp, Unknown
  Obtained from environmental sample
  misc_feature (1)..(495): n is a, c, g, or t
atggcagattacaagaaaccggattattggcagcttaaagcgcgaaaagaaggctaccctgcccgctcggtctacaagttaaaagaaatggatgaaaaattcggccttttaaagccgggaggaggcacacgttccggtgaacgtgtgcgcgttctggatctgggggccgcgccgggaagctggagcctgtatattctgcgaaaaatgcgcgacggcgttttccttgccgcggcggatctttctcccctttcgcgccagtatgacggaggcctgttcaacggtgataatttttgttttattcagggcgacattaccgatcctgccgtccgcgattcaattcttgcgcagggcccctaccatttgatcatcagcgacgccgccccggccacaacgggcaatcgttttattgacactacccgctcgctggagcttgccgaaacggttgccgcgtataccgaaagcgccctcataagcggcggcatctctcggccataa

SEQ ID NO: 34618 - protein, 164 aa, Unknown
  Obtained from environmental sample
  DOMAIN (19)...(163): FtsJ-like methyltransferase
  misc_feature (1)..(164): Xaa is any amino acid
MADYKKPDYWQLKARKEGYPARSVYKLKEMDEKFGLLKPGGGTRSGERVRVLDLGAAPGSWSLYILRKMRDGVFLAAADLSPLSRQYDGGLFNGDNFCFIQGDITDPAVRDSILAQGPYHLIISDAAPATTGNRFIDTTRSLELAETVAAYTESALISGGISRP

SEQ ID NO: 34619 - DNA, 1047 bp, Unknown
  Obtained from environmental sample
  misc_feature (1)..(1047): n is a, c, g, or t
ttgtttaattatatactgaaacgtatggatcaacagtatacccacagactggaaaaaattgaagcggtgcttgaacattggctgccggaaactcctgatatgaattgggcggcggaagtttttcccggccttgcggacaaagtgaagccggaactgctgcgcacgcttaccgcgccggataaagaccttctttcgcgggggggcaaacgctggcgccctctgctgatgactctggtctgcgaggcgctgggcggaggagacgctgccctgccccttgttccgttagttgaattttgccacaatgccagccttatccatgatgatattgaagacagttccgatgaacgacggggcaagccggcagtgcatattatccatggcgttgatacggcgatcaacgcgggcagtttcctttacttcctcccgcttgcctgcatagattcatgggatcaggcagacaaccgcagggctgaggtttactcattgtgggcggcttatttgcgcaagctccatttggggcaggcaatcgacattcactggcaccgcaattttgatataatcccgtctgttgatgagtaccttgccatgtgcgcgcttaaaactggatgcctggcgcgtttttccgcggagctgggaattttggcggcaagaacagcgggctgcgacacaagtaaagcagagcgtttgggcgaagcggcggaaaaactcggcattggctttcagatacttgacgatgttaaaaacctgactacaggcatacccggcaagcagcgcggcgatgatattgttgaagggaaaaagagcctgcctgtacttctgtttatgcaaaagtattctgaaaaaaaggcgatggtctgccgctgttttatggttgccgcagcggatggagccggcgcgccggaaacggaagagttaatacaggcgcttatggccagcggcgttattaaagaagccgaagagcagggcaaagcccttatcgccggcgcgcgaaaggtttttgaggaaaacagcgcgctgcttgccggtctgatagacctgataagctga

SEQ ID NO: 34620 - protein, 348 aa, Unknown
  Obtained from environmental sample
  DOMAIN (56)...(311): Polyprenyl synthetase
  misc_feature (1)..(348): Xaa is any amino acid
MFNYILKRMDQQYTHRLEKIEAVLEHWLPETPDMNWAAEVFPGLADKVKPELLRTLTAPDKDLLSRGGKRWRPLLMTLVCEALGGGDAALPLVPLVEFCHNASLIHDDIEDSSDERRGKPAVHIIHGVDTAINAGSFLYFLPLACIDSWDQADNRRAEVYSLWAAYLRKLHLGQAIDIHWHRNFDIIPSVDEYLAMCALKTGCLARFSAELGILAARTAGCDTSKAERLGEAAEKLGIGFQILDDVKNLTTGIPGKQRGDDIVEGKKSLPVLLFMQKYSEKKAMVCRCFMVAAADGAGAPETEELIQALMASGVIKEAEEQGKALIAGARKVFEENSALLAGLIDLIS

SEQ ID NO: 34621 - DNA, 558 bp, Unknown
  Obtained from environmental sample
  misc_feature (1)..(558): n is a, c, g, or t
atgaaaaaagataaagtcttaatcttcgacactacgttaagggacggcgagcaggccgcgcccgccagtctttctgtcgaacagaagttgcgcatagctcaccagctcgccaggcttaatgtcgatgtgatagaggcgggttttcccatatcctctccgggcgactttgagtccgtttccactattgcgcgtgagataaaggacgggcctgtgatttgcggtttggctcggcttgttgagaaagatatcgtggcctgcgccaaggcggtcaagtatgcgcagcgtccgcgtgtgcatactttcatcggaacttccgccatccacacggaaaagaagttgcgcaagtccgaggacgatgttttatcgatgattaccgccagcgtcaagctggcccgccgtctctgtcacgatattgagttttccgccgaggacgcggggcgcaccgacggcgattatctttgccgcgtggttgagacggcgataaaggcgggcgcgtctacggtcaacattccggacactgtcggttacacgccgccgggtcagttcggcgcgatatag

SEQ ID NO: 34622 - protein, 185 aa, Unknown
  Obtained from environmental sample
  DOMAIN (14)...(185): HMGL-like
  misc_feature (1)..(185): Xaa is any amino acid
MKKDKVLIFDTTLRDGEQAAPASLSVEQKLRIAHQLARLNVDVIEAGFPISSPGDFESVSTIAREIKDGPVICGLARLVEKDIVACAKAVKYAQRPRVHTFIGTSAIHTEKKLRKSEDDVLSMITASVKLARRLCHDIEFSAEDAGRTDGDYLCRVVETAIKAGASTVNIPDTVGYTPPGQFGAI

SEQ ID NO: 34623 - DNA, 1242 bp, Unknown
  Obtained from environmental sample
  misc_feature (1)..(1242): n is a, c, g, or t
atgctaaaggaacaacatcctgattgcgccgtaatttttatcggcccctgcgcggcaaaaaagcaggagattttaagaccggaaaataccaacgcagtggatatagttttaacattttctgaacttaaagagtggcttttatctgaaaacattcaaatagaaaattgttccgaaagcagttttgaccagttttatgaaaccggcgacgcacggttattccccattcagggcggaatgttaaaaacaggtaatattcaaaacgacggaacacaggcgaacatactgcatttaagcggagcggaagatattttgggactgttttcggataatcctgattttgaaggcaaactgattgaaccgttgttttgcaaaggcggctgtatcggagggccttgctatggacacgaaaaagaaaaagaagccggtcagaatctttttacaagacgggaaagcataatacgttacgccgaagcggcaagaaaaaacgacaagaaatttcctcagcgaaaaattaatcaccagcctaattttatatttaatgatcaaaaacagacagaggtaacggaaaatcaaattcacaaagtattggaacttacgggaaaaatagatactcaacttcagcttaactgcggcgcttgcggctataaaacctgtttggaaaacgccgctgcagtagttcgcggcatggctgaacctgagatgtgcattccctatatgcgccgtctggcgcagcagcgcaccgacagggttatagacacaacacccaacggcgtagtggtattagacagcgaattgtgcatagtaaaaatgaatcccgcttttcaaaaaatgtttacatgcaataacggtattttgggaaggcgcatttcttatcttgtgaacgccgatggttttgaaacactacattccggcgcttcggaaaaatgcgaatccattcaaaccaagtacgggattaaataccatgaaattctttatgcgttacgcgaagaaaaccagtatgtaggaatttattccgacatttccagaatcaaatacgatgccgggcagttggatacgataaaaacgcaaaccttaatgcacgcgcgggaattcctggatcatcaagtgcgatttgcgcaggaaatggcgcattacctgggcaaaagcacagcccanagcgaagaaatcgcaagacgcctgattggactgtatgaagaaaacgataattcggcggagcccgattacntaggtgaagcgacatga

SEQ ID NO: 34624 - protein, 413 aa, Unknown
  Obtained from environmental sample
  DOMAIN (205)...(238): Putative Fe-S cluster
  misc_feature (1)..(413): Xaa is any amino acid
MLKEQHPDCAVIFIGPCAAKKQEILRPENTNAVDIVLTFSELKEWLLSENIQIENCSESSFDQFYETGDARLFPIQGGMLKTGNIQNDGTQANILHLSGAEDILGLFSDNPDFEGKLIEPLFCKGGCIGGPCYGHEKEKEAGQNLFTRRESIIRYAEAARKNDKKFPQRKINHQPNFIFNDQKQTEVTENQIHKVLELTGKIDTQLQLNCGACGYKTCLENAAAVVRGMAEPEMCIPYMRRLAQQRTDRVIDTTPNGVVVLDSELCIVKMNPAFQKMFTCNNGILGRRISYLVNADGFETLHSGASEKCESIQTKYGIKYHEILYALREENQYVGIYSDISRIKYDAGQLDTIKTQTLMHAREFLDHQVRFAQEMAHYLGKSTAXSEEIARRLIGLYEENDNSAEPDYXGEAT

SEQ ID NO: 34625 - DNA, 579 bp, Unknown
  Obtained from environmental sample
  misc_feature (1)..(579): n is a, c, g, or t
atgtttttttttgacgacaatcaaccggcaggtcaaatgggcgggaaacagtatgctcttaccccacagcccgattctctaccgccccaagcagcgacaggttcaagcggccatagggggcgcttgctagaaaaatacgccgaacgcggtctctccgctttcagcgactatgaagtcctggaatttctgctgaccttcgcgcttccgcgcatagacactaaacccctcgccaaggaactattgaagcgttacggcacggtgaacgccgtcatcaacgcaccgcttgacgaactctgctcctttaaggggctggggcggcgttccgccgttctgctcgcactcgtcaaagacgtgatagcgtacagcctgaaggagagggttgtggacaagcccataatcacccggcgcggcgatgtggataactacctgcgatcaaatctcagcgaactaagagacgagcgcgtcatatcgctgtacctggacaacggcaaccgcgtcttgggaactgagaccttggcggatgagacggccaaccgcttgcttgtccttcccgttaatagatatggaagggcgcgatga

SEQ ID NO: 34626 - protein, 192 aa, Unknown
  Obtained from environmental sample
  misc_feature (1)..(192): Xaa is any amino acid
MFFFDDNQPAGQMGGKQYALTPQPDSLPPQAATGSSGHRGRLLEKYAERGLSAFSDYEVLEFLLTFALPRIDTKPLAKELLKRYGTVNAVINAPLDELCSFKGLGRRSAVLLALVKDVIAYSLKERVVDKPIITRRGDVDNYLRSNLSELRDERVISLYLDNGNRVLGTETLADETANRLLVLPVNRYGRAR

SEQ ID NO: 34627 - DNA, 522 bp, Unknown
  Obtained from environmental sample
  misc_feature (1)..(522): n is a, c, g, or t
ttggggcgcgtcgggtatttttggaataccggaaaaccttatacctattataaaaatgttttctgtgattttgagtttacaagatcgcgtaacggtactgccggcaattattcctatttgggaatttacggctggtcaagagacccaatgatagagtggtatatcgttgaggattggtatggagacggaataataggaccttcaaacatgggcggcagtgtaaggaaaaaaggcgaatgtacagtagacggtgagaaatatattatttatgaaggaatgagacctgccggttcaggtaacatagaaggcagaagcgtcgctttccagcaatatttcagcgtgcgtcaaaaacgccgtcaaagcggaacaatttccattacggaacattttaaggaatgggaaaaaatcggtatgaaactcggtaaaaatatgtatgaggcgaaattccttgttgaagccgccggtggcatgggttggtttgacgcctcgcacatttctttttatcagaaagatagcgaataa

SEQ ID NO: 34628 - protein, 173 aa, Unknown
  Obtained from environmental sample
  DOMAIN (2)...(164): Glycosyl hydrolases family 11
  misc_feature (1)..(173): Xaa is any amino acid
MGRVGYFWNTGKPYTYYKNVFCDFEFTRSRNGTAGNYSYLGIYGWSRDPMIEWYIVEDWYGDGIIGPSNMGGSVRKKGECTVDGEKYIIYEGMRPAGSGNIEGRSVAFQQYFSVRQKRRQSGTISITEHFKEWEKIGMKLGKNMYEAKFLVEAAGGMGWFDASHISFYQKDSE

SEQ ID NO: 34629 - DNA, 678 bp, Unknown
  Obtained from environmental sample
  misc_feature (1)..(678): n is a, c, g, or t
ttgatgaactacaaggaagattcaattagagatgtttttactctcgcccacgaaggcggtcattcaatgcactcatggtactccgcccgtaacaacccgttcccgcactacaattacacgatattcgaagcggaagtagccagcacatttaacgaagaactgttatttcgttatctgataaaacaagccgacagcaaagaattgcgtttatatcttgtaaacaaacacgccgacgacttattggcgactctataccgccaaaccatgttcgccgaatttgaaaaaataacccaccagcttgaagaaagcggcgttccgctgactgtcgagcttcttcgcggcgagtaccgcaaacttttggaaaaatatttcggacccgaaatgaaacttgaagaaacaagtgatcttgaaggtttgcgaatcccgcacttctaccgcgcgttctatgtgtacaaatacgcaacgggagtctccgccgccttggctttagcggatcgtgttctctccggcggagagaaagagaggcaagactatttcaccttcctaaaatccggcggctcccgcttccctatcgagtcattaagagccgcaggtgtagacatgagcagtcccaaacctgtaaacgccgcctgcgccgtcttcggcaaattggtagatgaattagaaaaaatgctgtaa

SEQ ID NO: 34630 - protein, 225 aa, Unknown
  Obtained from environmental sample
  DOMAIN (1)...(213): Peptidase family M3
  misc_feature (1)..(225): Xaa is any amino acid
MMNYKEDSIRDVFTLAHEGGHSMHSWYSARNNPFPHYNYTIFEAEVASTFNEELLFRYLIKQADSKELRLYLVNKHADDLLATLYRQTMFAEFEKITHQLEESGVPLTVELLRGEYRKLLEKYFGPEMKLEETSDLEGLRIPHFYRAFYVYKYATGVSAALALADRVLSGGEKERQDYFTFLKSGGSRFPIESLRAAGVDMSSPKPVNAACAVFGKLVDELEKML

SEQ ID NO: 34631 - DNA, 1494 bp, Unknown
  Obtained from environmental sample
  misc_feature (1)..(1494): n is a, c, g, or t
gtgcctttttgcggtatttattcttgtgtttttcatgataaaaatcccttagaaatatgttatcaatttaaagcaaaaattgcaatgtataaatggtttcaaaaaaatgtaaaaaacagtataattaattattatggagaaaatatgagcaatttcaatccaaaagaattatcaaatttcgcaaagcattatggttttcattacaaaagcataaatcccgacgctcttgtaaaagacgtattaacggagatggaaaacgggcttaacggcaagaaatcaagccttcctatgatcccttcatatatcacccccattacaaacattcctccgcttaagaccgtcctcgcgctggacgcaggcggaaccaatttaagggcaagccttgttcattttaacgaaaaaggcgaagccgtaccgcagggaataaacaaaacgccgatgccgggaacatacggcaaggtaaacgcggagcaatttttcgagacaatagcgaatgttacgttgcctttgcttaatgaagctaagatagaaggtatcggttttacattttcttatcctatggaaattaccaaagacgcagacggaatacttttatcgttcagtaaagaagtagacgctcccgacgtaatcggaaaatcaatcggcaaaggactgcgtgacgctcttgccgcaaagggctgtaactattcgggtcctatagttctgttaaacgacactgtcgctaccctgctctccggtcttgtttcaatttcacccgacggcgaaaccgcacggacacgtatagattttaatgttgaaagcggtcctgttatcggatttattttaggaacaggctttaacaccgcctaccccgaaaatattattccgaaaatcggttttaattcttcttctccgcaaattatggtatgcgaaacgggaaatttcgccgtccgctgtctgggcaaactggacaaagaatttgacaacacgacaaaaaatcccggtgtatattttcttgagaaagcgacggcgggggcatatcttggtccgttaacattgcacattcttaaacaggcaataaaagataaagttttaaaattcagaaaagccgatgaactgctgaatatgccgcatcttgaaacaagattcttaaacgaatttgcccacgctcccctgtcaaatcagggtccgctgggttcgctcttcgccgccgatgaaaccgacgctctcgcctcagtccaatacattacatcactggttacagaacgaggagctttattttcggcggcagtgttagccgcaactattatcaaggcaagcgataaatatgagccgtactcgcctgtccgtgtcgccgttgagggaactacatacatgatttacaaaggaatgcgccgctctcttgagtcgcatcttcatcaaatgttgtttaaggaaaaacctcgtccgtatattgtctctcctgtagaacaggcaagcctttacggagcggcggttgcggctttatcaaaataa

SEQ ID NO: 34632 - protein, 497 aa, Unknown
  Obtained from environmental sample
  DOMAIN (268)...(495): Hexokinase
  misc_feature (1)..(497): Xaa is any amino acid
MPFCGIYSCVFHDKNPLEICYQFKAKIAMYKWFQKNVKNSIINYYGENMSNFNPKELSNFAKHYGFHYKSINPDALVKDVLTEMENGLNGKKSSLPMIPSYITPITNIPPLKTVLALDAGGTNLRASLVHFNEKGEAVPQGINKTPMPGTYGKVNAEQFFETIANVTLPLLNEAKIEGIGFTFSYPMEITKDADGILLSFSKEVDAPDVIGKSIGKGLRDALAAKGCNYSGPIVLLNDTVATLLSGLVSISPDGETARTRIDFNVESGPVIGFILGTGFNTAYPENIIPKIGFNSSSPQIMVCETGNFAVRCLGKLDKEFDNTTKNPGVYFLEKATAGAYLGPLTLHILKQAIKDKVLKFRKADELLNMPHLETRFLNEFAHAPLSNQGPLGSLFAADETDALASVQYITSLVTERGALFSAAVLAATIIKASDKYEPYSPVRVAVEGTTYMIYKGMRRSLESHLHQMLFKEKPRPYIVSPVEQASLYGAAVAALSK

SEQ ID NO: 34633 - DNA, 339 bp, Unknown
  Obtained from environmental sample
  misc_feature (1)..(339): n is a, c, g, or t
atgggaatactgcagacaacggaaaaaactgtagtaacatccggcgtgtacgagcgtttctttgaagaagacggaataaggtatcaccacattttctcgccttctgacggatttcccgttaataacagcttgttatctgttaccattattgcgcataactcgatgaatgccgacgcactttcaaccgcagcctttgttcttggttacgaaaaaggaaaagaacttgttgaaacgcttcccgaaacagaggcaatttttatttttgaagaccgcagtgttcgaaaaactgccggagtaaatttcaccattaccgataattcatatcatcttacagattaa

SEQ ID NO: 34634 - protein, 112 aa, Unknown
  Obtained from environmental sample
  misc_feature (1)..(112): Xaa is any amino acid
MGILQTTEKTVVTSGVYERFFEEDGIRYHHIFSPSDGFPVNNSLLSVTIIAHNSMNADALSTAAFVLGYEKGKELVETLPETEAIFIFEDRSVRKTAGVNFTITDNSYHLTD

SEQ ID NO: 34635 - DNA, 360 bp, Unknown
  Obtained from environmental sample
  misc_feature (1)..(360): n is a, c, g, or t
gtgcgcaccatctatcaatacgttcatcccgcggtctgccagagctgccagcttgtcatgggcatgaccattcttgaggaaggatcggtctggaacaccatgccctgccacacgcacgagaggcgcatggaggtttacctgtactttgacataaaaccgggagccgtggtcttccacatgcacggccagccggatgaaacgcgccatatcgtcatgaacaacgaacaggcggtcatttcgccctcatggtcgatccattccggcgcgggcaccgccgcttatacctttatctgggcgatggccggtgagaaccagacttttgacgacatggacactgtcccggcagataaattgatgtaa

SEQ ID NO: 34636 - protein, 119 aa, Unknown
  Obtained from environmental sample
  DOMAIN (1)...(119): 5-keto 4-deoxyuronate isomerase
  misc_feature (1)..(119): Xaa is any amino acid
MRTIYQYVHPAVCQSCQLVMGMTILEEGSVWNTMPCHTHERRMEVYLYFDIKPGAVVFHMHGQPDETRHIVMNNEQAVISPSWSIHSGAGTAAYTFIWAMAGENQTFDDMDTVPADKLM

SEQ ID NO: 34637 - DNA, 1275 bp, Unknown
  Obtained from environmental sample
  misc_feature (1)..(1275): n is a, c, g, or t
atggataaactcatcatcaagggcgcgcgggagcataacctaaaaaacatcgatctggaactgcccagggataaattaatagtcgtttcaggcctttccggttcaggcaagagttccctggcctttgacacgattttcgccgaaggacagcggcgttatgtggaaagcctttccgcgtacgcccggcagtttttggggcgcatggacaagcccgatctggattatatcgaggggctttccccggcgatttcaatcgagcagaagaccacccaccgcaacccgcgttccaccgtcggcacagtcaccgagatttacgattactaccgcctgctctacgcgaggatagggataccccattgcccgatctgcggcagggagattcgcgaacagcntgttgattcaatcatcgaaagcattttacagatgggcgcgggcacaagggtgcagctcctcgcgcctgtcatccggggcaaaaggggagagcaccagaaaataattgaggatgcccgcaaggcgggtttcgcgagggccagaatagacggcgtgcccgtggaacttgacgaaagcatcaggctggacaagcagaagaagcacagcgttgacattatcgttgaccggctggtgattgggccggagatacgcttgaggcttgccgaatccgttgaaaccgcgctgcaaacctcagacgggctcttgctggtattgagccagagcccggacgcgccttccgcgaaaggcggctccgctaaagaaatacatgaaaatttcttttcacaaaaaaacgcctgccccgactgcggcgtttccattcccgaattgcagccgcgccttttttcatttaacaatcccttcggggcctgcccaagctgttccggcctcggttccaagctggagtttgatcccgatctggttatccccaacccctcgctttcctttaacgagggaggcattgttccctataacccggacagcgcctggcacagcagccgctttgaaagcctcgcgaaacattataaattcagtctggacacgccgctgaagacattgcccaaaaaaatcatggacgcgattctgtggggcagcagggatgaaataaaagtccgttacaacaaccgggaaggaaccggtcattttgaataccagtccagattccccggagtgctggaagatttgaaacggcgctatctggagacccagtcgccgggggtaaaggaatggcttgagaaattcatgagccagaagcactgcgaagactgcgaagctcggccgatctga

SEQ ID NO: 34638 - protein, 424 aa, Unknown
  Obtained from environmental sample
  misc_feature (1)..(424): Xaa is any amino acid
MDKLIIKGAREHNLKNIDLELPRDKLIVVSGLSGSGKSSLAFDTIFAEGQRRYVESLSAYARQFLGRMDKPDLDYIEGLSPAISIEQKTTHRNPRSTVGTVTEIYDYYRLLYARIGIPHCPICGREIREQXVDSIIESILQMGAGTRVQLLAPVIRGKRGEHQKIIEDARKAGFARARIDGVPVELDESIRLDKQKKHSVDIIVDRLVIGPEIRLRLAESVETALQTSDGLLLVLSQSPDAPSAKGGSAKEIHENFFSQKNACPDCGVSIPELQPRLFSFNNPFGACPSCSGLGSKLEFDPDLVIPNPSLSFNEGGIVPYNPDSAWHSSRFESLAKHYKFSLDTPLKTLPKKIMDAILWGSRDEIKVRYNNREGTGHFEYQSRFPGVLEDLKRRYLETQSPGVKEWLEKFMSQKHCEDCEARPI

SEQ ID NO: 34639 - DNA, 423 bp, Unknown
  Obtained from environmental sample
  misc_feature (1)..(423): n is a, c, g, or t
ttgatcggcgagaggattagccgaagaatacgccgtcttaatattcccgaagtatccgtgcgcgtcgtggacgagggaataaccctcagcctggacaacatacagttccatccggattcgcccgttatgcttcccggagaaaaagaaaaacttgataaaatcgttgatatactcaggcgctaccaggaacgcgacattatggtcggcggccacaccgcccttgccggcacggaggagagcagaaggaaactctcggttgaaagggcggctgttgtcgcggattacctcatcgagaaaaaagcccgcccccaggagcgcgtggtggtgcggggtttcagctccgacaggccggtggcggacaacaataccgaggaaggcaggcgcaaaaaccgccgcgtggagataacgattcttgaaaattag

SEQ ID NO: 34640 - protein, 140 aa, Unknown
  Obtained from environmental sample
  DOMAIN (35)...(131): OmpA family
  misc_feature (1)..(140): Xaa is any amino acid
MIGERISRRIRRLNIPEVSVRVVDEGITLSLDNIQFHPDSPVMLPGEKEKLDKIVDILRRYQERDIMVGGHTALAGTEESRRKLSVERAAVVADYLIEKKARPQERVVVRGFSSDRPVADNNTEEGRRKNRRVEITILEN

SEQ ID NO: 34641 - DNA, 729 bp, Unknown
  Obtained from environmental sample
  misc_feature (1)..(729): n is a, c, g, or t
ttggatacagataaaaaagttttggtaacaggggcaagcagaggcataggcagggcaattgccattgccgtatccggcgcggggtatcatgtaacggctcattataacaaagggaaagaagccgccgaatcattgcaaaatgaaattctccaaaagggcggaaacgtcgagcttatccaatttgatgtgagcaacagggaagaatgtcaggaaaaacttgaccaatggtcagaaaaaaacggcgctttttgggggattatcagcaacgccggaatctctgccgatgattcttttccgggaatgagcggagaatactgggataaggttcttcgcaccaaccttgatagtttttataatgtaattcatccgcttataatgccgatatgccgcaaaaagcgcggacgtatcattaccatttcttcggtatccgggatcacgggaaaccgggggcaggtaaattacagcgccgccaaagcgggcattattggcgcgacaaaagccctggcagtggaacttgcaagccgttccataacggtaaactgcatcgcgccgggtgttattgaaaccgaaatgatccgcgatgtgccaatggacatggtccttccggcaattccgctgggtcgtaccggaaaaccggaggaagtggcggctttagcggtgtttcttctttcagaatcagcttcgtatataacgcggcaggtaatttcagttaacgggggaatgtcgtga

SEQ ID NO: 34642 - protein, 242 aa, Unknown
  Obtained from environmental sample
  DOMAIN (5)...(173): short chain dehydrogenase
  misc_feature (1)..(242): Xaa is any amino acid
MDTDKKVLVTGASRGIGRAIAIAVSGAGYHVTAHYNKGKEAAESLQNEILQKGGNVELIQFDVSNREECQEKLDQWSEKNGAFWGIISNAGISADDSFPGMSGEYWDKVLRTNLDSFYNVIHPLIMPICRKKRGRIITISSVSGITGNRGQVNYSAAKAGIIGATKALAVELASRSITVNCIAPGVIETEMIRDVPMDMVLPAIPLGRTGKPEEVAALAVFLLSESASYITRQVISVNGGMS

SEQ ID NO: 34643 - DNA, 783 bp, Unknown
  Obtained from environmental sample
  misc_feature (1)..(783): n is a, c, g, or t
gtgcataccgcgccgggctttggcgaagacgatgccagggtgctgaagggaaccggtgtgccggtacttgtaccaatcgacgccgagtgccgtttcaccgcggaagttccggattacgaaggcgtttttgtcaaggacgcggacagcgtgattatggcgcgcctaaaggccgaaaaaaaactgattaaaaaagatcagatcctccatgcatatccccattgctggagatgcgaaagcccgctcatttacagggcgataagctcctggtttgtaagcatagaaaaaataaagcaggatatgattgaagccaacaatcaaattcactgggtgccggatcacatcaagacggggcgtttcggcaagtggcttgagggcgccagggaatgggcgatcagcaggaaccgctattggggaaatcccctgccaatctggaagtgccccgactgcggcaagacggtctgcatcggcagccgggcggaactgaaagaatactcaggcatcgccacaattgatgatctccacaagcactttgttgacgagattaccttcccgtgttcaaaagcgccgggcgaaaagaaatgctccgggataatgaaacgcgtaccggaagtgctggactgctggtttgaatcaggctcaatgacctacgcccaaaatcattatcctttcgagaataaagagttttttgagaatcactttccggcagattttatcagcgaaagcctggatcanaccagaggctggttttacacgcttaccatactggccgcggcccttttttag

SEQ ID NO: 34644 - protein, 260 aa, Unknown
  Obtained from environmental sample
  DOMAIN (1)...(260): tRNA synthetases class I (I, L, M and V)
  misc_feature (1)..(260): Xaa is any amino acid
MHTAPGFGEDDARVLKGTGVPVLVPIDAECRFTAEVPDYEGVFVKDADSVIMARLKAEKKLIKKDQILHAYPHCWRCESPLIYRAISSWFVSIEKIKQDMIEANNQIHWVPDHIKTGRFGKWLEGAREWAISRNRYWGNPLPIWKCPDCGKTVCIGSRAELKEYSGIATIDDLHKHFVDEITFPCSKAPGEKKCSGIMKRVPEVLDCWFESGSMTYAQNHYPFENKEFFENHFPADFISESLDXTRGWFYTLTILAAALF

SEQ ID NO: 34645 - DNA, 831 bp, Unknown
  Obtained from environmental sample
  misc_feature (1)..(831): n is a, c, g, or t
ttgttatttattattttagatatgcctaatatgtttgaatatatttcatggcggggagatttggaatttgaccgggtgccctttaacccggttgacaatattattttttcccaactgtcctatctgccgatggagggaattgttcccggcccccgggaacacggctgggtcactattgaggaactggccaccaagtacgcggtaatgcagcaggacaaacctgagggattaagcaacgatattacggtcatcgacgcgatttccgttatcaatgcgattggatcggctccccgttataaaaactgcaaactgtttgcttacaccaacaatatcgaccttgatcaggaaaaacagtttgccgctttttgcgcgataatcggcaggaggcgtttgaccagaaaaatgcttgtggtttaccggggtacggatatgacccttattggctggaaagaaagtttaaacttgagctttatcacctctatcccctcgcaaaaagaagccgtatcctaccttgagagaacggccaggagatgccgttatcccctgataatagccggacattcaaaaggcgggaatctggcggtttacgcgtccgccttttgcagaaaacgcgtccagaatcgcataactgtcgtttacagcaatgacgcgccgggctttcacaaacaagtgatagagagcgagggctacagggcaatctgcccccggattcgttcctttattccgcagtcgtcattagtcgggatgttgtttgagcatggcgagaccccgatggttataaaaagcgccgcaagcggccccatgcagcacagcctcgctcggccgatctga

SEQ ID NO: 34646 - protein, 276 aa, Unknown
  Obtained from environmental sample
  misc_feature (1)..(276): Xaa is any amino acid
MLFIILDMPNMFEYISWRGDLEFDRVPFNPVDNIIFSQLSYLPMEGIVPGPREHGWVTIEELATKYAVMQQDKPEGLSNDITVIDAISVINAIGSAPRYKNCKLFAYTNNIDLDQEKQFAAFCAIIGRRRLTRKMLVVYRGTDMTLIGWKESLNLSFITSIPSQKEAVSYLERTARRCRYPLIIAGHSKGGNLAVYASAFCRKRVQNRITVVYSNDAPGFHKQVIESEGYRAICPRIRSFIPQSSLVGMLFEHGETPMVIKSAASGPMQHSLARPI

SEQ ID NO: 34647 - DNA, 405 bp, Unknown
  Obtained from environmental sample
  misc_feature (1)..(405): n is a, c, g, or t
gtgcaggcggtacggacagcaggagctgaagacgatatagaaaaattctaccggtcatggaaagaaattacacctaacacatccaatatcattatacagaaatatgacgatttttgcggccttctgcccaggaaacaggcgtcggatctttccccggtacaaaggcagccttgctggcatattatgagggatatgccggtactgattgacggtactgtgcccctgtgcagggagcagattgcgggcaatgcccaaaatcttggaaacgcgtttaccgaaccgcttgaagtcatctgggaaagagggcggcgattctacacggaacaggcgggccaaatacccggcggaaaaaaatacgattctctgtgcgaagggtgtgatgagtactatacctacaacttttaa

SEQ ID NO: 34648 - protein, 134 aa, Unknown
  Obtained from environmental sample
  misc_feature (1)..(134): Xaa is any amino acid
MQAVRTAGAEDDIEKFYRSWKEITPNTSNIIIQKYDDFCGLLPRKQASDLSPVQRQPCWHIMRDMPVLIDGTVPLCREQIAGNAQNLGNAFTEPLEVIWERGRRFYTEQAGQIPGGKKYDSLCEGCDEYYTYNF

SEQ ID NO: 34649 - DNA, 654 bp, Unknown
  Obtained from environmental sample
  misc_feature (1)..(654): n is a, c, g, or t
ttgatggccgaggactttgacggcgacggcgtcttcgattggagctccgagtcgtcgggcgaggttgaacacgtgttcaaaacatacgcgtcgccgattttccgcgtgaccgacaccgagggcaacaccgccgtcgacaccatgcgcgtaataatctgccccaaagacatggccgcggtggggaacggaaagttctgcgttgacaagtacgaatggccaaatcaacaaggcgcaaccccgctcacaaacgtgagctggcacgaggcggccaaggcctgcgagagcgtcggcaagaggctctgcgcgcccgacgagtggaaacgcgcctgccggaacggcagcaaatataaatccttagacggcaattcctacccgtacggcgacgaatacgtgaacacaaagtgcaacacgctcggcaatcccaagtcaaagaacgcgcttatgcccgcgggctcgttcaacgagtgcgtcggcgcccttggcgtctacgacatgagcggcaacgccgccgagtggacgtcgtctacctccgcaaaagcgcaggcgctcggcgggttctaccaaagcggcgccgaggagagcgattgcgaatccggcgtggcgcttgataaagacaaaaagtatttgtacacgggattcagatgctgcaagtga

SEQ ID NO: 34650 - protein, 217 aa, Unknown
  Obtained from environmental sample
  DOMAIN (44)...(217): Domain of unknown function (DUF323)
  misc_feature (1)..(217): Xaa is any amino acid
MMAEDFDGDGVFDWSSESSGEVEHVFKTYASPIFRVTDTEGNTAVDTMRVIICPKDMAAVGNGKFCVDKYEWPNQQGATPLTNVSWHEAAKACESVGKRLCAPDEWKRACRNGSKYKSLDGNSYPYGDEYVNTKCNTLGNPKSKNALMPAGSFNECVGALGVYDMSGNAAEWTSSTSAKAQALGGFYQSGAEESDCESGVALDKDKKYLYTGFRCCK

SEQ ID NO: 34651 - DNA, 309 bp, Unknown
  Obtained from environmental sample
  misc_feature (1)..(309): n is a, c, g, or t
atgataaaacgcggcttcgggcgagtggtcaacgtaacgtcgggaataaaagacgagccgcagcttatgccctacgcggcctcgaaagcggcgcttgacaaatacgtatatgacatgtccccacacctgaaaggtaccggcgtactgatgaacctgatggaccccggctggctgcgcaccgacctcggcggcccaaacgctccgaatccggtagagtccgtcatcccgggggcgttagtaccggtactgctcgacataggtgatgaaacctgcgggaaattttaccacgctcaggattatagaatttaa

SEQ ID NO: 34652 - protein, 102 aa, Unknown
  Obtained from environmental sample
  misc_feature (1)..(102): Xaa is any amino acid
MIKRGFGRVVNVTSGIKDEPQLMPYAASKAALDKYVYDMSPHLKGTGVLMNLMDPGWLRTDLGGPNAPNPVESVIPGALVPVLLDIGDETCGKFYHAQDYRI

SEQ ID NO: 34653 - DNA, 531 bp, Unknown
  Obtained from environmental sample
  misc_feature (1)..(531): n is a, c, g, or t
atgccctttgcggcgaagtttcccatcctgtcaagggtgaacctcggcggcgcgagcttcaaaaggggtgagagcgagtcggtcttccgcataaacaaaaacttagagatcgccccgtacatctgctacgagataatcttccccgactttgtaaggcggcggctgaaagagtcgacgaatttgctcgtcaacgtgacaaacgacggatggttcggacggacgtccgggccgtaccagcacgcggtcatggcgcagacacggtcgatagagaacgggataacgctggcgcggtcggctaattcggggataagcatgttcgttgacccgtatgggaggataacagaaaaaacaggactttacactcgtgatatgatggtgcgggatgtctgcgtttatcgtgtgaagactctgtacaacagattcggggattgggttgtgtggctgtgcgcggggcttgtgattgccggagttgcggtgaggtcggcggtgttgataaagtcaaagtctttatcaacacaaaaatcaaagtaa

SEQ ID NO: 34654 - protein, 176 aa, Unknown
  Obtained from environmental sample
  misc_feature (1)..(176): Xaa is any amino acid
MPFAAKFPILSRVNLGGASFKRGESESVFRINKNLEIAPYICYEIIFPDFVRRRLKESTNLLVNVTNDGWFGRTSGPYQHAVMAQTRSIENGITLARSANSGISMFVDPYGRITEKTGLYTRDMMVRDVCVYRVKTLYNRFGDWVVWLCAGLVIAGVAVRSAVLIKSKSLSTQKSK

SEQ ID NO: 34655 - DNA, 951 bp, Unknown
  Obtained from environmental sample
  misc_feature (1)..(951): n is a, c, g, or t
ttgtaccgcgtattggacggcggggtattagtcgcgctggacgggacatggacattcacatcggaaaagatacattgcaagcactgtttaagcgccacgaataaaaccaagacggtgtattatcacagtatgctggcggcggcaatagtcaaaccgtccagcccggtagtattgccgcttgagcctgagattatccggaacgaggacgggaacgggaagcaggattgcgagcggaatgccgccaaacgctatcttgagagggaaggggaacgcctgcggggtctgaaaccgacgtttttaggggatgatttgtacgcgtgccattcgatatgcgccaagatactggatatggggatgagtttcatattcacatgcaaagacgaaagccacccgtggatagcggaacaggtgaaatacgcgcaaatggaaaagcatgcccggcgggaatggaacgggaggaaccaccttgaataccggtatgagtgggtaaacgggatagaaaaccgcgccgagggggagcggcttccggtgaattacctgagcctgcagatatggaaccaggagaaggatgaaatcacctatagcaacagttggataacggacaaaacggtcagcgccgatacggttgcgttattggcaaactgcgcccgaacccgctggaagatagaaaacgagtataacaacgtgctgaaatgccgggggtacaatctggagcacaatttcgggcacgggcaagagcatgcggcggatatatactgccttttgaacatattggcatttttgtttcacagcatacaggatgcgattgatgaagattaccaggcggcgcggaaatctttcggcaggcgggatgcttttttctgggctttacgctacgagatatgccgctatctgcatgatgactggcctttgttcttcctcaccattgccggccaagccccggacggttga

SEQ ID NO: 34656 - protein, 316 aa, Unknown
  Obtained from environmental sample
  misc_feature (1)..(316): Xaa is any amino acid
MYRVLDGGVLVALDGTWTFTSEKIHCKHCLSATNKTKTVYYHSMLAAAIVKPSSPVVLPLEPEIIRNEDGNGKQDCERNAAKRYLEREGERLRGLKPTFLGDDLYACHSICAKILDMGMSFIFTCKDESHPWIAEQVKYAQMEKHARREWNGRNHLEYRYEWVNGIENRAEGERLPVNYLSLQIWNQEKDEITYSNSWITDKTVSADTVALLANCARTRWKIENEYNNVLKCRGYNLEHNFGHGQEHAADIYCLLNILAFLFHSIQDAIDEDYQAARKSFGRRDAFFWALRYEICRYLHDDWPLFFLTIAGQAPDG

SEQ ID NO: 34657 - DNA, 342 bp, Unknown
  Obtained from environmental sample
  misc_feature (1)..(342): n is a, c, g, or t
gtgttgcgaagcaccctggttccagtagcaaacatcggctcttctcttgggccttggcttgccattgcaggtatagctatgtcttttcctattttgctaaacctcggcatccttctttttgggggcgctgtccttttctacgtagtcaccttgccggtggaattcaacgcttccgccagggctttggcggtgctccgaaacggcaatgtactcacccaggaagaactcagcggcgtaagaaaggtgctaaccgccgcagccctgacttacgttgcgtcggcgctctcggcaattatgaaccttctaaggctggttcttctttcgcgaagccgaagacggtaa

SEQ ID NO: 34658 - protein, 113 aa, Unknown
  Obtained from environmental sample
  DOMAIN (1)...(112): Putative neutral zinc metallopeptidase
  misc_feature (1)..(113): Xaa is any amino acid
MLRSTLVPVANIGSSLGPWLAIAGIAMSFPILLNLGILLFGGAVLFYVVTLPVEFNASARALAVLRNGNVLTQEELSGVRKVLTAAALTYVASALSAIMNLLRLVLLSRSRRR

SEQ ID NO: 34659 - DNA, 582 bp, Unknown
  Obtained from environmental sample
  misc_feature (1)..(582): n is a, c, g, or t
atgagcgaatatattcttgaaattcaaaaccttacaaaagaattccccggagtcagagcgctcgaaaatgtaaatttaaaagttaaaaaaggcgagattcattctttatgcggagaaaacggcgcgggcaaatccacgcttatgagttgtatctccggcgtatacccaagagacagttacgaaggcaaagttttttacaaaggacacgaaacaaattacaacagcgttaaagacagcgaacacgaagggcttgccattattcatcaggagttggcgcttagcccctatttatcggtttatgaaaatatgttcctaggtcacatggaaacaacattcggcataattaactggaacagatatataaaagaatcaaaaaaatatttaaatatagtcggcttgcatgagccgcctgaaacaatcgtaagcaaactgggcgttggaaaacagcagttggtggaaatcgcccgcgctctttccaaaaaacagagctgctcattctggacgaaccgacatcttctcttaatgatgatgaaagcgataaactgcttaatcttatgctggaattcaaaaagcagggaatga

SEQ ID NO: 34660 - protein, 193 aa, Unknown
  Obtained from environmental sample
  DOMAIN (31)...(188): ABC transporter
  misc_feature (1)..(193): Xaa is any amino acid
MSEYILEIQNLTKEFPGVRALENVNLKVKKGEIHSLCGENGAGKSTLMSCISGVYPRDSYEGKVFYKGHETNYNSVKDSEHEGLAIIHQELALSPYLSVYENMFLGHMETTFGIINWNRYIKESKKYLNIVGLHEPPETIVSKLGVGKQQLVEIARALSKKQSCSFWTNRHLLLMMMKAINCLILCWNSKSRE

SEQ ID NO: 34661 - DNA, 1056 bp, Unknown
  Obtained from environmental sample
  misc_feature (1)..(1056): n is a, c, g, or t
ttggcctccgaaatggcggctatcagctatacgctactagccctcgccgaggcgggcggtcggatactcacctcgccatacctctacggcggcagcgccgacagcttcaaaatggtctatcccagattcggaatccattttgattacgcaaaaaacatactgaatcccaaggaatgngagaaggagatcaaaccggataccaaggcgatattcattgagagcataagcaacccgaacgcggtattattggatgtggacgccatagcggccgtcgctcacaaacacgggattccgcttgttgtggacaacactgttgccacgccgtacctcttcaaccctatcgctcacggggcggatattgtgatctattccgcgaccaaagggctgagcggccacggcaatcttatcggcggattggttctggaaagcggcaagttcgattggcaaaacggtaaattcccgcagttctcggaaaaggtctatacgctgcgcgacgcggacggcaatatacgcaccttccttgaggtatttccggagattccatttacctgccttatccggttgagatacctgaactatttcggcgcggcgctcggcccgtttgacgcctatttggcgatcataggcctagaaacgctctcggagcgcctcgcgaaacagagccgcaacgccgtgacgctggtcgagtatctcagttcccacaaggcggtggagtgggtgcggtatcctacgcttaaaaatagtccgagccatgagctgtacaagcgcgatttcaaaaacggcgcgggggggattttggcgttcgggtttaagggaactgtagaacagcgggagaagttcctgaactccgttaaactgttccactaccatgtgaatatcggagacgcccgctctctaattgtcaactccccgcagaccacgcacggcgaattgaccgacgacgagaaggcgatagccgatattccggagaatttgatccgtatctcgacgggactggaagacccggaggatttgatcgccgacttgaatcaggcgttccaagaggcgtttcgttga

SEQ ID NO: 34662 - protein, 351 aa, Unknown
  Obtained from environmental sample
  SIGNAL (1)...(16)
  DOMAIN (2)...(347): Cys/Met metabolism PLP-dependent enzyme
  misc_feature (1)..(351): Xaa is any amino acid
MASEMAAISYTLLALAEAGGRILTSPYLYGGSADSFKMVYPRFGIHFDYAKNILNPKEXEKEIKPDTKAIFIESISNPNAVLLDVDAIAAVAHKHGIPLVVDNTVATPYLFNPIAHGADIVIYSATKGLSGHGNLIGGLVLESGKFDWQNGKFPQFSEKVYTLRDADGNIRTFLEVFPEIPFTCLIRLRYLNYFGAALGPFDAYLAIIGLETLSERLAKQSRNAVTLVEYLSSHKAVEWVRYPTLKNSPSHELYKRDFKNGAGGILAFGFKGTVEQREKFLNSVKLFHYHVNIGDARSLIVNSPQTTHGELTDDEKAIADIPENLIRISTGLEDPEDLIADLNQAFQEAFR

SEQ ID NO: 34663 - DNA, 576 bp, Unknown
  Obtained from environmental sample
  misc_feature (1)..(576): n is a, c, g, or t
atgatgcccctgaaggaattgacggctatgcccgataacgcgaacgggatggcgggcctgcaaaataccgaaacccggaagaccctggcccttctgggagctttttgcatgttcctttccacaatagagtatatgattcccaaacccattccgtttatgcgtatcggtatcgcaaacctgccgcttatgctggcgctggatatttttcccttccatgcttttttggttttagtctctattaaagtactgggtcaagccttaattacgggaaccctgttttcatatatttttcttttttcccttacaggaacttttttatcagcgtcatccatgtacatgctccgccgccttttgggatccggacgggtgagttttatagggataagcactatgggggcaatggtttcaaatgttgcccagttggcgcttgcatgggtttttatcttcggcagcagcgcgcggtacatcgcgccgcctttcctggccgccggacttgttacagggatagcgcttggagttttttgcgaagtgtttgcccgccgctcgcaatggtacgccgcccgcaaaagaaggtag

SEQ ID NO: 34664 - protein, 191 aa, Unknown
  Obtained from environmental sample
  DOMAIN (32)...(178): Heptaprenyl diphosphate synthase component I
  misc_feature (1)..(191): Xaa is any amino acid
MMPLKELTAMPDNANGMAGLQNTETRKTLALLGAFCMFLSTIEYMIPKPIPFMRIGIANLPLMLALDIFPFHAFLVLVSIKVLGQALITGTLFSYIFLFSLTGTFLSASSMYMLRRLLGSGRVSFIGISTMGAMVSNVAQLALAWVFIFGSSARYIAPPFLAAGLVTGIALGVFCEVFARRSQWYAARKRR

SEQ ID NO: 34665 - DNA, 390 bp, Unknown
  Obtained from environmental sample
  misc_feature (1)..(390): n is a, c, g, or t
atgacaaaaacaaagggggaaattcccgtaaaactctgggatatggtaataattttacttgccctctgcatgaccggattttcatttttttcagcatacataaaaccgcagaatagtccgtatgtaatgatacagggacaaaatcagaaatggatattccccatggacgccgaggaaactgtaaacgtgcaggggccattgggatctacggtagtccgaatccatggaaaccgggcctgggtggaatcatcgccatgcgataataaaatttgcgtgggcgcgggacatttgcataacaacggggaatttgccgcctgtcttccaaataaagttttaataatgatagaaggagatgatgcccctgaaggaattgacggctatgcccgataa

SEQ ID NO: 34666 - protein, 129 aa, Unknown
  Obtained from environmental sample
  DOMAIN (17)...(122): Protein of unknown function (DUF1312)
  misc_feature (1)..(129): Xaa is any amino acid
MTKTKGEIPVKLWDMVIILLALCMTGFSFFSAYIKPQNSPYVMIQGQNQKWIFPMDAEETVNVQGPLGSTVVRIHGNRAWVESSPCDNKICVGAGHLHNNGEFAACLPNKVLIMIEGDDAPEGIDGYAR

SEQ ID NO: 34667 - DNA, 528 bp, Unknown
  Obtained from environmental sample
  misc_feature (1)..(528): n is a, c, g, or t
atgatgatacttttgcaactcttaaagagctttttgataatcggcgtcggcgcatacggcggcgggttggtcactatccccatgatagaacatcaggccgtcgccgttcacgggtggatcaccgcctccgagctttcggagctcatagccgtggcgcagatgacccccggccccataggggtcaacgccgccacctacaccggctacagggtcgccggaatcgccggcgccgcggcggccaccttggggtttgtgatcccgtcgctcgtcctctgcctgacgctggcgtacatcctatcgaagttcggcggagttcagtgggtggagatattgaagaagtccgtccaacccgccgtcgccggtctgatcatcgccgccgtgctgacctacggaagagcggcgctgacggacgtccgggcggcggtcatcgcggcggcggcctttgcgatactgctgctgtcgaaagacaaaatacaccccgcgctgttgatccttttgggaggggtcgtcggggtgtttgtttattga

SEQ ID NO: 34668 - protein, 175 aa, Unknown
  Obtained from environmental sample
  DOMAIN (2)...(175): Chromate transporter
  misc_feature (1)..(175): Xaa is any amino acid
MMILLQLLKSFLIIGVGAYGGGLVTIPMIEHQAVAVHGWITASELSELIAVAQMTPGPIGVNAATYTGYRVAGIAGAAAATLGFVIPSLVLCLTLAYILSKFGGVQWVEILKKSVQPAVAGLIIAAVLTYGRAALTDVRAAVIAAAAFAILLLSKDKIHPALLILLGGVVGVFVY

SEQ ID NO: 34669 - DNA, 666 bp, Unknown
  Obtained from environmental sample
  misc_feature (1)..(666): n is a, c, g, or t
atgataaaactcactgcgctattcatcgcgttcttccgtgtgggcgccttcacgcttgggggcggctacgctatgttctcggttttgcgctacgagcttatagtcaaacgcggttgggtgagcgaagaggagtttacccaggaactcgctatggccacaagccttcccggcgctatggtcatcaacttctcgctcttctgcggcgcgaagctgcgcgggcggtccggggcgtttgcggcttttctgggcaccgtactgccatcgtttctgatgattctcatagcggcggcgttcctgttcccgtacttcaaacacccatccgtagcggcttttctgcgcggcgcggcggcggttgtggcggggctgttggcctatacggcgcttaccttgtgcaaaccgatgatctctcgggtatcgcatgccatagccgcgctcattgctgtgggaatcgcgctgatcccaaacgtcaacccgatattcgcgctcatactcgtcagcgtcgtcgtttacttcctgtcgatcaatagacgggttaaaacggcgggcgttattgataaggcgaaccatgatgttgtcaatgacgttaatagcgttaataaaggcaataacgacgtcgatacaatagacgataatatcaatagtatcaataacggaaacaatcgatga

SEQ ID NO: 34670 - protein, 221 aa, Unknown
  Obtained from environmental sample
  SIGNAL (1)...(18)
  DOMAIN (2)...(178): Chromate transporter
  misc_feature (1)..(221): Xaa is any amino acid
MIKLTALFIAFFRVGAFTLGGGYAMFSVLRYELIVKRGWVSEEEFTQELAMATSLPGAMVINFSLFCGAKLRGRSGAFAAFLGTVLPSFLMILIAAAFLFPYFKHPSVAAFLRGAAAVVAGLLAYTALTLCKPMISRVSHAIAALIAVGIALIPNVNPIFALILVSVVVYFLSINRRVKTAGVIDKANHDVVNDVNSVNKGNNDVDTIDDNINSINNGNNR

SEQ ID NO: 34671 - DNA, 777 bp, Unknown
  Obtained from environmental sample
  misc_feature (1)..(777): n is a, c, g, or t
atgctgcaatcaacactgccttcgcagagggacggcaggacagtgctggctgtaaaggccaattttcgcggacgcgtcaggggcatagtccacgaggtttcttccaccgggcagacggtttttatagaacctgaaaatgtcgtggaaaaaaacaatgatattcttgtggaaaccagaaaccttgaagcggaaatcaaaaaaatattgttaaatttaacaaaacaaatatcggaacacggcgaagaaataaaatcatttcatcagacggttttaaaaatggaaatgttaatgacaaaagcaagatactcgcttgaaacagtgggatattttaccccgggatttttcaccccctcggacgcacctggctttacgcttgttcaggcaaggcacccactgctggaaaacgccgtccccatagacctttccatgggcagtgaaggcacacgcgccctgataatcaccgggccgaacacgggaggcaaaaccgtcgtgcttaaaacggcgggccttctcgccatgatgaaccagatcggccttgccattcccgcggcccaaggcagcgagctcccggtattcgacggcattttcgccgacatcggggacgagcagtcgatcagccagtcgctttccactttttccgcgcacataacaaatgtcgccgccatcatcacccattccaccgaanattccctcgcgcttcttgacgagcttggatccggcaccgatccccaggaaggcggcgcgattgcgatggctgtgcttgaccgcctgnaatga

SEQ ID NO: 34672 - protein, 258 aa, Unknown
  Obtained from environmental sample
  DOMAIN (109)...(258): MutS domain V
  misc_feature (1)..(258): Xaa is any amino acid
MLQSTLPSQRDGRTVLAVKANFRGRVRGIVHEVSSTGQTVFIEPENVVEKNNDILVETRNLEAEIKKILLNLTKQISEHGEEIKSFHQTVLKMEMLMTKARYSLETVGYFTPGFFTPSDAPGFTLVQARHPLLENAVPIDLSMGSEGTRALIITGPNTGGKTVVLKTAGLLAMMNQIGLAIPAAQGSELPVFDGIFADIGDEQSISQSLSTFSAHITNVAAIITHSTEXSLALLDELGSGTDPQEGGAIAMAVLDRLX

SEQ ID NO: 34673 - DNA, 624 bp, Unknown
  Obtained from environmental sample
  misc_feature (1)..(624): n is a, c, g, or t
ttgggaggctgcgggccggcggcagccgggacaagttcgcgctcgggaaaacttatnttaagcgatccgatttccactatccaggaattgccggcaggcgtttttttatcaaggcggacaagaaccccttgccgttttgactcgcccgcaaaaacctccatgccgggctcgaaattcgcggctgtttcatccgcgttatccgcgccccggcgttctttggcgatggcgcgttcttcttcgtcaagggcggcgttttccgcttcgactgtttgtgcaagctcattcaggaaaccttttactttgaggatttgctcgcgggacagtgtgtcttccggagacgcggcgccttcccgggaaggcgcgttttccttgagttcgcgtacaaggttttccagggttttgcggctttcgtccaacagcaggcggagtttgcccccaaatccggcttttagttcaagttctttctgcctgagccgcagttctttcagatcggattttcgcctctcgtcccttaaacggtcttcctcaagcctcatcttttgttcaagcgtgtcaagctcgcggcgcttttcttttaagccgcttatcatctgggaaatatcagagcgtccgtcatcaagatag

SEQ ID NO: 34674 - protein, 207 aa, Unknown
  Obtained from environmental sample
  misc_feature (1)..(207): Xaa is any amino acid
MGGCGPAAAGTSSRSGKLXLSDPISTIQELPAGVFLSRRTRTPCRFDSPAKTSMPGSKFAAVSSALSAPRRSLAMARSSSSRAAFSASTVCASSFRKPFTLRICSRDSVSSGDAAPSREGAFSLSSRTRFSRVLRLSSNSRRSLPPNPAFSSSSFCLSRSSFRSDFRLSSLKRSSSSLIFCSSVSSSRRFSFKPLIIWEISERPSSR

SEQ ID NO: 34675 - DNA, 522 bp, Unknown
  Obtained from environmental sample
  misc_feature (1)..(522): n is a, c, g, or t
ttgatcagccgctttggcattacctgccgtttttcgttttatttgcaggaggatatggaagccatagtcaggcgttccgccggacttttaaatattaaaattgacaatgatgcagcttctctgcttgcaaagtcttcaaggggaactcctcgtgtggtaaaccggctgctcaggcgcatgagggattacgcacagtacgcgggcagcgccaatattacgttaaccgtcgtaagggaagggttaacgaagcttgaaatagacgcgcttgggcttgaaaaacaggatagggacatattaaaaatcattatcgaacgctaccagggcgggccggtcggcgctgaaacgcttgccatttccattggcgagtccgtggagacgcttgaagattactacgagccctacctcatacaaagcggcctgttacagcgcaccccccgcggaaggattgtgacgtcccttgcctacggccacctggggcttacgccggttaatacgggcagtggagaggcttcgttgttttag

SEQ ID NO: 34676 - protein, 173 aa, Unknown
  Obtained from environmental sample
  DOMAIN (83)...(161): Holliday junction DNA helicase ruvB C-terminus
  misc_feature (1)..(173): Xaa is any amino acid
MISRFGITCRFSFYLQEDMEAIVRRSAGLLNIKIDNDAASLLAKSSRGTPRVVNRLLRRMRDYAQYAGSANITLTVVREGLTKLEIDALGLEKQDRDILKIIIERYQGGPVGAETLAISIGESVETLEDYYEPYLIQSGLLQRTPRGRIVTSLAYGHLGLTPVNTGSGEASLF

SEQ ID NO: 34677 - DNA, 768 bp, Unknown
  Obtained from environmental sample
  misc_feature (1)..(768): n is a, c, g, or t
ttgccgatctatctccctccgccatacatggtgtacgatcccgaaaaatccgcctggaccatactgacaaccagcttgctgtggggcggattcagcgcttcgtttaccgcgacccggtcgttcggctacgagctggtttccagggaaaaccaactcgagaacgaccccctcaaccgtccctttgggtggtaccaggaagaacgggaaagactcaacccccaggaactgagtttggcctaccataaaaccatatccgccaacgaggggggcaaagtggtttttgaaagctcggtaaacacgggccttacgtttgacctccagcgctacacgtactcaaggttctttttcacgttgagccttggcgcgaagataaaccgtttcctggacatcagcgtccgctcccattcggagaactccgttgtttaccgctattttcagtacacccccctgttttccggcagcggcgttaccgtgccgggagaacgaaacatcctcgccgacctcttcaactcgttccgctttgacgacgtgaggaaacgggaggcctccggctttaagttcaaatccgtcggcattgacttggttcaccacctgggcgactgggacgcgacgctgacagtcaacatggcccccgaactcgacagaaacgcgcagcccccccggtaccgcctcttcaatcaaatcggcttcctcgtccagtggaaaccaatcaaagaattcaagaccgatatgaaatacgacaccaaggaaggtttccgctatgaatga

SEQ ID NO: 34678 - protein, 255 aa, Unknown
  Obtained from environmental sample
  misc_feature (1)..(255): Xaa is any amino acid
MPIYLPPPYMVYDPEKSAWTILTTSLLWGGFSASFTATRSFGYELVSRENQLENDPLNRPFGWYQEERERLNPQELSLAYHKTISANEGGKVVFESSVNTGLTFDLQRYTYSRFFFTLSLGAKINRFLDISVRSHSENSVVYRYFQYTPLFSGSGVTVPGERNILADLFNSFRFDDVRKREASGFKFKSVGIDLVHHLGDWDATLTVNMAPELDRNAQPPRYRLFNQIGFLVQWKPIKEFKTDMKYDTKEGFRYE

SEQ ID NO: 34679 - DNA, 522 bp, Unknown
  Obtained from environmental sample
  misc_feature (1)..(522): n is a, c, g, or t
ttgcggcaaggaaggattcgggctttccaaacggaaaatcacgttttccacctccggcatctgcgagggatcctcgacatggcggaaacgggcccggaggcggatttagccgtttccgttcccagcgcccgcgatgatttgcggcgcagactcatgcccggcatagccgggcatccccttcccgcgttacaaaaagccctggcgcgctatcaggcgctgcaaaaacggcagataactatagaaacggtactgctgggaggaatcaacaccggggcggaagatgcccgcgctctccttgactttacggaaaacctcgacacggtcataaacctcatcccttggaacccggcggcggggcttcgcttcgagggaaaaaaactccgtcaaagcgacccggacgaaacagcggctttcgcccggctgctggaacagggcggccgcgcggttacccgccgctatcgccgtggcaggggcgtcgccggagcctgcggccagcttgggtcgccccccagtttacgctaa

SEQ ID NO: 34680 - protein, 173 aa, Unknown
  Obtained from environmental sample
  misc_feature (1)..(173): Xaa is any amino acid
MRQGRIRAFQTENHVFHLRHLRGILDMAETGPEADLAVSVPSARDDLRRRLMPGIAGHPLPALQKALARYQALQKRQITIETVLLGGINTGAEDARALLDFTENLDTVINLIPWNPAAGLRFEGKKLRQSDPDETAAFARLLEQGGRAVTRRYRRGRGVAGACGQLGSPPSLR

SEQ ID NO: 34681 - DNA, 1266 bp, Unknown
  Obtained from environmental sample
  misc_feature (1)..(1266): n is a, c, g, or t
atgaataatgatatttccgctttttttgctttggaagaacaatcaaccgcttcaaaagcaatacaaaacaatgccgcaaaaggcagtttgcgcggttccccgatattttcaaacgaattgcagatcggcaaaaaatctgattatggttattctgccgggtctcaaaacgcgccgggagaatttgacggcgaagtttcccccaatatttccggattatcaaaacaggggtaccagtttttaagggaaaaccgcataggcgaagccctggactgttttaataaaattttggaagtggacaactgtaacaactatgccctggtcggccttggagacgccgccaggaagaagggcgcctaccgggatgcggcagtgcattacagccgttgcctggaataccacccgggaaacaactatgcccttttcggtctggcggattgttataaaaccttaaatcagtttcacaaagcgattgaaatttgggaacaataccttctgcacgatgatcagaatattacggttttaacaagggttgccgacgcgtaccgcaaaatcagggactttaaacattccagggaagtgtacctgaaagtgctggaaatggagagattcaacccctatgcgattatcggtctgggacaccttcattacgatttcagggaatacaacgccgccttattctactggcagaagatgctggaattaaatcaggaaaacgtggatatccgggtgcttacttccatcgggaactgccaccggaaactgaaaacctttgaaaaaggcataccctactttgaacaggcattaaagcgggattcaaataatttttacgctctttttggcatggcggactgttaccggggaatgaaccagcaaaaccgttcccttgaatattggaaccgcattctggagcaggatccccggaacaagatgatcctgacccgcgcgggagacgcgtaccggaaactcaaggagcatgacaatgccagccactgttaccagcgggccttgaatatagaattcgatacctatgccgttcttggccttgccctgattgccaaagatcagaataaatacgtggaagcaatcgaatccctgcggcggttaatccagcaggatccccggaattaccggctttacatagaactctccgattgctggtaccgcaagggagagcgaaaccaggccattgatatcctgggggaataccaaagacacgggtttagaaatgaaaaaatttccgaactccttgaccgctataaaaactaa

SEQ ID NO: 34682 - protein, 421 aa, Unknown
  Obtained from environmental sample
  DOMAIN (275)...(308): Tetratricopeptide repeat
  misc_feature (1)..(421): Xaa is any amino acid
MNNDISAFFALEEQSTASKAIQNNAAKGSLRGSPIFSNELQIGKKSDYGYSAGSQNAPGEFDGEVSPNISGLSKQGYQFLRENRIGEALDCFNKILEVDNCNNYALVGLGDAARKKGAYRDAAVHYSRCLEYHPGNNYALFGLADCYKTLNQFHKAIEIWEQYLLHDDQNITVLTRVADAYRKIRDFKHSREVYLKVLEMERFNPYAIIGLGHLHYDFREYNAALFYWQKMLELNQENVDIRVLTSIGNCHRKLKTFEKGIPYFEQALKRDSNNFYALFGMADCYRGMNQQNRSLEYWNRILEQDPRNKMILTRAGDAYRKLKEHDNASHCYQRALNIEFDTYAVLGLALIAKDQNKYVEAIESLRRLIQQDPRNYRLYIELSDCWYRKGERNQAIDILGEYQRHGFRNEKISELLDRYKN

SEQ ID NO: 34683 - DNA, 573 bp, Unknown
  Obtained from environmental sample
  misc_feature (1)..(573): n is a, c, g, or t
atggctaatggcaaagccagaaatgttttcagaaaattttttcaaggcaggctaaaggttgtggaatttgccataaccaacgcatgcatcgccaagtgctctttctgcaatatctggaagcagcagccaaaggtttttgttgatcgcgagagagccctggaagttattgatcgcctggcggatcacgggacagttcatataaccattaccggaggcgagcccctgcttcatcccaatgtggtggatatagtccgcagggcaacggacaggaagatgcacaccgccgttcttaacgcagccccgcagcttattttaaaagacgatattgtaaaacgcctggaagacgcgggaaacgatatggtaagcatttcctttgattcaggcgacccaaaaacaatggcggagtcccggcaaattccaaacataatggaagatatggcaaaggcggttgagttgatcggcaagaccaaggtaaagaccatggcgtcggttttaatctggaacgataattacgacaggctggaagaagtctgtatccgcgccaaaaacatgggctttaatttatttctataa

SEQ ID NO: 34684 - protein, 190 aa, Unknown
  Obtained from environmental sample
  DOMAIN (23)...(181): Radical SAM superfamily
  misc_feature (1)..(190): Xaa is any amino acid
MANGKARNVFRKFFQGRLKVVEFAITNACIAKCSFCNIWKQQPKVFVDRERALEVIDRLADHGTVHITITGGEPLLHPNVVDIVRRATDRKMHTAVLNAAPQLILKDDIVKRLEDAGNDMVSISFDSGDPKTMAESRQIPNIMEDMAKAVELIGKTKVKTMASVLIWNDNYDRLEEVCIRAKNMGFNLFL

SEQ ID NO: 34685 - DNA, 1041 bp, Unknown
  Obtained from environmental sample
  misc_feature (1)..(1041): n is a, c, g, or t
gtggatttatcaataattagctatgattttaactcggcgcagttgaacaagttgtccggcgttaatgaattggcgcaataccgtgacgattcaaaaatactgtggataaatgtcagcggatttgacgatgttgattcaataaacgaattgggaagatattatgagattcacccgttaagcattgaagatatttttcatacagaccggcagccaaaaatagaactgtttgaaaattacaggtacttatcaattaaaaccatacagcgtgaaaaaaggttcattcattgtaactataatcgaaataaaaagcaaaaaggcaatcaggaaaaacaagaaaaaatagatgagtttttgatagatcaaatcagcatcattatcaagaggaataccttaataacctttcaggaaatgcaaggcgacgcgtttgatggcataagaaaaaagatactggaaaatatcggggaaattcgcaaagctggcgtagattatctggcctatgtaattatagacgctgttgttgatgaatattttcttacaataaatcatcttgaagaagatattgagggtttcgaggatcgttcggcgaaaacaaacgatgaaacgtttatcgatgaaatacaggataccaaaaagtaccttttgcagataaagcgggctatttcacccttaagggattgcttaaacaaaattaaccgccaggaaaattttttccagtcagataagctaaaaccatttttacaggatttaagcgagaatattaatcacgcgctgataactgttgaaaatttccgtgagtggctttcaaacattatggaagttaatttgtctgttgtgtcttatcagacgaacaatgtaatgaaggtattgacagtcatttccacaatattcatccctttgacttttatcgcgggcatntacggcatgaactttgaatttatgcntgagctaagatatgaattggcgtacttcattgttttgggctgtatgggccttgtcgcaataacaatgctggtattttttaaaatacaccactggttttag

SEQ ID NO: 34686 - protein, 346 aa, Unknown
  Obtained from environmental sample
  DOMAIN (30)...(346): CorA-like Mg2+ transporter protein
  misc_feature (1)..(346): Xaa is any amino acid
MDLSIISYDFNSAQLNKLSGVNELAQYRDDSKILWINVSGFDDVDSINELGRYYEIHPLSIEDIFHTDRQPKIELFENYRYLSIKTIQREKRFIHCNYNRNKKQKGNQEKQEKIDEFLIDQISIIIKRNTLITFQEMQGDAFDGIRKKILENIGEIRKAGVDYLAYVIIDAVVDEYFLTINHLEEDIEGFEDRSAKTNDETFIDEIQDTKKYLLQIKRAISPLRDCLNKINRQENFFQSDKLKPFLQDLSENINHALITVENFREWLSNIMEVNLSVVSYQTNNVMKVLTVISTIFIPLTFIAGXYGMNFEFMXELRYELAYFIVLGCMGLVAITMLVFFKIHHWF

SEQ ID NO: 34687 - DNA, 636 bp, Unknown
  Obtained from environmental sample
  misc_feature (1)..(636): n is a, c, g, or t
ttgtttgaaaatggacgtttgaaaatgaatgatgcgcctaacgcccttgaccgattggttgcgcttttttcaaggctccccggaattggaaagaagagcgctagccgtctggtgtatcacatccttgacgctgatccctctttcgcaagaactattgccggggagcttcagggcctacatgaggctattaagcgatgctcgcgttgcggcagttttactgaaagcgatccctgctctatctgtaccgacacaacccgcgatcacagcctgctgtgcgtggtggaacgcgcccaggatgtcagggtaatcgaagagtccagagagtttcgcggcctctttcacgtcctgggcggactcattgcacccctggaaggtgtgaaccccggagatcttgccatagcgcagctcctgggccgtgtaagggacgaaggcgttacggaagtaattctggctttaaacccgacaatagaaggggacaccacggccctttacatccaaaagtttctgaaagaaaagctgccttcccgtccgcttgaaatcagccgcctggcgtcgggccttcctgtcggcggcgatcttgaatacgccgacaggcttaccctgtcccgaagtctgcggggcagaataaaaatgtga

SEQ ID NO: 34688 - protein, 211 aa, Unknown
  Obtained from environmental sample
  DOMAIN (89)...(181): Toprim domain
  misc_feature (1)..(211): Xaa is any amino acid
MFENGRLKMNDAPNALDRLVALFSRLPGIGKKSASRLVYHILDADPSFARTIAGELQGLHEAIKRCSRCGSFTESDPCSICTDTTRDHSLLCVVERAQDVRVIEESREFRGLFHVLGGLIAPLEGVNPGDLAIAQLLGRVRDEGVTEVILALNPTIEGDTTALYIQKFLKEKLPSRPLEISRLASGLPVGGDLEYADRLTLSRSLRGRIKM

SEQ ID NO: 34689 - DNA, 480 bp, Unknown
  Obtained from environmental sample
  misc_feature (1)..(480): n is a, c, g, or t
atgtgcaaaagacaggagtctataatgaggattttattaaacgaagtttttgatccacgagccataaaattaaaccttgagggtaaaaccaaagaggatatttttattgaattagcagaagcgataagagcggttcaccctgaatgtgagcgcgcttcaatgcttgcgtcattatgggagcgtgaaaacaagttaagtacaggtataggttccggcgttgctattccccacacaacatacgggggaataaataacatagccggagcaataggagtatcgaaaacaggcattgagtacggcactatcgatcacaaacctgttaacgttgtgttcatgctggtaataagcgataaagcaacagaaaaccatttgcgtattttaaaccagctttttacgcttgcccaatccgaggcaattgcgattataagagaagcgaaaaacacgcagatcgtgaaagatatactatcgcgctttcagtag

SEQ ID NO: 34690 - protein, 159 aa, Unknown
  Obtained from environmental sample
  DOMAIN (15)...(158): Phosphoenolpyruvate-dependent sugar phosphotransferase system, EIIA 2
  misc_feature (1)..(159): Xaa is any amino acid
MCKRQESIMRILLNEVFDPRAIKLNLEGKTKEDIFIELAEAIRAVHPECERASMLASLWERENKLSTGIGSGVAIPHTTYGGINNIAGAIGVSKTGIEYGTIDHKPVNVVFMLVISDKATENHLRILNQLFTLAQSEAIAIIREAKNTQIVKDILSRFQ

SEQ ID NO: 34691 - DNA, 525 bp, Unknown
  Obtained from environmental sample
  misc_feature (1)..(525): n is a, c, g, or t
gtgagaaggcggccgtgctttcccgacctcgtgtcaaacctgaacgcggcgctcacgaagataatccagaggactttcaacatcctttggaggcaggggaagctgccgcggccgccggaggcgctggcgggaagcggggcgcggctgaaggtggacttcatagggccgctggcgcaggcgcagaagaaattccacgagtcgtcgggcataggccagggcatcgggctaatcggggccgtggcgaagatgaaccccgaggctttggacgtaatcgattttgaccagacgttaaaatcggggcttgaggggatgggtttcccgcagagcgcggtgcgcgaggacagggacatcgaggcgctccggaagcttagggcgcaacggcaggaacagatgcaacggcaggctttggcgctggagcagcagaaacagttggcggggaacttcgacaagctgaacgagccggtaaaacaggggtcggccatcgatgagatgaacaaacaaattcaagggggattttaccagtga

SEQ ID NO: 34692 - protein, 174 aa, Unknown
  Obtained from environmental sample
  misc_feature (1)..(174): Xaa is any amino acid
MRRRPCFPDLVSNLNAALTKIIQRTFNILWRQGKLPRPPEALAGSGARLKVDFIGPLAQAQKKFHESSGIGQGIGLIGAVAKMNPEALDVIDFDQTLKSGLEGMGFPQSAVREDRDIEALRKLRAQRQEQMQRQALALEQQKQLAGNFDKLNEPVKQGSAIDEMNKQIQGGFYQ

SEQ ID NO: 34693 - DNA, 771 bp, Unknown
  Obtained from environmental sample
  misc_feature (1)..(771): n is a, c, g, or t
atgaataacgacccgcagtatggtgaacgcctgaaactgctgctgaaacacctctaccgcgccatgcgtgacggggactgggacgtgtacgtggggcaggttttcgacgagttccggcgcggcctgcacgtggtcaagccgttcgcgcttgataacggggcatggaaaaaattctacgcgcttgactgggggtacgcgaagccgttcagcctcggcaagtgggcggtgaacggcgaagggcgcatggtcaggtacggggaatggtacgggtgttcgccagacgcgatgaacaccgggataaagatgggatgcgacgccgccgcagcgaaggcgtgggagatggcggtactggaaggcgtgacggaagtcgtggcggacacggcgatgtggagcaaggacgacgacgggccttccaacgcggagaaatgggaaaacgccgggttcagaatgatacaggcgaacaaggaccgcataaacggcctgtcgatattccatcagaggttaaaaacgccgtgcgaggacggaaggccgatgcttttggttttcgaccactgcgtggacttcatacggacgataccgatactcacgcccgacccgtcgaagcccgaggacataaacacgaaactggaagaccacatatatgacgagagccgctacgcggtgatgagcgacttcgcgcacaacccggcggcgtggctgcggaagcagaacgggcagtggaacctgaagaggcgcggtgacggatgggacccgttcgagaagacggcgtga

SEQ ID NO: 34694 - protein, 256 aa, Unknown
  Obtained from environmental sample
  misc_feature (1)..(256): Xaa is any amino acid
MNNDPQYGERLKLLLKHLYRAMRDGDWDVYVGQVFDEFRRGLHVVKPFALDNGAWKKFYALDWGYAKPFSLGKWAVNGEGRMVRYGEWYGCSPDAMNTGIKMGCDAAAAKAWEMAVLEGVTEVVADTAMWSKDDDGPSNAEKWENAGFRMIQANKDRINGLSIFHQRLKTPCEDGRPMLLVFDHCVDFIRTIPILTPDPSKPEDINTKLEDHIYDESRYAVMSDFAHNPAAWLRKQNGQWNLKRRGDGWDPFEKTA

SEQ ID NO: 34695 - DNA, 750 bp, Unknown
  Obtained from environmental sample
  misc_feature (1)..(750): n is a, c, g, or t
ttggccgagtcgcttatggagaggctaaaagaggaacgtgtccgcaaaataatacagcctttgattctaggcgataatcttgcagtggatagattttcggatgactatctttacaccagagatttgggcttgataagggaaataggtaaaggcttagttgagccagcgaataaaatttatgcagagataatagtgagatacttgaattacaatttacaggaaaattttaaaactgaaatgccaaaaaacgatttgcctaaatacattgtaaaaggcaaaataaatataaatgctttgctaaaagagtttcaggctttttggcgagagaacagtgagatatggacaacgaagtacaaagataattattaccaatatgacgaagccgcccctcatttggtaatccaagcctttcttcagcgtgtgataaatggcggcggtcatatcagccgagaaatggcactcggcaagaatcgttctgatatttgcgttgagtgggagaatcagaaatatccgattgaacttaaaatatacaaaggaactaaaacaataaaagattccacagaacaaattttgaaatatatggagcgagtaggcacaaaagaagggtgggttgtgatttttgaccgcactcccaagaaaagctggagcaaaaaactttacgtgaaagaggttaagcaggcagggaaaaagattacgatttttgggtgtggaatcgctaaagaaattaccccctatgttttatacttctag

SEQ ID NO: 34696 - protein, 249 aa, Unknown
  Obtained from environmental sample
  misc_feature (1)..(249): Xaa is any amino acid
MAESLMERLKEERVRKIIQPLILGDNLAVDRFSDDYLYTRDLGLIREIGKGLVEPANKIYAEIIVRYLNYNLQENFKTEMPKNDLPKYIVKGKININALLKEFQAFWRENSEIWTTKYKDNYYQYDEAAPHLVIQAFLQRVINGGGHISREMALGKNRSDICVEWENQKYPIELKIYKGTKTIKDSTEQILKYMERVGTKEGWVVIFDRTPKKSWSKKLYVKEVKQAGKKITIFGCGIAKEITPYVLYF

SEQ ID NO: 34697 - DNA, 555 bp, Unknown
  Obtained from environmental sample
  misc_feature (1)..(555): n is a, c, g, or t
ttggccgcggagaagggcgttatcgtcagcgccgtgaagaaggagttcgccggcaagaagagcaagttcgagatgtactacgactaccgcgagagggcggccgccatcccctcgcaccggtttttggccatgcagcgcggggaacgcgaaaaggttctgaggctctcgctcgaactgccggcggagggcgtgacggagcggctgtgcgccgcgcttgtcaagcatccgcgaagcgcggcggcgccctaccttcgcgaggcggcgttcgacgccctcgacagactgctcctacccgccgttaaaacggcgctgcgcgccgatatgcgcgagcgggcggacgccgaggcgatcaaggtcttcggcgaaaacctcgcggcgctgctgctcgccgcgcccgccggacgcaaaacggtgataggcctcgaccccgggtttaggagcggatgcaagctcgccgtggttgacgatacggggaagttcatagagaccgcgaccatctacccgcacgagccgcaaaggacagggcgggggcgcaaacgacgctgctggcgttga

SEQ ID NO: 34698 - protein, 184 aa, Unknown
  Obtained from environmental sample
  misc_feature (1)..(184): Xaa is any amino acid
MAAEKGVIVSAVKKEFAGKKSKFEMYYDYRERAAAIPSHRFLAMQRGEREKVLRLSLELPAEGVTERLCAALVKHPRSAAAPYLREAAFDALDRLLLPAVKTALRADMRERADAEAIKVFGENLAALLLAAPAGRKTVIGLDPGFRSGCKLAVVDDTGKFIETATIYPHEPQRTGRGRKRRCWR

SEQ ID NO: 34699 - DNA, 957 bp, Unknown
  Obtained from environmental sample
  misc_feature (1)..(957): n is a, c, g, or t
atggccgagaaatccaattccgccccccaaatgaccgcccccgaacccgaattgctcccgcccgccaacgacgtggttttcaagtacgtcttcggcgatgagcggaacaagggcgtcactgcgaaactgctcagcgcgatcatgggcgccgagataggcgagtccgacatcactttcggcgacccgcaccttaaacgcgagtttatcgacgacaaattgggcatcctagatatgttcgtccgcctcaaaaacggcgaaaccgtggccgtggaaatgctgaccggtaatttttccaacatacacaagcggttagaatattatatttctaaactgacggccgcccaactcggcaacggcaacgagtaccctaagctgaaacctgtggtgtttatcctgatagcgaccgatccggtgctgaaaaatacggataaataccacagcgagttcgcgatgctggagaagaacgagcactacgtgctgcatgatctgcgtacgctccacatcatagagctctcaaaactgccgccgaacagccacggccgcctagtatcgtggctaaagttcatattggccaaaagaaaggaggaactggtgactctggtaaaggaaaatccggaacttcagtacgcttgcaacgtactagtggaagcgaacctgaccgccgaggtccgcgccctatacgaggtagacctgaaacggtggcgcgacgaacaggacagaaccgagtacgccgtacagaaggccaagcaggagaccttggaaaaggcggatgctgaaaaagaagccgcactaaaaaaggtggaggccgagaaagaaaccgcactaaaaaaggcggccgaaaaagaaaccgccatgaaacacgccctagacctattcaaacaaggctattcagcagaacaagttgaaaccatgctctgcaaaaaggactcggatttaataggattaaggaggaactag

SEQ ID NO: 34700 - protein, 318 aa, Unknown
  Obtained from environmental sample
  misc_feature (1)..(318): Xaa is any amino acid
MAEKSNSAPQMTAPEPELLPPANDVVFKYVFGDERNKGVTAKLLSAIMGAEIGESDITFGDPHLKREFIDDKLGILDMFVRLKNGETVAVEMLTGNFSNIHKRLEYYISKLTAAQLGNGNEYPKLKPVVFILIATDPVLKNTDKYHSEFAMLEKNEHYVLHDLRTLHIIELSKLPPNSHGRLVSWLKFILAKRKEELVTLVKENPELQYACNVLVEANLTAEVRALYEVDLKRWRDEQDRTEYAVQKAKQETLEKADAEKEAALKKVEAEKETALKKAAEKETAMKHALDLFKQGYSAEQVETMLCKKDSDLIGLRRN

SEQ ID NO: 34701 - DNA, 750 bp, Unknown
  Obtained from environmental sample
  misc_feature (1)..(750): n is a, c, g, or t
gtggcggatacttcgccgggtttcatggacaacagagccgcccgtaaaattattgaaatcactgtcaaacgaaaagacagggaatttacatttcccctctatctctttattcccaatggagcggataaaaaaccggttccagtggtccttactatagtcaaccgggaattgagcgacgctgatccatcccgcaagagcctttctccgttctggcccgcggaaatgatggtgagccgtggttatgcggcagcggcggttattacccatgaaatagccccggattatgaagagaattttaccacaaagtttcaccgtttgttcccggaatatgtgacgaaccatcccgccgacgcctggggcagcattaccgcctgggcctggggcatgagcagggccatagattacctggttacagatcctgcaataaacaataaagaaattgccattgccggtcattcccggggcggaaaaaccagtctctggtgcggcgcccaggataagagagccgcattggtgattagcagctgctccggctgttccggtactgctatcacccgcggaaaaaccggggaacatataaaagaaataaccgacagatttcctttctggttttgccctaattatagaaagtatgcgaacaatgaagacataatgccctttgaccagcatttacttttagcgttaatcgctccgcgaatgctttgtatatcggacaggtcttttgatagctggtgtgatccccgcgcctga

SEQ ID NO: 34702 - protein, 249 aa, Unknown
  Obtained from environmental sample
  misc_feature (1)..(249): Xaa is any amino acid
MADTSPGFMDNRAARKIIEITVKRKDREFTFPLYLFIPNGADKKPVPVVLTIVNRELSDADPSRKSLSPFWPAEMMVSRGYAAAAVITHEIAPDYEENFTTKFHRLFPEYVTNHPADAWGSITAWAWGMSRAIDYLVTDPAINNKEIAIAGHSRGGKTSLWCGAQDKRAALVISSCSGCSGTAITRGKTGEHIKEITDRFPFWFCPNYRKYANNEDIMPFDQHLLLALIAPRMLCISDRSFDSWCDPRA

SEQ ID NO: 34703 - DNA, 1029 bp, Unknown
  Obtained from environmental sample
  misc_feature (1)..(1029): n is a, c, g, or t
ttgcaagaatgccaaagagcaaaggattctttgaaatattttaacgaaaatgctccccaataccatattgccgctgcgggcagttttttgggtgtagccagtggaaaattccccgttggacaagtggataaatttacgctttacccaatgtctttttacgaatttttagaggcaacagggcatagcattttattggaaaatataaatgagttgaaccctgcattggaaaatatgcataatttgctaaccgatatgttgaaaacatatctttatgtaggcggaatgcctgctgcggtgaatgtttttgtgcaaacaaaggatttgagaggcgtaagggaaactcaaaatatgatactctccgattacaaaaacgatttttccaaacatataacgccaaacgatattccaaaagttagaatgctctgggattcaatacctgctcatttggcacgggaaaagaaaaaatttatttataaagatattaaaacaggcggacgtgccagcgaatttgaaaatgctatggactggcttgcaaataccggtttggtgtataaaattcagcgtactttaagcccaaaacttccgcttgctcgcgaccaagaacgcgaagcatttaaactttttatgcttgacgtgggtttgctgtgtgccaaaaccaatgtggatttatctttattctatatagcagaaccgaaaatttttgacgattttcacggtgcgctaacggagcaatatgtttgccaagaattgaagtgctctacttctaaccccattttttactgggggcgagaccgtggcgcggcggagatagattttataatgcaatataaaaacgaagtgtttcccatagaggttaaatctggtaaaaatacgcaggcaaagtccttgaaggtatatatgggggaatataaacccaaaatagcggttagaacatcgctctgcaatatcgcaaaattttgcgactcagccactntgcgagaaattccgctttacataattggaagttttgagaggatgattaagggttaa

SEQ ID NO: 34704 - protein, 342 aa, Unknown
  Obtained from environmental sample
  misc_feature (1)..(342): Xaa is any amino acid
MQECQRAKDSLKYFNENAPQYHIAAAGSFLGVASGKFPVGQVDKFTLYPMSFYEFLEATGHSILLENINELNPALENMHNLLTDMLKTYLYVGGMPAAVNVFVQTKDLRGVRETQNMILSDYKNDFSKHITPNDIPKVRMLWDSIPAHLAREKKKFIYKDIKTGGRASEFENAMDWLANTGLVYKIQRTLSPKLPLARDQEREAFKLFMLDVGLLCAKTNVDLSLFYIAEPKIFDDFHGALTEQYVCQELKCSTSNPIFYWGRDRGAAEIDFIMQYKNEVFPIEVKSGKNTQAKSLKVYMGEYKPKIAVRTSLCNIAKFCDSATXREIPLYIIGSFERMIKG

SEQ ID NO: 34705 - DNA, 651 bp, Unknown
  Obtained from environmental sample
  misc_feature (1)..(651): n is a, c, g, or t
ttggtagcaagggatttaatggatatagcaaatatcaagcggcaagattcattgcgggaacttataaggattttagcttcatggtcaggcaaatttatggatttgccacctatttgcaatgctcttgggttatcgaaaccaacaactgattcttacatcaacgctttagaatccctctatttatttgaaaaagtaactccttggacaaaaacagattatgagcgtgttggacgcagcccaaaaacttatgcgaccgatactggcttaatgacatcggttctcggttggaataaaaaggaagttatgctgaatgccgaccgtgctggcaaactgatggaaacttttgtgtttcacgaattggcagcgcaggttgatttagacaacgcatattctttatatcaatacagggacagaaaaggcagggaaattgattttattgtggagtgcgaagacgaagccctgattggagtggaagtaaaagcagggcatagcgtatacaaagagcattttgcatcgcagatttggtttaaggaaaatataatcaaaggaaaaaagccctattttggaatagtcttatattccggagaacacacgctttcttttggcgatggaatgctggcagttcccatagcagctttgtttaacccttaa

SEQ ID NO: 34706 - protein, 216 aa, Unknown
  Obtained from environmental sample
  misc_feature (1)..(216): Xaa is any amino acid
MVARDLMDIANIKRQDSLRELIRILASWSGKFMDLPPICNALGLSKPTTDSYINALESLYLFEKVTPWTKTDYERVGRSPKTYATDTGLMTSVLGWNKKEVMLNADRAGKLMETFVFHELAAQVDLDNAYSLYQYRDRKGREIDFIVECEDEALIGVEVKAGHSVYKEHFASQIWFKENIIKGKKPYFGIVLYSGEHTLSFGDGMLAVPIAALFNP

SEQ ID NO: 34707 - DNA, 771 bp, Unknown
  Obtained from environmental sample
  misc_feature (1)..(771): n is a, c, g, or t
ttggcatgctttaaaggcacggattacactttggatattgatgttgaaaaaattatggaagcaaaccaagttagcaaggaatgtttcaaagaatacgactttccacctgaggctttggccattgaacccgaagttattttcagcccaatgccaggcggtgccttaaccgcaaacactttgatgatgcgcgaaaccaaaacattccacctttacccgcaagtgattaaaaacatggcagagtgcgtagctcgcggcggatttggttcaagcgttacccctgtttctcaattctattttcagcaggcttatgcaaacacagttcaaggtccttggaaaaaaataactgacggctatggcaatatggttcttggctaccttggcaaaacacccagagaaccagacccagaaatagttaagattgcaagcgagcaaatgaaaaaacctgtgttcaccggaaatccattagatgttttggaaccaggcattccaaaagcgaaaaaagttttggaagaaaaccatttacctgtaactgatgaaaatattttcataattggcgcaatggcaacaaagggtggcaacaaaggtttggatttcttgcagggaaaagcaagagtgagcgttccaaaaaagaaacctgctgctgccgcacctgctgctgcacccgctgctgctccggctgcatctccacctgtttttgcgcccattagcggcacagttaattatggcgttaccgttagcggaaaaacatttaatgtgcaggttagcgggtaa

SEQ ID NO: 34708 - protein, 256 aa, Unknown
  Obtained from environmental sample
  DOMAIN (45)...(256): Conserved carboxylase domain
  misc_feature (1)..(256): Xaa is any amino acid
MACFKGTDYTLDIDVEKIMEANQVSKECFKEYDFPPEALAIEPEVIFSPMPGGALTANTLMMRETKTFHLYPQVIKNMAECVARGGFGSSVTPVSQFYFQQAYANTVQGPWKKITDGYGNMVLGYLGKTPREPDPEIVKIASEQMKKPVFTGNPLDVLEPGIPKAKKVLEENHLPVTDENIFIIGAMATKGGNKGLDFLQGKARVSVPKKKPAAAAPAAAPAAAPAASPPVFAPISGTVNYGVTVSGKTFNVQVSG

SEQ ID NO: 34709 - DNA, 885 bp, Unknown
  Obtained from environmental sample
  misc_feature (1)..(885): n is a, c, g, or t
atgaaaaagtatattttggctttatttatcttattatttgtcgtggttttttccgccgctcagacggcgaatgacggctccttcaggcaggaagggattgcttcctggtacggcaaggaatttgagggcaagccaacggctaacggggagatttttgaccccagcctttttaccgctgcccatccgacactgcccttcggaacaattctgacggtcaccaacaaacagaacatgaagcaggtaacaatccgggtaaatgacagagggccttttgttgccgccagaattatcgatctatcaatggcggcagccgaaactctggacatgataacgagcggaacggcctcggtgatcattgaaaaagccataaataccgttttggggcctgtatgngggcaaatatcggataataaaatatcttctccggttactgcatcagtaacagcaaataccaattcatcggtttccaccgaaacagcagagttaatgaaacaaaagccttcggctgccaatgagcctgctacccggctggaaattgtaaatgtcccggctgattcgccaatggttcaggaatacataaatacgcctgcgccgaaagtccaggaattctacaacgcgcctgcggcaaaaattgttggcagcattcctccagttggaagttcaaaatcctaccgcctccaggtgggagcatttacagtgccgcgaaacgcgcttaacgcattcgacaagcttaaaagcgcggggctgaatcccgcttacgaacaaaacgggcaattctaccgcgttgtgctggcaggactaaaggcaagcgaaatacaggcaatcgcgcagatacttgcgaataatggttttcaggaagcagtaatcagggaagaaaccaactaa

SEQ ID NO: 34710 - protein, 294 aa, Unknown
  Obtained from environmental sample
  SIGNAL (1)...(23)
  DOMAIN (220)...(290): Sporulation related domain
  misc_feature (1)..(294): Xaa is any amino acid
MKKYILALFILLFVVVFSAAQTANDGSFRQEGIASWYGKEFEGKPTANGEIFDPSLFTAAHPTLPFGTILTVTNKQNMKQVTIRVNDRGPFVAARIIDLSMAAAETLDMITSGTASVIIEKAINTVLGPVXGQISDNKISSPVTASVTANTNSSVSTETAELMKQKPSAANEPATRLEIVNVPADSPMVQEYINTPAPKVQEFYNAPAAKIVGSIPPVGSSKSYRLQVGAFTVPRNALNAFDKLKSAGLNPAYEQNGQFYRVVLAGLKASEIQAIAQILANNGFQEAVIREETN

SEQ ID NO: 34711 - DNA, 1275 bp, Unknown
  Obtained from environmental sample
  misc_feature (1)..(1275): n is a, c, g, or t
atgaaaacattactgcgtattgcaaaggaggctgtcagatataaaggctggctgctgctgtcgattttcggcacgcttatgatgacgacagtcaacctgattgccccaagaataatggcgagtatgacggggctcgtggcttcgggcatgacgctggaaaaatatatcaccgtcctttggatggcgggcggattgttaggtctgtacctgacgcgcatcctgttccggtttttatccaactactgctcgcacagggcggcgtggcggcttgtgcttgaactgcgggtaaaagtttataacgcgattcaatctttttccatggactattttcacaacaagcaaaccggcgaccttttgagccgcgtaatgaacgacgtggcgacatttgagttaatatacgcccacataacacccgatgttattacaaattttgtcaccctcacgggcgtaacgattatcctttttaatttaaacgcccgtctcgcgcttatcacctgtatccccattccgttcattctgttgtcaggctggtttttcagccgcaaagtgcgtccaaattttcagaaaacgcaaaaatcacagggggaattatccgcgcagttacaggataatttatcaggcatacaggagatacaggcttttggacgccaaacttacgcgtcagaaaaagtattaaaaaaaggcagggactttacacataatatgctgcgcgccttaaagttaagcgccatatttcatccgagcgtggagtttttaacttccattggcactgttattgtcgtgggcttcggaggatttctggcgtataaaaatcagctttccgtttctgaaattgtcggcttccttctttaccttgcccttttttacgcgcccattacaggcatcgcccagcttcttgagtcggcccagcaatcgcttgccggcgcggagcgtgtgatcgaaattttagacgcgcctcagagcgtcagggacaaacccgattccaaatcaatcggaaaagtgaatgggcaaattacatttgagaatgtcagtttttcctatattcaggacgttcccgttcttaacaacgtatcatttgacattaaacccggtcaaatggcggcgtttgtgggagcgacgggcgtgggaaaaaccacgttgagcaaacttatatcaaggttttatgatcctacgggcggaaagatttgccttgacgggcatgatctccgggacattactttagaaagcctgagaacgccaatatttctttggttatgcaggacacttttttattaa

SEQ ID NO: 34712 - protein, 424 aa, Unknown
  Obtained from environmental sample
  DOMAIN (18)...(292): ABC transporter transmembrane region
  misc_feature (1)..(424): Xaa is any amino acid
MKTLLRIAKEAVRYKGWLLLSIFGTLMMTTVNLIAPRIMASMTGLVASGMTLEKYITVLWMAGGLLGLYLTRILFRFLSNYCSHRAAWRLVLELRVKVYNAIQSFSMDYFHNKQTGDLLSRVMNDVATFELIYAHITPDVITNFVTLTGVTIILFNLNARLALITCIPIPFILLSGWFFSRKVRPNFQKTQKSQGELSAQLQDNLSGIQEIQAFGRQTYASEKVLKKGRDFTHNMLRALKLSAIFHPSVEFLTSIGTVIVVGFGGFLAYKNQLSVSEIVGFLLYLALFYAPITGIAQLLESAQQSLAGAERVIEILDAPQSVRDKPDSKSIGKVNGQITFENVSFSYIQDVPVLNNVSFDIKPGQMAAFVGATGVGKTTLSKLISRFYDPTGGKICLDGHDLRDITLESLRTPIFLWLCRTLFY

SEQ ID NO: 34713 - DNA, 1572 bp, Unknown
  Obtained from environmental sample
  misc_feature (1)..(1572): n is a, c, g, or t
ttgaccatcattgtgttgtcaacgaccagtattattatcatggaaagcgtcagccataaaaccgccgttctaatgggaacagaaaaaatcaaaagcgacatagcggcttttaaattaatgatagaaaacgagcacggctccttatacctcaaggacggcgatttggtagatcaacagggtagttgggtatcaaataattatgaaattgttgacaaagcatccgcaacgatgaatattttagcgaccatttttatcgccgataaaggtgattaccgcagaataaccaccagcattaaagacgcttcgggaaatcgcgcggtaggtacctatctgggatcgaacagcgcggcatatccgtacattcgggacggaaaagaatatataggaaacgcggttattctgggtaaaaaataccttgccgcgtattatccgttatttcaacccaataccaaagaggttataggcattttatttatcggcacagaaatgtcgtctatagaaaaaacgatttcacagaacagccgtatagcgataataataatccttttaatcgcggtggctcttgtagttatttcaattctgttaacatcatttggcagcaagtattttattgtaaacccaatcattaaagtagcccgcgttattaaaattgtcgccgatggtgatttgacatgtaaaacagatgtcaataccaatgacgaaataggcgatcttgccgatgactttaatcatatggtaagaaacatgagagagcttatagggacaatgaaacaaaagatcgacgcgctgaccaataccgggtttgatgatatgagaaacaaaatgatcaagcagacagaaagcgccgccgaagcggataaagcggttgcaaagataaaagacaacattgacaacatgagcaggcagatagatgaacagtccgccagcatcaatacttcgtcttccgcggttgagcaaatgaccgctaatattcattcagtaagaaacacccttttaaaaaacagcgaaaatgtcgacgaattgacaggagcgtccgagaacggaaaagtaggagttcaggcggttgcggaaaaaatacaggaaatagtgcgtcaatccgaaggacttttggaaataaacgcggtaatggaaaacatagccgcccagacaaacctgctttcgatgaacgccgctattgaggcggcgcacgcgggggaagtgggaaaagggtttgccgttgtcgccggtgaaatccgaaaacttgccgaatcgtcaagcgcgcagtcaaaatcaaccgcgagtatgttaaagaaaataaaagcgtccatagacggaataaccgcggcttccaacgatgttctttcacgctttaatgttattgatgagaaagtacaaacagtttcatcacatgaggtaaatatccgtaaagcgatggaagaacaggaagtaggcgggaagcagatactggaatcaatggaccgcctgaaaganatcaacgtaacggtaaaagagagcgcgggtgaaatgcttgaaagcggcgataacctgagccacgagaccagtgattntataaaacaagncatgagtcgatga

SEQ ID NO: 34714 - protein, 523 aa, Unknown
  Obtained from environmental sample
  DOMAIN (290)...(523): Methyl-accepting chemotaxis protein (MCP) signaling domain
  misc_feature (1)..(523): Xaa is any amino acid
MTIIVLSTTSIIIMESVSHKTAVLMGTEKIKSDIAAFKLMIENEHGSLYLKDGDLVDQQGSWVSNNYEIVDKASATMNILATIFIADKGDYRRITTSIKDASGNRAVGTYLGSNSAAYPYIRDGKEYIGNAVILGKKYLAAYYPLFQPNTKEVIGILFIGTEMSSIEKTISQNSRIAIIIILLIAVALVVISILLTSFGSKYFIVNPIIKVARVIKIVADGDLTCKTDVNTNDEIGDLADDFNHMVRNMRELIGTMKQKIDALTNTGFDDMRNKMIKQTESAAEADKAVAKIKDNIDNMSRQIDEQSASINTSSSAVEQMTANIHSVRNTLLKNSENVDELTGASENGKVGVQAVAEKIQEIVRQSEGLLEINAVMENIAAQTNLLSMNAAIEAAHAGEVGKGFAVVAGEIRKLAESSSAQSKSTASMLKKIKASIDGITAASNDVLSRFNVIDEKVQTVSSHEVNIRKAMEEQEVGGKQILESMDRLKXINVTVKESAGEMLESGDNLSHETSDXIKQXMSR

SEQ ID NO: 34715 - DNA, 471 bp, Unknown
  Obtained from environmental sample
  misc_feature (1)..(471): n is a, c, g, or t
atgncttgttttatanaatcactggtctcgtggctcaggttatcgccgctttcaagcatttcacccgcgctctcttttaccgttacgttgatntctttcaggcggtccattgattccagtatctgcttcccgcctacttcctgttcttccatcgctttacggatatttacctcatgtgatgaaactgtttgtactttctcatcaataacattaaagcgtgaaagaacatcgttggaagccgcggttattccgtctatggacgcttttattttctttaacatactcgcggttgattttgactgcgcgcttgacgattcggcaagttttcggatttcaccggcgacaacggcaaacccttttcccacttcccccgcgtgcgccgcctcaatagcggcgttcatcgaaagcaggtttgtctgggcggctatgttttccattaccgcgtttatttccaaaagtccttcggattga

SEQ ID NO: 34716 - protein, 156 aa, Unknown
  Obtained from environmental sample
  SIGNAL (1)...(25)
  misc_feature (1)..(156): Xaa is any amino acid
MXCFIXSLVSWLRLSPLSSISPALSFTVTLXSFRRSIDSSICFPPTSCSSIALRIFTSCDETVCTFSSITLKRERTSLEAAVIPSMDAFIFFNILAVDFDCALDDSASFRISPATTANPFPTSPACAASIAAFIESRFVWAAMFSITAFISKSPSD

SEQ ID NO: 34717 - DNA, 390 bp, Unknown
  Obtained from environmental sample
  misc_feature (1)..(390): n is a, c, g, or t
gtgctgaacgagaaagacgaagaagcgcggctgactaccagcgcctatcgagtcgccgaaggcggcatggaacatgtcatcgtgcgaaaaataggcaacacggccggatttataaaagacgcggcaaaaaaaattcttgttatcggaaccgacatccgggcgcggcgacgcattggcgatctttccggtattgcgaaagactgggcggcaaagacaggcattgaacggcccggagtcgcgcttgctcttggaaacgaagaaaccggccttccgaaaaatataaaagacaactgttcctgcctgcttcgcatccccgggacaggcaatatcgaaagcctcaatgtcgcccaggcggcggctctttttttaagggaaatttacgatttgtag

SEQ ID NO: 34718 - protein, 129 aa, Unknown
  Obtained from environmental sample
  DOMAIN (2)...(124): SpoU rRNA Methylase family
  misc_feature (1)..(129): Xaa is any amino acid
MLNEKDEEARLTTSAYRVAEGGMEHVIVRKIGNTAGFIKDAAKKILVIGTDIRARRRIGDLSGIAKDWAAKTGIERPGVALALGNEETGLPKNIKDNCSCLLRIPGTGNIESLNVAQAAALFLREIYDL

SEQ ID NO: 34719 - DNA, 672 bp, Unknown
  Obtained from environmental sample
  misc_feature (1)..(672): n is a, c, g, or t
ttgtttactaataataacggggaaacccgctctgacaacatttccagggaatcttcgattcccaaggaaacttcggtttccaaggagacttccataggggggggccgcgcggagtttcgtaaactctatgaaacggtatttcctatcctgttcaggatagcataccgcattacttccagcgaagaagccgccgaagatctgtgtcaggaagctttcttccgtctgcacgagaaagaaatggtctttcccaaccccgatgaagccaagtactggctgatcagggtggtaaagaacgcctccctgaattacgccagacgaagggtaagggagcgaaacgcatatcagaaggctttcagggaaaatgtaagaaccgtagaaacgggggaaaacctacttgtcaggaaagaaacccggcaggaagttaaggaagcccttgagaaattgccggaaaaccttcgtatcgtaatgatattgaaggagtacggcgacctgaactacaaagaaatagggcgtacccttggaataagcgaggggaacgtcaaagtccgggtgttccgtgcacgggagcgcctggcgggattattaaatgccgaaacccgccttgccctatccgaagcggaagattccggcgagaatgacggtattagtaaggaaggtgtgcatgtgtcctga

SEQ ID NO: 34720 - protein, 223 aa, Unknown
  Obtained from environmental sample
  DOMAIN (144)...(193): Sigma-70, region 4
  misc_feature (1)..(223): Xaa is any amino acid
MFTNNNGETRSDNISRESSIPKETSVSKETSIGGGRAEFRKLYETVFPILFRIAYRITSSEEAAEDLCQEAFFRLHEKEMVFPNPDEAKYWLIRVVKNASLNYARRRVRERNAYQKAFRENVRTVETGENLLVRKETRQEVKEALEKLPENLRIVMILKEYGDLNYKEIGRTLGISEGNVKVRVFRARERLAGLLNAETRLALSEAEDSGENDGISKEGVHVS

SEQ ID NO: 34721 - DNA, 813 bp, Unknown
  Obtained from environmental sample
  misc_feature (1)..(813): n is a, c, g, or t
ttgaagatcatttcccggaaggttcacgccatgtacggccgcctgtattcctgcctgatggatgaaatttttccgggccttgccaagaacggccttagacttgtcagcccggattcctacaccgtcccgcaaatggattatctggaatctttttttatcagagagatatacccggttctcactcccctgcgtattgaggatgacaagcccctgcctttttttgaaagccgctgcataaacgccgctttccttttaataccggatgacgcttcagtcatggatcaggaacgcattgtcatggtacagatcccctcttcgctcagccggatcgtctggctgcccgccgaagaagacacgctccgctgggcgctgttggacgatataatgctaacatgggggggatacctgttccccggttacaatgtcaaagaaagcatgttattcaaggtaaaccgtgacgctgatttttccgttgacgaacgcagggacgaggatttcattgaggcaatggcggaagtaattgaaggcagggaaaaatcggcgcccgttaacatgatcttttctccgggctcaggcagattaagggacgagttggcaaagcggtttgttctggaaagagatgacctgtacgagcttgagggccctttccatcccggcggtctggctgaattggcgggcgtagccggtttcgaggaactgcatgagaaagcctggaaaatacatccagctcccggttttaccgatgaagtgtcgatctgggaccgcctcagccagggcgatgttatgcttcatttttccctaccagtcatttga

SEQ ID NO: 34722 - protein, 270 aa, Unknown
  Obtained from environmental sample
  DOMAIN (1)...(269): Polyphosphate kinase
  misc_feature (1)..(270): Xaa is any amino acid
MKIISRKVHAMYGRLYSCLMDEIFPGLAKNGLRLVSPDSYTVPQMDYLESFFIREIYPVLTPLRIEDDKPLPFFESRCINAAFLLIPDDASVMDQERIVMVQIPSSLSRIVWLPAEEDTLRWALLDDIMLTWGGYLFPGYNVKESMLFKVNRDADFSVDERRDEDFIEAMAEVIEGREKSAPVNMIFSPGSGRLRDELAKRFVLERDDLYELEGPFHPGGLAELAGVAGFEELHEKAWKIHPAPGFTDEVSIWDRLSQGDVMLHFSLPVI

SEQ ID NO: 34723 - DNA, 720 bp, Unknown
  Obtained from environmental sample
  misc_feature (1)..(720): n is a, c, g, or t
atgaacgaattatttgagtttaaagcctcaggctcagggtacaccgttaagcagtttaccaacagtaaggagcgctccagcaagttttactttactacagagagctttacatcggatgacaagtatttcttttatgtacgcgcacaggacggcaagccggggatttaccgcgtggaatacgccacaggaaaccaggagaaggttctcaacgaagaatatacgaatttcggaatggattataacaacgattgcgcctatgtgcgtaaaggcgattccgtctataggtttgagacttttaccggcaaattgacggaagtcggaaccttgccgcccggacgctgtaccggccatttttcggcatccaaatcgggacttatatggagctcttaccaactggcctgtaaaatctacgcactggttgtgcttgatccaaagaagggtacaagcgaggttgtctggaaagacgaccacgttcttgggcattgccaggcctgccccggcgacgacgagactgttatgtacattcacgaaaccacaggcgacaccttacagcggatatggatgtttgactatcccacacgcacagtacgtccgtattacgttgaaaaagaaggcgactggattacccacgaggtgtggacagccgacgggaattatctgtattttacgcgctaccctacccaactaatacgcgggacaagggacggccacaatttttaa

SEQ ID NO: 34724 - protein, 239 aa, Unknown
  Obtained from environmental sample
  misc_feature (1)..(239): Xaa is any amino acid
MNELFEFKASGSGYTVKQFTNSKERSSKFYFTTESFTSDDKYFFYVRAQDGKPGIYRVEYATGNQEKVLNEEYTNFGMDYNNDCAYVRKGDSVYRFETFTGKLTEVGTLPPGRCTGHFSASKSGLIWSSYQLACKIYALVVLDPKKGTSEVVWKDDHVLGHCQACPGDDETVMYIHETTGDTLQRIWMFDYPTRTVRPYYVEKEGDWITHEVWTADGNYLYFTRYPTQLIRGTRDGHNF

SEQ ID NO: 34725 - DNA, 561 bp, Unknown
  Obtained from environmental sample
  misc_feature (1)..(561): n is a, c, g, or t
atgatgtcgtcacaagaatcaaacgcagttatggagaaagcaaaaaaagacggcgccaataaattcctcgccaaaccgctgtttccgtccgcagtaatcgacattgtcaatgactgtgtcgacccggaccaggggcaggcggaagacacgcaggaaaatactccccagtttgagggatgccgtatcctgcttgtggaagatgtcgaaattaaccgtgaaattgtgctggctctgcttgaacccatgctcatcgatgtagattgcgcggaaaacggcatggaagctgttcgtaagtttagcgaagctccggataagtacgatatgatctttatggatctgcaaatgccgcaaatggacggatatgaagcaactcagcgtatccgggcgttcgacacaccgaaagcgaaagaaattccaattatcgccatgaccgcgaacgtgttccgtgaagatatcgagaggtgcctgtctgttggcatgaacagccacatagggaagccgctaaatttcaacgatgttttggagaaactgcacagctttatacctagcgccaaatcgtag

SEQ ID NO: 34726 - protein, 186 aa, Unknown
  Obtained from environmental sample
  DOMAIN (60)...(178): Response regulator receiver domain
  misc_feature (1)..(186): Xaa is any amino acid
MMSSQESNAVMEKAKKDGANKFLAKPLFPSAVIDIVNDCVDPDQGQAEDTQENTPQFEGCRILLVEDVEINREIVLALLEPMLIDVDCAENGMEAVRKFSEAPDKYDMIFMDLQMPQMDGYEATQRIRAFDTPKAKEIPIIAMTANVFREDIERCLSVGMNSHIGKPLNFNDVLEKLHSFIPSAKS

SEQ ID NO: 34727 - DNA, 1047 bp, Unknown
  Obtained from environmental sample
  misc_feature (1)..(1047): n is a, c, g, or t
gtggactgggatcgtgaacgcttcaccatggacgaagggctttccagggcagtgcgcgaggtctttgttacgctttacgagcgtgatcttgtctacaagggaaagtaccttgttaactggtgcagcacatgcggaaccgctatcgctgatgacgaagttgagcatgaagatacgccgggtaagatgtaccatctccgctaccccttcgctgatggcagcggttttgtggagcttgccaccacacggccagagacgctgttgggagataccgccgtggcgtttcatcctaaagacgagcgctacacaaatctggaaggcaagatgctccgccttccccttaccgaccgcgagattccctttgtggcggactcttacgttgaccgcgatttcggtaccggcgttgtgaagatcacccccgcgcacgatcacaacgactgggagcttgcccgccgacacgacctgcctgtattaaacattctgaccagcgacgggcggctgaacgacgctgtaccggaaaagtaccgttcgttaaaagtgatggaagccagggaaaaagtccttgaagacctcaaggccgaaggtttttatataagggaagaaacgataacccacgcgattggctgctgttaccgttgccatactgtaatcgagccgtacctttcggagcagtggttcgtcaggatgaagccgcttgcggacaaggcgctggcagcatggcggagcggggaaattattttcttcccaaagaagtgggaaaatacctatgagcactggctggaaaatatccgggactggtgcgttagccgccagctttggtgggggcatcgaattcccgcctggtattgcggcgattgcggtaaaacctcagtctcccgtaccgacattgcggcttgccccactgcggctccaataatattgagcaggatcccgacgtgctggacacatggttttccagctggctctggcccttcaccgttatgggctgggaaaacgacaaatgcgataccgaagatttccgtcgctattatccaaccacggcccttgtga

SEQ ID NO: 34728 - protein, 348 aa, Unknown
  Obtained from environmental sample
  DOMAIN (1)...(339): tRNA synthetases class I (I, L, M and V)
  misc_feature (1)..(348): Xaa is any amino acid
MDWDRERFTMDEGLSRAVREVFVTLYERDLVYKGKYLVNWCSTCGTAIADDEVEHEDTPGKMYHLRYPFADGSGFVELATTRPETLLGDTAVAFHPKDERYTNLEGKMLRLPLTDREIPFVADSYVDRDFGTGVVKITPAHDHNDWELARRHDLPVLNILTSDGRLNDAVPEKYRSLKVMEAREKVLEDLKAEGFYIREETITHAIGCCYRCHTVIEPYLSEQWFVRMKPLADKALAAWRSGEIIFFPKKWENTYEHWLENIRDWCVSRQLWWGHRIPAWYCGDCGKTSVSRTDIAACPTAAPIILSRIPTCWTHGFPAGSGPSPLWAGKTTNAIPKISVAIIQPRPL

SEQ ID NO: 34729 - DNA, 1071 bp, Unknown
  Obtained from environmental sample
  misc_feature (1)..(1071): n is a, c, g, or t
atggaaaatgatttaagcggggctaaatcaggaggtatagataaagtaatactttcggcgcaagactttacaggctgcaaaggagcggaaggttcccatgcttataaactgaacggtttttactatttgtttcttatagcgtttgaatcgggcagaagagttgagctgtgttacagggcatccagtcttgaaggtctatgggaaggcaaaaaaatactggacaagggattgggcgtaagaattgatggagtcgcccagggcggcattgtcgagactccttacggtgactggtacggcttcttttttcaggatcgcgatgctgttggccgcgttcccgtactggttcccatgcgctgggataacgaactatggcctgtatttggcgattcaaacggcaatataccggtggaattggaaattaagcaagctcaggattatgggcaaaatctgtatgtttcagatgaattcaacagtgataaactgcaacttgcctggcagtggaatcataatccggataacgccaattggtcgctgagcaagaggccgggatatttgcgattgaaaacaggaagaaccagcagaacaatttaccacgcgaggaatacgctcacccaaagaacatttgagcctgcctgtgagggaatagccgctttggagccggtgaacatgaaagacggcgacagggccggtcttgttttgttgcaggctgtttccggatttgtcggaattgaacaggaaggcgataaaaaatatattgtgatgtataccggtgataatgaaaacaacaagggaatgaacgcagccgaaaccagacaggtccagcttccgtttacaggcggcagaatatatttgaagatcaattgccggtccattacagataccaatacagaagaaaaagcggcattttcgtacagttttgacggaacaaactggcataacatagggatcgatttaaatatgagatggacaatgacgcattttacaggcgcgcgttttggcttatttaattatgcggcaagaacagcgggcggatatgtggattttgactttttccgtgtgatacagggttaa

SEQ ID NO: 34730 - protein, 356 aa, Unknown
  Obtained from environmental sample
  misc_feature (1)..(356): Xaa is any amino acid
MENDLSGAKSGGIDKVILSAQDFTGCKGAEGSHAYKLNGFYYLFLIAFESGRRVELCYRASSLEGLWEGKKILDKGLGVRIDGVAQGGIVETPYGDWYGFFFQDRDAVGRVPVLVPMRWDNELWPVFGDSNGNIPVELEIKQAQDYGQNLYVSDEFNSDKLQLAWQWNHNPDNANWSLSKRPGYLRLKTGRTSRTIYHARNTLTQRTFEPACEGIAALEPVNMKDGDRAGLVLLQAVSGFVGIEQEGDKKYIVMYTGDNENNKGMNAAETRQVQLPFTGGRIYLKINCRSITDTNTEEKAAFSYSFDGTNWHNIGIDLNMRWTMTHFTGARFGLFNYAARTAGGYVDFDFFRVIQG

SEQ ID NO: 34731 - DNA, 441 bp, Unknown
  Obtained from environmental sample
  misc_feature (1)..(441): n is a, c, g, or t
atgaaaaaagcgcattttattcccgaaaccatgtccgccctgaaagcgtttgaatctttcaaacacggagacgtcaattttctttttgtaatggacgaatacggagggttatccggagtaatctcgatcagggcgttagttgaagaaattgtcggcgaactttcagcgtctgtaaaaaaggatgaacctctcgccaaacaggaagacggaagctggcttgcggacggcacgttaaatattgacgacgctgcaaaggcgctttcccttgccgatcttcacgaaaaaggcgattttcacactcttgcgggttttattctttcacttgcgggagaactgcctcacgccggagacagttttacttatgagagatactgtttccttgtaaaagagatggacggcaacaggataaacaagatattgattagcggtatcgaaaattaa

SEQ ID NO: 34732 - protein, 146 aa, Unknown
  Obtained from environmental sample
  DOMAIN (65)...(145): Transporter associated domain
  misc_feature (1)..(146): Xaa is any amino acid
MKKAHFIPETMSALKAFESFKHGDVNFLFVMDEYGGLSGVISIRALVEEIVGELSASVKKDEPLAKQEDGSWLADGTLNIDDAAKALSLADLHEKGDFHTLAGFILSLAGELPHAGDSFTYERYCFLVKEMDGNRINKILISGIEN

SEQ ID NO: 34733 - DNA, 963 bp, Unknown
  Obtained from environmental sample
  misc_feature (1)..(963): n is a, c, g, or t
atgcaccacttcatgacgagcgcgatcgccaaccgcgccaccgcctacttccgtatggaggggagcgagcctttggccgtgatcacgacgaagcgcacgctccgctacggtttccttgacggatccaccacctacgagcaggtccgcaagctgtcgcccgatccgtttgaggccgctttcgttaccgagtacagcgatgcccgcgatatgctcaagaacggaaagatcgacgcgttcttcgaggagagtaccgctaaggtggtcttcgacgcctacggcgggataacgtcgagcatattcctgccgcttatatacgaaccggtctcgctctgcacgcagacccgtgagttcgcgcctattatttccgttatggaaaaattcctgaacaacggcggacggagctacttcgccgcgctctacagccgcgggttgcaagattacaattcgcgcaagctatatcttctcctcaccgaagaagagaaagagtacgtcaggacgcatcataccgtattgtacgccgccgagcacgataactatccgttctccttctacaacgcaaccgaaaaacagtggcaggggatagctctcgacattctgcacgaggtggagaagctcacggggatcaccttccgcatcgctaatgacgataagaccgagttccgcgagctgatcaagatgcttgaggccggagaggtctcgctcgtcacggagctggtgcgcacgagcgaccgggccggaaggttcttgtggcccaacacgcccatgctcctcaataggttcgctctcgtctcgaggctcgactaccaagacgtaaatataagcgaggtattcgacaagcgagtgggcataatggtcggtacagtctacgaggaatgttcagaagatggttcccccatcatccgcatacgtttgaatacgggcacacaaacgacctctttcgagcgctggaacgcggcgacgtga

SEQ ID NO: 34734 - protein, 320 aa, Unknown
  Obtained from environmental sample
  misc_feature (1)..(320): Xaa is any amino acid
MHHFMTSAIANRATAYFRMEGSEPLAVITTKRTLRYGFLDGSTTYEQVRKLSPDPFEAAFVTEYSDARDMLKNGKIDAFFEESTAKVVFDAYGGITSSIFLPLIYEPVSLCTQTREFAPIISVMEKFLNNGGRSYFAALYSRGLQDYNSRKLYLLLTEEEKEYVRTHHTVLYAAEHDNYPFSFYNATEKQWQGIALDILHEVEKLTGITFRIANDDKTEFRELIKMLEAGEVSLVTELVRTSDRAGRFLWPNTPMLLNRFALVSRLDYQDVNISEVFDKRVGIMVGTVYEECSEDGSPIIRIRLNTGTQTTSFERWNAAT

SEQ ID NO: 34735 - DNA, 705 bp, Unknown
  Obtained from environmental sample
  misc_feature (1)..(705): n is a, c, g, or t
atggagcgtcgtcaccgctggcggcggcacgataaccagcgccggcgtctatacggcccccgctacgacgggcacctacacaatcagggccacaagccaggccgacaccacgaagagcgacacggcgactatcacggtggtgaaccccgtctcggtgagcgtcgcccccaagaccgtctcgctgataactggcgagacgcacacgttcaccgcgacagtgaccggcggcaccactggcaacacggcggtggcatggagcgtcgtcacatcaggcggcggcaccataaccaccgccggcgtctatacggcgccttcaaccgccggcacatacacaatccgcgccacgagccaggccgacacaacaaagagcgacacggcgaccatcacggtggtgaaccccgtctcggtaagcgtcacaccagaggcggccaccctgacaacaggcgggacacagcagttcacggcaaccgtcacgggcggcactgccggcaacacagccgttatctggacggccagcggcggcacggtgacacagaccggcggatataccgcgccgacaaccaagggcgcctacaccgtcacggccaccagccaggcggacgcgtcaaagagcgacacggcgactgtcacagtcaccgccgacaacgtgccagtcacgggtgtgtccctcgacaagacatccatgtccctgaccaccggcgatag

SEQ ID NO: 34736 - protein, 234 aa, Unknown
  Obtained from environmental sample
  misc_feature (1)..(234): Xaa is any amino acid
MERRHRWRRHDNQRRRLYGPRYDGHLHNQGHKPGRHHEERHGDYHGGEPRLGERRPQDRLADNWRDAHVHRDSDRRHHWQHGGGMERRHIRRRHHNHRRRLYGAFNRRHIHNPRHEPGRHNKERHGDHHGGEPRLGKRHTRGGHPDNRRDTAVHGNRHGRHCRQHSRYLDGQRRHGDTDRRIYRADNQGRLHRHGHQPGGRVKERHGDCHSHRRQRASHGCVPRQDIHVPDHRR

SEQ ID NO: 34737 - DNA, 942 bp, Unknown
  Obtained from environmental sample
  misc_feature (1)..(942): n is a, c, g, or t
ttggagatttcatcataccatttgcgtatagggccaatcgccggcggtgatattgacgaggcgagaaaagcggttttggccgttccgggaataaaggccgccatgtcttttcaggagttccatggccttgtccagggaaggaggggagggcagcaggctgccgttatccggggcttgccttcggatgccatggagatggatgcggatatggcgggccgcctcagctttgaagaaggctctttcggttttgaaaacaaaaatgacgcgcttttgggcgcggaacttgcccggcggctggggctaagaaccggcgatgaaattaccctgttctccatcccgtcaatttttaacgctgccggcggcaacatagttgccgatgacagttccggtttgcagatttttaccgtcaccggcatattcagaacaggtttttatgaatatgacacaagttggattttcattgatattgacagcgcggcggctttttccgaaaacagccctgttctgggcatcaagctgaaaaaccgcttccatgaccagcaggtccttgagctggcccgtaagaacctggagaacaacacagcttttgccggggctgccttttcaagctggcgcgattacaaccgttcgttttttggagctcttcgtaccgaaaagctgttcatgtttatactggtggggctgatctttatcgtggtagcgctgaacatctaccaggctcagcggagatcggtgctggaacaccgcgaggaaatagggctgctgcgggctataggcggcgggaaacacggcgtacagcttgtttttgtattggacggcgcgatcatcgggctttccggggcttcggcaggtttgtgttttgggctgcttatcgcttccaatattcccccgttttttttccgccatagaagcgattgtaaaattcagcatcaatattgttaa

SEQ ID NO: 34738 - protein, 313 aa, Unknown
  Obtained from environmental sample
  DOMAIN (166)...(297): Predicted permease
  misc_feature (1)..(313): Xaa is any amino acid
MEISSYHLRIGPIAGGDIDEARKAVLAVPGIKAAMSFQEFHGLVQGRRGGQQAAVIRGLPSDAMEMDADMAGRLSFEEGSFGFENKNDALLGAELARRLGLRTGDEITLFSIPSIFNAAGGNIVADDSSGLQIFTVTGIFRTGFYEYDTSWIFIDIDSAAAFSENSPVLGIKLKNRFHDQQVLELARKNLENNTAFAGAAFSSWRDYNRSFFGALRTEKLFMFILVGLIFIVVALNIYQAQRRSVLEHREEIGLLRAIGGGKHGVQLVFVLDGAIIGLSGASAGLCFGLLIASNIPPFFFRHRSDCKIQHQYC

SEQ ID NO: 34739 - DNA, 858 bp, Unknown
  Obtained from environmental sample
  misc_feature (1)..(858): n is a, c, g, or t
atgcagggcggcgccattacaccaagttccggcaccaatgccaatggaacggaatattatcttgacggcggcaacccgcccactactacccctccgaacccggtcatgcccgctaaccttacgggcatacagggtattaccgccaactcgacatcggcgggcaactgggccgctttggactatacttcccagggctatccggtaatagcctacttcgatgatcagaatcaaacgctccggcttatttatgccaacagtgataaccccaccgccggcaataactggacgcggcgttatgtgcttccgaccaccggcgctggcagcgaattgcgccagggttcaggttcatacgtcagcatggcgattgaccgcagaaacggcgctaaccgggtccacctggctttctacaacagcaccaacaaagcggttgtttacgcgacagcgccaagtccgagtgaaacctttaccgccagcgtcatagacctggtggttgagggcggccaatggacggatatatcggtagacagttccggcaatccctggattacctacgcggactcatcccgtacaggaaacacggacggcgtgcgcattgcgtacaagagcaataataccgataccggtcgctttaccaggacaaataccgacccgataacaaaaacggacattacaggctgggaagccatgaccatgccggcgagatacctggtgaacaatgaccgccttaacatagcggcctggccgcccgccggttacacaggcaccgctgccaccagccccattggcgactggaacgccgcggtcggctacgccagcgacctgtacaggatcgggtacttcttctatcccngggtttaa

SEQ ID NO: 34740 - protein, 285 aa, Unknown
  Obtained from environmental sample
  misc_feature (1)..(285): Xaa is any amino acid
MQGGAITPSSGTNANGTEYYLDGGNPPTTTPPNPVMPANLTGIQGITANSTSAGNWAALDYTSQGYPVIAYFDDQNQTLRLIYANSDNPTAGNNWTRRYVLPTTGAGSELRQGSGSYVSMAIDRRNGANRVHLAFYNSTNKAVVYATAPSPSETFTASVIDLVVEGGQWTDISVDSSGNPWITYADSSRTGNTDGVRIAYKSNNTDTGRFTRTNTDPITKTDITGWEAMTMPARYLVNNDRLNIAAWPPAGYTGTAATSPIGDWNAAVGYASDLYRIGYFFYPXV

SEQ ID NO: 34741 - DNA, 651 bp, Unknown
  Obtained from environmental sample
  misc_feature (1)..(651): n is a, c, g, or t
atgccggcaaaagcgcccgtgaagaaaacaacaagaaccccaggcggccataaaaccaatagtttaaagcctgttaaaaagacggtaaaaaaaacgcctaaaaaggttacattggacgatttattaaaatctcaggatgaggcttggaaagccataagggaaactgaggaatcctttaaaaaatttcaagatgagacccaaaaagccagggacgaggcatgggcagctataaaagaaacccaaaaaaacataggcggcctaaacaacacattaggctctatggttgagcatatactgacccccggactcccccaaaaattcaaaaaattaggctacacctttaaccgcatagccacttataaatttgcggaaggcgtctacgcccaaattgacggtatgcttgaaaacggcacacaggcggtcgcggtggaagtaaaaaccaccctgcggcaaggagatatagacgaccacctcttacgcatggaaaaaatacggaaacacgccgatgagcacggcgataaaaggcagttcatgggggctatggcggccaccattgcggacgaaaccacaaaaaattatgccctgaaaaaagggctttttgtcatagaaccctctggcgaagatgttaaggttacaaaaccggagnaatga

SEQ ID NO: 34742 - protein, 216 aa, Unknown
  Obtained from environmental sample
  misc_feature (1)..(216): Xaa is any amino acid
MPAKAPVKKTTRTPGGHKTNSLKPVKKTVKKTPKKVTLDDLLKSQDEAWKAIRETEESFKKFQDETQKARDEAWAAIKETQKNIGGLNNTLGSMVEHILTPGLPQKFKKLGYTFNRIATYKFAEGVYAQIDGMLENGTQAVAVEVKTTLRQGDIDDHLLRMEKIRKHADEHGDKRQFMGAMAATIADETTKNYALKKGLFVIEPSGEDVKVTKPEX

SEQ ID NO: 34743 - DNA, 1080 bp, Unknown
  Obtained from environmental sample
  misc_feature (1)..(1080): n is a, c, g, or t
atgcggagcggttccgccaatttcagcttccccgtgaaactcagtggtacgccggacggcccgaaagtgtactatgtgcgcgcggtagacacaaccggcgccctcactgtgaagtcatatatgtttttaatcaggaataacgccccttcgctggaagtatatacccccgcgcccggcgagatagtatccgattcatttatgctgtccggcagagccgaatacagaggcggtattacaaagttatcctatgaatggggcaagataaaaggggacattactttacgccccggcgatccctattggagcatcccgctcactgtcgccaaaggcgcttccggaaatatcaaggtgacagcgaaggacaagacgggaaaaaccgtcaacgtaacccgcaaagtggagctccacactacaggcggcggcgctgatataccccgccaaaccaatatccaatttgttttcccgacaagaaatgaaattgtacgcggcggcaagaccgttcttggctttatagaacaccctgttccgattcagaccattgcctactcccagaacgggtttcaattccaggaagttccctttgtctcgcgggcgggaaaggcatggttcagttattactgtgacttttccacgtttaaccccctgtcggacagattgtctttccgttttaccgatgtcaacggggccaatattgacaaggcccccgaatacacgcttgcctctgaagagtctgacggtgttgtccccaggcttatccttaacacgcctttggacggcgaggttattacgggcccttttgacatcaccggaatcgcgtccggagccagcatagaaaccgtccactggcgcttcctcgggccgaaactggaatccataacaaaaggggaagccggcaagacggccacggaagcagccagggcgtttatggcgaattccaatcccccattcgaagaaaaaaccacaaggcagaatattactattcccattgactttaccatgatcaccgacggcgaatacaactgcgaggtgtatgtccagacccgcgacggggtgaaaagtgaaaccgtgtaccgtcaataa

SEQ ID NO: 34744 - protein, 359 aa, Unknown
  Obtained from environmental sample
  misc_feature (1)..(359): Xaa is any amino acid
MRSGSANFSFPVKLSGTPDGPKVYYVRAVDTTGALTVKSYMFLIRNNAPSLEVYTPAPGEIVSDSFMLSGRAEYRGGITKLSYEWGKIKGDITLRPGDPYWSIPLTVAKGASGNIKVTAKDKTGKTVNVTRKVELHTTGGGADIPRQTNIQFVFPTRNEIVRGGKTVLGFIEHPVPIQTIAYSQNGFQFQEVPFVSRAGKAWFSYYCDFSTFNPLSDRLSFRFTDVNGANIDKAPEYTLASEESDGVVPRLILNTPLDGEVITGPFDITGIASGASIETVHWRFLGPKLESITKGEAGKTATEAARAFMANSNPPFEEKTTRQNITIPIDFTMITDGEYNCEVYVQTRDGVKSETVYRQ

SEQ ID NO: 34745 - DNA, 558 bp, Unknown
  Obtained from environmental sample
  misc_feature (1)..(558): n is a, c, g, or t
atgcgcgttcctcctccgttattggtacacagactcgacaaggatacatcgggcattatcctgacggcaaaaacaagggaagcagccgcaaaattttcccaactgcttggaaccggcagacagtctgtaaaacagtacatcgcagtttgcttgggatgccccgcaaaaaaagaaggcgttattaatttgaaaattcccgttcacggcagtatgaaaagctctaaaacgagttacaggataattaagagccggaaattacctgatatggatttttctgttcttgaacttgaacttggttccggaagaatgcatcaaatccggcgtcaccttgccatgattggaaatcccgtactgggagatgacaagtacggcgattttacgctgaataaaaaattgcgtaaaacaggcgttaagcgccttctcttgcattcgtcacggctgattattaaagatgagattaaccttaatctcattgcgcccttgccaggttattttcactcgtttctggataataatgacaatgacgccggcggcagtgttgtcatatccgctgattga

SEQ ID NO: 34746 - protein, 185 aa, Unknown
  Obtained from environmental sample
  DOMAIN (1)...(112): RNA pseudouridylate synthase
  misc_feature (1)..(185): Xaa is any amino acid
MRVPPPLLVHRLDKDTSGIILTAKTREAAAKFSQLLGTGRQSVKQYIAVCLGCPAKKEGVINLKIPVHGSMKSSKTSYRIIKSRKLPDMDFSVLELELGSGRMHQIRRHLAMIGNPVLGDDKYGDFTLNKKLRKTGVKRLLLHSSRLIIKDEINLNLIAPLPGYFHSFLDNNDNDAGGSVVISAD

SEQ ID NO: 34747 - DNA, 648 bp, Unknown
  Obtained from environmental sample
  misc_feature (1)..(648): n is a, c, g, or t
atggctgatgatgatatacttacgcttgaagaagttgcaaaatatcttcgggtatcggagcgtacaatctacgattgcgcccaaaaaggggaaattcctgccggaaagataagaactgcgtggcgttttaaaaaatccgaaatagataaatgggtcaacgacaaacttacatctaataaattcaattcacagacttatccggttaacgcacagtcgatcctttctcaggacaggatactctttcttgattatccgagaaaaaaagaagttctccttgctcttgcggaaaacctcgcggacgctccgcaggtaaaaaacaggcaggaattatcgatggagattttaaaacgtgaagaactgatgagtaccgctatcgggtgcggaatagctattccgcatgtgcgtctttcatcggtaactgatcttattgtttctgtaggaataagccggacagatattgtggattttaatccattagatgacgagccggtgcgccttatttttatgattacagccgcccaaaatcaacatacttattatttacagacgctttcatggtttagctcccgccttaaaaataaagaactgcgggattcacttctagcggcgcaaactcagcaggaagtttacagcttgttaacggcgtaa

SEQ ID NO: 34748 - protein, 215 aa, Unknown
  Obtained from environmental sample
  DOMAIN (8)...(43): MerR family regulatory protein
  misc_feature (1)..(215): Xaa is any amino acid
MADDDILTLEEVAKYLRVSERTIYDCAQKGEIPAGKIRTAWRFKKSEIDKWVNDKLTSNKFNSQTYPVNAQSILSQDRILFLDYPRKKEVLLALAENLADAPQVKNRQELSMEILKREELMSTAIGCGIAIPHVRLSSVTDLIVSVGISRTDIVDFNPLDDEPVRLIFMITAAQNQHTYYLQTLSWFSSRLKNKELRDSLLAAQTQQEVYSLLTA

SEQ ID NO: 34749 - DNA, 684 bp, Unknown
  Obtained from environmental sample
  misc_feature (1)..(684): n is a, c, g, or t
gtgcgccgtaccaggggcagggtttttgtttcgtatatggatacggttggcttcatgcccgccgatttgcgcgaccggattacggtaagcggcaatccggtgcgtccggtgtttcgctccgccgatccggcgaagggacgggcttttttggggctgggtacacaggagcggattttgctggtgctggggggcagtcagggggcgcaggaagtcaacgcgctgattcgggcgagcctgggggatttgcgccgccattacacggtggtgcatcagtttggtcccgaacagcaatgggatttgccgaaaacggaggggtatattcccgttccttatatcaaggatgaaatgccccatgttcttgccgcggcggaactgattgtgggacgcagcggggcgggtacggtttgggaaagcgccgctgtgggcaagccgatgattctgatacctttaagcggatccggtacaaggggcgatcaggtggaaaatgcccgcttctttgaacgggagggggcggcgctgattctgccggggcaggcgggggcggaagctctctcccgaatggtcagcgcccttgccgatgatccccataaaagggaagcaatggcggaggccgcgcggcaaatcggcagtcttgacggcgttgtgattattggcgattttttgtgcgcgtttacaggagtataa

SEQ ID NO: 34750 - protein, 227 aa, Unknown
  Obtained from environmental sample
  DOMAIN (58)...(217): Glycosyltransferase family 28 C-terminal domain
  misc_feature (1)..(227): Xaa is any amino acid
MRRTRGRVFVSYMDTVGFMPADLRDRITVSGNPVRPVFRSADPAKGRAFLGLGTQERILLVLGGSQGAQEVNALIRASLGDLRRHYTVVHQFGPEQQWDLPKTEGYIPVPYIKDEMPHVLAAAELIVGRSGAGTVWESAAVGKPMILIPLSGSGTRGDQVENARFFEREGAALILPGQAGAEALSRMVSALADDPHKREAMAEAARQIGSLDGVVIIGDFLCAFTGV

SEQ ID NO: 34751 - DNA, 549 bp, Unknown
  Obtained from environmental sample
  misc_feature (1)..(549): n is a, c, g, or t
ttgccaacttcaatgcctctatttagtaatataaaaaaaaatgcttgtttactcaagccttttttcaatttcttcccttgcgccaaccgcactcgtcctacagcaaatatatgtgtccggaacagtcggacagcactggttcccgaaaccccggcaatccgctattctaccagtatggtaaacatcgcttttaccgggggcggtaccggagggcatatctatcccggtttggcggtggcgcaggagctaaagcgcattcttgacgggggggagttccggctgttttggattggctccgccgcaggcatggaccggagcctggtagaggaagcggggctggatttttacggcatcccctcaggcaagctcaggcggtatttctctttgaggacaattcccgattttttccgggttgtcgcgngtttttttgcggcccgcaaaatcctcaaaagagaacatgcctgcctcttgttttccaagggcggttttgtgagcgtgccgccctgcgctgctgcggcttctctgggtattcccggtttttacccatga

SEQ ID NO: 34752 - protein, 182 aa, Unknown
  Obtained from environmental sample
  DOMAIN (62)...(182): Glycosyltransferase family 28 N-terminal domain
  misc_feature (1)..(182): Xaa is any amino acid
MPTSMPLFSNIKKNACLLKPFFNFFPCANRTRPTANICVRNSRTALVPETPAIRYSTSMVNIAFTGGGTGGHIYPGLAVAQELKRILDGGEFRLFWIGSAAGMDRSLVEEAGLDFYGIPSGKLRRYFSLRTIPDFFRVVAXFFAARKILKREHACLLFSKGGFVSVPPCAAAASLGIPGFYP

SEQ ID NO: 34753 - DNA, 363 bp, Unknown
  Obtained from environmental sample
  misc_feature (1)..(363): n is a, c, g, or t
ttggggttgacattattcatgtgcggcgcatgcgccactggcaaagcataccggggcttttggagcggtattttcacccgcaggagcttgccgccgccctgtccaaaggcccggggcgccgatctttcgctttcggcccggtttgccgccaaggaggcgttcgggaaagcgctgggaacggggcttgcgggaattgtgctgaaggatattatggttgttaacaggcataacgggcggccggacattcacgtttcgggaaccgcgctttcggctttgaaaaaaaccggggcaaaccggatacacctgtccctgacccacgatcacgacaacgccgtggctatggttgttttggaggaaatatga

SEQ ID NO: 34754 - protein, 120 aa, Unknown
  Obtained from environmental sample
  misc_feature (1)..(120): Xaa is any amino acid
MGLTLFMCGACATGKAYRGFWSGIFTRRSLPPPCPKARGADLSLSARFAAKEAFGKALGTGLAGIVLKDIMVVNRHNGRPDIHVSGTALSALKKTGANRIHLSLTHDHDNAVAMVVLEEI

SEQ ID NO: 34755 - DNA, 507 bp, Unknown
  Obtained from environmental sample
  misc_feature (1)..(507): n is a, c, g, or t
ttgctcgtcgctgccgtagatctgttcggcaagggccagggcggtttcggtcttgccgaccccggaggggcctgccagcatgattaccgcgatgggcttgttcgggtcggccagggacgcccttgcggtaactacccgtttagcgataattttcaggccgtgatcctgcccgataaccctccggcagagttcttcatcaagggaaaggatggacttgatttcgtcttttaccattctgcccaaaggtatgccggtccattcggagatgaccgtagaaaccgcctgagtgtccacctggggcagtaccagcggatgttccccctggaaatccgcaagctcttttcgcttggcttccagttccgcggtaagagccgccgccttgtccttttcaacgtcattgagttgtgtccgcagggccgctatttcggcggccagggctttttccctgtcaaaacgtttttgtatttcgtcactgtttttttcttcttttttaagttcatcgtttaa

SEQ ID NO: 34756 - protein, 168 aa, Unknown
  Obtained from environmental sample
  misc_feature (1)..(168): Xaa is any amino acid
MLVAAVDLFGKGQGGFGLADPGGACQHDYRDGLVRVGQGRPCGNYPFSDNFQAVILPDNPPAEFFIKGKDGLDFVFYHSAQRYAGPFGDDRRNRLSVHLGQYQRMFPLEIRKLFSLGFQFRGKSRRLVLFNVIELCPQGRYFGGQGFFPVKTFLYFVTVFFFFFKFIV

SEQ ID NO: 34757 - DNA, 1131 bp, Unknown
  Obtained from environmental sample
  misc_feature (1)..(1131): n is a, c, g, or t
atgagcattgaagcattaactgaattatcccgtttctatggaaaaaatcccgactatgttctcgccgggggtggaaatacttcgtggaaggacaattatactctgtatgttaaaggatcgggcatatctctggccgaagcggttcacgattcctttgtgaaaatggacagaaaggctctggctatgatttggaaaaaacggtatcccgaatcaagcgacgagcgggaaagcgcggtgttggccgacctgatggccgcaagaaaagcaggcgaagaaaagaagcggccaagcgtagagaccttattgcacgacattctgcctttcgcttttgttgtgcatcttcatccggcgctggtaaacggccttacatgttcacggcagggagagaaagcggcgaatgaaattttcggtagggatgccatttggattgctcctgttaatcccggctatgtgctttccaaaattgtaaagactgccattgatgagtacaaatccaaaaatggcaaatctgtgtctgttatctttttgcagaaccacggcgtttttgtgggggacaacagggtggagggcgtaaaaaaaatatacgatgaaattatgaataaaatcggcgcgcggataaaacggtgccctgatttttctgacgaaaaaattttgtcaattgattctgattctcaaatcgatcttcagattagcgatagtatcaaaacacttgctgatcttgcgggttccgtagtttttatgcggggcggagaaatcgcgaagctggttaatgatcgcgcatcctttgctcctgtctcgtcggcttttacgccggatcacatagtctacgccggaagcgagccgctttttatagaaacagatacaagcgccggtattcatgatgggtggacacagtacgttgataaaaccggaaggaagccgaaaatagtcgcggttcaggggttgggggtcttcggcgttggggcttcggaaaaggcggcattactggcgctggaacttttcagggactcggttaaggttgcggtatactcgcaatctttcggcgggccgctgtttatgacaaaggacaaaattgattttattaataactgggaagtggaacgctatcgcgcaaacatctcagcaggataa

SEQ ID NO: 34758 - protein, 376 aa, Unknown
  Obtained from environmental sample
  misc_feature (1)..(376): Xaa is any amino acid
MSIEALTELSRFYGKNPDYVLAGGGNTSWKDNYTLYVKGSGISLAEAVHDSFVKMDRKALAMIWKKRYPESSDERESAVLADLMAARKAGEEKKRPSVETLLHDILPFAFVVHLHPALVNGLTCSRQGEKAANEIFGRDAIWIAPVNPGYVLSKIVKTAIDEYKSKNGKSVSVIFLQNHGVFVGDNRVEGVKKIYDEIMNKIGARIKRCPDFSDEKILSIDSDSQIDLQISDSIKTLADLAGSVVFMRGGEIAKLVNDRASFAPVSSAFTPDHIVYAGSEPLFIETDTSAGIHDGWTQYVDKTGRKPKIVAVQGLGVFGVGASEKAALLALELFRDSVKVAVYSQSFGGPLFMTKDKIDFINNWEVERYRANISAG

SEQ ID NO: 34759 - DNA, 576 bp, Unknown
  Obtained from environmental sample
  misc_feature (1)..(576): n is a, c, g, or t
ttgcgccgttggcgtaaagatatggtttatacggcggggcgctatcaccgtcccgccgcatcttgtgataggagatggtttatgggtaagtttattgatttaacagatcaaacatttgacaatcttcatgtaataaaaagagcggaaaccagaaatggtgatacatattggatttgcgaatgtgtttgcggagaaaaaattgaggtaagggcggatcatttaatggcgggtaaaatacgcagttgcggctgtttgagcaatgaaatgaaatctatgtcattaaaaacacacggtatgacgcatacgcttttatacggagtatggaatgccatgatacaaagatgcgaaaaccctaaaaatgatcaagcaagattgtatcaggaaaggggcataaaggtttgtaacgaatggcatatttttgaaaatttcaagaactgggctttgcggaatggttataacgaaacattgacgattgatcgaattgataacaacggaaactatgaaccttcaaattgccgatggacggatttagttacccaggcaaataataaaaggacaaatagaaaaatgaaataa

SEQ ID NO: 34760 - protein, 191 aa, Unknown
  Obtained from environmental sample
  misc_feature (1)..(191): Xaa is any amino acid
MRRWRKDMVYTAGRYHRPAASCDRRWFMGKFIDLTDQTFDNLHVIKRAETRNGDTYWICECVCGEKIEVRADHLMAGKIRSCGCLSNEMKSMSLKTHGMTHTLLYGVWNAMIQRCENPKNDQARLYQERGIKVCNEWHIFENFKNWALRNGYNETLTIDRIDNNGNYEPSNCRWTDLVTQANNKRTNRKMK

SEQ ID NO: 34761 - DNA, 669 bp, Unknown
  Obtained from environmental sample
  misc_feature (1)..(669): n is a, c, g, or t
atgacggacgtaaaaaacattatcgcggcccgggcggcaaaagagcttaaggacggcgatgtggtaaatctgggaattggcattcccaccatggtggttaattttctgccccccggcatagacattatacttcattcggaaaacggcatcatgggaatgggtcccacccccgcagccggcgaagaaaacatggatatcgtgaacgccggcggccggccggttaccataaaaacaggagccatgtttttcgacagcgcggtatctttcggaataatacgcggcggacatgtggacgccaccattatcggtgcgctggaagtggacgagaagggcagtatctcaaactggatagtgccgggaaaatcgattcccggcatgggcggcgccatggatctgatggtagcggcaaaaaaggttatagtcgtaacgactcataccaataagggcgcgcccaagatactgaaaaactgcacccttccgtatggggctttggacgccgttgacatgatcattacagaaatgggggttatggaaattacgcctgacggcattgtgctgacggaactgcattccgactatacaaaagagcaggtacaaaaagcgaccggcgccaggttaataatcagcccggatttgaaaccgatgttgatagggaacggggaagtttaa

SEQ ID NO: 34762 - protein, 222 aa, Unknown
  Obtained from environmental sample
  DOMAIN (2)...(173): Bacterial regulatory proteins, deoR family
  misc_feature (1)..(222): Xaa is any amino acid
MTDVKNIIAARAAKELKDGDVVNLGIGIPTMVVNFLPPGIDIILHSENGIMGMGPTPAAGEENMDIVNAGGRPVTIKTGAMFFDSAVSFGIIRGGHVDATIIGALEVDEKGSISNWIVPGKSIPGMGGAMDLMVAAKKVIVVTTHTNKGAPKILKNCTLPYGALDAVDMIITEMGVMEITPDGIVLTELHSDYTKEQVQKATGARLIISPDLKPMLIGNGEV

SEQ ID NO: 34763 - DNA, 705 bp, Unknown
  Obtained from environmental sample
  misc_feature (1)..(705): n is a, c, g, or t
atggccggaagcaataggaattctaactataggggtaacgattttcaacacgaatcttatattttcattgataatttaggagcggaaaacagcacgaaattttcaattaatattaacaacttgattgaagcttctatttatttatctgttaggaaagtcgtaaagccaatttggctaaatgatcgcgatcaatttctctatcctaatgacggctggaaaaatgacacggactttcaaaataattgtttagcctttacaatatttaacacaaatattcaatcaaaatatggcgttaatcactggataccttattctgaagaagaggtcaatgcaaggaataattttgaaagccgttttatggttgattatataaaagacaaaacaatacatgaagagaatacggaactgtttggagaattaacaaaaaagcataaagccctcaaattttccgatgaagccaaagctgtttttaaggctggaaagaaattatggcaatactaccattcccaaccaacagctaatgtaaacgcttctttatacgacattcgcgagttctttcagggtagagacgacagcggaaaaatgaacaatacaagcggtgatactcaatacaatgaattgacaggtgatttacgctccgcactaaaagcattatcattaaaaatacagccgaaagtgtatgagtacgggtttttagtaagataa

SEQ ID NO: 34764 - protein, 234 aa, Unknown
  Obtained from environmental sample
  misc_feature (1)..(234): Xaa is any amino acid
MAGSNRNSNYRGNDFQHESYIFIDNLGAENSTKFSININNLIEASIYLSVRKVVKPIWLNDRDQFLYPNDGWKNDTDFQNNCLAFTIFNTNIQSKYGVNHWIPYSEEEVNARNNFESRFMVDYIKDKTIHEENTELFGELTKKHKALKFSDEAKAVFKAGKKLWQYYHSQPTANVNASLYDIREFFQGRDDSGKMNNTSGDTQYNELTGDLRSALKALSLKIQPKVYEYGFLVR

SEQ ID NO: 34765 - DNA, 348 bp, Unknown
  Obtained from environmental sample
  misc_feature (1)..(348): n is a, c, g, or t
atgaatttaaaaagtattattccgttggctatgcttgtagcttcaaatgttttcatgacgtttgcatggtatgggcatttaaaattcaaggaaagccccttatggatagtaatattggcgagctggggtatcgccttctttgaatactgtattcaggttcctgctaaccgtataggctcttcttatttttctgtaacacagcttaaagtagcgcaggaagtaattacgcttaccgtgttttcggtgttttcggtattatacctgaaagaggagttaaaatggaactatatcgtggggttcattttaattctgcttgccgttttttttgtattcaaaaaatgggactga

SEQ ID NO: 34766 - protein, 115 aa, Unknown
  Obtained from environmental sample
  SIGNAL (1)...(22)
  DOMAIN (6)...(112): Protein of unknown function, DUF486
  misc_feature (1)..(115): Xaa is any amino acid
MNLKSIIPLAMLVASNVFMTFAWYGHLKFKESPLWIVILASWGIAFFEYCIQVPANRIGSSYFSVTQLKVAQEVITLTVFSVFSVLYLKEELKWNYIVGFILILLAVFFVFKKWD

SEQ ID NO: 34767 - DNA, 1215 bp, Unknown
  Obtained from environmental sample
  misc_feature (1)..(1215): n is a, c, g, or t
atgctctacctgcacaatattggacgccggtccggggcttcacgcaagcttgccgacaagtacatgcgcgcctatacggagatgtcggcgcgggcgggcggcaatctcgacgcctccgagtggatggggctttatcactcgcttgtcaaatgggatatagagcttgagggaatcgcaagcgacgcggtaacgcggatgcacacgggtcttaaatccgactgcggcaagaagttttgcgacttcgccgccgagaattacacggactgggtgcgcggcggaagcggccgcccgcctatgcttgcggacgtcttggagcgggtagtggcgccggagctggcccttggccgcggcgtgctcatggttgtgctgaacgggatgcgtttggatcaatttctatgtatggaacctgaactgcggcggaatttctccgtaagcggtctgaagctcatgtcgctgctgcccaccatgtcgaatatctgcgttaccgcgctcgcctccggctgctatcccgatgaggcggcggaggcggagccgggggtttttgaggcggcggcggccgatcctataattatgaaacgcctgatgcgccgcggcctcgagcgcgccggggcgccgcgcgttaaaactcttttcgcctccgccgacggccccaacggcagacgccatgtgcggtcggcgatagagacaatgagaaaagcgcagacgttcggggtggtggccatagacataatagaaaaagttctcggctccgaaccctccgccaagcatacgaagaagtctgtcgccaatgaggcggagttccgcaggcgcgtggaattggagtttgcgggatcgacggtgctaggggttatgaaggaggtctgcgggcacgactgcacggtgcttattacgtcggggcacgggcacgttctatgccaccgcgcgagcgagatatacgagacggcgaataaactcggtccgaacctgcggtgcttcatcggcgagcgggcgtcggtcgacgagcgggaggtttttctgttcgaggatctgtcgcacctcaggctgccgtcgacgatacagggcaaagtgtgcctcttggcgcgcgagaacttttatctggcgctgaacgagagcgtcggcggcccgtcgaacgtcttccagtgcggcggcatttcgccggaggagatggtgacgccgctgtacatctgccgcccgcttgcgggcacggcgcgttag

SEQ ID NO: 34768 - protein, 404 aa, Unknown
  Obtained from environmental sample
  misc_feature (1)..(404): Xaa is any amino acid
MLYLHNIGRRSGASRKLADKYMRAYTEMSARAGGNLDASEWMGLYHSLVKWDIELEGIASDAVTRMHTGLKSDCGKKFCDFAAENYTDWVRGGSGRPPMLADVLERVVAPELALGRGVLMVVLNGMRLDQFLCMEPELRRNFSVSGLKLMSLLPTMSNICVTALASGCYPDEAAEAEPGVFEAAAADPIIMKRLMRRGLERAGAPRVKTLFASADGPNGRRHVRSAIETMRKAQTFGVVAIDIIEKVLGSEPSAKHTKKSVANEAEFRRRVELEFAGSTVLGVMKEVCGHDCTVLITSGHGHVLCHRASEIYETANKLGPNLRCFIGERASVDEREVFLFEDLSHLRLPSTIQGKVCLLARENFYLALNESVGGPSNVFQCGGISPEEMVTPLYICRPLAGTAR

SEQ ID NO: 34769 - DNA, 489 bp, Unknown
  Obtained from environmental sample
  misc_feature (1)..(489): n is a, c, g, or t
ttgcgggcacggcgcgttagcggaaatcacataggggcttttacgatgacggagacggcaaggacggtaaagacgctgacatcatctgtggaggagacgcgccgtttgggcgcggggatcgctaagatggcgcgtcccggcgacgttttctcgctaaacggcgatctcggctgcggcaagacggagttcgcgcgcggctttgtggaggcgctgtcaaacggcgttgacgtgcgcagccccacattctctatcgtcaacacctaccaaacgccggattttccgatacatcactttgatttctacaggatagaggacgttagggagttttcgtcgataggattggacgagtatataaacggcgacggagtgtgtctgatcgagtggggagatatgtacccagatgttctgcccgatacgacgaaacgcatccattttgcggaagttgacgagacgacgcgggagattgaggcgcanatcggattttgttaa

SEQ ID NO: 34770 - protein, 162 aa, Unknown
  Obtained from environmental sample
  DOMAIN (33)...(155): Uncharacterised P-loop hydrolase UPF0079
  misc_feature (1)..(162): Xaa is any amino acid
MRARRVSGNHIGAFTMTETARTVKTLTSSVEETRRLGAGIAKMARPGDVFSLNGDLGCGKTEFARGFVEALSNGVDVRSPTFSIVNTYQTPDFPIHHFDFYRIEDVREFSSIGLDEYINGDGVCLIEWGDMYPDVLPDTTKRIHFAEVDETTREIEAXIGFC

SEQ ID NO: 34771 - DNA, 360 bp, Unknown
  Obtained from environmental sample
  misc_feature (1)..(360): n is a, c, g, or t
gtggaaagaggaattcacagtggcctataccgcgaaggggcctgggccattgctgctttcctcgctgcgcttgcaggagcggccctaaccttccgcgccggttcttactcccccggcggaatagcgggaaggggctggatcgcgcttgctgcggtttatctgggtttcagaaatgtttggggagtcgtgcttgcctctctcgtttttaccctggctgagcgtcttggatttagcttgcagaatttcggccatttgagcgctggcagtctaagcgctaccgcgcttttaggtctgcctttcgcgttggctttgttgttttatcttttttcgctggtggtggggaagaggagaaagctttaa

SEQ ID NO: 34772 - protein, 119 aa, Unknown
  Obtained from environmental sample
  SIGNAL (1)...(27)
  misc_feature (1)..(119): Xaa is any amino acid
MERGIHSGLYREGAWAIAAFLAALAGAALTFRAGSYSPGGIAGRGWIALAAVYLGFRNVWGVVLASLVFTLAERLGFSLQNFGHLSAGSLSATALLGLPFALALLFYLFSLVVGKRRKL

SEQ ID NO: 34773 - DNA, 585 bp, Unknown
  Obtained from environmental sample
  misc_feature (1)..(585): n is a, c, g, or t
atgaaaaaaccgagaaaaacatcgtttgcgatgttatttatcaccgtttctttgcttatgattttatccataacggtatctttatccgtaatatttttctacaatctccgtaaaattgtcatcaatttaactgaattaagcacgaagacaaatgtcgcccgctcgcgggatatggtgttatcttttatcaaggaacacgaagaagccataaaacaattttccgccggcattacgcatcttttcaggcaaagggcggtttccactgagtctgtcgccggatacttgagcgacattaaagaaatagtgcccaacagtctggatctgtattttaccaataatgttatgtggaacaaaccgggcggttttgccgcgtttgccggaggatggattcccgatgacgattgggataatacccaacgcgactggtttaccgacgccaagaaagcgcagggaaagatcgtcttttcagaaccttatgttgattccgaaacgggcgatgtcattattacactttcgatgacggtctttgacggcgcgggaacggacataggagtgtcggcggacgatgtcgcgttaatgtcatga

SEQ ID NO: 34774 - protein, 194 aa, Unknown
  Obtained from environmental sample
  SIGNAL (1)...(29)
  misc_feature (1)..(194): Xaa is any amino acid
MKKPRKTSFAMLFITVSLLMILSITVSLSVIFFYNLRKIVINLTELSTKTNVARSRDMVLSFIKEHEEAIKQFSAGITHLFRQRAVSTESVAGYLSDIKEIVPNSLDLYFTNNVMWNKPGGFAAFAGGWIPDDDWDNTQRDWFTDAKKAQGKIVFSEPYVDSETGDVIITLSMTVFDGAGTDIGVSADDVALMS

SEQ ID NO: 34775 - DNA, 726 bp, Unknown
  Obtained from environmental sample
  misc_feature (1)..(726): n is a, c, g, or t
gtgccgctcgacgcctcgctcatccgcacggtcgttgtggatccggggcacggcggcaaggatccgggggccatagggcctacgggggtcatggagaagaacatcgtgctaggaatagggcttgagttgcgcacgatgcttgagaaggccgggttcaaggtatttatgacgcgcgataaagacgttttcataccgcttggcgacaggactcggttcgcgaatgagaaaaaggccgatctatttgtgagcatccacgccgacgccgtaggcggggacaacaagaagcgctccgcggcgcgcgggtacaaggtctacttcctctcgcaggccaagaacgaggaggacaagatggtggctatgcgcgaaaacgccgtaatagaacttgaggacaagaacaagcgttccaactacgacgcgcttcaggacgttctgataagcatagcgggcgcggagtatctgcgggagagccaagacctttgcatattcattgagcagtcgctcggcgcgaacgtcaagcagataccgcggttgcagctcggcgtgggtcaggccaatttttgggttttaaacggcgcgtacatgccgtctgtgctgatagaggtgggattcatatcgaacacggaggaggagaaactgctctccgacaagcgggttcagtttcagcaggcggcggcgttgtccgaggccattgtgaagttcaagcagcagtttgaaggggggcagtaa

SEQ ID NO: 34776 - protein, 241 aa, Unknown
  Obtained from environmental sample
  DOMAIN (11)...(232): N-acetylmuramoyl-L-alanine amidase
  misc_feature (1)..(241): Xaa is any amino acid
MPLDASLIRTVVVDPGHGGKDPGAIGPTGVMEKNIVLGIGLELRTMLEKAGFKVFMTRDKDVFIPLGDRTRFANEKKADLFVSIHADAVGGDNKKRSAARGYKVYFLSQAKNEEDKMVAMRENAVIELEDKNKRSNYDALQDVLISIAGAEYLRESQDLCIFIEQSLGANVKQIPRLQLGVGQANFWVLNGAYMPSVLIEVGFISNTEEEKLLSDKRVQFQQAAALSEAIVKFKQQFEGGQ

SEQ ID NO: 34777 - DNA, 795 bp, Unknown
  Obtained from environmental sample
  misc_feature (1)..(795): n is a, c, g, or t
gtgggcgattcgcggcctataggcgttttcgattccgggctcggcggcctcacggtggccaaggagatattccgcctgatgccgcgcgagcggataatctacctcggcgacacggcgcgcgtgccgtacggcggcaagtcggaggagacgatacgccgcttcggtttgcaggacgctcggacgcttttggacctagacgtaaagatgcttgtcgtggcgtgcaatacggtttcttcggtggctatagactatttggagcggcacatcaaggaggtccctgtgataggcgtggtgctgcccggggcgcgggcggcggccacgcgcagcgcgcagaagcgcgtaggggtcataggcaccgcggcgacggtgaggtcgggggcttacgccaaggcgatcaacagcatcgatccaagcataaaagtatacggaaagccgtgcccgctcttcgtcccgctggtcgaggagggcctgatagacagcgacatcacgcgcctcgccgtgcagcactacctctacgagatggtggatctggggatcgactgcctgatattgggctgcacccactaccccatactgatggaggtgatccagagcaccgtaggaaaccgcatacagcttgtggacagcgcaatgtggacggccaaggaggcgcagcacataatgaaggcgctcggggcggaatatccggcggcgcatggccatacagacccgaaagaacaacctaggcgagcggatcaattctcgttgaaagctcggaaggcttcaccgcgagccgtttcggctcggccgatctga

SEQ ID NO: 34778 - protein, 264 aa, Unknown
  Obtained from environmental sample
  DOMAIN (6)...(222): Asp/Glu/Hydantoin racemase
  misc_feature (1)..(264): Xaa is any amino acid
MGDSRPIGVFDSGLGGLTVAKEIFRLMPRERIIYLGDTARVPYGGKSEETIRRFGLQDARTLLDLDVKMLVVACNTVSSVAIDYLERHIKEVPVIGVVLPGARAAATRSAQKRVGVIGTAATVRSGAYAKAINSIDPSIKVYGKPCPLFVPLVEEGLIDSDITRLAVQHYLYEMVDLGIDCLILGCTHYPILMEVIQSTVGNRIQLVDSAMWTAKEAQHIMKALGAEYPAAHGHTDPKEQPRRADQFSLKARKASPRAVSARPI

SEQ ID NO: 34779 - DNA, 507 bp, Unknown
  Obtained from environmental sample
  misc_feature (1)..(507): n is a, c, g, or t
gtgcaatacggtttcttcggtggctatagactatttggagcggcacatcaaggaggtccctgtgataggcgtggtgctgcccggggcgcgggcggcggccacgcgcagcgcgcagaagcgcgtaggggtcataggcaccgcggcgacggtgaggtcgggggcttacgccaaggcgatcaacagcatcgatccaagcataaaagtatacggaaagccgtgcccgctcttcgtcccgctggtcgaggagggcctgatagacagcgacatcacgcgcctcgccgtgcagcactacctctacgagatggtggatctggggatcgactgcctgatattgggctgcacccactaccccatactgatggaggtgatccagagcaccgtaggaaaccgcatacagcttgtggacagcgcaatgtggacggccaaggaggcgcagcacataatgaaggcgctcggggcggaatatccggcggcgcatggccatacagacccgaaagaacaacctag

SEQ ID NO: 34780 - protein, 168 aa, Unknown
  Obtained from environmental sample
  misc_feature (1)..(168): Xaa is any amino acid
MQYGFFGGYRLFGAAHQGGPCDRRGAARGAGGGHAQRAEARRGHRHRGDGEVGGLRQGDQQHRSKHKSIRKAVPALRPAGRGGPDRQRHHAPRRAALPLRDGGSGDRLPDIGLHPLPHTDGGDPEHRRKPHTACGQRNVDGQGGAAHNEGARGGISGGAWPYRPERTT

SEQ ID NO: 34781 - DNA, 1503 bp, Unknown
  Obtained from environmental sample
  misc_feature (1)..(1503): n is a, c, g, or t
atgatgctccttcggggccagaacctgctggggtatcggcattatgcggacgacgtggtggccaaatttgtggaatacgcggctaaagacggggtagatatcttccgtatttttgacgcctgtaacgatccccggaatttcgaggctgccactaaagccgcgaaaaaaaccggtaagcacatccaggctaccatttcctatgcggtaactcccttccataccatcgaaaagtacgctgaattcgccaaacaactggtgagtattggcgccgattctatctgcatcaaggatatggccggtcttctgaagccttacgagggctatgacctggtcaaggctatcaaaaaagtgacgaatcttcctgtggaagttcatacccacgccactaccggaatgtctgtcgcaaccctggtaaagtgcgccgaggccggggcggagatcctggataccaccatttcatccatgtccatgggcaccagccacagccccacggaaaccatggtggaaatcttcaaaggtacggaatacgataccggtcttgataccaacctccttctggagattgcggcctatttccgggaagtaagaaagaattacaagaaattcgagtccagcttccttggcgcggacacccgaatcctggtctcccaggtaccggggggaatgttgagcaacctggaaagccagctcaaggagcaaggcgcgggcaacaagatcgacgacgtgctcaaggaaatcgccgttgtccagaaagacgcgggctatccgccgcttgtaactcctacaagccagattgtcggaacacagtccgtattcaacgtgctgttcggacgctacaacaagctttcaggcgaattccaggacttggttgccggtaaatacggcgcctgccccgcccccaaaaatcccgacgttgttaaaaaagctcttgaatcccttaaaatggaaaaagaaatcacccaccgcccggcggatgacattccagatgaatattcaaaacttgaagatgaaaccaaaaaacttttaggcacaagctcggtgacaacggaagacgttcttacttacgcaatgttcccgaaagtcgccccggacttcttcaaaaaacgcgccaacggccccgtggtattcaaaccggaagccgacgctccaaaagccgcggctgccgcgcccggacaggcagcgcgttactctgtaaacgtgaacggttccaattacgacgtggttgtctctcccgcgggaactgtagccgctgttcccgccgcttcttcagcggcgccaacggcaagcgcacctgttgcaggcggagcgacaatccccgcgcccgtagccggaactatactccgctatgtcgcgtccgagggcgcgcaggtaaaatccggcgacactgtattaattattgaatccatgaaaatggaactggaaaataaaagcgacttcgtcaggccccattcacttccttgttccaaccggaacacaggtttgcggcccaacagccctgtctag

SEQ ID NO: 34782 - protein, 500 aa, Unknown
  Obtained from environmental sample
  DOMAIN (436)...(500): Biotin-requiring enzyme
  misc_feature (1)..(500): Xaa is any amino acid
MMLLRGQNLLGYRHYADDVVAKFVEYAAKDGVDIFRIFDACNDPRNFEAATKAAKKTGKHIQATISYAVTPFHTIEKYAEFAKQLVSIGADSICIKDMAGLLKPYEGYDLVKAIKKVTNLPVEVHTHATTGMSVATLVKCAEAGAEILDTTISSMSMGTSHSPTETMVEIFKGTEYDTGLDTNLLLEIAAYFREVRKNYKKFESSFLGADTRILVSQVPGGMLSNLESQLKEQGAGNKIDDVLKEIAVVQKDAGYPPLVTPTSQIVGTQSVFNVLFGRYNKLSGEFQDLVAGKYGACPAPKNPDVVKKALESLKMEKEITHRPADDIPDEYSKLEDETKKLLGTSSVTTEDVLTYAMFPKVAPDFFKKRANGPVVFKPEADAPKAAAAAPGQAARYSVNVNGSNYDVVVSPAGTVAAVPAASSAAPTASAPVAGGATIPAPVAGTILRYVASEGAQVKSGDTVLIIESMKMELENKSDFVRPHSLPCSNRNTGLRPNSPV

SEQ ID NO: 34783 - DNA, 438 bp, Unknown
  Obtained from environmental sample
  misc_feature (1)..(438): n is a, c, g, or t
gtggaaatttaccagatattccaggagcagtataaacttgcgaatatccgccttaccattgacagggttgacgccgcaggatggactcagaagcgttcttccggacacgttcagtactatatgatgaactggtatgcggacttccttgatccggacaattatttattttccatatatcacagcggtacggctaacttcttctctaccggtttcagggataagtattttgatgagcagcttgcgataggccgtacccttcaactttcggagaaacaaaagttttattcggaactggagtcttatctgcttaatgaaaagattgcaggctggccgctttatacgcctaccggatatatcctcagatccaaccgcgtaaaagacgtatacataaagaaagatttcttgtttacctttgagattggctatcttgtcgaatag

SEQ ID NO: 34784 - protein, 145 aa, Unknown
  Obtained from environmental sample
  misc_feature (1)..(145): Xaa is any amino acid
MEIYQIFQEQYKLANIRLTIDRVDAAGWTQKRSSGHVQYYMMNWYADFLDPDNYLFSIYHSGTANFFSTGFRDKYFDEQLAIGRTLQLSEKQKFYSELESYLLNEKIAGWPLYTPTGYILRSNRVKDVYIKKDFLFTFEIGYLVE

SEQ ID NO: 34785 - DNA, 555 bp, Unknown
  Obtained from environmental sample
  misc_feature (1)..(555): n is a, c, g, or t
atgtctgacagtgatgatctaaatcttgatggtgaggactccgctggagcaaacgcaccaaaaaaaacatccggtttagcggctttattgccgaatttgctgaaatttgttgccatcggactgggcgcgttgatttttattgttaccgtttcggtaattacctataacattctgaacaagggcgggcaatcccagagttttcttccttcggcttctccttttgtcggtgccaggtcggagtaccaaattttttcttccattgggcagatcaggacaagcaccaaggatcccctgccttattcggtagttgtggatatgattatcggatacgatcttaacgacaatgtagcccagaccgaattatcaaaccgcctttacgagttgcgggattttgtgcgggtgtttttcaaaactaaaatggccgatgatctcaggccggaaaacgagccccgtataaagcaggaaatactcgagcagctcaacaccaaaatattgaattccgccagggcaaggattattttgttcactcagcttgatgtaatgtcgatgcagtaa

SEQ ID NO: 34786 - protein, 184 aa, Unknown
  Obtained from environmental sample
  DOMAIN (30)...(181): Flagellar basal body-associated protein FliL
  misc_feature (1)..(184): Xaa is any amino acid
MSDSDDLNLDGEDSAGANAPKKTSGLAALLPNLLKFVAIGLGALIFIVTVSVITYNILNKGGQSQSFLPSASPFVGARSEYQIFSSIGQIRTSTKDPLPYSVVVDMIIGYDLNDNVAQTELSNRLYELRDFVRVFFKTKMADDLRPENEPRIKQEILEQLNTKILNSARARIILFTQLDVMSMQ

SEQ ID NO: 34787 - DNA, 822 bp, Unknown
  Obtained from environmental sample
  misc_feature (1)..(822): n is a, c, g, or t
ttgcggctggcgcaggttattacaaaccttatgaccaacgctataaaattcactcccgataacggcaagattcagttgaacgcaaaaaagctggaagaaaaagaagatgaagtaacggtaagaatcgaggttattgacagcgggatcggaatttcgcccgaacagcaggaaaaacttttcacggcttacaatcaggcggaccgcactatctcgaaacaattcggcggtacggggcttgggcttgccatttccaaacggattatcgaacttatgcacgggaagatttggattgaatcggaactcggcaaaggcgcgaaatttattttcaccttaaaaatgaagaagggaaaacccgttgcggcggcggccgccacggccgatgctaccggagcgcccgcggcaacggttgttccaagcgtaaaagcctccgatttacacttgcagggttacaccatattggcggcggaagatatggactttaacagggaagtcctgtccaagtatctggaaagaacgggcgttaccattgattacgccgaaaacggcaaagaatgcgttgaaaaattcaaagtgaaccatgaaaaatactgcatgatccttatggacattaatatgccgaaaatggacggagatgaggcggcaaagataatacgggcgcttgatttaaagaaggcaaaggagatacctatcgtcgcgatgacagcagatgtttttaaggaagatgtcgaaaaatgtttgtcggtaggcatgaacgatcatatctcaaagccaatagttccgaaaactatatatgccaaattaaagcagcatctggggttataa

SEQ ID NO: 34788 - protein, 273 aa, Unknown
  Obtained from environmental sample
  DOMAIN (150)...(268): Response regulator receiver domain
  misc_feature (1)..(273): Xaa is any amino acid
MRLAQVITNLMTNAIKFTPDNGKIQLNAKKLEEKEDEVTVRIEVIDSGIGISPEQQEKLFTAYNQADRTISKQFGGTGLGLAISKRIIELMHGKIWIESELGKGAKFIFTLKMKKGKPVAAAAATADATGAPAATVVPSVKASDLHLQGYTILAAEDMDFNREVLSKYLERTGVTIDYAENGKECVEKFKVNHEKYCMILMDINMPKMDGDEAAKIIRALDLKKAKEIPIVAMTADVFKEDVEKCLSVGMNDHISKPIVPKTIYAKLKQHLGL

SEQ ID NO: 34789 - DNA, 1245 bp, Unknown
  Obtained from environmental sample
  misc_feature (1)..(1245): n is a, c, g, or t
gtggaagattatgaagagctgaaggacagactggacaggtaccagaaaaccattgactctttatttgagcagtacacaaggctgtacggccccaacataacgaaccccgttacggtggtggaatttctggaaaccgtatcgcttatcaatactgacctgtgccaactgtgggcagggacattcgccagcctggacgcgcgggtacaacggaataccgcaatcgcgaagatgtatttgattctgtatctgctggtagtattgatctcgctgggaatcgcgatttggtttgtggcgttcattacgctggatattaacaagtcggtcagaatcctcaaaaccctgttcaaagggctcaacgagaacgacttaaccttgactctaaaggtcaattccatggacgaattcggcgaactgatgacggctttcaacggattcctcaatatactccgctccacattcggaagcttcaagcagagcgccaaactggtcgcaaattccgttttcgatctttcctcctcatcaaaagaaatctcatctaccgccaacgagcagtccgccagcgtctccgagattgtcagcacgatggaaggcagcaaaaacctgtcggaacagatcgcctataagaccaccgaggtggccaatctcgccatggaaacgcaggagttaagcagcaaaggcgccgaactgcgggaagcgaaccagaccatgatggaagatatacggaatcaaaaccagaagatcataagcgagatacgcaacctttcggatatgattatcaggatcagcgaggccataaggatcatcgacgggatcgccgaccagaccaagctgattgcgtttaacgcctctcttgaagcgtcgtcttccggggaagcgggggcgcggttctcggtagtcgcctcggaaataaggcgtttcgcggataatgtggttgaatcaacacgggaaataaagcagaagatagaagaagtgcagggcgcctcgcaggcgctcatcgcggaagccaactcaggctccaggcaaatcgaaatcggctatgaaagaatgagcgaacaaaaaatcgtgtttgagcatattgttgaaaattcccagaatgtcgcgacccgttcacagcagatctcaaacttaagcaaacagcaggagctggcttcgtcgcagatttttacagccctcanggaaaatttcgccggcgtaaaacagtttgtgatagcacttcatcactttcaagaatgccgacagccctga

SEQ ID NO: 34790 - protein, 414 aa, Unknown
  Obtained from environmental sample
  DOMAIN (82)...(151): HAMP domain
  misc_feature (1)..(414): Xaa is any amino acid
MEDYEELKDRLDRYQKTIDSLFEQYTRLYGPNITNPVTVVEFLETVSLINTDLCQLWAGTFASLDARVQRNTAIAKMYLILYLLVVLISLGIAIWFVAFITLDINKSVRILKTLFKGLNENDLTLTLKVNSMDEFGELMTAFNGFLNILRSTFGSFKQSAKLVANSVFDLSSSSKEISSTANEQSASVSEIVSTMEGSKNLSEQIAYKTTEVANLAMETQELSSKGAELREANQTMMEDIRNQNQKIISEIRNLSDMIIRISEAIRIIDGIADQTKLIAFNASLEASSSGEAGARFSVVASEIRRFADNVVESTREIKQKIEEVQGASQALIAEANSGSRQIEIGYERMSEQKIVFEHIVENSQNVATRSQQISNLSKQQELASSQIFTALXENFAGVKQFVIALHHFQECRQP

SEQ ID NO: 34791 - DNA, 834 bp, Unknown
  Obtained from environmental sample
  misc_feature (1)..(834): n is a, c, g, or t
atgatcaccctggaacgcatgaggcttgtgaactggcataactttgaagatgatgttatagaaatcgggaaccgctgtctcctggccggtgataacggttccggcaagtccaccgtcatagacgcaattcaatatgtaatggcggccaacctgcggatggcgcggttcaattccgccgcggacgagcgccggggcggaggcagggacctgatgggttatgtgcgctgcaagctcggcagcgaatcaaccgagtaccgtcgcggcgataccataactcacgtaatgctggagtggaagaccagtgacggcaattttgcctgcggcgtatgcatcgaagcttacaaggacaatcaccacaccgagcatttctggatcggtgaaatcgatccaaaaaactcaataggggctataagtgtacgcaacgaaaaaaacgaaccgttgatcttccgccaattcaaaaatgtgcttgctgaaagaaaattttacgattatccgacaaagcagcagtatgtaaaagatttaacaaacaaacttggtgttttcaaacggcagcccgatgtaaacccctatctggacgcccttacccgttccataggttttaaacctcttgattccatcgatcaatttgtttgcgattttattcttgaggaaaaccccgtgtcgattcaggatatgaagcagaatcttgaaaattacaaagaggcggatcgtcaggcaaaaggggcgattgcgaaaataggcgtattgaaaaaaatctgcgcaaaggccgccgagtggcgcaattacgacggtcttatccttaaacaggaatatttgaaactcaaaatgaactga

SEQ ID NO: 34792 - protein, 277 aa, Unknown
  Obtained from environmental sample
  misc_feature (1)..(277): Xaa is any amino acid
MITLERMRLVNWHNFEDDVIEIGNRCLLAGDNGSGKSTVIDAIQYVMAANLRMARFNSAADERRGGGRDLMGYVRCKLGSESTEYRRGDTITHVMLEWKTSDGNFACGVCIEAYKDNHHTEHFWIGEIDPKNSIGAISVRNEKNEPLIFRQFKNVLAERKFYDYPTKQQYVKDLTNKLGVFKRQPDVNPYLDALTRSIGFKPLDSIDQFVCDFILEENPVSIQDMKQNLENYKEADRQAKGAIAKIGVLKKICAKAAEWRNYDGLILKQEYLKLKMN

SEQ ID NO: 34793 - DNA, 612 bp, Unknown
  Obtained from environmental sample
  misc_feature (1)..(612): n is a, c, g, or t
atgaaccaggatcttgacgcccttgtcttgatacgcgatctttcaagcgatgaatttgagcggttcagggcggcgcttcatatacttacgtcaaaaacgtttattatccgtggtattgacaaggaacgggagctttacgattttacgatcagaaacatcgcgctttttgacgcgtggttttcctgcatggatgctaatctggtacgggatgaaagcctgggcgtaatctgttttcggggttccggaaatacccggttatttttttcaaaagatgaaatctgcgcggcccttgttctgcgcctcctctacgaggataagaaacttgaagtaacattaacaaaatttcctgtggtaactgtcagggattttcaggacaagtacaacgccatgaccggggaagagataaagaagaccgtcctcatcaatgtattgcgccgtctttcttcctgcaaattactatctgtggaatcccaggactatgcggatccggaaggaatcattcagctataccccagtattcccctcagcatagaccgtaacacactggacgaggcagtagtcttgctgggagacaagagcgatgatgccggagatacggagggagagcaatga

SEQ ID NO: 34794 - protein, 203 aa, Unknown
  Obtained from environmental sample
  misc_feature (1)..(203): Xaa is any amino acid
MNQDLDALVLIRDLSSDEFERFRAALHILTSKTFIIRGIDKERELYDFTIRNIALFDAWFSCMDANLVRDESLGVICFRGSGNTRLFFSKDEICAALVLRLLYEDKKLEVTLTKFPVVTVRDFQDKYNAMTGEEIKKTVLINVLRRLSSCKLLSVESQDYADPEGIIQLYPSIPLSIDRNTLDEAVVLLGDKSDDAGDTEGEQ

SEQ ID NO: 34795 - DNA, 666 bp, Unknown
  Obtained from environmental sample
  misc_feature (1)..(666): n is a, c, g, or t
atgcgggccgcaatgactgaactatcggcttccattgacgaagtgagccgcagttcatcgtcttccctggtccagctaaacgccgcgctcgacgccacgaaccaaggcaacgcggcaggtgacgcgaccaagagcgcgatggaggagataacgcagaccacgggcaggatagccaaggccataagcgtcattcaggagatcgccaaccagacgaacctgctttcgctgaacgcagcgatagaggccgccaaggccggcgagcagggcaagggctttgcggtggtggcggaagaggtcagaaagctggcggagcgcagcgccgcatcggccaaggagatagccaagtacaacatcgcggcccgcaaatcggtgaagcgcggcgacgagatggtcaccaatacggtcgcgctgctggaaaaaatccgcacgaacctggacctgttcgccgcccagacgcgggggtccgtggccgccaccaaggaacaggccaagaccggcagcgaggtggcaaagcaggtggagaaaaacgcgagcgaatcggcgtccatcgcctccgccacccaccagatgatgacatccacgcaggaggtcacgcgcactgcggcggagctggccgccctagcgtccgaccttcagacaaagctacagaggtttaggctgggctaa

SEQ ID NO: 34796 - protein, 221 aa, Unknown
  Obtained from environmental sample
  DOMAIN (2)...(221): Methyl-accepting chemotaxis protein (MCP) signaling domain
  misc_feature (1)..(221): Xaa is any amino acid
MRAAMTELSASIDEVSRSSSSSLVQLNAALDATNQGNAAGDATKSAMEEITQTTGRIAKAISVIQEIANQTNLLSLNAAIEAAKAGEQGKGFAVVAEEVRKLAERSAASAKEIAKYNIAARKSVKRGDEMVTNTVALLEKIRTNLDLFAAQTRGSVAATKEQAKTGSEVAKQVEKNASESASIASATHQMMTSTQEVTRTAAELAALASDLQTKLQRFRLG

SEQ ID NO: 34797 - DNA, 408 bp, Unknown
  Obtained from environmental sample
  misc_feature (1)..(408): n is a, c, g, or t
gtgcgcgtgacctcctgcgtggatgtcatcatctggtgggtggcggaggcgatggacgccgattcgctcgcgtttttctccacctgctttgccacctcgctgccggtcttggcctgttccttggtggcggccacggacccccgcgtctgggcggcgaacaggtccaggttcgtgcggattttttccagcagcgcgaccgtattggtgaccatctcgtcgccgcgcttcaccgatttgcgggccgcgatgttgtacttggctatctccttggccgatgcggcgctgcgctccgccagctttctgacctcttccgccaccaccgcaaagcccttgccctgctcgccggccttggcggcctctatcgctgcgttcagcgaaagcaggttcgtctggttggcgatctcctga

SEQ ID NO: 34798 - protein, 135 aa, Unknown
  Obtained from environmental sample
  misc_feature (1)..(135): Xaa is any amino acid
MRVTSCVDVIIWWVAEAMDADSLAFFSTCFATSLPVLACSLVAATDPRVWAANRSRFVRIFSSSATVLVTISSPRFTDLRAAMLYLAISLADAALRSASFLTSSATTAKPLPCSPALAASIAAFSESRFVWLAIS

SEQ ID NO: 34799 - DNA, 681 bp, Unknown
  Obtained from environmental sample
  misc_feature (1)..(681): n is a, c, g, or t
atggcaagggcctgtacaactccggtgactgaaaacatggatattattacccacgatcctgagatcatcgcaacgcggcgagctgtactggaactcatcctttccaatcacccttcggactgcctccagtgcccgcggaacggaaactgcgagctgcaaaccctggctgctgaattcggcatcagggaaatcccctttaagcatatttccaatgggcttcccattgacgattcaaacccggcaatcgtgctgaacccggaaaagtgcatccgctgcggccgttgcgtaagggtctgccaggacgtgcagaatgtctgggcaattgaattccttggccgcggcataaagggccgcattgccagcgctgcggacgcgtctcttggcgaaagcccgtgcatcaagtgcggtcagtgtgctgcccactgccctgtcggagcaatttacgaaagggacgataccgtanaggtttgggccgccctgcaaaatcccgattgccacccggtggtacagattgccccggcggtgcgggtcgccctggcggaagaattcggccttgaacccggaacggtttttaccaaaaaaatctacgccgccttaaggcgactgggttttaaaactgtttttgacactaacttttcagccgaccttaccatcatggaagaagggcacggagctggttaa

SEQ ID NO: 34800 - protein, 226 aa, Unknown
  Obtained from environmental sample
  DOMAIN (153)...(226): Iron only hydrogenase large subunit, C-terminal domain
  misc_feature (1)..(226): Xaa is any amino acid
MARACTTPVTENMDIITHDPEIIATRRAVLELILSNHPSDCLQCPRNGNCELQTLAAEFGIREIPFKHISNGLPIDDSNPAIVLNPEKCIRCGRCVRVCQDVQNVWAIEFLGRGIKGRIASAADASLGESPCIKCGQCAAHCPVGAIYERDDTVXVWAALQNPDCHPVVQIAPAVRVALAEEFGLEPGTVFTKKIYAALRRLGFKTVFDTNFSADLTIMEEGHGAG

SEQ ID NO: 34801 - DNA, 402 bp, Unknown
  Obtained from environmental sample
  misc_feature (1)..(402): n is a, c, g, or t
ttgatagtcatcattgatacaaatgtgctggtctcggcatcgaagaacagcgcggggattccaaacttggcattggaaaaggccatggagccgccataccatgcggttatctgcgaccagacactggaggaactgcatcgcgtctatcaccgcaaattcccagatgaactgcacgcgctgcaaaagttcttgaccaaatctctgcgattgctggaggtgatccgcactccagatgatccgttggaaatagaggccaaaattagggacaccaaagaccgccccatcctgcgggcggcgatcatgatcaatgcagacgtgcttattacgggcgacagggactttttggagtcgggcatagaaaggccgctcattgtcacgccggcaaagtttgtccgaggataa

SEQ ID NO: 34802 - protein, 133 aa, Unknown
  Obtained from environmental sample
  DOMAIN (3)...(124): PIN domain
  misc_feature (1)..(133): Xaa is any amino acid
MIVIIDTNVLVSASKNSAGIPNLALEKAMEPPYHAVICDQTLEELHRVYHRKFPDELHALQKFLTKSLRLLEVIRTPDDPLEIEAKIRDTKDRPILRAAIMINADVLITGDRDFLESGIERPLIVTPAKFVRG

SEQ ID NO: 34803 - DNA, 489 bp, Unknown
  Obtained from environmental sample
  misc_feature (1)..(489): n is a, c, g, or t
ttgacacgaggtcttggcacccagacaggcgggcgcgttaagcgcatctggaggtatgtcgagggcgagcgcttccacctgacgtacggcgacggtgtgtcgaacatagacattcacgcattggtggagatgcacgaaaaatcgggcaagacggtcacgctctctgccattcagcccggcggtcgctttggcgtgctggacatcaacgacagggatgggtctatcaccggcttccacgaaaaatcgcgcgaggagaacacttggatcaacgccggattcatggtcatggagcctgaagtgttcaactacttggacgacgacagcaccatattggagcgcagacccttggagcgcctgagtgccgagggcaagctgggcgtcttcaagcaccacgatttctggcagtgcatggacactgcaagggacaacgagctgcttagaagcctgtgggacagcggccacgcgccgtggaagacctggggggactga

SEQ ID NO: 34804 - protein, 162 aa, Unknown
  Obtained from environmental sample
  misc_feature (1)..(162): Xaa is any amino acid
MTRGLGTQTGGRVKRIWRYVEGERFHLTYGDGVSNIDIHALVEMHEKSGKTVTLSAIQPGGRFGVLDINDRDGSITGFHEKSREENTWINAGFMVMEPEVFNYLDDDSTILERRPLERLSAEGKLGVFKHHDFWQCMDTARDNELLRSLWDSGHAPWKTWGD

SEQ ID NO: 34805 - DNA, 306 bp, Unknown
  Obtained from environmental sample
  misc_feature (1)..(306): n is a, c, g, or t
atgggcgatttggaggcaaaacaggaaaagaaccttttggagctggagcctcttcttgcggcttttgccttgcaattagggcatcacggttccaaaacatcgtcttcttgggattttttggctcaagttcagccaaaaatgacattcataagcgctggcagaaacaattcctatgggcatccacacctggagaccctagctaaactccgcctaattttgccagacacagcgcaaatttaccgcacagacagggatggaagcgttagagttgaatggatgtataaaacagggatatggagggaataa

SEQ ID NO: 34806 - protein, 101 aa, Unknown
  Obtained from environmental sample
  misc_feature (1)..(101): Xaa is any amino acid
MGDLEAKQEKNLLELEPLLAAFALQLGHHGSKTSSSWDFLAQVQPKMTFISAGRNNSYGHPHLETLAKLRLILPDTAQIYRTDRDGSVRVEWMYKTGIWRE

SEQ ID NO: 34807 - DNA, 831 bp, Unknown
  Obtained from environmental sample
  misc_feature (1)..(831): n is a, c, g, or t
atgttttctcttttggaaatacaaaaattctgcctttactcttatacaagctgtggctggttctttaacgatattgaaggcttggaacctgtgcaaaatatgcgttattgtttaagagcaatagaacttttgagcaaatatttgccagacgaaagtgttttggaaagcgaaattttaaccattttgagcaaaataacatcaaacgagcatcacaaaaccggaacggaaatttggactgagtgggttcgcccaaaaataccggtttcctgcattttaataggcgcagaagccgtaaaacggcatttggaattgcctgcgcagccatctccgcacataaaaataaactctttgaaaagcatggataatcaattaattttgaacgccacttatacacacccaaatacttacgagaacaaaagcgcaaatgttttggtggttactgattccattggaagagttaagattgtgttgcaaacggtaaatccaaacataaagcgcatacctatttttgtggaaaaagatgctatagatcaaacgaatttcaaaaatctttatccaaatgcttttgtgtttcgcttgcacgagtttccgcaagatattttggcggaaattaacgaaatgcactcaagggtaaaattatcctcaattagcaaagatttagaagatttctacgagaaattcaatataaatctggattgccttgccgaccgcacagattcgcttgctgttccgctcaggcaatgcatgatattcaacttaactgtaaaaataagagggcttgcgctggaagctctttacaacgaccctgccactcttgctttgaaaaaataa

SEQ ID NO: 34808 - protein, 276 aa, Unknown
  Obtained from environmental sample
  misc_feature (1)..(276): Xaa is any amino acid
MFSLLEIQKFCLYSYTSCGWFFNDIEGLEPVQNMRYCLRAIELLSKYLPDESVLESEILTILSKITSNEHHKTGTEIWTEWVRPKIPVSCILIGAEAVKRHLELPAQPSPHIKINSLKSMDNQLILNATYTHPNTYENKSANVLVVTDSIGRVKIVLQTVNPNIKRIPIFVEKDAIDQTNFKNLYPNAFVFRLHEFPQDILAEINEMHSRVKLSSISKDLEDFYEKFNINLDCLADRTDSLAVPLRQCMIFNLTVKIRGLALEALYNDPATLALKK

SEQ ID NO: 34809 - DNA, 693 bp, Unknown
  Obtained from environmental sample
  misc_feature (1)..(693): n is a, c, g, or t
atgaaagaaaaggcggctgttttagttgtagacgatgagccgaaaatactcgaattgataaaatcttacctcgaaatgaacggttataccgccatttgcgccaaaaatggcagggaagctacggcgcttttcgatgaaaaccctgttgacctcatacttcttgaccttatgcttcccgatttatcaggcgaggaattgtgcaggaaaatacgccaggtgtcggacgtacctattattatgataaccgccaaagttgacgaggcaagtattattcatggtcttaatatcggcgctgatgattatgtgtgcaagcctttcagtcccaggcagttaatggcgcgtgtgcaagcggctctcagacggatcggtgcgggagaaaaaccgggagattttctttcctataaagatttatctatagatactgaaaaaaggcttgttagccgggacggaaaaccgcttgccctaacccgtgatgaatacaatattctttcgcttttaatgtcaaggcagtcaaaaatttttaccagagacgaaatactggaagcggtcaagggggacgattttgacggttttgatcgcgctgttgatacccatattaaaaggtttagagctaaaataggagacgattccaaagcgccgcagtacattgttaccgtctatggtatgggttacagattaggagtaactgagtga

SEQ ID NO: 34810 - protein, 230 aa, Unknown
  Obtained from environmental sample
  DOMAIN (150)...(226): Transcriptional regulatory protein, C terminal
  misc_feature (1)..(230): Xaa is any amino acid
MKEKAAVLVVDDEPKILELIKSYLEMNGYTAICAKNGREATALFDENPVDLILLDLMLPDLSGEELCRKIRQVSDVPIIMITAKVDEASIIHGLNIGADDYVCKPFSPRQLMARVQAALRRIGAGEKPGDFLSYKDLSIDTEKRLVSRDGKPLALTRDEYNILSLLMSRQSKIFTRDEILEAVKGDDFDGFDRAVDTHIKRFRAKIGDDSKAPQYIVTVYGMGYRLGVTE

SEQ ID NO: 34811 - DNA, 519 bp, Unknown
  Obtained from environmental sample
  misc_feature (1)..(519): n is a, c, g, or t
atgaataaacagagcaatgtaattgattacagaagaaacaaaatccgggaaatcaggcgttaccgctcggtatacgctcttctggttatcccgttaacctattacatcatttttaaatattttcccatttggaacggacagattgcattcaaagatttcatgcccatggacggggtaacaggaagcaaatggattggttttggacacttcagtacttttataaagtctttctattttgccgaactgctgcgtaataccctgttctacagtttcggaaaactcctgatcagcgttcccgcggcgataatcctcgcggtgacgctgtatgagtgtaccaggcctaaactggcaaaggtagtgcagacactggcgtatcttccccacttcctttcatgggttatcatgtacggtattctcctggtgctgctggctcccggcgacggtattcttaacgatattatcaagtcggtgggcggcgagccggtcgctttccttaccaatctcggccgccgcgaataa

SEQ ID NO: 34812 - protein, 172 aa, Unknown
  Obtained from environmental sample
  misc_feature (1)..(172): Xaa is any amino acid
MNKQSNVIDYRRNKIREIRRYRSVYALLVIPLTYYIIFKYFPIWNGQIAFKDFMPMDGVTGSKWIGFGHFSTFIKSFYFAELLRNTLFYSFGKLLISVPAAIILAVTLYECTRPKLAKVVQTLAYLPHFLSWVIMYGILLVLLAPGDGILNDIIKSVGGEPVAFLTNLGRRE

SEQ ID NO: 34813 - DNA, 309 bp, Unknown
  Obtained from environmental sample
  misc_feature (1)..(309): n is a, c, g, or t
ttgctggtaaaaaaagcgcttctcaatttcgacaagcacgccaacacgcatatatcccgctggaaactggccgattcggtaaatgtcagcgaagattacctgacccgtatctttcacaaggaaatggggcttcccctgtgggactatctgaaccgttaccgtatttttctcgcggccgaaattctgcagcagaccaatgagacgatacaggaagtcgccaacagatgcggctttcaggatcaggcttatttttgccgtgttttcaaaaaaatctacggcgtttctcccggacaaatgcgcaagaagtaa

SEQ ID NO: 34814 - protein, 102 aa, Unknown
  Obtained from environmental sample
  DOMAIN (57)...(101): Bacterial regulatory helix-turn-helix proteins, AraC family
  misc_feature (1)..(102): Xaa is any amino acid
MLVKKALLNFDKHANTHISRWKLADSVNVSEDYLTRIFHKEMGLPLWDYLNRYRIFLAAEILQQTNETIQEVANRCGFQDQAYFCRVFKKIYGVSPGQMRKK

SEQ ID NO: 34815 - DNA, 597 bp, Unknown
  Obtained from environmental sample
  misc_feature (1)..(597): n is a, c, g, or t
gtggaaagccgcgacaaagtttcggcggggcatataactcgcatatcgcaatacataaaagttttagtgaaagccatgatagccagagatgtttaccaagaagaacttgccgactgggatttgaatacagcaatgaccgctgcacacttgcacgatgttgggaaaattgtggtatcggaattgattttgaacaagcagggtaaattaacccacgaagaatacagtgaaattaagcgacataccacagaaggcgaaaaaattattgagcaaatgatagcccaaactggcgattccctatttttgtaccacgccaagctttttgccggcgctcatcacgaaaaatgggatggaacaggatatccacgaggtttgcaagaagaagatatcccgcttcaagggcgtgtaatggcactcgttgacgtgtacgatgcacttgtgtctgaaagatcatataaacctgctattacctgcgatgaagcagcagaaattattatcaaagaatctggaactgcttttgacccgctcattattgatgtttttggtgaaattaaagaagaatttgcagaaatagtaaaaaacacaagcaaggatatgtaa

SEQ ID NO: 34816 - protein, 198 aa, Unknown
  Obtained from environmental sample
  DOMAIN (14)...(145): HD domain
  misc_feature (1)..(198): Xaa is any amino acid
MESRDKVSAGHITRISQYIKVLVKAMIARDVYQEELADWDLNTAMTAAHLHDVGKIVVSELILNKQGKLTHEEYSEIKRHTTEGEKIIEQMIAQTGDSLFLYHAKLFAGAHHEKWDGTGYPRGLQEEDIPLQGRVMALVDVYDALVSERSYKPAITCDEAAEIIIKESGTAFDPLIIDVFGEIKEEFAEIVKNTSKDM

SEQ ID NO: 34817 - DNA, 528 bp, Unknown
  Obtained from environmental sample
  misc_feature (1)..(528): n is a, c, g, or t
gtggaaatttttgctgcccttgaatttgattttgcttgggcttggagccttgtttatcgctatgggttggtttttatgatgagtgcttccaagtatttttatgccgctgtgactgggccaatcagcctgctgaaaggcttgtccgtcacccttaaatactttctcagtcctggaaaaatagtgaccgagcaatatcctgaaaacagggcaaagcttaaaatgcaggagcgtttcaggggcagggtagagctgattcacgatgaacagggcttgcattcttgcaccgcttgcggtatgtgcgaaaaggcttgccccaacgcttctataaacgtgctttccacaaagagcatggctggcaaaaagattttgggtaaatacctttaccgcatggactcgtgtactcagtgcgggctgtgcgtggagagttgcccctttggttgccttagaatggcacacgattttgaaatgtcttctacagacaggcagatattcaatatggttttaaataaaacagaagggcagggttaa

SEQ ID NO: 34818 - protein, 175 aa, Unknown
  Obtained from environmental sample
  DOMAIN (87)...(110): 4Fe-4S binding domain
  misc_feature (1)..(175): Xaa is any amino acid
MEIFAALEFDFAWAWSLVYRYGLVFMMSASKYFYAAVTGPISLLKGLSVTLKYFLSPGKIVTEQYPENRAKLKMQERFRGRVELIHDEQGLHSCTACGMCEKACPNASINVLSTKSMAGKKILGKYLYRMDSCTQCGLCVESCPFGCLRMAHDFEMSSTDRQIFNMVLNKTEGQG

SEQ ID NO: 34819 - DNA, 450 bp, Unknown
  Obtained from environmental sample
  misc_feature (1)..(450): n is a, c, g, or t
atggacgaaatacagcgcataaagatagaaaacgagatgaaaggcgcgtttatcagttacgccatgagtgtcatcgtggcgcgggcgttaccggacgccagagacgggctgaagcccgtgcagcggcgcatacttcattccatgaacgagctgaatttagacccggacaagccttataaaaagagcgcgcgcgtcgtgggtgacactatgggtaagtatcaccctcacggcgagtcgtctatttatgacgccatgttgcgtatggcgcaggatttttccacacactatatgcttgtggacggtcacggcaacttccgctccatggacggctacggcgcggcggcccaaaagtacaccgaggcccggctgtccaagctgtctatggaaatgctcccccgaattgataaagaaaccgggtactttactggcaactacaacggcgaattttaa

SEQ ID NO: 34820 - protein, 149 aa, Unknown
  Obtained from environmental sample
  DOMAIN (28)...(148): DNA gyrase/topoisomerase IV, subunit A
  misc_feature (1)..(149): Xaa is any amino acid
MDEIQRIKIENEMKGAFISYAMSVIVARALPDARDGLKPVQRRILHSMNELNLDPDKPYKKSARVVGDTMGKYHPHGESSIYDAMLRMAQDFSTHYMLVDGHGNFRSMDGYGAAAQKYTEARLSKLSMEMLPRIDKETGYFTGNYNGEF

SEQ ID NO: 34821 - DNA, 1215 bp, Unknown
  Obtained from environmental sample
  misc_feature (1)..(1215): n is a, c, g, or t
gtgcttgttcagaccgtggggatgtttcccatcgcctttatgaccatttcttcaatccttaagtccattgactcaaccgtggaagacgccgcgatggatcttcgcgcaaccaggcttacaacttttctcaccataaccttgcctctttctcttcctggtctcctttcggcctggcttctggtttttaccacatctttggctgacttcgccaatccgctgctcttggcaggctcctaccgcgtgctttcggtagaggcgtacattattgttaccggcagaaataatttgggaggcggcgcggccttgagcctgcttcttcttttaccaacgcttacagccttcttcgcccagcgttactgggtgaacaaaaaaagcgtggtaaccatcacgggcaagccttcaacacgcctgacggagctgacttcaaaaccggtgcgcattgcccttacggcgtttgtgattttctgccttgtttttatcctgtctctttacgcgactattatcgcgggctgctttgttaaagcctggggcattgattattctttcaccctctcaaatttcggcgaggcacttgcgcacggatggcagtccatcaccaacaccttaaccctcgcaacagcggcaactcccatcgccggccttattgcaatggcagcggcgctaataattgtgcgccagaaattcgccggcaagcgaattctcgaagttctgctcatgacgcctttcgcgatccccggtacccttttgggtatctcttacatactcgcgtttaacaagccgcctctgcttttggtcggaacggcggcgatcatcgtcatcaattatgttgtccgtgaattgccggtgggtattgaaaccggcgctgccaatatgcggcagatcgataaatcaatagaagaagccgcccaggacctgggggcggatatgtccaaggtctttacttccgtagtgcttcctttggtaaggcccagcttcctgaccagcatgtcctatacttttgtccgctcaatgactgcggtaagcgcggtgatcttcctgatctctgcccgctggtatcacctgaccgtgcagatatataacttttcggaaaatttgcgcttcggcatggcaagcgtcctttcaaccgtgctgatcgtcatcgtcctggctgtcttcgtcctgatgcaggttcttgtccgggatcggggcattagcgccaaacaaatatcacaatag

SEQ ID NO: 34822 - protein, 404 aa, Unknown
  Obtained from environmental sample
  DOMAIN (194)...(397): Binding-protein-dependent transport system inner membrane component
  misc_feature (1)..(404): Xaa is any amino acid
MLVQTVGMFPIAFMTISSILKSIDSTVEDAAMDLRATRLTTFLTITLPLSLPGLLSAWLLVFTTSLADFANPLLLAGSYRVLSVEAYIIVTGRNNLGGGAALSLLLLLPTLTAFFAQRYWVNKKSVVTITGKPSTRLTELTSKPVRIALTAFVIFCLVFILSLYATIIAGCFVKAWGIDYSFTLSNFGEALAHGWQSITNTLTLATAATPIAGLIAMAAALIIVRQKFAGKRILEVLLMTPFAIPGTLLGISYILAFNKPPLLLVGTAAIIVINYVVRELPVGIETGAANMRQIDKSIEEAAQDLGADMSKVFTSVVLPLVRPSFLTSMSYTFVRSMTAVSAVIFLISARWYHLTVQIYNFSENLRFGMASVLSTVLIVIVLAVFVLMQVLVRDRGISAKQISQ

SEQ ID NO: 34823 - DNA, 921 bp, Unknown
  Obtained from environmental sample
  misc_feature (1)..(921): n is a, c, g, or t
ttgtcgcaagacaatttaccgccagacagcttgccacaagacagtttacttcaaagcaacttaccgccaggcaatttactgcaaagtaacttgttgccggtttgccgccgcgacatggacgagcgcaaatgggaacaatgtgatttcatctttgtttcaggcgatgcctatgtagatcatccttcttttgcggcggcgcttttgtgcagggcgttggaagcggcaggtttccgtgctggaataattcctcaacctgactggaaagacccctcatcatataccgtattgggaagaccgcgcctcgcttttttggtaggcgcaggcaatatggattccatggttgcgcattacaccgccgcaaaacgcaagcgttccgatgacgcgtattcgccgacaggaaaaaatggactgcgccccgaccgcgcaacgctggtttatgttgaaggaatcaggcgtgcgtacaaagatgtgccggtaatcatcggcggaatcgaagcaagccttcgccgctttgcccattacgattactggtctgacaccgtacgccgttcgattctgcttgattcaaaagcggatattctggtttacggaatgggagaaaagcccctgcttaacatagcgcgccggttagcggatggtgaaacaatcgacagtataaccgatgaaaagggaacctgcgtccgtgttcacggaagagccgccgttgaaaaaggtaaaaccgaacaatggaaagacctttgtcttctgccgggatatgaagcggtaaaagggaaagacgagtcttcgttattcgcttatgccgaacattttatgatacagaaacaaaacgccgatccgttaagcgcaaaaccgctggcggaaagaaacgacggagatcgatgggttattcaaaatccccccgcccccgcccctttctactaa

SEQ ID NO: 34824 - protein, 306 aa, Unknown
  Obtained from environmental sample
  DOMAIN (31)...(303): Radical SAM N-terminal
  misc_feature (1)..(306): Xaa is any amino acid
MSQDNLPPDSLPQDSLLQSNLPPGNLLQSNLLPVCRRDMDERKWEQCDFIFVSGDAYVDHPSFAAALLCRALEAAGFRAGIIPQPDWKDPSSYTVLGRPRLAFLVGAGNMDSMVAHYTAAKRKRSDDAYSPTGKNGLRPDRATLVYVEGIRRAYKDVPVIIGGIEASLRRFAHYDYWSDTVRRSILLDSKADILVYGMGEKPLLNIARRLADGETIDSITDEKGTCVRVHGRAAVEKGKTEQWKDLCLLPGYEAVKGKDESSLFAYAEHFMIQKQNADPLSAKPLAERNDGDRWVIQNPPAPAPFY

SEQ ID NO: 34825 - DNA, 720 bp, Unknown
  Obtained from environmental sample
  misc_feature (1)..(720): n is a, c, g, or t
ttgggcttaaagatttttgttttgaagcggacttttctgactggcgaaccgttagagaaacctgaattgtatcaatcaatgttattaaatccagaggataaccgagaaaacttgccggaagattatatcaatgacattcttgacactttgccggaaaaacaaaaagcccgctttcgtgatggtctttgggtaaaagccgagggcgttatatacgaccgctttgatgaaagcatgattgttaaggctgatgaccttcctgaacaatttgaccgatacgctgcggggcaggacttcggcttaaatataacttttgtgaaaataggctggcttggtgatgtaatctacgtcattggcgattatggggcgttttgtatgactacccaaagttttaatgaggagttacaggcgcggggcttgcttgactgccctgatgatatgggtttgccggtgtactgcgaccctgcgggtggggaacgcatacaggaaataacaggcggtactaaagctaataacagcgtggacagcgggattgattttatcaatgcgaaaatagaaagacatcaattctttgtgtgcgagaagtgtaccggcgtactttcagagatttgggattattgcagggatgaggcggggcagatcgtcaaggtaaatgaccactatttagatgctttgcgttatgcgatatttacggacgttcagcagggggttgtgctggcatga

SEQ ID NO: 34826 - protein, 239 aa, Unknown
  Obtained from environmental sample
  misc_feature (1)..(239): Xaa is any amino acid
MGLKIFVLKRTFLTGEPLEKPELYQSMLLNPEDNRENLPEDYINDILDTLPEKQKARFRDGLWVKAEGVIYDRFDESMIVKADDLPEQFDRYAAGQDFGLNITFVKIGWLGDVIYVIGDYGAFCMTTQSFNEELQARGLLDCPDDMGLPVYCDPAGGERIQEITGGTKANNSVDSGIDFINAKIERHQFFVCEKCTGVLSEIWDYCRDEAGQIVKVNDHYLDALRYAIFTDVQQGVVLA

SEQ ID NO: 34827 - DNA, 369 bp, Unknown
  Obtained from environmental sample
  misc_feature (1)..(369): n is a, c, g, or t
gtgtatataggcagcggcaatgtcggggagcttgcgtttgagcggtacagcctttctgaactttcaaattatttagcgaataacagcattgtatttaacgccgtaatagtcggaacgggccaggcttccgccgcggttgagtatctttgcagggaaacaggcgggaatattgcgcgcctttaccagccgcagggaataggcccgctaattaagagcgttgccgaccttccttccggattgtacagctattcgtttgcttcccgtcttcccaccgatttcggaagggcgtggcttcccgttgaaatagaagttaagctgatggaaagatcaggcttggatagtactggctattatcctccgcttgaatga

SEQ ID NO: 34828 - protein, 122 aa, Unknown
  Obtained from environmental sample
  misc_feature (1)..(122): Xaa is any amino acid
MYIGSGNVGELAFERYSLSELSNYLANNSIVFNAVIVGTGQASAAVEYLCRETGGNIARLYQPQGIGPLIKSVADLPSGLYSYSFASRLPTDFGRAWLPVEIEVKLMERSGLDSTGYYPPLE

SEQ ID NO: 34829 - DNA, 603 bp, Unknown
  Obtained from environmental sample
  misc_feature (1)..(603): n is a, c, g, or t
atgaaccgaataaaacctcctgaatatcatcatgtagatttatgtnttccggcaagacggctttggaaaaatataatacatgattgttcacaatcgtcgattgaaacaaagatacttggcatggatagaagcacagacatacccggcgctttagctcccgaaatatggtttgagttcttaaaaacagaaagaacggacagattaatgggaatctgcgatcataacacggcggatattaaaggattggcggcgattcttgcggcaatgatcaaaattgccgaagatccgtttaacgtaaaatacatttacgacacaggccgccttgccattttctggcgctttttttgccgtcgtaatgattcggaaaatttaaagaaaaccggagataaacttctgcgtttagccgcgaaaaaaaatattaattgcctgccatatataaaagccgctatatacagggcgctggcaattgactgtgaaagaaagaaaaaaaattacgaactcgcgctggaatatgtaaatgaaggactattactagatgaaataagtgaaaatttgcgaaatgaatttgagcgaaggaaagaaagacttgaaaaaaaattataa

SEQ ID NO: 34830 - protein, 200 aa, Unknown
  Obtained from environmental sample
  misc_feature (1)..(200): Xaa is any amino acid
MNRIKPPEYHHVDLCXPARRLWKNIIHDCSQSSIETKILGMDRSTDIPGALAPEIWFEFLKTERTDRLMGICDHNTADIKGLAAILAAMIKIAEDPFNVKYIYDTGRLAIFWRFFCRRNDSENLKKTGDKLLRLAAKKNINCLPYIKAAIYRALAIDCERKKKNYELALEYVNEGLLLDEISENLRNEFERRKERLEKKL

SEQ ID NO: 34831 - DNA, 756 bp, Unknown
  Obtained from environmental sample
  misc_feature (1)..(756): n is a, c, g, or t
atgcagatagaaagcgtgtttcttttacctacacaaggcagggcttgttttatggttccaaatggcatagctagaaagcaatatagaaatttactacattactgctatatgacgcgcatagtatctaaatttggtggaagctccgtagcagatgcaacgcagttccgtaaaataaaaaacattctggaaggtaagccggaaagaaaaattgtcgtggtttctgcacccggcaaaagaaatcccaaagaggccaaattaaccgacttgctctactccgtttacgaccttgccaaaaaaaagctggatttagcagagccttggaaactcataaaagaacgttatacagagatagtgcgggaactttccctgcaatccaccatacgcgaagaattagaagtattggaaaaagccttgcttacaaaacctgatgaactttcggttgattttgtggtgagccgcggcgaatacctatgcgcaaaaataatggcggaatttctaggggcaaaattcatagatgcctacccccttatacagttcgacagccaataccaaattacaaagcaaagctatgaaaacatcgcacttgctctttcagacacagagtccctttacgttgtgcctggtttttatggaagtgacataagaggagacttaaaaacattcacacgcggtggctcagacatcaccggcggaattttagcgaatgcctgcgattgcctgctttacgaaactggacggatgtttctgggctattga

SEQ ID NO: 34832 - protein, 251 aa, Unknown
  Obtained from environmental sample
  misc_feature (1)..(251): Xaa is any amino acid
MQIESVFLLPTQGRACFMVPNGIARKQYRNLLHYCYMTRIVSKFGGSSVADATQFRKIKNILEGKPERKIVVVSAPGKRNPKEAKLTDLLYSVYDLAKKKLDLAEPWKLIKERYTEIVRELSLQSTIREELEVLEKALLTKPDELSVDFVVSRGEYLCAKIMAEFLGAKFIDAYPLIQFDSQYQITKQSYENIALALSDTESLYVVPGFYGSDIRGDLKTFTRGGSDITGGILANACDCLLYETGRMFLGY

SEQ ID NO: 34833 - DNA, 714 bp, Unknown
  Obtained from environmental sample
  misc_feature (1)..(714): n is a, c, g, or t
ttgcctgctttacgaaactggacggatgtttctgggctattgatggcagattctcgaattgttcaaggggcacattccataaattatgtgagctaccgcgaaataagagaactagcatacagtggcgcaagcgtgctgcacgatgaatccatatatccgtgcagggcaaaaaacattcccataaacataaaaaacaccaacagcccgggcgaccaaggcacaatcatcggtccaaccccggagcacacttctagcataataaccggcgttgcaggtcgcaaagatttttcaatgctctatattgaaaaaagcatgatgaacaaagaaagaggctttggacgcaaagttcttacaattttagaagaacgcggtgtatcttatgaactctccccttgcggcatagattcgatgaacgtggtggtggactccaaaaccttgcacagggtaaaagcggaagtttgtgcggaaattgagcaaaaaatgcaaccgaacaaaatgaagatttttgacaaagttgctttgattgcaaccgttgggcacggaatggtaaatcaaattggaaccgctgctaggctttttggtgcgcttgcaaaagagaaaataaatgtgcgcataatagatcaaggctcatcggaaataaacattatcgttggagttaacgaagaagattttgagagagcaatagtggctatttacaacgagtttgtggggtaa

SEQ ID NO: 34834 - protein, 237 aa, Unknown
  Obtained from environmental sample
  DOMAIN (176)...(237): ACT domain
  misc_feature (1)..(237): Xaa is any amino acid
MPALRNWTDVSGLLMADSRIVQGAHSINYVSYREIRELAYSGASVLHDESIYPCRAKNIPINIKNTNSPGDQGTIIGPTPEHTSSIITGVAGRKDFSMLYIEKSMMNKERGFGRKVLTILEERGVSYELSPCGIDSMNVVVDSKTLHRVKAEVCAEIEQKMQPNKMKIFDKVALIATVGHGMVNQIGTAARLFGALAKEKINVRIIDQGSSEINIIVGVNEEDFERAIVAIYNEFVG

SEQ ID NO: 34835 - DNA, 1041 bp, Unknown
  Obtained from environmental sample
  misc_feature (1)..(1041): n is a, c, g, or t
ttgatactgtttcttgcgctaatgtacagattcgccgacagcaaagtttttaaaatcggcgttgcgattgcggcgggcgggtgcgtggggcttctcctttcaagcatgagccctttttttatgactaaattnttcgttgtagtttttatggttcttttcagtacgggcgaacataccatcatgccggtacggactacaatctccatggacttggcaaaaaaagaaaagacgggcgcttctttgggactgtcaaactcaataagccaattcggaaacatagcgggatttatttttgttaccgtgctttttttctttcttaacaaaatgggttttaacagaaaagatgttttcgggtacagaattgtctttgccgccgccgccgcgttaatgacatccgccgctcttgtcgcgtccgctttgcgcgagactacgctcaaggcgcagcggcgaagattttatttcgcgaaaaaattttacaagtattatatgctggaaattttttatggggcgcgcaaacaaattttccttaccttcgccccgtatgtgctgattctgcagtacggagccgatccttccattatgtcaatactttacgctatttgcgccgttttcggaatgtgctttagccaccttatcggaagaataatcgacaaggttgggtataaggcggtcatggtcgccgatactctcattttaatagttgtctgtcttctttacgggttcgcgcacagactgttttcgtataataccgcctttatagtagtctgcgttaattttgtaatggactcgattatttccatagccagcatggcgagtaacatctatgtacagcgtattgcgtccaataaggaagaagttaccgctaccctttcaacgggaatctcggtaaatcatatcatcagtatttttatagcgctaatgggcggctggatttgggaagttacaggtatcgagtttcttttttcgctctccgcctttctgggtttattaaacagcatttacgcggcgacgattaaaaaagaaggcgaggtttctacctga

SEQ ID NO: 34836 - protein, 346 aa, Unknown
  Obtained from environmental sample
  DOMAIN (3)...(313): Major Facilitator Superfamily
  misc_feature (1)..(346): Xaa is any amino acid
MILFLALMYRFADSKVFKIGVAIAAGGCVGLLLSSMSPFFMTKXFVVVFMVLFSTGEHTIMPVRTTISMDLAKKEKTGASLGLSNSISQFGNIAGFIFVTVLFFFLNKMGFNRKDVFGYRIVFAAAAALMTSAALVASALRETTLKAQRRRFYFAKKFYKYYMLEIFYGARKQIFLTFAPYVLILQYGADPSIMSILYAICAVFGMCFSHLIGRIIDKVGYKAVMVADTLILIVVCLLYGFAHRLFSYNTAFIVVCVNFVMDSIISIASMASNIYVQRIASNKEEVTATLSTGISVNHIISIFIALMGGWIWEVTGIEFLFSLSAFLGLLNSIYAATIKKEGEVST

SEQ ID NO: 34837 - DNA, 1437 bp, Unknown
  Obtained from environmental sample
  misc_feature (1)..(1437): n is a, c, g, or t
ttgaacgcaaagattactggcttttctaaaatagaaggcgcttcacaccatctgttaggtgtaattaacgatattctggacatgtcaaaaatagaggccaacaaatttgaactcgctccgattgaattcgatttggagaaaatgctccagcgcgtggtcaatgtcgtcaatttccgcatagatgaaaagcatcaaaaactttcaatacatatagacagggcgattccccgcatgctcataggggacgatcagcgtatagctcaggtcatcaccaacctgatggggaacgcgataaaattcaccccggaaaacggttctatcacccttgacgcgcaattggccggaataggaaacgaaatttgtaccctgcaaatttcggtaagcgacaccggaatcggcataaaacccgaacaaaaggaaaggatttttgactcttttgagcaggcggaatccagcacaacccgcaaatacgggggcacgggactgggcctggcaatttccaaaaaaatagtggaaatgatgggcggcactatttgggtagagtcagacccggggaaaggctcaactttttcctttaccgctcaactggagcgcggcacgaacggaacacacgcgctgttatccgacgatataaatttagacaacctccgtattttaaccgttgacgacgaccctgatattttaacgtacttccttgatatagcgcagagcttcggcataacttgcgacgcggccataagcggggaaaaagcccttgatctgataacgcaaaaaaacggctaccatatctattttatcgactggaggatgccgggcatggacggcatacagcttgcccgtgaaataaagaaccgcgtggcggaaaaccccattgtaataatgatctccgccgccgaatggagcgcgattgccgaagaagcgaaaacggcgggcgttaataaattcctttccaagcccctgttcccctctaccatagcggaagtgattaatgattgtctgggcgttgacaaaaagcaggcggaaaaatcgaaggcagcggaaattgccggtattttcgcggggcgccgcatactgctggttgaagacgtggaaataaaccgcgagattatactgaccctgcttgaaccgacaaagctggagatagactacgccgaaaacggcgtggaagcggtccgtatgtttaccgaagccccgcgcaggtacgaaatgattttcatggatatacagatgcccgaaatggacggctatgaagcgacgcggcgcatcagggcgctggatattccggaggcgaagaccatacccatagtcgcaatgacagctaacgtgttcaaagaggatattgaaaaatgccttgactccggcatgaacagccatgtgggtaaaccggttgatatcgacgaagtcctgaacagtcttcgcaagtatttgagtggttaa

SEQ ID NO: 34838 - protein, 478 aa, Unknown
  Obtained from environmental sample
  DOMAIN (81)...(197): Histidine kinase-, DNA gyrase B-, and HSP90-like ATPase
  misc_feature (1)..(478): Xaa is any amino acid
MNAKITGFSKIEGASHHLLGVINDILDMSKIEANKFELAPIEFDLEKMLQRVVNVVNFRIDEKHQKLSIHIDRAIPRMLIGDDQRIAQVITNLMGNAIKFTPENGSITLDAQLAGIGNEICTLQISVSDTGIGIKPEQKERIFDSFEQAESSTTRKYGGTGLGLAISKKIVEMMGGTIWVESDPGKGSTFSFTAQLERGTNGTHALLSDDINLDNLRILTVDDDPDILTYFLDIAQSFGITCDAAISGEKALDLITQKNGYHIYFIDWRMPGMDGIQLAREIKNRVAENPIVIMISAAEWSAIAEEAKTAGVNKFLSKPLFPSTIAEVINDCLGVDKKQAEKSKAAEIAGIFAGRRILLVEDVEINREIILTLLEPTKLEIDYAENGVEAVRMFTEAPRRYEMIFMDIQMPEMDGYEATRRIRALDIPEAKTIPIVAMTANVFKEDIEKCLDSGMNSHVGKPVDIDEVLNSLRKYLSG

SEQ ID NO: 34839 - DNA, 345 bp, Unknown
  Obtained from environmental sample
  misc_feature (1)..(345): n is a, c, g, or t
atgcctaaaaaaataacagagactgaaaagtaccttgtgaatatgactaaaaacgctgaagatgatttaagcgaaatagtactgtccattgcccaatataatccgcaaaccgcgctgaaaatactggaaaagattcaaacaaaaataaatacactggatcattctccaaataagggagcttatgtccctgaattgttatacaagaatataagggattacaggcaaataacagaattgccatggaaaattatttataaggtaaatgatgatattgtttatatattggcaataatggatttaaagagaaatttatcggacgtattactaaaaaaattgcttaattaa

SEQ ID NO: 34840 - protein, 114 aa, Unknown
  Obtained from environmental sample
  DOMAIN (13)...(104): Plasmid stabilisation system protein
  misc_feature (1)..(114): Xaa is any amino acid
MPKKITETEKYLVNMTKNAEDDLSEIVLSIAQYNPQTALKILEKIQTKINTLDHSPNKGAYVPELLYKNIRDYRQITELPWKIIYKVNDDIVYILAIMDLKRNLSDVLLKKLLN

SEQ ID NO: 34841 - DNA, 1017 bp, Unknown
  Obtained from environmental sample
  misc_feature (1)..(1017): n is a, c, g, or t
atgaaagtagtcgtcattggcgctcagtggggcgatgaggggaaaggcaagatagttgattatcttgcgggcgaggcccagatgattgtccgcttttcaggcggcgcgaacgcggggcataccatcgttattggcggcgagcaatacgctttgcacctgattccttcgggtgttttttattccgataaaattgtcattctgggagccggcatggtgatcgatccggtagcgttattcgatgaaattaaaatgctggaagaccggggtatcgacaccacggggcgggttttaatttctgatcgggcgcacctggtgctgccacgttacataaaaattgacaaagaacgggacgcggcgcgcaaaaaaccaatcggcacgacgggccgcggcattgggattacctattccatgaaaagcgaccgcgagggaatccgcattgcggaccttgcgtggaaagataaaatggcggaacttgaggctgaagaccgtgatttcctggccccctataccgaaaggctccttgccatgtcggttgatcttgcgtcgtatctggtacaccggaaaaattcgcaaatattgtttgaaggggcgcagggaactttgcttgatcttgatttgggaacctatccctatgtgagcagcggaatgtcctgcgccgcgggagcggcggtaggcggctgtatcggaccgagggccatcgacaaggtgttgggggtttttaaggcttattcaacccgcgtggggaacggccccctgcccagcgaatttgatccccaggccgaggatgagttatgccgttttgtccgcgaaaccggccgcgaatacggcgttaccaccggaagaccccggcgctgcggttacctggatttggtttccctgcgctacgcctgcataaccaactcaatcgacagcctggtgatgacccatcttgatgtgtacgatactttcgatgaaataaaagcctgtatcgcctaccgcatcggcgaccgcatgggggaaaattccccgcttccttga

SEQ ID NO: 34842 - protein, 338 aa, Unknown
  Obtained from environmental sample
  DOMAIN (2)...(330): Adenylosuccinate synthetase
  misc_feature (1)..(338): Xaa is any amino acid
MKVVVIGAQWGDEGKGKIVDYLAGEAQMIVRFSGGANAGHTIVIGGEQYALHLIPSGVFYSDKIVILGAGMVIDPVALFDEIKMLEDRGIDTTGRVLISDRAHLVLPRYIKIDKERDAARKKPIGTTGRGIGITYSMKSDREGIRIADLAWKDKMAELEAEDRDFLAPYTERLLAMSVDLASYLVHRKNSQILFEGAQGTLLDLDLGTYPYVSSGMSCAAGAAVGGCIGPRAIDKVLGVFKAYSTRVGNGPLPSEFDPQAEDELCRFVRETGREYGVTTGRPRRCGYLDLVSLRYACITNSIDSLVMTHLDVYDTFDEIKACIAYRIGDRMGENSPLP

SEQ ID NO: 34843 - DNA, 909 bp, Unknown
  Obtained from environmental sample
  misc_feature (1)..(909): n is a, c, g, or t
atggccgtcctgtttgactgttccaccgataacatttccctgcatttgaaaagtatctacgctgaagatgagctttcagagcctgcaactaccgaggatttctcggtagttcaacatgagggtagccgggaagttcagcggatagtcaaatattacaatctcgacgctataatcgctgtaggatacaggattaacaccaagcgagccaccgctttccggcaatgggctacctcggttttaagggactatgctttgcggggttacgtcatagaccggaagcgcatggaaaacggctcttttcttgacgaggactattttgaacaccttcttgcggagattagggaaatccgccttagcgagcgacgcttttaccaaaagataacagacatctactccaccgctatggactacaacaaaaacgcccccataacaaaagagtttttctccaaggtacaaaacaaactgcactttgccattcacggtcataccgccgccgaggttatttatgaacgggccgatgccgccaaggagcacatgggattgactacgtgggaaaacagcccacagggaaaaattgttaaaacggatgtgatcgtcgcgaagaactatctgactgaaacagaactggaatctttgggacgcatagtcaacgcctatctcgatttggctgaagaccgcgcaaaaaagcatatccctatgaccatggaagactgggccaaacgtctcgaccgctttcttgaggccgatgacaggtcgattcttcaagactcaggaaagataagcgcccaacttgcaaaagaattcgccgaaagcgaatttgaaaaataccgcatcattcaagaccgcttgtttgaatctgattttgacagggaaatcaaaagtatcaaaggaaaacggccgaaggagtag

SEQ ID NO: 34844 - protein, 302 aa, Unknown
  Obtained from environmental sample
  misc_feature (1)..(302): Xaa is any amino acid
MAVLFDCSTDNISLHLKSIYAEDELSEPATTEDFSVVQHEGSREVQRIVKYYNLDAIIAVGYRINTKRATAFRQWATSVLRDYALRGYVIDRKRMENGSFLDEDYFEHLLAEIREIRLSERRFYQKITDIYSTAMDYNKNAPITKEFFSKVQNKLHFAIHGHTAAEVIYERADAAKEHMGLTTWENSPQGKIVKTDVIVAKNYLTETELESLGRIVNAYLDLAEDRAKKHIPMTMEDWAKRLDRFLEADDRSILQDSGKISAQLAKEFAESEFEKYRIIQDRLFESDFDREIKSIKGKRPKE

SEQ ID NO: 34845 - DNA, 372 bp, Unknown
  Obtained from environmental sample
  misc_feature (1)..(372): n is a, c, g, or t
atggaatatgtctaccccgcaatttttcaccggaatgaggacaaaagctatacggttacatatcctgacttgcctggatgtattagcgaaggaaaaaccctcgggaatgccatatatatggcgcagtcagctttaacccaatggattggttacctcgtggacaaaaggcaagagatacccagcgcctcatcgatagaggaagtaaaaccatcagatggcgattttgtgaatctcatttgcgccgagctaagggacggccgggcggtcaaacggactgtcagtattcccaaatggatggacgataaggtaattcagtccggcttgagcttgtccagggtattgcaggatgcgttgagggagaggctggggtaa

SEQ ID NO: 34846 - protein, 123 aa, Unknown
  Obtained from environmental sample
  DOMAIN (4)...(51): Uncharacterised protein family (UPF0150)
  misc_feature (1)..(123): Xaa is any amino acid
MEYVYPAIFHRNEDKSYTVTYPDLPGCISEGKTLGNAIYMAQSALTQWIGYLVDKRQEIPSASSIEEVKPSDGDFVNLICAELRDGRAVKRTVSIPKWMDDKVIQSGLSLSRVLQDALRERLG

SEQ ID NO: 34847 - DNA, 309 bp, Unknown
  Obtained from environmental sample
  misc_feature (1)..(309): n is a, c, g, or t
atggtcctatttttccagcgggagatattatttttaatgattgataaccggaatataacaaacctttccgttaacattgcgggagtaattttaaaaaatcccgtaattgcggcgtcaggaactttcggatacggacgtgaatacggctcaatttttgacgtatctcttttagggggaatatgcacaaaggggcttactatgtatccgagaaaaggaaacaacggaacacgcgtatgggaaactccgagcggtttattaaactcaatcggacttgaaaatccgggtatccggtcggccaatctgtcatga

SEQ ID NO: 34848 - protein, 102 aa, Unknown
  Obtained from environmental sample
  misc_feature (1)..(102): Xaa is any amino acid
MVLFFQREILFLMIDNRNITNLSVNIAGVILKNPVIAASGTFGYGREYGSIFDVSLLGGICTKGLTMYPRKGNNGTRVWETPSGLLNSIGLENPGIRSANLS

SEQ ID NO: 34849 - DNA, 786 bp, Unknown
  Obtained from environmental sample
  misc_feature (1)..(786): n is a, c, g, or t
atgtgtgtttcaaataacgcaaaaagcgttctgtgtgaacttgcagccaatataaaagttaatagtgaattttttatactgcattttaactgggacgggcctcccccgctggcaggacagttttttatgataaggcccgaattttcatccgtttttcttatgcgcccgattagcatctttgaatatgttccatcgcagaaactgataaaatttttaattgtaataaaaggcgcgggaacgcgggaactttcatttttacagcccggtgagaaagcaagattaacaggtcctcttggaaacacatgggccggttttctgccagaaaacggcaaagtggctcttataggcggcagcgccggagtcgctccccttgcggcgttagcggcggaaaaaccggattataattttcacttttacgccggttttagaaacggttttgataaaaaagacgaagaaaacgccgttcttggccgcgctttaaacgcgaaaaaactcgtaatcagcgccgaagacggaaaaaacgccttaaacgggcgcataacagactttattaacgaacaggagaattatgacgtaatattcacatgcggttctgtccaaatgttaaaagccgtaaaagaaagattcgtttcaaaaaatattccctgttatgtgtcaatggaaagcaggatggcctgcggaacaggcgcgtgccttggctgtacgattcaaacgttaaagggcggcagacgctgctgcgccgatggtcctatttttccagcgggagatattatttttaatgattga

SEQ ID NO: 34850 - protein, 261 aa, Unknown
  Obtained from environmental sample
  DOMAIN (113)...(207): Oxidoreductase NAD-binding domain
  misc_feature (1)..(261): Xaa is any amino acid
MCVSNNAKSVLCELAANIKVNSEFFILHFNWDGPPPLAGQFFMIRPEFSSVFLMRPISIFEYVPSQKLIKFLIVIKGAGTRELSFLQPGEKARLTGPLGNTWAGFLPENGKVALIGGSAGVAPLAALAAEKPDYNFHFYAGFRNGFDKKDEENAVLGRALNAKKLVISAEDGKNALNGRITDFINEQENYDVIFTCGSVQMLKAVKERFVSKNIPCYVSMESRMACGTGACLGCTIQTLKGGRRCCADGPIFPAGDIIFND

SEQ ID NO: 34851 - DNA, 1032 bp, Unknown
  Obtained from environmental sample
  misc_feature (1)..(1032): n is a, c, g, or t
ttgttttctgtttttgcttgtaccgctcagaaagcttcaggtgaaagttcatcagtaaactccggtacaaaacaagtttccgccgattccgcgctgggggacggcctttttgcaagaatcactacctccaggggagacattgtgcttcgcctggaataccaaaaggttccgatgactgtctgcaacttcgtggctctggcggaaggcaagatgactgccgccggaggcaaacctttttacgacggccttgtctttcaccgcgtaataaaagactttatgatccagggaggcgatccccttggcaacggttcaggcgggcctggttaccgtttccccgatgaatttgattccagtcttaagcatgacggccccggggtgctttccatggccaatgccggcgcaggtacaaacggcagccagttttttatcacccatgtggaaacgccctggcttgacgggaagcactcggttttcggcagggtagtcaagggtcaggatgtggtcgatgccatacaacagggagataagatagaaaaggtcaccatcattcgcaacggcgaggcggccgcgaacttcagggcggatcaaaccgtttttgacgcgttggtccgcaacagcgaatcggccgccgcggcaaaggcgaaggtccgccaggaagaagaaatcgcggaaatcgcaagtaagtacccaaacgccgtggtaaattcctccggtntaaggtacatcgtgcaaaaacagggtaatgggcccaagcctgcttccggaagcaccgctgtggtcaacataaaaggaagcctggtttcaggcatggtttttgccaattcggatctttctggcggcgcggaagaattgcctgtcgggactggcaaaatccttcccggccttgacgaagcaataatgggcatgtcaaagggcgagaagcggctggcaatagtcccgcctgagttgggatacggaaacagggacattaacaacatcattccggcgaatagttttctgatttttgaactggaactggtggatataaggtaa

SEQ ID NO: 34852 - protein, 343 aa, Unknown
  Obtained from environmental sample
  DOMAIN (247)...(340): FKBP-type peptidyl-prolyl cis-trans isomerase
  misc_feature (1)..(343): Xaa is any amino acid
MFSVFACTAQKASGESSSVNSGTKQVSADSALGDGLFARITTSRGDIVLRLEYQKVPMTVCNFVALAEGKMTAAGGKPFYDGLVFHRVIKDFMIQGGDPLGNGSGGPGYRFPDEFDSSLKHDGPGVLSMANAGAGTNGSQFFITHVETPWLDGKHSVFGRVVKGQDVVDAIQQGDKIEKVTIIRNGEAAANFRADQTVFDALVRNSESAAAAKAKVRQEEEIAEIASKYPNAVVNSSGXRYIVQKQGNGPKPASGSTAVVNIKGSLVSGMVFANSDLSGGAEELPVGTGKILPGLDEAIMGMSKGEKRLAIVPPELGYGNRDINNIIPANSFLIFELELVDIR

SEQ ID NO: 34853 - DNA, 840 bp, Unknown
  Obtained from environmental sample
  misc_feature (1)..(840): n is a, c, g, or t
ttgccgcagaactttttcggcgttgaaatccccgaacagtcggcggatttttccgaggaagctttaaccgccgcggcagtccccgttcaggaaacggacatagccgacgcgcgcggtaaagaagttaaaaaagacggcgatttatttcaattcgaaaaaaatgaagtctctcttttgaacagcgccggcaaagaagccgcccctttgcaaaaagagacggaaaaagacagccgcgtaaaaccgggagaagcgcaaagccgcagccgccgcgacaaactttcttttgaagtgcgcgacatgcgttccggtatggacaatcaaaacaatgtgacgcagataaaagcaggcgctcagattgaacgtacgcagaatattcctgtaagggaattaactcttgaactgcggctgccgggcaatgcgcaaagtacggcgcagaccgcgtgggaggtaaaagcgggaggcgccgccgttgagaacatgcttgcgagggaactgcaccagaactttaacggcgacattgtgcgccatgcttccatggcgcttcatgacggaggggagggggttataaagcttgcccttaaaccggacagtcttggaaatgtaaagatacacctgaaaatgtccgaaaacaagataacggggcatattgtcgttgaaagcgaggaagccctgaacgcgttcaggaaggaaattacttctttggaacaggctttcagggattcaggctttgaaaacgcccggcttgatctgtcgttaaccgccgatcagcggaatacggattggcaggaacagaaagcgccttctccttttacaggggatgcggcttcccgtttacgatga

SEQ ID NO: 34854 - protein, 279 aa, Unknown
  Obtained from environmental sample
  DOMAIN (113)...(254): Flagellar hook-length control protein
  misc_feature (1)..(279): Xaa is any amino acid
MPQNFFGVEIPEQSADFSEEALTAAAVPVQETDIADARGKEVKKDGDLFQFEKNEVSLLNSAGKEAAPLQKETEKDSRVKPGEAQSRSRRDKLSFEVRDMRSGMDNQNNVTQIKAGAQIERTQNIPVRELTLELRLPGNAQSTAQTAWEVKAGGAAVENMLARELHQNFNGDIVRHASMALHDGGEGVIKLALKPDSLGNVKIHLKMSENKITGHIVVESEEALNAFRKEITSLEQAFRDSGFENARLDLSLTADQRNTDWQEQKAPSPFTGDAASRLR

SEQ ID NO: 34855 - DNA, 465 bp, Unknown
  Obtained from environmental sample
  misc_feature (1)..(465): n is a, c, g, or t
atggaaatagatgcgaacaatatgaccagaacggttttgaattcgactgaaaaaaacgaacttgaaaaaatggttcgcgattttaatcttaagacaaacccggtgcggcagccgcagcaaaatttgggcagagacgattttcttaaaatcttaattacccagctttcataccaggacccgacagctccaatgcaggacaaggaatttattgcgcagatggcgcaattttcgtctttggagcagatgacggcgatggcgaaagatttttcgaagcttaccgcgataattggctcaaacgaagcgtctacttcgcttggaaaaaatgttgaggttgtagaaggagagcgccttattcaaggcgcggtacaggcggtaacaagaggggaaactccgcaggttctggtaaatgggactttttataattgggataaagtagtcaaagtatttgcagatgaaaaggaatag

SEQ ID NO: 34856 - protein, 154 aa, Unknown
  Obtained from environmental sample
  DOMAIN (10)...(152): Flagellar hook capping protein
  misc_feature (1)..(154): Xaa is any amino acid
MEIDANNMTRTVLNSTEKNELEKMVRDFNLKTNPVRQPQQNLGRDDFLKILITQLSYQDPTAPMQDKEFIAQMAQFSSLEQMTAMAKDFSKLTAIIGSNEASTSLGKNVEVVEGERLIQGAVQAVTRGETPQVLVNGTFYNWDKVVKVFADEKE

SEQ ID NO: 34857 - DNA, 804 bp, Unknown
  Obtained from environmental sample
  misc_feature (1)..(804): n is a, c, g, or t
atggccattgccgctgaggagataaaatcccggcttgtttccacttccagcgtctatctgctttccggctggattcccgccgacatgattaaccaaacggccggtgatctttcaaagatcacccatggcaggacggcaatccgtatctatgtccccgatgaagtccccgaagtgaaggacggcagcgagaaagtgcccgtctccatgaaacacggcaaatttgtaaaaggttttgaaggcgttatcttttcctacggcgcgccgctctacggcactatcgatccaacgcccattgtcgccattttttttacgctgctttttgggatcatgttcggcgattcggggcaaggcgccgtattgctgctgttgggcctgcttaccggcaattaccgccgtcttgcgaaattcaaaagttattccaccccgctgatatcggtaggcatcgcctcaatattgatgggcttcgttacaggcgagattttcaccagagaggatctgcttgtagtcccgacaagggcgattactcaagtccttaccggccgcccgatagacaggctgcttaccgtcatgcctctcgccgagcacggcggcagcgttattaaacttttctatttctttggatttaccatcggcatggggattattctcaactcgctgggactcctgataaatatatataacaagtgcgcgcttaaaaaatacgaagaagcgtttttcgggaaaacagggctggccggccttctgctgttctggtatgcgatattcatcgcgctgcgctgtattttttttaaagaggcgttttga

SEQ ID NO: 34858 - protein, 267 aa, Unknown
  Obtained from environmental sample
  misc_feature (1)..(267): Xaa is any amino acid
MAIAAEEIKSRLVSTSSVYLLSGWIPADMINQTAGDLSKITHGRTAIRIYVPDEVPEVKDGSEKVPVSMKHGKFVKGFEGVIFSYGAPLYGTIDPTPIVAIFFTLLFGIMFGDSGQGAVLLLLGLLTGNYRRLAKFKSYSTPLISVGIASILMGFVTGEIFTREDLLVVPTRAITQVLTGRPIDRLLTVMPLAEHGGSVIKLFYFFGFTIGMGIILNSLGLLINIYNKCALKKYEEAFFGKTGLAGLLLFWYAIFIALRCIFFKEAF

SEQ ID NO: 34859 - DNA, 1356 bp, Unknown
  Obtained from environmental sample
  misc_feature (1)..(1356): n is a, c, g, or t
ttgacaaaagctattgacccagtactgaaagaaattgcctctatattcaacaacaacgggaaacaggtgtaccttgtgggcggcgcggtgcgggatatgctgatggggaaaaaaaatcacgattgggatttggctacggacgcgctgccggaagaagtgaccgccatagtcaaaggcgcaaggggaaaggttatccccacagggataaagcacggtacagttaccgttctttacaaaaagtacagtatcgaagttaccacattcaggcttgagtcagattattcggacgggcgcaggccggatacggttcaattttcaacgaatatcgaagaagacctttcgcggcgcgacttttgtatgaacgctattgccttacgccttccggctggagaagttgtcgatccctttggaggcgagaaggacataaaagcgaaaattatccgctgtgtggggaatgcggcggacaggttcggcgaggacggactgcgcccgctgcgggcgaatcgttttgccgcacagctttcctttactctgaaaccggaaactttggcgnccattcccgacgccctggaaaccagcgcaaaagtatcggcggaacgggtaagggacgaaattgagaaaattatcgcgtccgataaaccttcccgcgcctttttattgatggaacaaagcggcctgctcaaactttttctgccggaacttgccgcctgccggggcattgatcaaaaaggcttccaccgttttgacgttctggaacattccctgtttgcctgcgattatgccgctgaaaagaaatattcccaggatgtgcggatcgccgccctgttacacgatattgggaaagtccccacccgcacccttgatgaaagcggcatttgggctttttatcggcatgaaaccgaatcggaaaaaatgacacggaatatactgacgcggctgcgttatccgaaggtgtgtatcgactcggcctgtcatctggtgaaagagcatatgttccattatacggacgaatggggcgatgccgcggtccgccgttttattgtccgtgtgggtgaggacaatcttgcaaagatgtaccaactccgcagggccgacgcctatgccaccaccgcagttgaaccgccgccggattttcttcttccccttacccgccgcgtggaaaaagccctcggcgaaagccatgctttttcgctgaaagaccttgccgtttccggcaaagacttgatcacattggggattaagcccggaaaaaccatgggcatcatccttgaggaactgcttgaaaccgtactggatgaccctgcccagaatacccgtgaggcattgctcaaaattgcggaaaaagctgtggtataa

SEQ ID NO: 34860 - protein, 451 aa, Unknown
  Obtained from environmental sample
  DOMAIN (250)...(370): HD domain
  misc_feature (1)..(451): Xaa is any amino acid
MTKAIDPVLKEIASIFNNNGKQVYLVGGAVRDMLMGKKNHDWDLATDALPEEVTAIVKGARGKVIPTGIKHGTVTVLYKKYSIEVTTFRLESDYSDGRRPDTVQFSTNIEEDLSRRDFCMNAIALRLPAGEVVDPFGGEKDIKAKIIRCVGNAADRFGEDGLRPLRANRFAAQLSFTLKPETLAXIPDALETSAKVSAERVRDEIEKIIASDKPSRAFLLMEQSGLLKLFLPELAACRGIDQKGFHRFDVLEHSLFACDYAAEKKYSQDVRIAALLHDIGKVPTRTLDESGIWAFYRHETESEKMTRNILTRLRYPKVCIDSACHLVKEHMFHYTDEWGDAAVRRFIVRVGEDNLAKMYQLRRADAYATTAVEPPPDFLLPLTRRVEKALGESHAFSLKDLAVSGKDLITLGIKPGKTMGIILEELLETVLDDPAQNTREALLKIAEKAVV

SEQ ID NO: 34861 - DNA, 915 bp, Unknown
  Obtained from environmental sample
  misc_feature (1)..(915): n is a, c, g, or t
gtgcagatcagtgatgagaatgtgcatttagtcagatgtttatgtgatgaaatttttagtaaagataatcaagttgcaactatatgttataagaaacctggtcaacgatcatcaaatacacttagtattctaaccgattttattatttggtactgtaaagataaagaaaaagtaaagtataaccaattatatttagaaaaatctttaagtggtttaggtggttcacattataatcaagttgaattaaaagatgggtctattcgcacaataaagcaagaggaaataataaatccaaaactattaccagatggtgcaaaagtttttgaaacgactgctttaacatcggctgggtcacaatcaggtgatgattgttttaattttaataaaaaagattattatccgcctccacacaaacattggagttgttctattgaaggattaaaaaatgttgctaaagcaggtagaatagtaccaacaaatacaacgatacgatacaaacgatattttaatgatttaaatgtaatggaattggataatcgttggaatgatgttggtctttatggggaatctatttatgtagtgcaaactgggattttatctatccagcgctgtctcctcatgaccaccgaccccggcgatctagtactcgacattacctgcggaagcggaaccacagcctacgttgccgaacaatggggacgccgctgggtaacctgtgacacttcgcgcattgccatcacccttgcaaaaaaacgcctaatgaccgcaacatttgattattacaaactggcgcatcctgaacagggagtatcaagcggcttcgtgtataaaacagtcccgcacatcacactaaaagtcatagcaaataacgaaccgcccgaacagggaaacgctctacgactacccgnaaaataa

SEQ ID NO: 34862 - protein, 304 aa, Unknown
  Obtained from environmental sample
  DOMAIN (1)...(251): DNA methylase
  misc_feature (1)..(304): Xaa is any amino acid
MQISDENVHLVRCLCDEIFSKDNQVATICYKKPGQRSSNTLSILTDFIIWYCKDKEKVKYNQLYLEKSLSGLGGSHYNQVELKDGSIRTIKQEEIINPKLLPDGAKVFETTALTSAGSQSGDDCFNFNKKDYYPPPHKHWSCSIEGLKNVAKAGRIVPTNTTIRYKRYFNDLNVMELDNRWNDVGLYGESIYVVQTGILSIQRCLLMTTDPGDLVLDITCGSGTTAYVAEQWGRRWVTCDTSRIAITLAKKRLMTATFDYYKLAHPEQGVSSGFVYKTVPHITLKVIANNEPPEQGNALRLPXK

SEQ ID NO: 34863 - DNA, 321 bp, Unknown
  Obtained from environmental sample
  misc_feature (1)..(321): n is a, c, g, or t
atggacggtcaagccataaaggatactttaggcaaaaatatcaagatttttagagccagaaggggtctttctcaagcggatttatccgaaaaagcgggtatttccattccttttttaagtaatatcgagcgtggcattaaatatccccagcctgatatgctagcaaaaatagccaattcgcttggtgttgcggtcaacgagttatttactgtcaatcttgagtctgccgaaagcagtgatttattaagccatttatcagaagatatgaccaaaaacgtcaatattacaatgaccgaagtttttaagcggtatatggggtaa

SEQ ID NO: 34864 - protein, 106 aa, Unknown
  Obtained from environmental sample
  DOMAIN (14)...(68): Helix-turn-helix
  misc_feature (1)..(106): Xaa is any amino acid
MDGQAIKDTLGKNIKIFRARRGLSQADLSEKAGISIPFLSNIERGIKYPQPDMLAKIANSLGVAVNELFTVNLESAESSDLLSHLSEDMTKNVNITMTEVFKRYMG

SEQ ID NO: 34865 - DNA, 504 bp, Unknown
  Obtained from environmental sample
  misc_feature (1)..(504): n is a, c, g, or t
ttggccgagaatttttatttagatgctgtaagaataccacaaaaatatccacaaaaaaaatacttcaaaggtcctagaattggagaattgtcttgtaatccattaggaaaaaatccgagtgatatatgggatattcccaatgtaaaaaataatcatgttgaaaaaacagttcacccttgtcaatttccaattgaattagttgaaaggcttgtacttgcgttaacaaatgaaaatgatatggtatttgatccttttctaggagtgggatcaacatcagcggcggcaataaaaaacaagcgtaaaggaatgggatgtgaaatagttgaagaatattataatattgccattgaaagaacaaaattagcaatggaaaaaaaattaaaaacccgtccaatgaataaacctatatatgatcccaaaaatccaaaagttaatttagaatatgaatgggaaataacatcaccacaatttgtattatttaataaaaagccagcatatctgtag

SEQ ID NO: 34866 - protein, 167 aa, Unknown
  Obtained from environmental sample
  DOMAIN (1)...(117): DNA methylase
  misc_feature (1)..(167): Xaa is any amino acid
MAENFYLDAVRIPQKYPQKKYFKGPRIGELSCNPLGKNPSDIWDIPNVKNNHVEKTVHPCQFPIELVERLVLALTNENDMVFDPFLGVGSTSAAAIKNKRKGMGCEIVEEYYNIAIERTKLAMEKKLKTRPMNKPIYDPKNPKVNLEYEWEITSPQFVLFNKKPAYL

SEQ ID NO: 34867 - DNA, 300 bp, Unknown
  Obtained from environmental sample
  misc_feature (1)..(300): n is a, c, g, or t
ttgctctttgcctgttcccaaatcttttgcgctgacgtgaacaataccgtttgcgtcaatatcgaaagttacttcgatctgcggaactccgcgcggagcgggaggtatgcctacaagatcgaaccgcccaagcacacggttttggttcgccatttcacgctcgccctgcaagacctgaatggagacggctgtttgtccgtctgcggcggtggagaagatttggctcttgcgtgtgggaattgtcgtgttgcgtgtgatgagttttgtcattacgccgccaagcgtttcaatgccgagtga

SEQ ID NO: 34868 - protein, 99 aa, Unknown
  Obtained from environmental sample
  misc_feature (1)..(99): Xaa is any amino acid
MLFACSQIFCADVNNTVCVNIESYFDLRNSARSGRYAYKIEPPKHTVLVRHFTLALQDLNGDGCLSVCGGGEDLALACGNCRVACDEFCHYAAKRFNAE

SEQ ID NO: 34869 - DNA, 747 bp, Unknown
  Obtained from environmental sample
  misc_feature (1)..(747): n is a, c, g, or t
atgacaaaactcatcacacgcaacacgacaattcccacacgcaagagccaaatcttctccaccgccgcagacggacaaacagccgtctccattcaggtcttgcagggcgagcgtgaaatggcgaaccaaaaccgtgtgcttgggcggttcgatcttgtaggcatacctcccgctccgcgcggagttccgcagatcgaagtaactttcgatattgacgcaaacggtattgttcacgtcagcgcaaaagatttgggaacaggcaaagagcaaaaaatccgcatcgaaagttccagcggtttaagcgactcggacattgaccgcatggtaaaagaagcggaactccacgccgaagaagataaaaaagagcgtgaaaaagccgaagtgcgcaatgaagccgactcgatgatctacgccacggagaaaaacataaaagacttgggcgacaaagtaagcgccgccgataaatccaaaactgaggaagccattgccgatttgcgcaaggctcttgaaagcggcgatattcagtcaatcaaggacaagaccgaagccttaaagcaggcgtcttacaaaatagccgaagaaatttacaagcagcaggccgcttccggacagcagggcggcgctcaaggcgcaggacctgatatgggcgagttcaatccgaacatgggcacaggcggctcctcaggcggcggtgaaaacaccaaaagcgccgaagatgcagactacgaagtggtagacgacaaataa

SEQ ID NO: 34870 - protein, 248 aa, Unknown
  Obtained from environmental sample
  DOMAIN (1)...(197): Hsp70 protein
  misc_feature (1)..(248): Xaa is any amino acid
MTKLITRNTTIPTRKSQIFSTAADGQTAVSIQVLQGEREMANQNRVLGRFDLVGIPPAPRGVPQIEVTFDIDANGIVHVSAKDLGTGKEQKIRIESSSGLSDSDIDRMVKEAELHAEEDKKEREKAEVRNEADSMIYATEKNIKDLGDKVSAADKSKTEEAIADLRKALESGDIQSIKDKTEALKQASYKIAEEIYKQQAASGQQGGAQGAGPDMGEFNPNMGTGGSSGGGENTKSAEDADYEVVDDK

SEQ ID NO: 34871 - DNA, 405 bp, Unknown
  Obtained from environmental sample
  misc_feature (1)..(405): n is a, c, g, or t
gtgatggcaaagcgggattactatgaggttctcggagtacagaaaaatgcctcgaaagatgaaataaaaaaagcatatcgtaagcttgccattcagtatcaccctgataaaaatcccggtgacaagcaggctgaagaaaaattcaaagaagccaccgaagcttacgagattctcggcgacgaccagaaaaaagccgcttatgaccaattcggctttgccggagtagaaggcatgagcggtcagggtgattattcaaatgtattccgcgggtttgaagacatattcggcgaaggcgggtttggcagcatatttgacagtttttttggaggcggttttcgaagaagttcatccggcggcgtaagacacggagccaatctacgttatgatattgaaatccgcgtttaa

SEQ ID NO: 34872 - protein, 134 aa, Unknown
  Obtained from environmental sample
  DOMAIN (6)...(68): DnaJ domain
  misc_feature (1)..(134): Xaa is any amino acid
MMAKRDYYEVLGVQKNASKDEIKKAYRKLAIQYHPDKNPGDKQAEEKFKEATEAYEILGDDQKKAAYDQFGFAGVEGMSGQGDYSNVFRGFEDIFGEGGFGSIFDSFFGGGFRRSSSGGVRHGANLRYDIEIRV

SEQ ID NO: 34873 - DNA, 1272 bp, Unknown
  Obtained from environmental sample
  misc_feature (1)..(1272): n is a, c, g, or t
ttgacatcaacgacaggcgtgtatcaagcgtcctgcttattgagtacgacaatgaccagaagcgtttggatcttccgaagcataccagcagggaggctgatgttgaagtttcctgacgatattcgggagctcgtcaaacgtaaatatcaaaacaaccgtcgggaatggctcaagatgtctgtgtcagataatgactcgcagaccacatggccgttggaattttgtcttggcatccccacagagaaggacgcgcttcaacagcaagagggggtaagggcatggattaccgcgtggaaatcatggcggggaagaggggaacttgtttggattgaacgtcattggcgctcccttgggatacaaaccgtcccacagaaattaattttgaatgaacctgcggatgtggtttcatggataggcgaggttgaggcctggtctaatgcgcttgaacattataaaacgctgatacaacgctggccgacgttgattgatattttgcccaaatattataacgttcttgccaactctgacgacggtaattttcttcgcataacagagatgttatcgtggatatgcgccaacccgtgttcagggctatatcctcgccaaatacctgtcgccggcgttgacagcaaatggctggaattccataaggggcttatctgcgatctggttttggcgattcggggaaccagtgaacgtgatttttttagggcttgcggtttaaaacctccgccgcagttaatccgtatgcgcattcttgacccggagatgagaagcagattcagcggactttgtgacatcagcgcctcttgggaagaaatagctaatcttgatattaaaccgacgcatgtttttattgttgaaaatcttcaaacagggcttgcttttgagattttggcccgttcccgttgtgatcatggcccggggtatggcgttgatgttttagggcgtattccctggcttcgtcatgcgcgatgtatttattggggagacattgacacgcatggttntgctattctgaaccgcgccagaacatacttgccttccctggaatcagcgctgatggataagcaaacattttttgcacaccgtgatttatgggttcaggagaaagagcaaagcgcgtcatctgaactgtctttactcactaacgaggaacaggaaattttcttgtcactgaaaaataatgtttggggacagcaaatccgtctggaacaagagcggatctgtttggatgcggcatgggaagcaataaaaaaatttctcaaataa

SEQ ID NO: 34874 - protein, 423 aa, Unknown
  Obtained from environmental sample
  misc_feature (1)..(423): Xaa is any amino acid
MTSTTGVYQASCLLSTTMTRSVWIFRSIPAGRLMLKFPDDIRELVKRKYQNNRREWLKMSVSDNDSQTTWPLEFCLGIPTEKDALQQQEGVRAWITAWKSWRGRGELVWIERHWRSLGIQTVPQKLILNEPADVVSWIGEVEAWSNALEHYKTLIQRWPTLIDILPKYYNVLANSDDGNFLRITEMLSWICANPCSGLYPRQIPVAGVDSKWLEFHKGLICDLVLAIRGTSERDFFRACGLKPPPQLIRMRILDPEMRSRFSGLCDISASWEEIANLDIKPTHVFIVENLQTGLAFEILARSRCDHGPGYGVDVLGRIPWLRHARCIYWGDIDTHGXAILNRARTYLPSLESALMDKQTFFAHRDLWVQEKEQSASSELSLLTNEEQEIFLSLKNNVWGQQIRLEQERICLDAAWEAIKKFLK

SEQ ID NO: 34875 - DNA, 435 bp, Unknown
  Obtained from environmental sample
  misc_feature (1)..(435): n is a, c, g, or t
atgggcaaagaaataattaaaaaaataattgataaatgtcttgaagaaaccccgtgcaaaattgtcgttcttgaagacgcgcctatgaaagaacacactacttttaaagtgggtggctccgccgactgcctattgcgtcctgaaggcgaaggctttgccgctttttgcgtaaatattttaaaccgttgcagtgccgaaaaaattccaatatttattcttggcggcggcgcgaatattgtagtctccgacaaggggatacgcggtatagtgttggatatgggagcgtggaaaggtgggaatgctcccgtaatagcctcccgcgaagacgaaattatatttaaaagcggaacaatcatagacgaagccgttgatatggtctgcgccgctggtttaagcggacttgagtttcttgccggaatgccccggtacgggtag

SEQ ID NO: 34876 - protein, 144 aa, Unknown
  Obtained from environmental sample
  misc_feature (1)..(144): Xaa is any amino acid
MGKEIIKKIIDKCLEETPCKIVVLEDAPMKEHTTFKVGGSADCLLRPEGEGFAAFCVNILNRCSAEKIPIFILGGGANIVVSDKGIRGIVLDMGAWKGGNAPVIASREDEIIFKSGTIIDEAVDMVCAAGLSGLEFLAGMPRYG

SEQ ID NO: 34877 - DNA, 381 bp, Unknown
  Obtained from environmental sample
  misc_feature (1)..(381): n is a, c, g, or t
atggattgcgtcattgtaaatgcgtcattcagattaaaaaaatgcaataaagaagaacaagaaaaaatgttaaataacataaaaaaatacagggaagacagagaaaaaaaagggcattaccgtttccccagcgccggttccgcttttaagaacaaccgtgattttggaaaacctacagggcaaatcatagacgaacttggtttaaaaagccggcaagtaggcggcgctcaaatagcccccttccacggaaatatcatcattaacacaggcagcgcgtccgcaaatgacatccgcgctcttgtggacgaaacagctttagaagttaaaaaaaagacaggatttatacttgaaccggaaatactttttgtcggcgaatggtag

SEQ ID NO: 34878 - protein, 126 aa, Unknown
  Obtained from environmental sample
  DOMAIN (20)...(124): UDP-N-acetylenolpyruvoylglucosamine reductase, C-terminal domain
  misc_feature (1)..(126): Xaa is any amino acid
MDCVIVNASFRLKKCNKEEQEKMLNNIKKYREDREKKGHYRFPSAGSAFKNNRDFGKPTGQIIDELGLKSRQVGGAQIAPFHGNIIINTGSASANDIRALVDETALEVKKKTGFILEPEILFVGEW

SEQ ID NO: 34879 - DNA, 804 bp, Unknown
  Obtained from environmental sample
  misc_feature (1)..(804): n is a, c, g, or t
atgatacaagttgcggggaaaaatggaagtattgttttacagggtgaatccgatgaaccgcgtgactgtacactcctgtataaatattgcgtgtccggtttacaaaaaggtaaaaagactgatttttttctttattttctatataatcagagcggattagtggatgttcgcattgaagcgaaagacggaacgttgttggatgtaaaaaaatccgaggcagacgaaacaatagacgaaataataaacaggttgctccgagagagggaagaacagaaacgcaaagctcgcgcggaaattatgtttatggtagacacatccggttcaatgtccggcaaacctgtacagctggcgcgtgaggctgtacgggattttgtaaaagaattggatttatcaagattcagtgtttcaatagtaaatttttcagatacaggcagatttgaatgtaaaaatgaaaaaaacctccgcaatattgagagggcaataacagcggtggcaattgatacttgcggctacggcaacgatgaaacgcctcttaattcattcggaaataaattcagtgaaaatgaaatgaatcacattattgtagttttaaccgatggagtatggagcgatcaagctactgaaattaaagctgccgaaagattaaagacgtccggtattacaatttacgcaataggttttggcggagctgatgaaagatttttaaacaggattgcgtcagacggatgcgggcaaaaagtagatttaagtaaccttagcgatgcttttgtggaaatcgcgggcagtatagccacggaaaagtag

SEQ ID NO: 34880 - protein, 267 aa, Unknown
  Obtained from environmental sample
  DOMAIN (98)...(263): von Willebrand factor type A domain
  misc_feature (1)..(267): Xaa is any amino acid
MIQVAGKNGSIVLQGESDEPRDCTLLYKYCVSGLQKGKKTDFFLYFLYNQSGLVDVRIEAKDGTLLDVKKSEADETIDEIINRLLREREEQKRKARAEIMFMVDTSGSMSGKPVQLAREAVRDFVKELDLSRFSVSIVNFSDTGRFECKNEKNLRNIERAITAVAIDTCGYGNDETPLNSFGNKFSENEMNHIIVVLTDGVWSDQATEIKAAERLKTSGITIYAIGFGGADERFLNRIASDGCGQKVDLSNLSDAFVEIAGSIATEK

SEQ ID NO: 34881 - DNA, 621 bp, Unknown
  Obtained from environmental sample
  misc_feature (1)..(621): n is a, c, g, or t
atgtcattgatgcgggaaaactgcctgaatgcccgctggcgcaggacgttcatcagaacgacagactcaacacatacccttgaagtctgtgaaaacatactcaaccgcgagtttcatgctgaaaaaggcgggcagaagtgggtttcagacattacgtacctgcgtacggtacacggctgggtgtacttgaccgtggtgcttgacctgtacgaccgtaaggtcattggctgggcactcagcgccggtatggagaccgcagatactaccatcgccgccttgaaaatggcggtaagaaaccggacgcctggggacggactgatatttcattcggacaggggcatccagtattgcgcccaatcctttcgtgctgcgttacgcgaaaagtgtccatcggttcgtcagagcatgagcaggaaaggcaattgctgggacaacgcgtgcgccgaatcattttttaaaacattgaaaagggaattggaaacactggacggaaaacactcagaggctgatgtcaggcagtcggtgtttttttacattgaggcgtactacaatcgtatccgtatgcattcggtacttgactatgttgcgcctaatgtgtttaactcaaggaaagtcgcttaa

SEQ ID NO: 34882 - protein, 206 aa, Unknown
  Obtained from environmental sample
  DOMAIN (39)...(202): Integrase core domain
  misc_feature (1)..(206): Xaa is any amino acid
MSLMRENCLNARWRRTFIRTTDSTHTLEVCENILNREFHAEKGGQKWVSDITYLRTVHGWVYLTVVLDLYDRKVIGWALSAGMETADTTIAALKMAVRNRTPGDGLIFHSDRGIQYCAQSFRAALREKCPSVRQSMSRKGNCWDNACAESFFKTLKRELETLDGKHSEADVRQSVFFYIEAYYNRIRMHSVLDYVAPNVFNSRKVA

SEQ ID NO: 34883 - DNA, 615 bp, Unknown
  Obtained from environmental sample
  misc_feature (1)..(615): n is a, c, g, or t
atggaacagaagattcaggagctaaccgaaaagatttacaaggaaggcgtcgagaagggcgaggctaaggccaaggatatcgtggccgaggccgagagcagggcggccgccatcgtcaaggaggccaaggcgcaagccgagaagctcgtagccgacgcgcacaagcaggccgaggacctcaagcgcaacgccgagtccgagctcaaaaactccggcgctcaggcgatcgcctctataaagaacaggatcgtcaacctgatcaccgccaaggtgctcgacgactccgtgggcaaggcgctctccgacccgggggcgctcaaggaattcgtctccaccgccgtccacaattggaagatggccggcggcgaagcgcccaacctggaggtgctcctccccgccgccaaacagagcgagcttcaggcgagcttcaacgccggcgccgggcaggcgctgggcgcgggggttacggtcaacttctccgcggacataaaagccggcttccgcatcggcccgtccgacgggacgtataagatcagcctcacagacgaggatttcaaggagttctttaaggagtacctgcgccccaaaacgcgcgcgtaccttttcggtgaataa

SEQ ID NO: 34884 - protein, 204 aa, Unknown
  Obtained from environmental sample
  DOMAIN (15)...(202): ATP synthase (E/31 kDa) subunit
  misc_feature (1)..(204): Xaa is any amino acid
MEQKIQELTEKIYKEGVEKGEAKAKDIVAEAESRAAAIVKEAKAQAEKLVADAHKQAEDLKRNAESELKNSGAQAIASIKNRIVNLITAKVLDDSVGKALSDPGALKEFVSTAVHNWKMAGGEAPNLEVLLPAAKQSELQASFNAGAGQALGAGVTVNFSADIKAGFRIGPSDGTYKISLTDEDFKEFFKEYLRPKTRAYLFGE

SEQ ID NO: 34885 - DNA, 750 bp, Unknown
  Obtained from environmental sample
  misc_feature (1)..(750): n is a, c, g, or t
atgatagacaagtttcaattaattaacgattataagtattattttcaatttaccttgaatccgtatgattcggatattgaagcaggattaccgcccaaacctgaaataattgaaacttttaaaaaattatcggatataatcggcccgcagaaagttatttggcgctatgatccaattttaataaacagcaaatataatacggcatatcatattgataaatttgagaaaacagccaatgtccttaaaggatatacggaaaaagtaataatcagttttattgatttttataaaaagattgcagaaaatattaaactattggagattattgaaatatcaatggaagaaaaaaagaccattgctcaaaaattttcagaaatagctaaaaataataatttttctattgatacctgcgcggaagatattgatctttcagaatacggcatttcgcatgcccgctgtatagacgacaggttaatttcaaaaataacaggatataatttacttgttgaaaaagacaaaaaccaacgtccggaatgtggctgtgttaaaagtattgatataggagaatataatacttgccctaacggttgtgtttattgttacgcgaattatagcaataatattgttaaaaaaaatatcaaaaaacatattcaatcatcgccgttattaacaggtgatatttgccctgaagatattataaaggaacgtaaagttacaagtgaaaaaatatttcagaatgagcttttttaa

SEQ ID NO: 34886 - protein, 249 aa, Unknown
  Obtained from environmental sample
  misc_feature (1)..(249): Xaa is any amino acid
MIDKFQLINDYKYYFQFTLNPYDSDIEAGLPPKPEIIETFKKLSDIIGPQKVIWRYDPILINSKYNTAYHIDKFEKTANVLKGYTEKVIISFIDFYKKIAENIKLLEIIEISMEEKKTIAQKFSEIAKNNNFSIDTCAEDIDLSEYGISHARCIDDRLISKITGYNLLVEKDKNQRPECGCVKSIDIGEYNTCPNGCVYCYANYSNNIVKKNIKKHIQSSPLLTGDICPEDIIKERKVTSEKIFQNELF

SEQ ID NO: 34887 - DNA, 453 bp, Unknown
  Obtained from environmental sample
  misc_feature (1)..(453): n is a, c, g, or t
gtgacaattcccgcgggggttgaaaacggaaggcggctggttattcaccaccaaggcgacgcgggccagaacggcgggccgtcaggcgatctgtatgtgataatccggataaggccccacgaatactttgaacggcataattttgatttgtactgcgcggtcccaatctcggtaacccaggcggccctgggcgcggaaatccgcatcagcacccttgacggcaagacgataaaggtaaaggtgcccgcgggaacccagaacggcaaaatgctccgcatccgcgacgagggcgtgccttcgggaagccaccggggcgatctctatatcaaattaattgtccgcgtacccgaaaaactttcccgccggggcaaggaactgctggaagaactggcccgcaccgaaggcgaaaacgacagccccggacctgtccccctttcgcagttaagcgagtaa

SEQ ID NO: 34888 - protein, 150 aa, Unknown
  Obtained from environmental sample
  DOMAIN (11)...(131): DnaJ C terminal region
  misc_feature (1)..(150): Xaa is any amino acid
MTIPAGVENGRRLVIHHQGDAGQNGGPSGDLYVIIRIRPHEYFERHNFDLYCAVPISVTQAALGAEIRISTLDGKTIKVKVPAGTQNGKMLRIRDEGVPSGSHRGDLYIKLIVRVPEKLSRRGKELLEELARTEGENDSPGPVPLSQLSE

SEQ ID NO: 34889 - DNA, 351 bp, Unknown
  Obtained from environmental sample
  misc_feature (1)..(351): n is a, c, g, or t
gtgagcctgactctgcgctacatacctgacattcagagggactttgaaacaattacccaggctcagcaggcccgcggccttgaactttccaaaaaagcctcgtggttcaaaagactgaaaagaaccgccccgcttctgctgccattgatcttctcatcgctggatcgcattggcgtaataagccgcgcaatggaactgcggggcttcggtaagaacgcccgccgcacctggtattcggaaaaacgcttcagccgccgcgacaagcttgtccttgttataagcgccctgttttttgccgccgggatttggcttactttccgcgggggaagcaggttttatagtccattttag

SEQ ID NO: 34890 - protein, 116 aa, Unknown
  Obtained from environmental sample
  misc_feature (1)..(116): Xaa is any amino acid
MSLTLRYIPDIQRDFETITQAQQARGLELSKKASWFKRLKRTAPLLLPLIFSSLDRIGVISRAMELRGFGKNARRTWYSEKRFSRRDKLVLVISALFFAAGIWLTFRGGSRFYSPF

SEQ ID NO: 34891 - DNA, 843 bp, Unknown
  Obtained from environmental sample
  misc_feature (1)..(843): n is a, c, g, or t
atgagttttgaaaatcctttactttctgtgcgcaatttatccatagcttttggaggcactcaagttacgcacaatgtttcttttgatataatgaacggagaaatttttgccattatgggagaatccggcagcggaaaaacagtgagcgcaatggcaattccaaggctgctcccttgtcccagcgcaaaaatagcaagcggtgaaattatttttgaaggaaaaaacactctggaatcaaaagacattgaaagcataagaggccgccgaataggttgcgtttttcaagaacccatgcaagccttgaatccagttatctccattggcacccagcttttagaagctgtgcgttttatgccaaaggaagaaaaaacaactcgcatagaagaacttttaacaaagtctggttttaaagacacaaaaagaattttcaaaagctacccgcacgagatgagcggcggaatgctgcaacgcattgtgatttgtatggctcttgcgccaagaccttctctcataatagccgatgagccaacaactgcaatagatgccaatcttcaaattgccattatggatattttgaggaatttatgtttagaagaaaaagttgccgttctttttataacacacaacgcacacttggctgcaagttatgcaaacagaatagccgtaatgtataagggaaaaatcgtagagtgcaacacagcaagcgaaattttgaattccccaaagcacccatacacaaaagctttgctagacgttgtgccgacaaagggaaaaactttagcagatttgaaacctataccttttggtgcggattttagtggagagttgagagttgagagttga

SEQ ID NO: 34892 - protein, 280 aa, Unknown
  Obtained from environmental sample
  DOMAIN (229)...(271): Oligopeptide/dipeptide transporter, C-terminal region
  misc_feature (1)..(280): Xaa is any amino acid
MSFENPLLSVRNLSIAFGGTQVTHNVSFDIMNGEIFAIMGESGSGKTVSAMAIPRLLPCPSAKIASGEIIFEGKNTLESKDIESIRGRRIGCVFQEPMQALNPVISIGTQLLEAVRFMPKEEKTTRIEELLTKSGFKDTKRIFKSYPHEMSGGMLQRIVICMALAPRPSLIIADEPTTAIDANLQIAIMDILRNLCLEEKVAVLFITHNAHLAASYANRIAVMYKGKIVECNTASEILNSPKHPYTKALLDVVPTKGKTLADLKPIPFGADFSGELRVES

SEQ ID NO: 34893 - DNA, 717 bp, Unknown
  Obtained from environmental sample
  misc_feature (1)..(717): n is a, c, g, or t
atgatttaccgccttattcacaactctatgggcttgaataacgatggaatagaaaaaatatccaaaagggtggaaaaacaaattggcaaggcttgcaaaaacaagtttgcggttgggatttccattgcggaaacacccggaatagcagaagaaaaccgcttgcaagatttgctggaaactttttcaatagcatacaaagccgcagattatttggaagtaaatgtgagctgcccaaacacaggcgaagagcgtttggatttagacacatgctttatgaagaatattttttttgaaattgaaaattttagaaaaaaagccccatgccgcaaagcggtttatgcaaaactaagcccagacttaacagacaaacagttactttcgcttttggatttgctctctcaatttggcgtgaacggcattattttgggaaacacttacccaagcgaaaaactctcttattcattgcccgctttaaatgaaaaaggtacaagcggaggagtttctggaagggttatttacgaaaacacattcaaaaaaacggtgcttgcaaaaaagcattttcctcagttttctcttgttgcctgcggcggaattgaccacggctttaaggtaagggatttgcttggcgaaggtgcggattttgttcaggtgtattccgtgttcgcttttagatggatgccagtgcagaagatgatttatgagcttgattgtaaataa

SEQ ID NO: 34894 - protein, 238 aa, Unknown
  Obtained from environmental sample
  DOMAIN (2)...(235): Dihydroorotate dehydrogenase
  misc_feature (1)..(238): Xaa is any amino acid
MIYRLIHNSMGLNNDGIEKISKRVEKQIGKACKNKFAVGISIAETPGIAEENRLQDLLETFSIAYKAADYLEVNVSCPNTGEERLDLDTCFMKNIFFEIENFRKKAPCRKAVYAKLSPDLTDKQLLSLLDLLSQFGVNGIILGNTYPSEKLSYSLPALNEKGTSGGVSGRVIYENTFKKTVLAKKHFPQFSLVACGGIDHGFKVRDLLGEGADFVQVYSVFAFRWMPVQKMIYELDCK

SEQ ID NO: 34895 - DNA, 627 bp, Unknown
  Obtained from environmental sample
  misc_feature (1)..(627): n is a, c, g, or t
ttggcgcgactcagggtttcgacatacccatttattgattttacatttgcaaataataagtacaagcccatgccagaaaaagttaagaaaaaaatgcttgccgccattacggaatatgcggtcatgaatgatatcgaaagaacctccgtttggacattcgcaaaaaaagggacaaaaaaatattcatctgtaacaagggacaattttcttggatttggagcttccgcgacgactttattgcaggatatatttaaaattaacacattctcaattactgattacatacaacggataaatgaaaatcatcttccgacatcactgacgcttgatttttcaaaaagacaacgcgcctgttattttttattttgggcatgttattcaatgcggatagacagggtagcgtttaatgaagtgttaggtgaaaaccttgaaaaattatacggcatggaacttttattctgcagaatattcggtcttcttaaaaaagaaaataaagtataccatcttacggataaaggagcatatttataccacaaaatagaacaaacatatacgacagcgtatatagacaaatcatggaatatatccagattacagcctttccctgaaaaaattattttaaactaa

SEQ ID NO: 34896 - protein, 208 aa, Unknown
  Obtained from environmental sample
  DOMAIN (67)...(175): HemN C-terminal region
  misc_feature (1)..(208): Xaa is any amino acid
MARLRVSTYPFIDFTFANNKYKPMPEKVKKKMLAAITEYAVMNDIERTSVWTFAKKGTKKYSSVTRDNFLGFGASATTLLQDIFKINTFSITDYIQRINENHLPTSLTLDFSKRQRACYFLFWACYSMRIDRVAFNEVLGENLEKLYGMELLFCRIFGLLKKENKVYHLTDKGAYLYHKIEQTYTTAYIDKSWNISRLQPFPEKIILN

SEQ ID NO: 34897 - DNA, 750 bp, Unknown
  Obtained from environmental sample
  misc_feature (1)..(750): n is a, c, g, or t
atgaataacacccattatacatttttaacttctcgctcaggcgaaatagtacccgctattatcgataaagacggagtttcccgcccattgcactccacagttgatccaatacgcgaagcggaacgccttgtgtctaccataccgcaagatacgggctttgtgatttttttgggtctttgcggcggctttgcacagcagatcgctctctccaaaacgtccgcacagattgttgtcatagattttaacaaagacggcataaaagaacttttatcgtcaaaagattacacacagcttttaaacaatggacgtttcagtcttttaactgattttacgttagatgaaataaaaaaatatatcattgaaaactataaccccgttctgtgcggcggtattaaagttatccccatgcggacaagaaccgagcatgattcagaaaattttaataaagccgcctcagttatacaggaagcgatagacgccgccgcatcggacttcagcgttcaagcgcattttgggctgcgctggttttccaacattatccgcaacataagaaacgccgaatctacaaaccaatctttcagcgcaaaaaaaattaatgaagcggcaattgtcgcggcgggtccatcgcttgacgggcaaataaccgctcttgcggaatttaaatcaaaggacgtctttattatctgctccgataccgctcgttcattgattctattttttcggttatggcttcggttttatttgatttaa

SEQ ID NO: 34898 - protein, 249 aa, Unknown
  Obtained from environmental sample
  misc_feature (1)..(249): Xaa is any amino acid
MNNTHYTFLTSRSGEIVPAIIDKDGVSRPLHSTVDPIREAERLVSTIPQDTGFVIFLGLCGGFAQQIALSKTSAQIVVIDFNKDGIKELLSSKDYTQLLNNGRFSLLTDFTLDEIKKYIIENYNPVLCGGIKVIPMRTRTEHDSENFNKAASVIQEAIDAAASDFSVQAHFGLRWFSNIIRNIRNAESTNQSFSAKKINEAAIVAAGPSLDGQITALAEFKSKDVFIICSDTARSLILFFRLWLRFYLI

SEQ ID NO: 34899 - DNA, 744 bp, Unknown
  Obtained from environmental sample
  misc_feature (1)..(744): n is a, c, g, or t
gtggggcgtaaaacacattaccctttttacagagacaaaaaatacgcaaacgcttccgcttttgccgtgaacctttgcgccgccctgccctctcaatgcgctgacagcgcgcaattaattttaaacgacggcagtttttggcagaacatcgttcttcacgagctaaatctgccgtccgtgattattccgcaaagaggaacggtaaccgcaaccgccgtggagcttgctttagttctttcaagcggaaacatctaccttgccggtttggatttttcagttaatgacattagaacccacgcaagaccctatagttttgacaatttatttttcggcagagctaaccgttttgttcctttttattcagaaagttattcgcgttcaagactgcttcatcagggcggaagcatggatatatacgcggcatggtttaaggagcagttaaacaaatggtcaaaacgaatttattccataggcggcaataaaatttttgaacacggggagccttcatcgcgcgacggtttaaaaaagactgatgatttttttaagacggttgaagttggaaactcaaatgccttttgcgggaaagggatacaagctctgcttaacgcgttgaaacagcctgagtatgcgcaaaacataaagagggaacttaattccctgcttttttcaggcgaaaatgaagtaacggagtgtgaattggaaaccgcaataaaagaaacttgtataaaggttctacatgaataa

SEQ ID NO: 34900 - protein, 247 aa, Unknown
  Obtained from environmental sample
  misc_feature (1)..(247): Xaa is any amino acid
MGRKTHYPFYRDKKYANASAFAVNLCAALPSQCADSAQLILNDGSFWQNIVLHELNLPSVIIPQRGTVTATAVELALVLSSGNIYLAGLDFSVNDIRTHARPYSFDNLFFGRANRFVPFYSESYSRSRLLHQGGSMDIYAAWFKEQLNKWSKRIYSIGGNKIFEHGEPSSRDGLKKTDDFFKTVEVGNSNAFCGKGIQALLNALKQPEYAQNIKRELNSLLFSGENEVTECELETAIKETCIKVLHE

SEQ ID NO: 34901 - DNA, 750 bp, Unknown
  Obtained from environmental sample
  misc_feature (1)..(750): n is a, c, g, or t
ttgggcaacagtcccctgcaagtagatattaccttcctgcggatgagcagccatgaatcaaaaaacgcccctcccggacatctggaaaaattttacatcagcgcggaggaaatactttccactgatattcgttttgacgggcttatcattaccggcgcgccggtggagaccatgccttttgaagaagttgattactgggacgagcttgccagggtaattgattattcggagagaaaagtattttctactttgcacatttgttggggagcgcaggcggggctgtaccgccgctataatattcccaagaagccgctggacaaaaaactgttcggtatttttccccatgcggtaaatgaacagcaccatgtcttgttccgcggttttgacgatgaattcctcgccccgcagtcccggcatacaactgttgaccgcgccacaatcgccgccaagccgcatctgacaattcaatcagaaactgatgagaccggggtttttattgtcaccgcccgcgggggccgcgaaatttatgttaccggccatctggaatatgacccccttactctggatcgggaataccgccgtgatctggaaaaagggctgcccatagaaccgccgaaaaattattatcctgataacgatccgtcaaaagagccggtagtccgctggcgcgcccatgccaatttgtttttttataactggcttaactatgtgtatcaggaaactccgtttgatttgcaaagtatacggtga

SEQ ID NO: 34902 - protein, 249 aa, Unknown
  Obtained from environmental sample
  DOMAIN (1)...(243): Homoserine O-succinyltransferase
  misc_feature (1)..(249): Xaa is any amino acid
MGNSPLQVDITFLRMSSHESKNAPPGHLEKFYISAEEILSTDIRFDGLIITGAPVETMPFEEVDYWDELARVIDYSERKVFSTLHICWGAQAGLYRRYNIPKKPLDKKLFGIFPHAVNEQHHVLFRGFDDEFLAPQSRHTTVDRATIAAKPHLTIQSETDETGVFIVTARGGREIYVTGHLEYDPLTLDREYRRDLEKGLPIEPPKNYYPDNDPSKEPVVRWRAHANLFFYNWLNYVYQETPFDLQSIR

SEQ ID NO: 34903 - DNA, 300 bp, Unknown
  Obtained from environmental sample
  misc_feature (1)..(300): n is a, c, g, or t
atgccaatttgtttttttataactggcttaactatgtgtatcaggaaactccgtttgatttgcaaagtatacggtgacaggaaggtaaatatggaaaagaaagtgctaaaagtagaagggatgtcttgtgaacattgcgtaaaggcggtaaccaatgccctcggcggcattgccggggttaccggcgttgcggtcagcctgaaagacaaaacggcgtctttcagttacgaccccgctcaaacgcagttggaaatcattaagaccgccataacggacgaaggctacgaggtagtcgggtaa

SEQ ID NO: 34904 - protein, 99 aa, Unknown
  Obtained from environmental sample
  DOMAIN (35)...(99): Heavy-metal-associated domain
  misc_feature (1)..(99): Xaa is any amino acid
MPICFFITGLTMCIRKLRLICKVYGDRKVNMEKKVLKVEGMSCEHCVKAVTNALGGIAGVTGVAVSLKDKTASFSYDPAQTQLEIIKTAITDEGYEVVG

SEQ ID NO: 34905 - DNA, 903 bp, Unknown
  Obtained from environmental sample
  misc_feature (1)..(903): n is a, c, g, or t
gtggaatttgtcgatattgcgggattggtaaaaggcgcgtcaaggggagaggggcttggcaatcagtttctttcacatatacgcgacgcgtcagtctacgcccatgtcgtccgttgttttgaaaacgccgatgttgtccatgtaagtgacaaactcgatcccgcgtccgacattgaaacaattgatattgagttggcgcttgccgatatgcagactgtcgccaaacgacgcgaacgggctgaaaaaactttaaaaaatcaggccgaaaagaaaaactccgagtttgtcatctccatacttgataaaatcggtcccgctcttgaaaacgcgcggccaatccgctcgctcggtttaagcgatgaggaaaaagccacgatttacgactgccattttattaccgccaaaccccagctttatgtgtgcaatgtcgatgaagccggtattaaatccggcaacgcctacaccgaggctgtaaaaaaacgcgcgcaaagcgaaggaaccgaagccgtctgtatctgcggaaaatttgaatctgacctttgcggaatagaaagtcccgaagaaaaaaaagcgttccttgaagatttaggtttggaagagacgggactttccgccttgattcacagcgcctacaaactacttggtttaagaacttttttcacttcaggaaaagacgaatgcagagcgtggacaatcaaagcgggcgacaccgcgccaaaagcggcgggcgttattcacacggattttgagaagggttttataaaagccgaagtatatacttgcgaagatatttttacctacggaacagaagcaaaaattaaagaagcgggaagataccgtcttgaaggcaaagattatgtcgttcaggacggagacgtaatcttctttaaatttaacgtttaa

SEQ ID NO: 34906 - protein, 300 aa, Unknown
  Obtained from environmental sample
  DOMAIN (216)...(299): Protein of unknown function (DUF933)
  misc_feature (1)..(300): Xaa is any amino acid
MEFVDIAGLVKGASRGEGLGNQFLSHIRDASVYAHVVRCFENADVVHVSDKLDPASDIETIDIELALADMQTVAKRRERAEKTLKNQAEKKNSEFVISILDKIGPALENARPIRSLGLSDEEKATIYDCHFITAKPQLYVCNVDEAGIKSGNAYTEAVKKRAQSEGTEAVCICGKFESDLCGIESPEEKKAFLEDLGLEETGLSALIHSAYKLLGLRTFFTSGKDECRAWTIKAGDTAPKAAGVIHTDFEKGFIKAEVYTCEDIFTYGTEAKIKEAGRYRLEGKDYVVQDGDVIFFKFNV

SEQ ID NO: 34907 - DNA, 519 bp, Unknown
  Obtained from environmental sample
  misc_feature (1)..(519): n is a, c, g, or t
atggacaaatttacaatactcagggaaagattcggctactcctctttccgtcccgggcaggaagaagtgatcgacgcaattctggccggaacagacgcgcttgcggtaatgcccacgggagcgggaaaatccctctgctaccagataccggctcttatgcttgagggaatgacaatcgttatctcaccgcttatttccctgatgaaggatcaggtaagcgcgctgaaagaagcgggatgcggcgcggcctttctgaacagctctttaagcggcagggaatacgcgcaaacaatggatgaaataacaagcggcgatattaaactgctctacatcgcgcctgaacgtttacaaaggacggagcttcccgaactcgcggttaacagcgttccgcttgtggtagtggacgaggcgcattgcgtgtcacagtgggggcatgatttcagaacaagttatctgcaaatagcggattttatcagaggcgttaagccgcgccctgcggtcgcggcttttacagcttaa

SEQ ID NO: 34908 - protein, 172 aa, Unknown
  Obtained from environmental sample
  DOMAIN (13)...(159): Type III restriction enzyme, res subunit
  misc_feature (1)..(172): Xaa is any amino acid
MDKFTILRERFGYSSFRPGQEEVIDAILAGTDALAVMPTGAGKSLCYQIPALMLEGMTIVISPLISLMKDQVSALKEAGCGAAFLNSSLSGREYAQTMDEITSGDIKLLYIAPERLQRTELPELAVNSVPLVVVDEAHCVSQWGHDFRTSYLQIADFIRGVKPRPAVAAFTA

SEQ ID NO: 34909 - DNA, 594 bp, Unknown
  Obtained from environmental sample
  misc_feature (1)..(594): n is a, c, g, or t
atgtctcaaagcgacgaaaagaaacgtctgacgataggcttcttcgtctccgagcttgagaacgcctacgctcagacgctttgccgcggcatcatggatgccgccgccgccgccgacgccaatgtcatgatctttccggggaagtcgcccaaggttccgtacgactaccgctaccagtacaactccatatacagactggccgacaagaataccgtggacgcgctgatccttgccacggggacgatggtcaattttctgagcgacgaggagttccgggagttttacaggcgctacaaggatattccgctcgtcagcatttccatacctatagagggcgtgtccagcgtgctcatagacaatacggtggggcttaggggcgttctggagcatttggctaaggatcacggctacaagcgcatcgcctttatcggcggaccggagagcaacgtggaggccaaggagcgctacaacgtttacttggacgtgcttaaagagtgcgggttgccgttcgaccccggtctcacggcggtcggcgatttcacaagtactccggcgtgcgcgcggtgggggattttctggacgtgcgtggcgtga

SEQ ID NO: 34910 - protein, 197 aa, Unknown
  Obtained from environmental sample
  misc_feature (1)..(197): Xaa is any amino acid
MSQSDEKKRLTIGFFVSELENAYAQTLCRGIMDAAAAADANVMIFPGKSPKVPYDYRYQYNSIYRLADKNTVDALILATGTMVNFLSDEEFREFYRRYKDIPLVSISIPIEGVSSVLIDNTVGLRGVLEHLAKDHGYKRIAFIGGPESNVEAKERYNVYLDVLKECGLPFDPGLTAVGDFTSTPACARWGIFWTCVA

SEQ ID NO: 34911 - DNA, 924 bp, Unknown
  Obtained from environmental sample
  misc_feature (1)..(924): n is a, c, g, or t
gtggtggagcttgagagggccatagaaaagctcaaaaactcggccgcgaccancaagggcgaattcgggcccccatatgcccgaactgagaagaagtgcgaggagcgcaagagggagatatacgacgccctttcgccctggcagaccgtgcaggtcgcgcggcatcccaagcgtcctgtcctgcacgactacatctcgctgatattcaaggatttcgtcgaactgcacggcgacaggtacttcggggacgacagggcgcttatcggcggcttcgccaagctcgatacccagaaggtcatgctggtcgggcacagcaaaggcaagaacatagaggagaacgtcaggcgcaacttcgggatggccaagcccgaaggctaccgaaaagcgctgaggcttatgcgtctggccgagaagttcaacgtgccggtggtctcctttatagacacctccggagcctaccccggcttagacgccgagcagcgcgggcaggccgaggccatagcgaggaacctgacggagatggcgaagcttgagatcccggtagtagccatagtaaccggcgagggcggcagcggcggcgcgctgggaataggcgtggccgactccgtattaatgctggcaaacgccgtatactcggtgatatcccccgaaggctgcgcttccatcctatggcgcgacgcctcgtactccgcccaagctgcggagagtttaaagatcaccgccaagtccctcctgtctttaggagtgatagacgaaatagtgaaagagcccgccggcggcgctcacagcaaccaccaagccacagccaacgcaataaaatcggcgctattgaaacacctgaaaaaattaatacccctgtcaccgcaaaaactcattcaaaggagattcgaaaaattttccgaaatgggaaaatttactaagtaa

SEQ ID NO: 34912 - protein, 307 aa, Unknown
  Obtained from environmental sample
  DOMAIN (2)...(137): Acetyl co-enzyme A carboxylase carboxyltransferase alpha subunit
  misc_feature (1)..(307): Xaa is any amino acid
MVELERAIEKLKNSAATXKGEFGPPYARTEKKCEERKREIYDALSPWQTVQVARHPKRPVLHDYISLIFKDFVELHGDRYFGDDRALIGGFAKLDTQKVMLVGHSKGKNIEENVRRNFGMAKPEGYRKALRLMRLAEKFNVPVVSFIDTSGAYPGLDAEQRGQAEAIARNLTEMAKLEIPVVAIVTGEGGSGGALGIGVADSVLMLANAVYSVISPEGCASILWRDASYSAQAAESLKITAKSLLSLGVIDEIVKEPAGGAHSNHQATANAIKSALLKHLKKLIPLSPQKLIQRRFEKFSEMGKFTK

SEQ ID NO: 34913 - DNA, 747 bp, Unknown
  Obtained from environmental sample
  misc_feature (1)..(747): n is a, c, g, or t
gtggaaatcgacagagacggcacccggcggcgtattgatcttgcccagaatatctacgatcactggtatttacagcttgcgtttgcccccctgatcgattatatggggagtcctgagatcgaacttggcaaccgcaagctgctcataaaaaacgcgaaaatgcccggcagtaaggacatttccatccctctggacggtaatggcagaatgctcctcgactggtccagggaagagtataaagacagttatgatcatatttcattttatgagttttctcttctggaagatcttgaggccgaattggaacaatactcccgggctgtcggcgatacggatattcccttttttgcgcaatttgattcttcactgtccaggataccctttattgccgcggaactggcgtccctctttgatgatattcgcgaatacagactcgcggccctggaaaactgttccgatgaatacttcagggattatatagaccgccgggacaaaacccgcggcctcatccgggaactccttgccattgatcccggcgccaggatacgcgccatgcgttcggatttggctgagtcccaccccgaatttgccgcccaaatctccgatgaggctgagtacatcatgtctctggcggaggccctaaaggtagatttggatcggtacgaaagcataacggaattaatcaaaaataaggtgaaggacaaattttgcattctgggccgcgtcgatccggaacaacggatatag

SEQ ID NO: 34914 - protein, 248 aa, Unknown
  Obtained from environmental sample
  misc_feature (1)..(248): Xaa is any amino acid
MEIDRDGTRRRIDLAQNIYDHWYLQLAFAPLIDYMGSPEIELGNRKLLIKNAKMPGSKDISIPLDGNGRMLLDWSREEYKDSYDHISFYEFSLLEDLEAELEQYSRAVGDTDIPFFAQFDSSLSRIPFIAAELASLFDDIREYRLAALENCSDEYFRDYIDRRDKTRGLIRELLAIDPGARIRAMRSDLAESHPEFAAQISDEAEYIMSLAEALKVDLDRYESITELIKNKVKDKFCILGRVDPEQRI

SEQ ID NO: 34915 - DNA, 387 bp, Unknown
  Obtained from environmental sample
  misc_feature (1)..(387): n is a, c, g, or t
ttgcattctgggccgcgtcgatccggaacaacggatataggctcaaatccgttcttcagcgaatatatcaatgtgggaacccacggagtggtactggacatgatcctttccggttctttcattactccggccggtatatattggcagacgcttttcgcccttgtcctggtgatattgtttcttctggccggcccgcggttctcagccaggctgagggcaagctccggtctcattataaccgctgtcgtaatcgtcttaacggtcttactgttccgttttaccgggttgtttttcagccctctcgcggcggttgtttccatggtttcggcaatcgttattactgaaataacagagagaaaaggaaatacccccgtagcgcccatgtaa

SEQ ID NO: 34916 - protein, 128 aa, Unknown
  Obtained from environmental sample
  misc_feature (1)..(128): Xaa is any amino acid
MHSGPRRSGTTDIGSNPFFSEYINVGTHGVVLDMILSGSFITPAGIYWQTLFALVLVILFLLAGPRFSARLRASSGLIITAVVIVLTVLLFRFTGLFFSPLAAVVSMVSAIVITEITERKGNTPVAPM

SEQ ID NO: 34917 - DNA, 420 bp, Unknown
  Obtained from environmental sample
  misc_feature (1)..(420): n is a, c, g, or t
atggacattggatcaatatcgtcatttcatgcgtttcccactatagaatacgcgataaacgcctcgcaaagcactgtttctcagggcgttaaggcatccctgccggtggctccgtcggcggctatttatgcgcattttaagcatgtctccggcgtaccggctcctgacggggtacaaggggtgaatatcaacaaactgaaaatcatcgatgcccttattgagcagatttccaaaatgaaaaaacagccggacttttcggatgcacagccgctgaccgatataagcggacaaagtgatgaaaagcgcatcaacgcccttattgataaatttcagaaccaggtgcggcaggcggtaaacgccgctactccctatgctccgacagcgccgattaccggagcgatatttaacataagcgtctaa

SEQ ID NO: 34918 - protein, 139 aa, Unknown
  Obtained from environmental sample
  misc_feature (1)..(139): Xaa is any amino acid
MDIGSISSFHAFPTIEYAINASQSTVSQGVKASLPVAPSAAIYAHFKHVSGVPAPDGVQGVNINKLKIIDALIEQISKMKKQPDFSDAQPLTDISGQSDEKRINALIDKFQNQVRQAVNAATPYAPTAPITGAIFNISV

SEQ ID NO: 34919 - DNA, 306 bp, Unknown
  Obtained from environmental sample
  misc_feature (1)..(306): n is a, c, g, or t
gtggatttttgccgccaaaataatattttggttgaggcctggagtccgctcggctcgggccggattttgcaggataagaatcttttaaccatcgctgaaaaatataataagtctgcggcgcaaatctgtctgcgctggtgtttgcagaacggcaccttgccgctgccgaagtccgttactccggcgcgcgtcaaagagaattaccaagtctttgattttgagctttctgcggaggatatgctgagtattgatgctctgccggaatttggcgggtcgggatttgatcccgatacggcgacgtggtaa

SEQ ID NO: 34920 - protein, 101 aa, Unknown
  Obtained from environmental sample
  misc_feature (1)..(101): Xaa is any amino acid
MDFCRQNNILVEAWSPLGSGRILQDKNLLTIAEKYNKSAAQICLRWCLQNGTLPLPKSVTPARVKENYQVFDFELSAEDMLSIDALPEFGGSGFDPDTATW

SEQ ID NO: 34921 - DNA, 681 bp, Unknown
  Obtained from environmental sample
  misc_feature (1)..(681): n is a, c, g, or t
gtggttttacattccgccactaaatttatcggagggcacggaacggttatcggtggcgtgatcgtagattcggggaaatttaactgggctgcaaatgacaaattccccggactttcaaagccgaaccccagctatcacggggttgtgcttactgacgcggtagggaatctcgcttatattataaagatccgcgttaccttaatgagagacaccggcgcgacagtaagtcctttccattccttcctctttttgcaagggctggaaaccttatcactgcggacagaacgccatgttgaaaacgcgcttaaagtggtagaatatttacgcaaacacccaaaggtagaatcagtgaatcaccctgtactgccgaatcatccggatcatgccctgtatcagaagtatttcccgaggggtgctggctcaattttcacttttgagattaagggcggagcggagcaggcgaggaactttattgataagctggaactgttttcgcttcttgccaatgttgcggattccaaatcgctggttatccatccggcaagcacaacacattcccagctttccggggatgagcttttggagcagggaataaagccgaataccatccggctttcggtaggaaccgaacacattgacgatattatcgccgatctggaacaggcgtttggaagtaaatga

SEQ ID NO: 34922 - protein, 226 aa, Unknown
  Obtained from environmental sample
  DOMAIN (1)...(224): Cys/Met metabolism PLP-dependent enzyme
  misc_feature (1)..(226): Xaa is any amino acid
MVLHSATKFIGGHGTVIGGVIVDSGKFNWAANDKFPGLSKPNPSYHGVVLTDAVGNLAYIIKIRVTLMRDTGATVSPFHSFLFLQGLETLSLRTERHVENALKVVEYLRKHPKVESVNHPVLPNHPDHALYQKYFPRGAGSIFTFEIKGGAEQARNFIDKLELFSLLANVADSKSLVIHPASTTHSQLSGDELLEQGIKPNTIRLSVGTEHIDDIIADLEQAFGSK

SEQ ID NO: 34923 - DNA, 498 bp, Unknown
  Obtained from environmental sample
  misc_feature (1)..(498): n is a, c, g, or t
ttgaattctgttgaaatagaatcccttgaaaatgacaccgcggcgccgttttcagaggatgattcacaaagcgaagaggagctttcacttatccccgaaggttttgaaatagaagaggatgatctcggcgatatttccggaaaagaagatagtcttgatgaattgaaggaagaaatcgaggagattcaagagataccggaagacgtaattgaagagattgaagactttgtgcctggagctgaagaaatcgaagcggaagaaagcgcctctgctgctcccgaacctgaacctgctcctgaaccggttgttgcagaagctccggcttccaccgctgaaatttcaggaattccggcgagcttaaaaacagaattaaagacggtgctttcttacatggatcagcttcttgaggccctcccggacgataaaattcaagaattcgccaaatccgattattacgacacctataaaaaactgttcaaagaattagggcttgtataa

SEQ ID NO: 34924 - protein, 165 aa, Unknown
  Obtained from environmental sample
  misc_feature (1)..(165): Xaa is any amino acid
MNSVEIESLENDTAAPFSEDDSQSEEELSLIPEGFEIEEDDLGDISGKEDSLDELKEEIEEIQEIPEDVIEEIEDFVPGAEEIEAEESASAAPEPEPAPEPVVAEAPASTAEISGIPASLKTELKTVLSYMDQLLEALPDDKIQEFAKSDYYDTYKKLFKELGLV

SEQ ID NO: 34925 - DNA, 555 bp, Unknown
  Obtained from environmental sample
  misc_feature (1)..(555): n is a, c, g, or t
ttgcgccaactgtncagcacaacggtagcagattcacagtggcatcctgaggcaggcgtatcggtacaggaatttctggaagctgaaatcccggattccgaggcttctgaaatacgccttttggaatggcggcctgcccttaacgtttatggccgctcgtaccttgcccttttggaggaagcggcaacttttataaagcgttctgacgcaaacgcaagaacaacaaaagctttcggaccaaggtggtttaaaaattttgtcaaaaacttgtcaattataaaaacagccttaaaccctatcaacagggattcatcattggtttcccagccgtttctcgtaacaggcgctggcccaagcctggaagacgcaatcccgataatcagacaaactataaaaaatgttaaggcgcataccgctntttttatcctggcatcttcttcgtccgtagcggctctggaagcgaacggtttaacacccgatttggcaatcagtacggatggatccaactggggcaggcttcacctctacattttttcaggagcaataccgggataa

SEQ ID NO: 34926 - protein, 184 aa, Unknown
  Obtained from environmental sample
  misc_feature (1)..(184): Xaa is any amino acid
MRQLXSTTVADSQWHPEAGVSVQEFLEAEIPDSEASEIRLLEWRPALNVYGRSYLALLEEAATFIKRSDANARTTKAFGPRWFKNFVKNLSIIKTALNPINRDSSLVSQPFLVTGAGPSLEDAIPIIRQTIKNVKAHTAXFILASSSSVAALEANGLTPDLAISTDGSNWGRLHLYIFSGAIPG

SEQ ID NO: 34927 - DNA, 816 bp, Unknown
  Obtained from environmental sample
  misc_feature (1)..(816): n is a, c, g, or t
ttggaggggggccgaatgcggatagaaactgtagaacaaaatatttttgaaaaatatcttgactgcgcggatcgcactgatccgataaaatgcgtcggtaaagtaataaaaatagaaggattattaatagaaagcaaaggccctcaggctattataggcgagatatgcaggattatcgctccaaaaggcaagggtgccattaaagccgaagttgtcggattaagatatgaaattgttcagctgatggcttatgaggaaacggacggaattgaagtgggggacagggtaatcgcccttggcagccgtcttgaagtgccggtttccgacaagcttttagggcgcgttatagacgctcttggaaacccattggacgacaaaggtgaaatatcgtccatttgttcgtatcccgcgcttgcaagcgcccctgatccgctaaaaagaaggcgtataacggagcgcataacaacgggcgttcgcgccattgacggtcttcttgccgtgggcaaggggcagaggctcggcattttttccggttcaggcgttggaaagtccacccttcttggaatgattgcgcgtaacacttccgccgatgttaacgtggtagccctaataggtgagcgcgggcgtgaagtgaacgattttatagaatacgatcttggccctgaggggcttaaacgcagcgtactgatagtaaccccatccaattccccgccccttgcccgtcttcgcggagcttatgtggcgacagccgtcgccgagtatttccgcgatcagggaaatgacgttatgcttttgttgactcctcggccgatctga

SEQ ID NO: 34928 - protein, 271 aa, Unknown
  Obtained from environmental sample
  DOMAIN (35)...(100): ATP synthase alpha/beta family, beta-barrel domain
  misc_feature (1)..(271): Xaa is any amino acid
MEGGRMRIETVEQNIFEKYLDCADRTDPIKCVGKVIKIEGLLIESKGPQAIIGEICRIIAPKGKGAIKAEVVGLRYEIVQLMAYEETDGIEVGDRVIALGSRLEVPVSDKLLGRVIDALGNPLDDKGEISSICSYPALASAPDPLKRRRITERITTGVRAIDGLLAVGKGQRLGIFSGSGVGKSTLLGMIARNTSADVNVVALIGERGREVNDFIEYDLGPEGLKRSVLIVTPSNSPPLARLRGAYVATAVAEYFRDQGNDVMLLLTPRPI

SEQ ID NO: 34929 - DNA, 456 bp, Unknown
  Obtained from environmental sample
  misc_feature (1)..(456): n is a, c, g, or t
ttggatggggttactatcagtacgctgcgtttaagcccctcagggccaagatcgtattctataaaatcgttcacttcacgcccgcgctcacctattagggctaccacgttaacatcggcggaagtgttacgcgcaatcattccaagaagggtggactttccaacgcctgaaccggaaaaaatgccgagcctctgccccttgcccacggcaagaagaccgtcaatggcgcgaacgcccgttgttatgcgctccgttatacgccttctttttagcggatcaggggcgcttgcaagcgcgggatacgaacaaatggacgatatttcacctttgtcgtccaatgggtttccaagagcgtctataacgcgccctaaaagcttgtcggaaaccggcacttcaagacggctgccaagggcgattaccctgtcccccacttcaattccgtccgtttcctcataa

SEQ ID NO: 34930 - protein, 151 aa, Unknown
  Obtained from environmental sample
  misc_feature (1)..(151): Xaa is any amino acid
MDGVTISTLRLSPSGPRSYSIKSFTSRPRSPIRATTLTSAEVLRAIIPRRVDFPTPEPEKMPSLCPLPTARRPSMARTPVVMRSVIRLLFSGSGALASAGYEQMDDISPLSSNGFPRASITRPKSLSETGTSRRLPRAITLSPTSIPSVSS

SEQ ID NO: 34931 - DNA, 486 bp, Unknown
  Obtained from environmental sample
  misc_feature (1)..(486): n is a, c, g, or t
atgtttaaaagcattttttccgtaatgatgcctcttttattcgccgcctcgggaggattatttccggcgcttgccggaacccttaatatcgcgctggaaggcctgcttcttgcgggcgctttttcgtctcttgccgtgtattgcgcaacgggaagcgtattagccgcgataatagcggcggttatagtggcaacggcgctttcagcccttcaagcgtttgccgtctttaagttacgtgcaaatctttatatttgcgcccttgccattaaccttttttcaagcgggttttgcgttgttctttcggataaattattccgaacaaggggagtaatcgtgtcaaatgccgcctcaggactgttaaaatggtacattatcgccggaatttttacgcttgctctgtcctggctcgcgatttacaaaacgcctttcggataccgcctgcgcgcctgcgaaaaaaactccgaggcgcttgtctctcggggataa

SEQ ID NO: 34932 - protein, 161 aa, Unknown
  Obtained from environmental sample
  SIGNAL (1)...(25)
  misc_feature (1)..(161): Xaa is any amino acid
MFKSIFSVMMPLLFAASGGLFPALAGTLNIALEGLLLAGAFSSLAVYCATGSVLAAIIAAVIVATALSALQAFAVFKLRANLYICALAINLFSSGFCVVLSDKLFRTRGVIVSNAASGLLKWYIIAGIFTLALSWLAIYKTPFGYRLRACEKNSEALVSRG

SEQ ID NO: 34933 - DNA, 636 bp, Unknown
  Obtained from environmental sample
  misc_feature (1)..(636): n is a, c, g, or t
atgtggaatacaagcgagctgattacttcattcctgctntcatgcgctgtaattcccatgttaaatttcttagtntgcggcccctttgtggacgcgcagtcgtcattgcaatctacgcacaaaatagcggaaaatntgcgttttccattaatactgaaaccttcaggattgagcgccggaatttttatcacggccgcgttaattattatcgttcaattgtttttatcagggacaaaattcggctatgaaatacggatgacgggtaataatgaattattcgcgcgttacggcgggattaacacaaaattagttacagtcgcttcaatggccataagcggcggcttttacggccttgcgggaagcatggctgtaatgggaacttatcactcggtaataaaagaattttcttccggactcggctggaacggccttgctgtcgctttaatttcagggttttatccggccgcggtaataccttccgcgctttttttcgcgtggattcaggctggcgcgagaatcgcaatgcagaatacgggccttacttatgaagtagcctctattgtgcaggctgtaattttccttgtttcaacaagccttgttatacgcaatatttattcgcggcgggggaaaaaataa

SEQ ID NO: 34934 - protein, 211 aa, Unknown
  Obtained from environmental sample
  DOMAIN (3)...(197): Branched-chain amino acid transport system / permease component
  misc_feature (1)..(211): Xaa is any amino acid
MWNTSELITSFLLSCAVIPMLNFLVCGPFVDAQSSLQSTHKIAENXRFPLILKPSGLSAGIFITAALIIIVQLFLSGTKFGYEIRMTGNNELFARYGGINTKLVTVASMAISGGFYGLAGSMAVMGTYHSVIKEFSSGLGWNGLAVALISGFYPAAVIPSALFFAWIQAGARIAMQNTGLTYEVASIVQAVIFLVSTSLVIRNIYSRRGKK

SEQ ID NO: 34935 - DNA, 420 bp, Unknown
  Obtained from environmental sample
  misc_feature (1)..(420): n is a, c, g, or t
atggcagcctattttcgctttgaagtgtatacccctcaccacgctttttttgccgactcggtagaagcgatagtccttaccctgctcgacggagaagccgcagtctacgccaaccactcgcattttacggcccctgttatcccctgcctcttaaaaattaaagacggcaaaggtgtctggaaaaccgcgtttgtctcggaaggcctattggaggtaaccagccacaaaaccgttctgctctccaacgccgccgaatggccgactgaaattgactacgaacgcgcaaaagaagctaaggaaagggcggaagaaacccttaaggaggctatgctcaagttcgaaacagaggccgcagccgcttccctaaaacgggcgaatatgcgaatcagggccagggacgagagcgtaaataagcagtag

SEQ ID NO: 34936 - protein, 139 aa, Unknown
  Obtained from environmental sample
  DOMAIN (4)...(86): ATP synthase, Delta/Epsilon chain, beta-sandwich domain
  misc_feature (1)..(139): Xaa is any amino acid
MAAYFRFEVYTPHHAFFADSVEAIVLTLLDGEAAVYANHSHFTAPVIPCLLKIKDGKGVWKTAFVSEGLLEVTSHKTVLLSNAAEWPTEIDYERAKEAKERAEETLKEAMLKFETEAAAASLKRANMRIRARDESVNKQ

SEQ ID NO: 34937 - DNA, 924 bp, Unknown
  Obtained from environmental sample
  misc_feature (1)..(924): n is a, c, g, or t
gtgggaaagacggtgctcatcatggagctgatccggaacatcgccaccatacattcggggtactcggtttttgcgggggtaggggaacgttcccgggagggctcggatctctggaaggaaatgaatgagtccggggtaatcagcaaaaccgctctggttttcggccagatgaacgaacctcccggcgcgaggatgcgggttgcactgtcgggccttaccatggcggaatattttcgtgacaaggaaggccaggatgtgcttctttttatcgataatattttccggtttatccaggccggcgcggaagtatccgccctccttggccgtattcccagcgccgtaggttaccagcccactctggccaatgaaatgggctctttacaggaacggatcgccagtacctccaaaggctccattaccagtatccaggcggtgtatgtccccgccgacgaccttacggatccggcgccggctaccacctttgcccaccttgacgctaccaccacgctttcccgaaaaatcgtggaactgggtatttatccggcggtggatcccctggactcaagctcgcgtattctcaatccggaaatagtcggcgaggaacactaccgtactgccatgcaggtacagcaaatacttcagcgttacaaagagttgcaggatataatcgcgattctcggcatggacgagctttcgcccgaagacaaacttactgtaacaagggccagaaaagtacagcgctttttcagccagcccttcttcgttgcggaaaaattctcgggaactcccggcagttacgtgccggtaaaagaaaccgtccgaggctttagaatgatcctggacggcgaatgtgattccataaatgaacacgctttctttatggccggttctatcgatgaagttctgcaacggggcggaacctaa

SEQ ID NO: 34938 - protein, 307 aa, Unknown
  Obtained from environmental sample
  DOMAIN (203)...(303): ATP synthase alpha/beta chain, C terminal domain
  misc_feature (1)..(307): Xaa is any amino acid
MGKTVLIMELIRNIATIHSGYSVFAGVGERSREGSDLWKEMNESGVISKTALVFGQMNEPPGARMRVALSGLTMAEYFRDKEGQDVLLFIDNIFRFIQAGAEVSALLGRIPSAVGYQPTLANEMGSLQERIASTSKGSITSIQAVYVPADDLTDPAPATTFAHLDATTTLSRKIVELGIYPAVDPLDSSSRILNPEIVGEEHYRTAMQVQQILQRYKELQDIIAILGMDELSPEDKLTVTRARKVQRFFSQPFFVAEKFSGTPGSYVPVKETVRGFRMILDGECDSINEHAFFMAGSIDEVLQRGGT

SEQ ID NO: 34939 - DNA, 348 bp, Unknown
  Obtained from environmental sample
  misc_feature (1)..(348): n is a, c, g, or t
ttgcagaacttcatcgatagaaccggccataaagaaagcgtgttcatttatggaatcacattcgccgtccaggatcattctaaagcctcggacggtttcttttaccggcacgtaactgccgggagttcccgagaatttttccgcaacgaagaagggctggctgaaaaagcgctgtacttttctggcccttgttacagtaagtttgtcttcgggcgaaagctcgtccatgccgagaatcgcgattatatcctgcaactctttgtaacgctgaagtatttgctgtacctgcatggcagtacggtagtgttcctcgccgactatttccggattgagaatacgcgagcttga

SEQ ID NO: 34940 - protein, 115 aa, Unknown
  Obtained from environmental sample
  misc_feature (1)..(115): Xaa is any amino acid
MQNFIDRTGHKESVFIYGITFAVQDHSKASDGFFYRHVTAGSSREFFRNEEGLAEKALYFSGPCYSKFVFGRKLVHAENRDYILQLFVTLKYLLYLHGSTVVFLADYFRIENTRA

SEQ ID NO: 34941 - DNA, 1059 bp, Unknown
  Obtained from environmental sample
  misc_feature (1)..(1059): n is a, c, g, or t
gtggttttatggaataaactgggtttatgttttatattattgattatgcttttttctttttctaaatgttcgtctccgccgcctgagttttcggaagatgactggtatgaaaaaactcatgctccggataccgcgcttttatacgcgaataatgtcgccgacgatggcactttttttaacccctggctggagagagaaaaaagaaaggggcggtatttccgaagcaaagggcaatttgaagaaccgtctagtgcccaatacggcgcagtacccaatgatttttcttatctttcagataacacttttgacagcattaccaatgcaggtcatgcttcgataattatcaagatgaatgggcagacaatttttactgacccgtttttttccaatgcggcgatgatagtgccaaaaaaagtaaaaataaagtttgatttttccaaagtcacaaaaagaccggtggtgttaataagccacaatcattatgatcatctggataaatattcggtaaaacaacttgcaaaaaaagacgctgtttttatcgtgccgttaggtctaaaaaaacttgtttcaagttacggcgcaaaagaagtacacgaactcggctggtggcagaatataacgattaacggtattgaatatacgtttgtgccttctcagcattggtctcggcggttagggcagaagggcggcagtaccttatggggcggatatattattcaaggcgcaaaaacgatttatttttcaggcgactcgggttattttatcggatttaaggaattcggaaaccgctggaatattgattatgccattatgggggcgggcgcttatgagcctcgctggtttatgcattacgcccacatgaatgtaaaagaatttttaatggcggcggaagaaacaaaagcaaaggtttcaatacccatgcatttcggcgttatcagtctgagcgatgagcctctgctttatccgttacttgaaattgataacgctgttaaacaaaatcccgaaatagcgaatagtatacttccgttgagagtaggggagtatacaaaaatgcagtga

SEQ ID NO: 34942 - protein, 352 aa, Unknown
  Obtained from environmental sample
  SIGNAL (1)...(24)
  misc_feature (1)..(352): Xaa is any amino acid
MVLWNKLGLCFILLIMLFSFSKCSSPPPEFSEDDWYEKTHAPDTALLYANNVADDGTFFNPWLEREKRKGRYFRSKGQFEEPSSAQYGAVPNDFSYLSDNTFDSITNAGHASIIIKMNGQTIFTDPFFSNAAMIVPKKVKIKFDFSKVTKRPVVLISHNHYDHLDKYSVKQLAKKDAVFIVPLGLKKLVSSYGAKEVHELGWWQNITINGIEYTFVPSQHWSRRLGQKGGSTLWGGYIIQGAKTIYFSGDSGYFIGFKEFGNRWNIDYAIMGAGAYEPRWFMHYAHMNVKEFLMAAEETKAKVSIPMHFGVISLSDEPLLYPLLEIDNAVKQNPEIANSILPLRVGEYTKMQ

SEQ ID NO: 34943 - DNA, 384 bp, Unknown
  Obtained from environmental sample
  misc_feature (1)..(384): n is a, c, g, or t
atgagcgatgaatgttacagtatcagccgtttgctggaaaaaagcatcgacaaggattgtatttttaaagaaaaagaaatggacgagcttattccatacgtcggaaaagtcgaggaatttttaagtttgcttgaagaccagcttggacgtaatccgtcgtcggaactgaaaatacgcgccgcggaattggaaaaccaaatcgacagagaccgcaagaagttgcacaaactcggacgcaaacgaattgaggcgggcggcaacgtaaaaaccgaattgctttttatcgatcttgtccgcagaatagaaagacttggcgattattgtttcgagatttcagaagaaaacacactcaaaaaatggattaacaatattatcacaagataa

SEQ ID NO: 34944 - protein, 127 aa, Unknown
  Obtained from environmental sample
  misc_feature (1)..(127): Xaa is any amino acid
MSDECYSISRLLEKSIDKDCIFKEKEMDELIPYVGKVEEFLSLLEDQLGRNPSSELKIRAAELENQIDRDRKKLHKLGRKRIEAGGNVKTELLFIDLVRRIERLGDYCFEISEENTLKKWINNIITR

SEQ ID NO: 34945 - DNA, 1248 bp, Unknown
  Obtained from environmental sample
  misc_feature (1)..(1248): n is a, c, g, or t
ttgggccgggcggtaaaacttttaaaaagatggtgggatgccagggacaaaatagttatggttcttgccgaatcttcagtgggaattgtagccccaattccgggcaaaacacgcggtagggcatcgaagtttcccaacggcaaaagcggaatattgtctcttttcagggaaattatcgaagaggcaattgcaggaagagaaaaaaatggaaaatccccgtggttatgggcaaggacatttcaggagaagcccagacccattgatctggtgcaaatgcctcatcttcttattgcgggagctaccggctcgggaaaatctgtctgcgtcaattcaatgattctttcaatattgtaccagcgtactccggcggaatgccgtttaatccttatcgatcccaaaattgtagagcttaaactgtacaacgatattccccatctgcttacgccggtaattaccgagccgaaaaaagcgtttcaggctcttcaatactgcatttacgagatggagcggcgttacgcctgccttgattcggtgggagtacgcgacatccgcagttacaacaagcgcattaaagagaagaatatcgctcaggaacacatgccctacattgtcgtggtaattgacgaattcgcagaccttatggtaaccaccggaaaagagctggaatcaacagtcgcccgccttgccgcaatgagccgcgccgtcggtattcatcttgtgcttgccactcagcgcccttcaattgacgttattacaggccttatcaaggcaaacattcctagccgtattgcctttatggttgcgggaaaaatggacagccgtatcattattgatatggtcggcgcggaaaaacttttaggcaaaggcgatatgctctatgcaggcgtagttgatcctttcccgatccgcatgcagggcgctttcgtatctgaagaagaagtagaagcggttgtagaatatgtaaaatcattcggagagccggattacatagacgatgagattttctttgaggaagaagaggaagactcaggcgcttccctgttctccgacggcgatgatccgttatacgaaaaagcgctggagatagtttatcagcagggcaaggcaagcgccagtttcattcaacgcagactaaaaatcggctttaaccgcgcggcgaggcttatcgacgaaatggaacataacggagttgtaggtccagcgaacggaagcaagcccagagaattggtgagagactttggcgcgtaa

SEQ ID NO: 34946 - protein, 415 aa, Unknown
  Obtained from environmental sample
  DOMAIN (57)...(248): FtsK/SpoIIIE family
  misc_feature (1)..(415): Xaa is any amino acid
MGRAVKLLKRWWDARDKIVMVLAESSVGIVAPIPGKTRGRASKFPNGKSGILSLFREIIEEAIAGREKNGKSPWLWARTFQEKPRPIDLVQMPHLLIAGATGSGKSVCVNSMILSILYQRTPAECRLILIDPKIVELKLYNDIPHLLTPVITEPKKAFQALQYCIYEMERRYACLDSVGVRDIRSYNKRIKEKNIAQEHMPYIVVVIDEFADLMVTTGKELESTVARLAAMSRAVGIHLVLATQRPSIDVITGLIKANIPSRIAFMVAGKMDSRIIIDMVGAEKLLGKGDMLYAGVVDPFPIRMQGAFVSEEEVEAVVEYVKSFGEPDYIDDEIFFEEEEEDSGASLFSDGDDPLYEKALEIVYQQGKASASFIQRRLKIGFNRAARLIDEMEHNGVVGPANGSKPRELVRDFGA

SEQ ID NO: 34947 - DNA, 621 bp, Unknown
  Obtained from environmental sample
  misc_feature (1)..(621): n is a, c, g, or t
ttgcggcagacggatagaaaggagcttggcatgaaagttattttaaacaaggatctctcgactcttggcgaggagggagacgtaaaagaagtggcaaaaggttatgcgcgcaattatcttttcccaaggggcatcgcgctgccgtatacgcccagaatgatcaagttaatagaaagccgcagggctgaaatagacgcgcgtaaagaacaaaaacgcatggatgcaagaggattaaaggaaaaacttgatgcgtttgaactttctcttacaatgcccgcgggggctaacggcaaactttacggcgccgtgacaaatcaaactatcgcggacgaacttgccaaaaacggattccaaattgagcgcaagcgcattgaaattgccggcaacggattcaagaacgtaggcaaatacaaggcggtaattaagctctatgaaaaccagtctgcggaaattacaattacaattatcgcgcaggaaataaagactgaaagctccgcttccaagcctgctccgcggcgaggcagaaaagaccgtcatgaaggcgaagcgcaggaaactccagccgaagaaacttccgcgcctgccgccgctgaagaaaaaacggaaactaaagccgaatag

SEQ ID NO: 34948 - protein, 206 aa, Unknown
  Obtained from environmental sample
  DOMAIN (72)...(158): Ribosomal protein L9, C-terminal domain
  misc_feature (1)..(206): Xaa is any amino acid
MRQTDRKELGMKVILNKDLSTLGEEGDVKEVAKGYARNYLFPRGIALPYTPRMIKLIESRRAEIDARKEQKRMDARGLKEKLDAFELSLTMPAGANGKLYGAVTNQTIADELAKNGFQIERKRIEIAGNGFKNVGKYKAVIKLYENQSAEITITIIAQEIKTESSASKPAPRRGRKDRHEGEAQETPAEETSAPAAAEEKTETKAE

SEQ ID NO: 34949 - DNA, 759 bp, Unknown
  Obtained from environmental sample
  misc_feature (1)..(759): n is a, c, g, or t
gtggcacagtcagtaagggataaaactcctcctcatgacgatgaattggaacaggccgcgttaggcagtctgttggcggatagcgaagccgtatccgccgcaattcaatttcatcttaccattaatgatttttattcccgcgctaactcccgcatctttgaagctatcatgagtcttgattcaaaaggactgcgtccggatattcaaaccgtagttcaggaattaaaactaatgggtaaacttgacgaagccggaggagtgtcctatgtttcaggcctgacaacggttattccctcaagcgcgaattttgaatattacgcgcagatggtaaaaaactactctgttaaaagatcgcttcttggtgtagcgtcggaaattggggcaagggtttacgatgaatcaaaagaagctgtggaaatactggagcacgttcaaaaggcaatttttaaattaagcgatgaaagacaggttttttcatccagaaaaatcagcgaagtgctgaaagaatcaataatgattcttgacaaggtaatgaagtccaaaaatccgataaccggcatttcaacgggctttgaagaactggatcggttgacatcaggttttcagcgcgaggaatttattgtaatcggagcgcggccttccgtaggaaaaaccgccattgcgcttaatatggcttccaatatggcttttcaccaaaatatccccacggcgttcttttcacttgaaatgtcaagtattgcgcttgtccagcgtctataa

SEQ ID NO: 34950 - protein, 252 aa, Unknown
  Obtained from environmental sample
  DOMAIN (183)...(252): DnaB-like helicase C terminal domain
  misc_feature (1)..(252): Xaa is any amino acid
MAQSVRDKTPPHDDELEQAALGSLLADSEAVSAAIQFHLTINDFYSRANSRIFEAIMSLDSKGLRPDIQTVVQELKLMGKLDEAGGVSYVSGLTTVIPSSANFEYYAQMVKNYSVKRSLLGVASEIGARVYDESKEAVEILEHVQKAIFKLSDERQVFSSRKISEVLKESIMILDKVMKSKNPITGISTGFEELDRLTSGFQREEFIVIGARPSVGKTAIALNMASNMAFHQNIPTAFFSLEMSSIALVQRL

SEQ ID NO: 34951 - DNA, 405 bp, Unknown
  Obtained from environmental sample
  misc_feature (1)..(405): n is a, c, g, or t
gtggtatatttagatacatcggctttgtataaattggttataaacgaatctggttctattgaacttagacaatatgtacaaagtttgttggatagtggctatacgttagtttcttccattttagcagaaacagaattaagacgagcagcacaaagagacaatatccctatttctactatagaagagttattgtctttcataagtttgattgaaatttccagagacgaatttatttcagcaggaaagttaacaacggaacattctaaaaatttacgttctttagatgctttgcatattgtttctgccgaacttgttgagattgattttgtaataacttttgacaatagacaagcggctgtttttaaagatttaggttacaaggttcaatacaacattcagggatga

SEQ ID NO: 34952 - protein, 134 aa, Unknown
  Obtained from environmental sample
  DOMAIN (2)...(124): PIN domain
  misc_feature (1)..(134): Xaa is any amino acid
MVYLDTSALYKLVINESGSIELRQYVQSLLDSGYTLVSSILAETELRRAAQRDNIPISTIEELLSFISLIEISRDEFISAGKLTTEHSKNLRSLDALHIVSAELVEIDFVITFDNRQAAVFKDLGYKVQYNIQG

SEQ ID NO: 34953 - DNA, 693 bp, Unknown
  Obtained from environmental sample
  misc_feature (1)..(693): n is a, c, g, or t
gtgaaacagcaaaaaggcgacattatggaaattgcatgtggaactggacgaatgacaattcctatctttgaggaaatagaaggctccggtcgtagtatcttggcttttgatttgtccgattctatgctggatgttctaaggggcaagctctctcctgaaaaaaatcatagctgcttgcaagtagaaaaaggcgatatgtcaaatttttactttaatagaaaattcgggcttgttttattgatgtggcgtgcctttcagcatttaattgatactgagggtgcacaaaactgcttgaaatgtatatatgaacatatgtcagatgatgctgtattgttattcaatgtttttcttcctaaagactcgtacggtaaggagtggattggcaaggaatttataacatatgatttaattgataaaaaaaacgatgcaagaatagttcgttcaacgaaaaacatcgattcggatgaagcaaggcaaattatacgatatttaacaagatatgatttaacatttaaagatggagaaaagaagcattatgaagatacgattgtctataaatattattatcccgaacagataaaggaattactaaagaaacacaattttgatatagttgaagaattaaattctttaaacccacaaaataaggaaattacagaccagtattatgttttgaaaaaagcaaaagtttaa

SEQ ID NO: 34954 - protein, 230 aa, Unknown
  Obtained from environmental sample
  DOMAIN (9)...(111): Methyltransferase domain
  misc_feature (1)..(230): Xaa is any amino acid
MKQQKGDIMEIACGTGRMTIPIFEEIEGSGRSILAFDLSDSMLDVLRGKLSPEKNHSCLQVEKGDMSNFYFNRKFGLVLLMWRAFQHLIDTEGAQNCLKCIYEHMSDDAVLLFNVFLPKDSYGKEWIGKEFITYDLIDKKNDARIVRSTKNIDSDEARQIIRYLTRYDLTFKDGEKKHYEDTIVYKYYYPEQIKELLKKHNFDIVEELNSLNPQNKEITDQYYVLKKAKV

SEQ ID NO: 34955 - DNA, 1377 bp, Unknown
  Obtained from environmental sample
  misc_feature (1)..(1377): n is a, c, g, or t
atggtagaaaacgggcagaggatcaatcccgatgtcaccctcataaggcgcggttctacggaaataaaagccccggaaagcacttatgtccaaattctggacagccccgacggacattccaggatactctacctgataggcaaagagcagaagattgagattaggaacggttctgattttcttgtaaaaaaagggacggtggttgaaaaggacaaaaccatcgccacctttgatcctttctccgatcccatcatcgccgaattcagcggaaaggttaaatatgaggacattatttccggaaccaccctcaaggaagaaattgacgaggttacgggaaacatcgaaaagcgcataacggaattccagcttgaaaacaagcagccccgcatctatatcatggacgataatgacaacgagcttatctcataccacctccccggcggggcgatcctccaggtcgaggacggggacaagatcaagtcgggccgtaccattgccaagatacttaaagagtccgcccgcgctatggacataacttccggccttccccgcgtcagcgagctgtttgaggcgcgcaagccgagaagccccgcggaactcgcgaaggtttccggcgtggtgttattcgagggaattgccaagggcaagcgcaagatcacggttaaagacacgtttggccgggaataccaccattttatccccatggcaaaacgccttctggtgcgcgacggcgacacggtggaagccggcgagcccctatgcgccggaaacatcaacccccatgacgtattaagcatcatgggtgaaagctacctccagacctatctgatggacgaaatccagcaggtgtaccggcttcagggcgtgtcgattaacgacaagcacattggcgttataatccgccagatgatgcggaaagtggagatccgttttgtgggcgacacaaggtttatctacggacagatggtggacaagtaccgcttccacgaggaaaacgcaagggttataaaagaaggcggccagcccgccatcgcccagcctttattccagggcataaccaaggcgtcgctgaatatcgactcgttcctttcggcggccagcttccaggaaactacccgcgtgctgaccaacgccgccattgccggcagtaccgactatctgcgcggcttgaaggaaaacatcatcattggccatccgatacccgcgggcaccggcatgaagcgttaccgtaacgtcaagctgtacgatgaagacagccaggatttggaaaagcagatgcaggagatccttgaacagcgcaggcttgaggcggagtatatcgccgaagcggcaaaagcggcggaaatgatgcccatggaagatgtggacgaagactaa

SEQ ID NO: 34956 - protein, 458 aa, Unknown
  Obtained from environmental sample
  DOMAIN (22)...(365): RNA polymerase Rpb1, domain 5
  misc_feature (1)..(458): Xaa is any amino acid
MVENGQRINPDVTLIRRGSTEIKAPESTYVQILDSPDGHSRILYLIGKEQKIEIRNGSDFLVKKGTVVEKDKTIATFDPFSDPIIAEFSGKVKYEDIISGTTLKEEIDEVTGNIEKRITEFQLENKQPRIYIMDDNDNELISYHLPGGAILQVEDGDKIKSGRTIAKILKESARAMDITSGLPRVSELFEARKPRSPAELAKVSGVVLFEGIAKGKRKITVKDTFGREYHHFIPMAKRLLVRDGDTVEAGEPLCAGNINPHDVLSIMGESYLQTYLMDEIQQVYRLQGVSINDKHIGVIIRQMMRKVEIRFVGDTRFIYGQMVDKYRFHEENARVIKEGGQPAIAQPLFQGITKASLNIDSFLSAASFQETTRVLTNAAIAGSTDYLRGLKENIIIGHPIPAGTGMKRYRNVKLYDEDSQDLEKQMQEILEQRRLEAEYIAEAAKAAEMMPMEDVDED

SEQ ID NO: 34957 - DNA, 1692 bp, Unknown
  Obtained from environmental sample
  misc_feature (1)..(1692): n is a, c, g, or t
atgaaaaaacttgttgacaaggatgttgtctacaatatcaagaaagccaagatgctgcttgaagccgagagcgtggaaattttcgcgatcctcgacgaagtggttaaggaacatccggtgctgttgaaccgtgcgcctaccctgcaccgcctgggtatacaggcctttgagccggtgctggtggaaggcaaggcgatcaaactgcatcccctggtctgccacgcttttaacgccgactttgacggcgaccagatggcggtacatgtgcccctgacccaggcggcccagatggagtgctggacgctgatgctctccgcccgcaaccttcttaaccccgcaaacggcaggactatagtgttcccctcccaggacatggtgctgggaattaacttccttacccgcgtgaaacctaacggcaagcggcccgaatctttaaacccggagagtaagaatcatattccatattattcctccccggaggaagccctgatggcggtggagaataaatttcttgattggggctcccttatccgccttaagcctgtgaaattcccgatatgggacaagattgaccatgagatggaaatcccgaaagacggaatcattgaaaccaccgtcggaaggctggtgttcaacgaggaacagcccagggagattcccttcattaattatgagatgaaagacaaggaactccgcgcccttattgagcacatcttcaagaaaaatggttcctggattacggtaaaaatgctggacgccatcaagtcaaccggataccgttatgcgacagttttcggcgccacgataggcattgatgatattgtagttcccaaagaaaagcccgaaatgatcgataaggcgaacagggaagttgaggcgattcagacccagtggcgcaagggcattatgacccaggaggaacgctacaataaagttatcgacgtatggaacaagaccaacgaggaactgaccaacattatgatgaagaccctggaggcggaccgtgacggctttaactcgatttacatgatggcgaactccggggcgcgcggaagccgcaaccagatacgccagcttgccgcgatgcgcggccttatgggcaagccttccggcgaaattatcgagctgccgatacgctcaaacttcaaggaagggctttccgtcatcgagttttttatttcgactaacggcgcgcgcaaaggtctcgcggacaccgcccttaaaaccgccgaagccggttaccttacgcggcggcttgtggatatagcccaggacgttgtggtaaacgagaatgactgcggcacgattaacgggatttcctataccgccgttaaggaaggcgaagacattgtcgagcctttaagcgaccgcattatcggccgctacactatcgagcccgtgaagcatccttttacgggcgaaattatcgtcgatgtcaacgaggagattaccgaggaaatcgccaaaaaaataaccgccgccgaggttaattccgtgcgcatacgcacagttctgacctgtgaggcgaaacacggcgtctgccgcatgtgttatgggcgcaacctcgcgacaaaccgcacggtggacatcggtgaggcggtgggaaccatcgcggcccagtcaatcggccagccgggaacgcagcttaccatgcgtaccttccatataggcggtacggctcggccaatctga

SEQ ID NO: 34958 - protein, 563 aa, Unknown
  Obtained from environmental sample
  DOMAIN (385)...(562): RNA polymerase Rpb1, domain 5
  misc_feature (1)..(563): Xaa is any amino acid
MKKLVDKDVVYNIKKAKMLLEAESVEIFAILDEVVKEHPVLLNRAPTLHRLGIQAFEPVLVEGKAIKLHPLVCHAFNADFDGDQMAVHVPLTQAAQMECWTLMLSARNLLNPANGRTIVFPSQDMVLGINFLTRVKPNGKRPESLNPESKNHIPYYSSPEEALMAVENKFLDWGSLIRLKPVKFPIWDKIDHEMEIPKDGIIETTVGRLVFNEEQPREIPFINYEMKDKELRALIEHIFKKNGSWITVKMLDAIKSTGYRYATVFGATIGIDDIVVPKEKPEMIDKANREVEAIQTQWRKGIMTQEERYNKVIDVWNKTNEELTNIMMKTLEADRDGFNSIYMMANSGARGSRNQIRQLAAMRGLMGKPSGEIIELPIRSNFKEGLSVIEFFISTNGARKGLADTALKTAEAGYLTRRLVDIAQDVVVNENDCGTINGISYTAVKEGEDIVEPLSDRIIGRYTIEPVKHPFTGEIIVDVNEEITEEIAKKITAAEVNSVRIRTVLTCEAKHGVCRMCYGRNLATNRTVDIGEAVGTIAAQSIGQPGTQLTMRTFHIGGTARPI

SEQ ID NO: 34959 - DNA, 1026 bp, Unknown
  Obtained from environmental sample
  misc_feature (1)..(1026): n is a, c, g, or t
atgacaggcgatgaaaatattgtttcagccagcaaaattttcgttacaacaaacttggcggctgctacagcggcggtcttcacaatgatcattacatggatacgttacaagaaacctgacgtgtcaatgacactgaacggcgctcttgccggtcttgtagcgattaccgcgggatgcgacgctgtatcaccgttcggcgcattctgcataggtattattgcggcgattgttatcgtattcggtattgagtttgtcgacaaagtattaaaaattgacgatcctgtcggcgctatcggcgtacacggtattgccggcgcggcgggaacaattcttaccggtatattcgctcttgacggcggattagcttacggcggcggatggacgatggttggagttcaggctctcggcgttgtctcggtagcggcatgggtagcggtaacaatgggtattgtctttacggtaatcaagaaagtaatgggtcttcgcgtttcacataccgaagaacttgccggcttggatattaccgaacacaatattgcaaacagctatgccgactttatgataactccagcgggcgctgacttcaagccttattcggatgaggatgaagatgaagaaaaagttccggaaaatgtggcagttcctgttgtaaacaactcaaagcccggcgcgaagatgacaaaaattacaatcatcacaaatcagaacaaactcacggctcttcacaacgcgctcgacagaatcggtattacaggtcttacggttaccaacgtacttggtcacggaatgcaaaagggacataccgagtattaccgcggcgctcctgtaaccatgaaactgcttcccaaggttcaggttgatattatcgtatgtaaaataccgccgcaaaccgtaatagacaccgtaaagaaagtgttgtatacgggaaaagtcggcgacggcaaaatatttatttatgatgtcgaaaacgttgttaaggttcgcacaggcgagcaaggatacgacgcgttacaggacaatgaataa

SEQ ID NO: 34960 - protein, 341 aa, Unknown
  Obtained from environmental sample
  DOMAIN (1)...(182): Ammonium Transporter Family
  misc_feature (1)..(341): Xaa is any amino acid
MTGDENIVSASKIFVTTNLAAATAAVFTMIITWIRYKKPDVSMTLNGALAGLVAITAGCDAVSPFGAFCIGIIAAIVIVFGIEFVDKVLKIDDPVGAIGVHGIAGAAGTILTGIFALDGGLAYGGGWTMVGVQALGVVSVAAWVAVTMGIVFTVIKKVMGLRVSHTEELAGLDITEHNIANSYADFMITPAGADFKPYSDEDEDEEKVPENVAVPVVNNSKPGAKMTKITIITNQNKLTALHNALDRIGITGLTVTNVLGHGMQKGHTEYYRGAPVTMKLLPKVQVDIIVCKIPPQTVIDTVKKVLYTGKVGDGKIFIYDVENVVKVRTGEQGYDALQDNE

SEQ ID NO: 34961 - DNA, 363 bp, Unknown
  Obtained from environmental sample
  misc_feature (1)..(363): n is a, c, g, or t
atgatttatattaaatacatcgggcttgatgggcgggttcatctaaaagggaggatttatggcggaggagacggcagctgcggcaaagacggcggcgacggcggggaccgccgggacggcagctgcggcaaagacggcggcgacggcggggaccgccgggacggcaacggcggtaaagacggcggtggaggctgggactgccgggactacagcggcggtaaagacggcggtggaggttatgaaggcgagactggcggcggcggcaggaaccgcggcaacggcagggacgtttaccgacaagagggacgggcagacttaccgtacggtgaaaatgccggacgggaggatatggatggcgcataa

SEQ ID NO: 34962 - protein, 120 aa, Unknown
  Obtained from environmental sample
  misc_feature (1)..(120): Xaa is any amino acid
MIYIKYIGLDGRVHLKGRIYGGGDGSCGKDGGDGGDRRDGSCGKDGGDGGDRRDGNGGKDGGGGWDCRDYSGGKDGGGGYEGETGGGGRNRGNGRDVYRQEGRADLPYGENAGREDMDGA

SEQ ID NO: 34963 - DNA, 495 bp, Unknown
  Obtained from environmental sample
  misc_feature (1)..(495): n is a, c, g, or t
atggcggaggagacggcagctgcggcaaagacggcggcgacggcggggaccgccgggacggcagctgcggcaaagacggcggcgacggcggggaccgccgggacggcaacggcggtaaagacggcggtggaggctgggactgccgggactacagcggcggtaaagacggcggtggaggttatgaaggcgagactggcggcggcggcaggaaccgcggcaacggcagggacgtttaccgacaagagggacgggcagacttaccgtacggtgaaaatgccggacgggaggatatggatggcgcataatcttaattataagcccgagccgggcaattcttggtgctataacgacgatgagtcgatgggcgcgaaatacgggcggctctacagctggaggtccgcgatgaccgtcgccccggcgggatggcatttgccggacgcatcaggaatggttggatgtgataaccgccaagggctcttgggaggcgagcattaa

SEQ ID NO: 34964 - protein, 164 aa, Unknown
  Obtained from environmental sample
  SIGNAL (1)...(23)
  misc_feature (1)..(164): Xaa is any amino acid
MAEETAAAAKTAATAGTAGTAAAAKTAATAGTAGTATAVKTAVEAGTAGTTAAVKTAVEVMKARLAAAAGTAATAGTFTDKRDGQTYRTVKMPDGRIWMAHNLNYKPEPGNSWCYNDDESMGAKYGRLYSWRSAMTVAPAGWHLPDASGMVGCDNRQGLLGGEH

SEQ ID NO: 34965 - DNA, 786 bp, Unknown
  Obtained from environmental sample
  misc_feature (1)..(786): n is a, c, g, or t
atgcgcgaaggctttagcctgagcgggaggcgtaggaacagcaccccgaaccacgaaccacgaccccttgtactgcttcccgtcttcccgggtacaaactgtgaatgggacatggagagggctttccgtgaagcgggcgcacggacaaggatcgttattttcagaaaccggaacagggaagatatagcggagtcaaaacaagagctggcgcgggcaatcgttgaatgtcagatacttgcgttatccggcggattcagcgccggcgatgagcctgacggcagcggcaaattcatcgccaatgtactgcgagccccgattatcgccgacgctgttaacaatttattggaaaaccgggacggactcatactgggaatctgcaacggcttccaggcattgatcaaactgggactggttccttatggcgcttaccgcagagcggaagaatcaatgcccacccttacctttaaccgcgttggccgccatgtttcgcgtatggtcaacacgctggtaatgccgaattgttccccctggcttgcgctggacaaacccggcgcggttcatgcgctgccggtaagccacggcgagggccgcctcgttatcagcgaggcggaaggagaagcgttgtttaaaaacggccagattcccttttgctatgccgacgaaaacggcctcccgaccatgcgggagcctgacaatcccaacggatcggattttgccatcgagggcatggtcagccccgacggaaggatactcggcaagatggcccattcggaacgccgggggtga

SEQ ID NO: 34966 - protein, 261 aa, Unknown
  Obtained from environmental sample
  misc_feature (1)..(261): Xaa is any amino acid
MREGFSLSGRRRNSTPNHEPRPLVLLPVFPGTNCEWDMERAFREAGARTRIVIFRNRNREDIAESKQELARAIVECQILALSGGFSAGDEPDGSGKFIANVLRAPIIADAVNNLLENRDGLILGICNGFQALIKLGLVPYGAYRRAEESMPTLTFNRVGRHVSRMVNTLVMPNCSPWLALDKPGAVHALPVSHGEGRLVISEAEGEALFKNGQIPFCYADENGLPTMREPDNPNGSDFAIEGMVSPDGRILGKMAHSERRG

SEQ ID NO: 34967 - DNA, 849 bp, Unknown
  Obtained from environmental sample
  misc_feature (1)..(849): n is a, c, g, or t
atgaatcacaatactgaaacaaataatctaaatgaggcagtgggaataaccaaagcattggaagacagcaaaaaaatgctggagatgctcaataaagcagctataacatttgtttcgcaaagtgaagaatcttttgagaaaagaatagaaggcggagtaagagctatttgcgatatggcagggctggataggttttgcatttttcgcaactcatccaagccagattgcttgcacgtttcgcagatataccgctgggacagggaaacgggcggaacaattgaaattgaccctgtgctcgtagatgtaacttatgctaaatttgctcctcgatgggaagcaattttggcaagcaatgaaatagtaaacggacctataaaagcaatgccagaatcagctatgctacaatcgtttggcttggtatcggctcttgttgtgcctttgtttatcaagaatgcgttttgggggtttgcgctttttgaagaccgccataatgaacgttattttgacaaagaacaggtagaaataatgtgttcagctgcctttttgtgtgccaacgtttttattcaacgacaaacagaaattgaaattgatagaacttccaaaaaattggagagtagcaaaaaaatgctggagatgctcaataaagctgcgataacatttgtttcgcaaagcgagggctcttttgaaaaaagaatagaagaaggggtgaggtctatttgcgatatggcaaaactggatagattttccgtttttcgcaattttactatgccagatggtttgcattcatcgcagatataccgttgggatagggaagctggcggaacaactgagataactcaggcggtttga

SEQ ID NO: 34968 - protein, 282 aa, Unknown
  Obtained from environmental sample
  DOMAIN (44)...(187): GAF domain
  misc_feature (1)..(282): Xaa is any amino acid
MNHNTETNNLNEAVGITKALEDSKKMLEMLNKAAITFVSQSEESFEKRIEGGVRAICDMAGLDRFCIFRNSSKPDCLHVSQIYRWDRETGGTIEIDPVLVDVTYAKFAPRWEAILASNEIVNGPIKAMPESAMLQSFGLVSALVVPLFIKNAFWGFALFEDRHNERYFDKEQVEIMCSAAFLCANVFIQRQTEIEIDRTSKKLESSKKMLEMLNKAAITFVSQSEGSFEKRIEEGVRSICDMAKLDRFSVFRNFTMPDGLHSSQIYRWDREAGGTTEITQAV

SEQ ID NO: 34969 - DNA, 417 bp, Unknown
  Obtained from environmental sample
  misc_feature (1)..(417): n is a, c, g, or t
atgattccctgtgataccggtctctttttgcatacctttggccttcgttcagagatactgccctccgctgatttttccgctgttaaccgtggttctctggcggaaatttttaccggattagaactgttaaaagcggcttcctgttttaccccacaggaattattctactggcagagatcggccagtccggattccgcaaaggggaacgctcaagttgattttcttgttcagaaaggcgcaaacattattcctatagaagtcaaatcgggaacccagggcagtatgcaaagtctccgtctttttatgaaagaaaagcatattgaaagagggatacggacatcccttgaaaactttggacactatgaggatatagatatctatcctttatatgcgattgggaatttggttaggggttga

SEQ ID NO: 34970 - protein, 138 aa, Unknown
  Obtained from environmental sample
  misc_feature (1)..(138): Xaa is any amino acid
MIPCDTGLFLHTFGLRSEILPSADFSAVNRGSLAEIFTGLELLKAASCFTPQELFYWQRSASPDSAKGNAQVDFLVQKGANIIPIEVKSGTQGSMQSLRLFMKEKHIERGIRTSLENFGHYEDIDIYPLYAIGNLVRG

SEQ ID NO: 34971 - DNA, 927 bp, Unknown
  Obtained from environmental sample
  misc_feature (1)..(927): n is a, c, g, or t
atggaaattcaatattttaagcggaatatcgataaaattcttctcgcctggagtagggatacaccccctgacaggaaaccattgctcctgcgtggggcaaggcagatagggaaatcatcggctgtcaggcaattggggaagcagtttaagtattttgtcgagattaacttcgatgaaaataaagaggtaagaagtttttttgaggcccctttttcccctcaggaaatttgcgagcagcttgcgcttttttaccatacgccgattatacccggagaaacattgctattttttgatgaaattcaaagctgccagccggctttggcaaagatacggtatttttatgagaagtatgccgaacttcatctggttactgcgggctctctcctggaattcgcgcttgaagaaatatcgtctttcggcgtgggtcgtattcgttctctttttatgtatccctttggattcgatgaatttctgaccgccttgaatgaagaagcgctctcggaagctgtcaagacagcatctcctgaaaaaccgcttacagagcccattcatcagcaactcctgggcaggctgaaaattttttttatctgcggagggatgcctgaagcggtttcccaatatgtacggaaaagggatttgctaagcggcgaactcattctgaacgatcttataaccgtgcttaaaactgatttcgcgaaatatagaaaacgcacttcccttttgcttctaaatgaagtttttgaatccgttatgcgccaaccgaagggaaagtttgtttatgaacgcgccgcacctggaactcaaagcgcggctgtaaggcaagcacttgaacttctcatcatggcaggactggttcatccggtaacccataccgccgcaaatggtattcccctggagcagaggcaaaccggaaataccgccggatga

SEQ ID NO: 34972 - protein, 308 aa, Unknown
  Obtained from environmental sample
  misc_feature (1)..(308): Xaa is any amino acid
MEIQYFKRNIDKILLAWSRDTPPDRKPLLLRGARQIGKSSAVRQLGKQFKYFVEINFDENKEVRSFFEAPFSPQEICEQLALFYHTPIIPGETLLFFDEIQSCQPALAKIRYFYEKYAELHLVTAGSLLEFALEEISSFGVGRIRSLFMYPFGFDEFLTALNEEALSEAVKTASPEKPLTEPIHQQLLGRLKIFFICGGMPEAVSQYVRKRDLLSGELILNDLITVLKTDFAKYRKRTSLLLLNEVFESVMRQPKGKFVYERAAPGTQSAAVRQALELLIMAGLVHPVTHTAANGIPLEQRQTGNTAG

SEQ ID NO: 34973 - DNA, 315 bp, Unknown
  Obtained from environmental sample
  misc_feature (1)..(315): n is a, c, g, or t
atgcatcataatataaggggggagcttgtgttattcagaagaaaaactaaaaagaataatagcttttcgctggtaaaatcagacgacgacaggcgttttgtgttcggctgggcgagcgttgcggtgagggctgacggcgaggttattgttgactcgcagaatgacgttatagacatatcggagcttgaaaatgcggcgtacgaatataccgttaattttggcgcagcgggagaaaatcacgaaaaagcggcgtgggagtactttatgaaagcgtggcgtttacaaaagagaaagccgcgcaatgggtatccctga

SEQ ID NO: 34974 - protein, 104 aa, Unknown
  Obtained from environmental sample
  misc_feature (1)..(104): Xaa is any amino acid
MHHNIRGELVLFRRKTKKNNSFSLVKSDDDRRFVFGWASVAVRADGEVIVDSQNDVIDISELENAAYEYTVNFGAAGENHEKAAWEYFMKAWRLQKRKPRNGYP

SEQ ID NO: 34975 - DNA, 939 bp, Unknown
  Obtained from environmental sample
  misc_feature (1)..(939): n is a, c, g, or t
gtgggcgtgttcggctacggcggcggcgttatcggccgttactgcgaccagcccgaaaaattccccggcgtggcgcacttccacacggtgcgcgtagcccagccctcgggcaaattctacaacacgaagtttctccgcgacctttgcaatatctgggatttgcgcggatcgggcctgaccaacatgcacggttccaccggcgacatcgtcctgcttggcacccagacccgccagctcgaagaaattttctgggaactgacccacaacatgaacaacgacctcggcggttccggctccaacctgcgcacgcccgaagcctgcatggggcagtcccgctgcgagtacgcctgctacaacacgcaggacatgtgctaccagttgaccatggattaccaggacgaactgcaccgtccggctttcccctacaagttcaaattcaaatttgacggctgtcccaacggctgcgtcgccgccatagcccgttccgacttcgccgtgattggcacctggaaggatgacatcaagatcgatcagggcgcggtgaaaggctatgtgggcggcgaattcaaacccaatgccggcgcccattcgggccgcgactggggcaaattcgacattgtgaaggaagtccttgatcgctgtccctccaaatgcatgaaatgggacggctccaagctgtccatcaagaccgccgaatgtgtgcgctgcatgcactgcatcaacgtcatgccccgcgccctgcgcatcggcgacgaacgcggcgcttccatcctgtgcggcgcgaaagccccggttctggacggcgcccagatgggctccctgctcgtacccttcattgaagccgaagccccctacgacgaagtcaagggagtcatcgaaaaatttgggactggtggatggaagaaggcaaaaaccgcgaacgcttcggtgaaactatga

SEQ ID NO: 34976 - protein, 312 aa, Unknown
  Obtained from environmental sample
  DOMAIN (97)...(312): Nitrite and sulphite reductase 4Fe-4S domain
  misc_feature (1)..(312): Xaa is any amino acid
MGVFGYGGGVIGRYCDQPEKFPGVAHFHTVRVAQPSGKFYNTKFLRDLCNIWDLRGSGLTNMHGSTGDIVLLGTQTRQLEEIFWELTHNMNNDLGGSGSNLRTPEACMGQSRCEYACYNTQDMCYQLTMDYQDELHRPAFPYKFKFKFDGCPNGCVAAIARSDFAVIGTWKDDIKIDQGAVKGYVGGEFKPNAGAHSGRDWGKFDIVKEVLDRCPSKCMKWDGSKLSIKTAECVRCMHCINVMPRALRIGDERGASILCGAKAPVLDGAQMGSLLVPFIEAEAPYDEVKGVIEKFGTGGWKKAKTANASVKL

SEQ ID NO: 34977 - DNA, 303 bp, Unknown
  Obtained from environmental sample
  misc_feature (1)..(303): n is a, c, g, or t
ttgcaatatctgggatttgcgcggatcgggcctgaccaacatgcacggttccaccggcgacatcgtcctgcttggcacccagacccgccagctcgaagaaattttctgggaactgacccacaacatgaacaacgacctcggcggttccggctccaacctgcgcacgcccgaagcctgcatggggcagtcccgctgcgagtacgcctgctacaacacgcaggacatgtgctaccagttgaccatggattaccaggacgaactgcaccgtccggctttcccctacaagttcaaattcaaatttga

SEQ ID NO: 34978 - protein, 100 aa, Unknown
  Obtained from environmental sample
  misc_feature (1)..(100): Xaa is any amino acid
MQYLGFARIGPDQHARFHRRHRPAWHPDPPARRNFLGTDPQHEQRPRRFRLQPAHARSLHGAVPLRVRLLQHAGHVLPVDHGLPGRTAPSGFPLQVQIQI

SEQ ID NO: 34979 - DNA, 483 bp, Unknown
  Obtained from environmental sample
  misc_feature (1)..(483): n is a, c, g, or t
ttgaatcatgaagaaattaccctaaaagatataaaggctgattttgcggtttcatactcgtcgtttgaacatgacggacttggacgttatggcgatccactttctccggatggggattttcgtgcgatgaaagaggcgcataaattcttaaaaagggatgggatactttttctgggagttccgctgggagaagactgtatagtatggaacgcacatagaatatatggcaaaaaccgtttgccactattgctcagaggttggcaattaatagatgtatttgacattaacattaaagacagtcctgaatatccgtttaatttacctttgggaagttatattcaaaatgttatggtactaaaaaaaatagaggaagagtttcccgatgataaatatctattcgcggatagtattaagtttggtgaaaggaacaacttatataagagaataaacaaaataatatatgattataaaaaatctttatga

SEQ ID NO: 34980 - protein, 160 aa, Unknown
  Obtained from environmental sample
  DOMAIN (2)...(122): Caenorhabditis protein of unknown function, DUF268
  misc_feature (1)..(160): Xaa is any amino acid
MNHEEITLKDIKADFAVSYSSFEHDGLGRYGDPLSPDGDFRAMKEAHKFLKRDGILFLGVPLGEDCIVWNAHRIYGKNRLPLLLRGWQLIDVFDINIKDSPEYPFNLPLGSYIQNVMVLKKIEEEFPDDKYLFADSIKFGERNNLYKRINKIIYDYKKSL

SEQ ID NO: 34981 - DNA, 804 bp, Unknown
  Obtained from environmental sample
  misc_feature (1)..(804): n is a, c, g, or t
gtgtcagtgattgccgatctgcctcctgggcgtaaggccataaaaacccaccttgcaaaagaatctaacgctgggaaggtntacgatgttgtgcgcaatgaactatcaagaggccatcaggcttattttgtttaccctctaatcgaaggcggagacggaaacgacttaaaagacgcggtgtccatggcggacaggcttgccaaagaagtgttcccgggttttcccctcgcgctcttgcactcaaaagtgaacgaagaggacaagcgaaaagccatggaagccttccgccgtggagaaataaagatccttgccgccacgagcgtcgtggaagtcggcgttgatgttccgaacgcgacctgcatggtaatcgaacatgccgagcgcttcggcctttccgccctgcaccagctccggggcagggtgggccggggagaaggtcagtcctactgttttttggtttactccgacaatttgggcgaagacgggaaaaaacggcttatggtaatgcttgaaaattcttccggctttgttattgccgaagaagatctaaagctgcgcgggcccggccagattgccggcattgagcagtcaggctaccttaaactgggcgttgccgatcccgtcagggacgcggaagatcttgtccgcgcccgctccgacgcctttgaaattcttgaatccgatcctgcgcttgaaaagcctccgaataaacgaattgccgaagttctggaacgctgcccgccctttagcgaggtggggctgtanggattagaaattctgaattttaaaaagaacacattttaa

SEQ ID NO: 34982 - protein, 267 aa, Unknown
  Obtained from environmental sample
  DOMAIN (68)...(145): Helicase conserved C-terminal domain
  misc_feature (1)..(267): Xaa is any amino acid
MSVIADLPPGRKAIKTHLAKESNAGKVYDVVRNELSRGHQAYFVYPLIEGGDGNDLKDAVSMADRLAKEVFPGFPLALLHSKVNEEDKRKAMEAFRRGEIKILAATSVVEVGVDVPNATCMVIEHAERFGLSALHQLRGRVGRGEGQSYCFLVYSDNLGEDGKKRLMVMLENSSGFVIAEEDLKLRGPGQIAGIEQSGYLKLGVADPVRDAEDLVRARSDAFEILESDPALEKPPNKRIAEVLERCPPFSEVGLXGLEILNFKKNTF

SEQ ID NO: 34983 - DNA, 1497 bp, Unknown
  Obtained from environmental sample
  misc_feature (1)..(1497): n is a, c, g, or t
ttggatcgcgcccttgaccttatcatggcctcgcgggacgagagtgcgcggaacctccttgtaacgctgaacggaacgggaagccgcgacgtttcattaagctatgtgatccccacgccggtgtggaaggtatcttacaggcttgatatttcaggaaaggagcctttccttcagggttgggctattgtagacaacgacagcgatgccgactggaagggcgttgagctttcgcttgtaacgggaagaccggtctcgttcatccagaggctctacccgccatacaggctttcacgccccgttgttccccttgccattgccggctttgcggagagcagaacttacgagtcaggctacaatttcggtgcaagggcgccggaagccgcgccaatgccaagcgcggcaatgaggacgcagagcatggcggacacagccgcaaaagcggaaatggactattactatgaaaaggagagtgcagccgttggttctgttgccgggggagcaatggataccgcttccggacgcgcagccggggatcagtttgagtttacgctgaaaaaccccgtaacccttgacaggcggcagagcgcgatgctcccgctggtggaagggtcgataaaggcggaaaaaatcctgattttctcaggcgctcgcgcattaggcggtgctacgataaaccccgcgattagcgcggaactggtcaacacctccggcatgaaacttcccgccggacccatcacggtttacgagggcggaacctacgcgggcgacgcgctcatcgagttctggaatgaaggcgaaaaacggcttgtatcctatggcgaggatctttcagttataggcgccgttatgaacagcagttccaatacgttttcttcagtgaccatatcaggcggcgtaatgactattacccgcagccaggagtacctgaaaacctacactttcaaaaacaacgccgcgcaggaaaaacagctcctcattgaacatcccaaaagccagggattttcccttaattcccccaaagccgatgaggaaaccccgaccctataccgcttcaccgtaaccctgcccgccggaagcgaacttaccgtccctgtccgcgaatcccgcccaatcatggagcgcgtaaccctgctgcagctcaggcccgaggcgtttctgtcatacgcgagcagccaggaacttcccgcaaacgtgagggatagtctgcagcaggcggtgaacctgcgttcttcgcttaacagcgcgcaggccgctgtcacagaagcggaaaggcagagacagggttttgtttcagagcaggatcggatcaggaaaaatcttgaagccgccggcagtacaacccagcaggggcaggaatacctgaaaaggcttttatcgcttgacgacagcattgacaaacttgacgcggaactgcaaaccttaagggaaaacgcaagaaccgcccagaaagcgtatgaagattacattggcagcctgagaatagggactagggactag

SEQ ID NO: 34984 - protein, 498 aa, Unknown
  Obtained from environmental sample
  misc_feature (1)..(498): Xaa is any amino acid
MDRALDLIMASRDESARNLLVTLNGTGSRDVSLSYVIPTPVWKVSYRLDISGKEPFLQGWAIVDNDSDADWKGVELSLVTGRPVSFIQRLYPPYRLSRPVVPLAIAGFAESRTYESGYNFGARAPEAAPMPSAAMRTQSMADTAAKAEMDYYYEKESAAVGSVAGGAMDTASGRAAGDQFEFTLKNPVTLDRRQSAMLPLVEGSIKAEKILIFSGARALGGATINPAISAELVNTSGMKLPAGPITVYEGGTYAGDALIEFWNEGEKRLVSYGEDLSVIGAVMNSSSNTFSSVTISGGVMTITRSQEYLKTYTFKNNAAQEKQLLIEHPKSQGFSLNSPKADEETPTLYRFTVTLPAGSELTVPVRESRPIMERVTLLQLRPEAFLSYASSQELPANVRDSLQQAVNLRSSLNSAQAAVTEAERQRQGFVSEQDRIRKNLEAAGSTTQQGQEYLKRLLSLDDSIDKLDAELQTLRENARTAQKAYEDYIGSLRIGTRD

SEQ ID NO: 34985 - DNA, 1287 bp, Unknown
  Obtained from environmental sample
  misc_feature (1)..(1287): n is a, c, g, or t
atgcgtaccatctcagctgaaaccaacgaaatcggcaggatacccttaaatatattgcagctctgtacggaattatttaccatactcatggtttatgcggtcatagtcctgttaaactggaaaatgacgctggtaatttccgctgtattattattcatagtgtcaattttacttgcaattttaacaaaagaaaataagatacagggagcaaagagggtgattttcggcagaaaaatgcaccgtgttttaatggagactatggggaactataaatatgtaaaactaaagggcaatgaagaaaatatcctgtccgcttataattccgttgtagaaaagttcacacgaacagaggtcgtcaataataccctcggcattatccccaagactattcttgaaagtctgggattttcattccttgtcgcggtagtcgtttttattttatggatatatcatgacgcttcaaaggttattccggttatttcaatgtatgccctggctctgtaccgtatccttccgtcactgcaccgtttgctgcaaaatataaatagtattacctattctgaaaaggctcttgagagcgtttatgaaagcctgcggctgccggtagaaaatgaaggagccgtaccgcttcaatttgaacattctatccgccttgaagatatacattttaaatatatgaccggtaatgaggttattaccggggtctcactcgaaattaaaaaaggggaaaaaatcgccattaccggggaaagcggcggcggcaaatcaaccctggttgatattattataggtattcacaagccgctttccggtaaagtttatattgatgaaaccgaaatcacggatgataatatccgttcatggcgaaaaaaaataggatatataccgcaaagcatctatctttttgacggaacagtcgcggagaacgtctcttttggctctatgcctgatgaagaaaaaataaagaaagccctgcaaatggccaatatatggaattttctcgcggcaaaagacggaagcaacaccctggtcggcgaagggggcattcaattaagcggcggacagcagcagcgtatcggcattgcccgcgccctttacgatgatcccgacgtactgatccttgacgaagccacttccgcccttgataccgaaaccgaacaaaaaataatggatgaaatatataacgtaagcgcgaataaaacattaattgtaatcgcccaccgcttaagtaccgttgagcgctgtgacagaaaaatccgaattgaaaatgggaaaattatttcataa

SEQ ID NO: 34986 - protein, 428 aa, Unknown
  Obtained from environmental sample
  DOMAIN (233)...(428): RecF/RecN/SMC N terminal domain
  misc_feature (1)..(428): Xaa is any amino acid
MRTISAETNEIGRIPLNILQLCTELFTILMVYAVIVLLNWKMTLVISAVLLFIVSILLAILTKENKIQGAKRVIFGRKMHRVLMETMGNYKYVKLKGNEENILSAYNSVVEKFTRTEVVNNTLGIIPKTILESLGFSFLVAVVVFILWIYHDASKVIPVISMYALALYRILPSLHRLLQNINSITYSEKALESVYESLRLPVENEGAVPLQFEHSIRLEDIHFKYMTGNEVITGVSLEIKKGEKIAITGESGGGKSTLVDIIIGIHKPLSGKVYIDETEITDDNIRSWRKKIGYIPQSIYLFDGTVAENVSFGSMPDEEKIKKALQMANIWNFLAAKDGSNTLVGEGGIQLSGGQQQRIGIARALYDDPDVLILDEATSALDTETEQKIMDEIYNVSANKTLIVIAHRLSTVERCDRKIRIENGKIIS

SEQ ID NO: 34987 - DNA, 1077 bp, Unknown
  Obtained from environmental sample
  misc_feature (1)..(1077): n is a, c, g, or t
ttgcccggtatggaggaaattgccggcgattttggcgggattttttttaaacccctgcttatctgtgataccaataccgaatttctcgccgtgaaaatccgcggcaatgccaatattcccctttgtacactggaagcaggcgaatcacataaagactggcagtcagtagagaccattctccgaagcgcccgtgacgccggactgggcagagacggaacttttatcggcgtgggcggcggggttatcagcgacctgagcgccttcgccgcgtcgatttatatgcggggctgttccgttgctctggtatcaacgaccttgctgggcatggttgacgccagcctcggcggaaaaaccgggtttgaccttttcggcgttaaaaactttgccggaactttttttcccgcccgccatgtgtatatgccgatggaaagtctggcaagcctgcccctgcctgaatggaaatccggtatggcggaacttatcaaaaccgccatactggataacgatgattttctcggcgagcttgcctccctggcggcggctttccccgatgggagtttcagcggcggcttcccgccggatttcgcatcacgggtcattgccaccgatacggcattaagccgctgcatcagcagggcggcgcggttcaaaggcggcattgtcgaggaagatccgctggaaacgggaacccggcgcgttctcctcaatttggggcataccttcggtcacgcgctggagtccactgccggactgggaacaatttcccacggcgaagcggttgcctggggcattgcgcgttcctgcgaactcggtctggctttgggcatctgtcccccgtacagggcaaagaggataatgtcgcttttaacggcttttgattatgagactgcggccccccatcctcttgctgccggcgccgaactaatacaggccctgggcagtgataaaaagaaacgacggggaaaacttgtttttatagtcccggacgaaaaaagtgcccggcctgtaaccgcggatgcgcctgagtttatgaatacggtcagccgaataatcgaaggagccgtgtcatccttgtaa

SEQ ID NO: 34988 - protein, 358 aa, Unknown
  Obtained from environmental sample
  DOMAIN (7)...(319): 3-dehydroquinate synthase
  misc_feature (1)..(358): Xaa is any amino acid
MPGMEEIAGDFGGIFFKPLLICDTNTEFLAVKIRGNANIPLCTLEAGESHKDWQSVETILRSARDAGLGRDGTFIGVGGGVISDLSAFAASIYMRGCSVALVSTTLLGMVDASLGGKTGFDLFGVKNFAGTFFPARHVYMPMESLASLPLPEWKSGMAELIKTAILDNDDFLGELASLAAAFPDGSFSGGFPPDFASRVIATDTALSRCISRAARFKGGIVEEDPLETGTRRVLLNLGHTFGHALESTAGLGTISHGEAVAWGIARSCELGLALGICPPYRAKRIMSLLTAFDYETAAPHPLAAGAELIQALGSDKKKRRGKLVFIVPDEKSARPVTADAPEFMNTVSRIIEGAVSSL

SEQ ID NO: 34989 - DNA, 480 bp, Unknown
  Obtained from environmental sample
  misc_feature (1)..(480): n is a, c, g, or t
atggaaataactctgtacttttcgggcgcaggctgcagtcttccggcgcaagcgaaagtttttaagccgtcggacggactggaggcgattattccctttgtgtacgacattgtcagcggattgggaattaacgcctgccctcccctgcttgtgggagtcggtcttgggcataacatcgaaaacgcatcaacgctttccaagaaggcgattttaagaccgttggggacaaaacacccacaccccaaaggagcggaacttgaaaaacagctaacagacggtcttaacagtcttggcatgggcgctcaaggattaagagggaatcaggctgtaatgggagtgcatattgaatcgtcggctagacacacggcgacaagggcgtgcgctgtaaatgtttcgtgttacacactaaggcgcggaaagctccgcattaaagaaaatctttcctgcgaactgacaggttttaagggagcgaaaatttga

SEQ ID NO: 34990 - protein, 159 aa, Unknown
  Obtained from environmental sample
  SIGNAL (1)...(18)
  DOMAIN (1)...(143): Fumarate hydratase (Fumerase)
  misc_feature (1)..(159): Xaa is any amino acid
MEITLYFSGAGCSLPAQAKVFKPSDGLEAIIPFVYDIVSGLGINACPPLLVGVGLGHNIENASTLSKKAILRPLGTKHPHPKGAELEKQLTDGLNSLGMGAQGLRGNQAVMGVHIESSARHTATRACAVNVSCYTLRRGKLRIKENLSCELTGFKGAKI

SEQ ID NO: 34991 - DNA, 567 bp, Unknown
  Obtained from environmental sample
  misc_feature (1)..(567): n is a, c, g, or t
ttgaacacgattaatttgcctttgactgccgatgacattctcaagtttcatatcggcgatgtaatttatctttcgggaacaatcgtaacgggaagggacgaggtttatcacagggtggtagaagaaaatattatgccgcctgttgccttaaacggtatggcgatttatcacgccggacctatcgtaaaaaaaactgggaaaagtcacgagcttatttcgataggaccaactacatctatgcgtatggaaaaatgggcggcggattttattaaaaaaacaggcgtaaaagtgatgatcggcaagggcggtatgggagagaaaacggcgtccgcctgccgccagttatgcgcaattcactgtgtttatcctggcggctgcgctgtgttaggcgcaagtcagatagagagcatcgaaaattgccactgggaagaatttggtatggctgaatgtctttgggtgatgaagactgcggcgttgggtccgctgattgtcagtattgatgcgcatggggggaatctttttgcggagaatgctttggtttatgccggaagaaaatggagagattaa

SEQ ID NO: 34992 - protein, 188 aa, Unknown
  Obtained from environmental sample
  DOMAIN (1)...(180): Fumarase C-terminus
  misc_feature (1)..(188): Xaa is any amino acid
MNTINLPLTADDILKFHIGDVIYLSGTIVTGRDEVYHRVVEENIMPPVALNGMAIYHAGPIVKKTGKSHELISIGPTTSMRMEKWAADFIKKTGVKVMIGKGGMGEKTASACRQLCAIHCVYPGGCAVLGASQIESIENCHWEEFGMAECLWVMKTAALGPLIVSIDAHGGNLFAENALVYAGRKWRD

SEQ ID NO: 34993 - DNA, 1209 bp, Unknown
  Obtained from environmental sample
  misc_feature (1)..(1209): n is a, c, g, or t
atgaacgaagaatctcaattatggtataaaaaacccgcaaaagaatggaccgatgctttgccaataggaaatggcagactcggggctatggtgttcggcggggttcagcatgagcgcgtacagttaaacgaggattccctgtggtcaggcggtttcagagaccgcaataatccggaagccggggcaaatctgcaacaaatacgttctttgctcaaagcgggtaaaatacctcaggctgaagagcttgcgcgtttttctcttacaggattgcctgaatttcagcgctcttatcagacattgggcgatctgtttattaattttcatggcatggacggtaaatatgaggaatatatcagattacttaatttggaaaatgcggtatcggttgtaagttataaaatcggcggatacagctatgagcgggaaatttttgcctccgctcccgctgatgttattgttatgcggctgtctacaacaaaccctgcgggtatttcctttgacgcaagactcgtacgtaaccgtttatgtgatcattgtggaaaaattgacgtggaaacggtattttttgacggcgtttctggcggcgacggaatttctttttactgcatgatgaccggcgcggtgaaaaacggtgaaatgaatgcaatgggcgaatatcttgtgttcaagggcgcaagtgaagcgtttctctacataaacgctttaacaagtttcagaagctcaaacccgtccgcagattgcctttcggttctaaaggctgcgaagaaaagcgggtatgagtatattctaaaagagcatataactgactatcaaaaaattgaacgccgcgtgtctctgaaactaacaaaagataatgaagtatccagacttcctgtcaatgaacggctggatctttttcaaaatgatttttcggatataaagctgatagagctgtattttagatacggacgttatctcctgatttcttgcagccggcccgggactcttcccgccaatctgcagggtatatggtgtaacgaatttctgccgccctgggacagcaaatacacgataaacataaacactcaaatgaaatactgggctgctgaaatctgtaatctatcggagtgtcatctgccgctgtttgatcaccatcaacggatgtacgaaaatggccggcataccgcccaaaccatgtatggcgccgaggggaattgtccccaaccataa

SEQ ID NO: 34994 - protein, 402 aa, Unknown
  Obtained from environmental sample
  misc_feature (1)..(402): Xaa is any amino acid
MNEESQLWYKKPAKEWTDALPIGNGRLGAMVFGGVQHERVQLNEDSLWSGGFRDRNNPEAGANLQQIRSLLKAGKIPQAEELARFSLTGLPEFQRSYQTLGDLFINFHGMDGKYEEYIRLLNLENAVSVVSYKIGGYSYEREIFASAPADVIVMRLSTTNPAGISFDARLVRNRLCDHCGKIDVETVFFDGVSGGDGISFYCMMTGAVKNGEMNAMGEYLVFKGASEAFLYINALTSFRSSNPSADCLSVLKAAKKSGYEYILKEHITDYQKIERRVSLKLTKDNEVSRLPVNERLDLFQNDFSDIKLIELYFRYGRYLLISCSRPGTLPANLQGIWCNEFLPPWDSKYTININTQMKYWAAEICNLSECHLPLFDHHQRMYENGRHTAQTMYGAEGNCPQP

SEQ ID NO: 34995 - DNA, 795 bp, Unknown
  Obtained from environmental sample
  misc_feature (1)..(795): n is a, c, g, or t
ttgccggaaataggcgtcgaggggcaaaaaaaattaaaggctgcgaaagttctcatcgtaggcaccggaggactgggcgcgccgctcgccctctaccttgccgcggcgggcgtggggacaatagggcttgtggattttgacgttgtggacgaatcaaatctccagcggcagataattcacagcacccgcgacgtgggaaggcccaaagtggcttcggcaaaagacagaatcaaggggataaacccgcttatcaacgtagtgacgcataacgccatgcttacaagcaaaaacgcgctggaactttttgccgattacgacatcatcgcggacggaaccgacaacttccaaacgcgctaccttgtcaacgacgcctgcgtatttttagggaaactgaacgtatacggctccgtgttccagttcgacggacaggcgactgtcttcggcgcgaaggacggcccctgctaccgctgcctctacccgtccccgccgcctccgggacttgtcccctcctgcgcggaaggcggagtcatgggcgtacttcccggcattatcggaaccattcaggcggcggagacgattaagctcatcacaggcggcgcgaaaccgcttgtcggccgtcttcttttgtttgacgcgtggcgcatggcgttccgcgaattaaaacttgacaaaaatcccgactgtcccgtttgcgggaagaacccttccattcacgaacttatagactacgaacaattctgcggtttgaaaaaagaatcaagaaagcaaacctatagataccataaccgccattga

SEQ ID NO: 34996 - protein, 264 aa, Unknown
  Obtained from environmental sample
  DOMAIN (150)...(235): MoeZ/MoeB domain
  misc_feature (1)..(264): Xaa is any amino acid
MPEIGVEGQKKLKAAKVLIVGTGGLGAPLALYLAAAGVGTIGLVDFDVVDESNLQRQIIHSTRDVGRPKVASAKDRIKGINPLINVVTHNAMLTSKNALELFADYDIIADGTDNFQTRYLVNDACVFLGKLNVYGSVFQFDGQATVFGAKDGPCYRCLYPSPPPPGLVPSCAEGGVMGVLPGIIGTIQAAETIKLITGGAKPLVGRLLLFDAWRMAFRELKLDKNPDCPVCGKNPSIHELIDYEQFCGLKKESRKQTYRYHNRH

SEQ ID NO: 34997 - DNA, 1425 bp, Unknown
  Obtained from environmental sample
  misc_feature (1)..(1425): n is a, c, g, or t
ttggtcaattttaaaacaaatataagctctctcggagacagtttgcttgccctctctcaatcacagcttgatattgattacattgtgctcagcgcatccgacgcaaagctacctaaggtaaatgagaatttctttgttgcggcttcgcatgagatacgctctttctttgcgtccttctttgtcgattacaataacctcggcgatttccaccgtaagagcgccgatgttgtaaatgtttggattcttgccggacgggatcaaagtacaatcttaaaagcgatgatagacgattcttttactccggtaaccggaataaaagtaaacgtaaaacttgtagccgcagatgcggttatgcctgcggttgttgcgggtacggggccggatatggctcttaccgttccgcagggcgatcctgttaactacgctattcgtaaagcggttgtagatgtttcaaaatttcccgattatgaagaagcgataaaggacataggcgctagcgcgattattccttttaccttcaatggcggagtatggggtttgccggaaacacagtacttccatgtaatgttttacagaaaagatatttttgaagaactgagtctcccaattcccgacacatgggaagagttaattaatattctgcctgttattcaaaaaagcaatatgaacgtaggtattccttctgttgcgactaacgttcagttaaatatcgacttttcaaacttcctggcgcacctgttccagcgcggcggccgtatgtacaacgaagacagttcaagaacgcttctggacagcgagattgccatagaagcgtttgatgtctacacaaaatttttcacgcattataaaactcccgtagtttacgattttgttaaccgctttcgcacaggcgaaatgccgcttgcgtttgcggactatacaaactttaacacgctggaagtctttgcgccggaacttcgcggactttggggcttttccagaatgcccggtttgcgcagagcggatggagtagtagatcgctctgtttcaacgggaactcttgccgccatgattttttccaaagcgaaaaacaaagacgccgcatggcggtttatgaaatggtggatcagcgaggatactcagcttagatacggacgcgagcttgaaagcatcatgggagccgccgcgcgttatccgacggcgaattacgccgctttcaaacggctttcttggggctcggagcaaatggcggttcttgatgaacagcgcaaatggacggtcggagtgccggaagtgcccggcggatactttataagccgccatattacaaatgcggcgcgtaaaattttaaatgagggacaggatacgcgggagactctgctggactataccctcacgatcaatgatgagttgattaaaaagcgcaaagaattcggtttggaatag

SEQ ID NO: 34998 - protein, 474 aa, Unknown
  Obtained from environmental sample
  DOMAIN (71)...(375): Bacterial extracellular solute-binding protein
  misc_feature (1)..(474): Xaa is any amino acid
MVNFKTNISSLGDSLLALSQSQLDIDYIVLSASDAKLPKVNENFFVAASHEIRSFFASFFVDYNNLGDFHRKSADVVNVWILAGRDQSTILKAMIDDSFTPVTGIKVNVKLVAADAVMPAVVAGTGPDMALTVPQGDPVNYAIRKAVVDVSKFPDYEEAIKDIGASAIIPFTFNGGVWGLPETQYFHVMFYRKDIFEELSLPIPDTWEELINILPVIQKSNMNVGIPSVATNVQLNIDFSNFLAHLFQRGGRMYNEDSSRTLLDSEIAIEAFDVYTKFFTHYKTPVVYDFVNRFRTGEMPLAFADYTNFNTLEVFAPELRGLWGFSRMPGLRRADGVVDRSVSTGTLAAMIFSKAKNKDAAWRFMKWWISEDTQLRYGRELESIMGAAARYPTANYAAFKRLSWGSEQMAVLDEQRKWTVGVPEVPGGYFISRHITNAARKILNEGQDTRETLLDYTLTINDELIKKRKEFGLE

SEQ ID NO: 34999 - DNA, 357 bp, Unknown
  Obtained from environmental sample
  misc_feature (1)..(357): n is a, c, g, or t
atgtatagcatagattatgtacggcgtgcggtagactacaaagacaaagggcataccttcagggaattgaaggatgcgtttaatattccggcagaaacgtattaccaatggaaggaaaagctcgaaaacggatacgatgggacgaaagtcttcagggaacggtcgcgaaagatagacaaagagaagctgaaaaaagccgtagcggaaaaaccggatatgtacctttatgaactggcgcagctgtttgactgtacaccacaagcggttttcctcatgcttgaaaggctaaatataacacgaaaaaaaagtcctttacttattatgaaaagtccgaagagaagtgcgcagaatttataa

SEQ ID NO: 35000 - protein, 118 aa, Unknown
  Obtained from environmental sample
  DOMAIN (1)...(114): Transposase
  misc_feature (1)..(118): Xaa is any amino acid
MYSIDYVRRAVDYKDKGHTFRELKDAFNIPAETYYQWKEKLENGYDGTKVFRERSRKIDKEKLKKAVAEKPDMYLYELAQLFDCTPQAVFLMLERLNITRKKSPLLIMKSPKRSAQNL

SEQ ID NO: 35001 - DNA, 399 bp, Unknown
  Obtained from environmental sample
  misc_feature (1)..(399): n is a, c, g, or t
gtgcgggggcagaaagtagaagacatcaaaatgggaagccattttgagcgggtaaacgttatcggcgctctttgcagcaaagagcatatagccgttgaatgctataaacattcgacagacagcgctttttttgaagattggtttgaaaattattttataaaagaaattcccaaaggatgcacggcaataatggacaatgcaaggttccactcaaaggagcggctgcgcaagctagcgagaggaaaggtgagattattgttcctgccgccgtattcaccagactacaaccctatagaaaaatcatgggcaaatatgaaacgctatctccgcgataatatgcataattataaatttgctgattctgcaatttatgactattttggctattcagttatttaa

SEQ ID NO: 35002 - protein, 132 aa, Unknown
  Obtained from environmental sample
  misc_feature (1)..(132): Xaa is any amino acid
MRGQKVEDIKMGSHFERVNVIGALCSKEHIAVECYKHSTDSAFFEDWFENYFIKEIPKGCTAIMDNARFHSKERLRKLARGKVRLLFLPPYSPDYNPIEKSWANMKRYLRDNMHNYKFADSAIYDYFGYSVI

SEQ ID NO: 35003 - DNA, 831 bp, Unknown
  Obtained from environmental sample
  misc_feature (1)..(831): n is a, c, g, or t
ttggacgatccgcgaatgcctacgatagccggtcttcgcagacggggttacactcctgaggcgattcgcagttttgtttcacaaattggcatcgcaaagacggatagcatggtagacatagcgtttcttgaatactgtcttcgcgaagacctgaacaaacgtgctttgcgcgtaatggcggttttacgcccactcaaattaattatcgaaaactgggaagaaggcaaaagcgaagaaatggaagcggtaaacaatcccgaagatgaatccgccggaaagcgccttgtgccattttcccgcgaactgtggattgaacgcgaagattttgaagaaactccaccgcccaaatattttcggctcttcccgggcaactccgtccgtctgcgttatgcgtacattgtcacatgcaccggttttgacaaagacgcaaacggtaatataacagccgtgcgctgtacttacgatccgcagacaaggggcggtaacgcgcctgacaacaaaaagattaaatctacgattcattgggtatccgcttctcatgccgcgccaatacaggcgcgtatttacgattatctgttcagcgtggaaaagccaatggaagtttcccaacgccccgatggctctcccggcgattttaccgacaaccttaatcccaattcattggaagtaattgaaaacgcgtggggcgaaccatcgcttgcaaatgtttcgccgggcaaagttttccaatttgaacgccttggctattttgtccgcgatccggacacaggcgcggacggacgagcggtttacaataaaccatcggtctcgtgccgctcgtgccgattctga

SEQ ID NO: 35004 - protein, 276 aa, Unknown
  Obtained from environmental sample
  DOMAIN (55)...(253): tRNA synthetases class I (E and Q), anti-codon binding domain
  misc_feature (1)..(276): Xaa is any amino acid
MDDPRMPTIAGLRRRGYTPEAIRSFVSQIGIAKTDSMVDIAFLEYCLREDLNKRALRVMAVLRPLKLIIENWEEGKSEEMEAVNNPEDESAGKRLVPFSRELWIEREDFEETPPPKYFRLFPGNSVRLRYAYIVTCTGFDKDANGNITAVRCTYDPQTRGGNAPDNKKIKSTIHWVSASHAAPIQARIYDYLFSVEKPMEVSQRPDGSPGDFTDNLNPNSLEVIENAWGEPSLANVSPGKVFQFERLGYFVRDPDTGADGRAVYNKPSVSCRSCRF

SEQ ID NO: 35005 - DNA, 1563 bp, Unknown
  Obtained from environmental sample
  misc_feature (1)..(1563): n is a, c, g, or t
ttgcgtaaagcgaccgaggcgagcaaggcgaagggcgagtttctctccaacatgagccacgaaatgcgcacgccgctaaacgcgataaccggcatgaccgccataggcaaaaaggcgaaagaacctgaacgcaaagactacgccttcagcaaaatacaagacgcctccacgcacctcctcggcgtaataaacgacgtgctggatatgtcgaagatcgaggcgaatatgcttgagctctcccccatagaattcaacttcgaaaagatgctgcaaaaaatcgtagccgtactcaacttccgcatagacgaaagagggcagaagttcacagtccgcatagacggcgccatccccaaaacgctgatagccgacgatcaacggctcgcccaagtcgttacaaacctgatcagcaacgcgataaaatttaccccggaaaacggcgttatcgctctcgaagcgtctttcatcggcgagaaagacggcgtctgcaccattcaaatttccgttagcgacaccggtatcggaataagcgaagagcagcaaagacacctcttcaactccttccagcaagccgagagcagcacgacgcgcaagtacggcggcacgggacttgggttggccatcagcaaaagcatagtagagatgatgaacggcaagatatggatagaatcggaaataggaaaaggctccactttcacatttaccgtggaagcgcaacgcggtactacaaaagagagactcggtctgctctccccagaagtaaactggagcaacatccgcataatggcggtagacgacgatcccgacacgctgacctacttccgcgacataacgacgggattgggcgtacaatgcgacaccgccataagcggggaagatgcgctgcgactcgtaaacaaaaacggcgactaccacatctacttcgtagactggaagatgccggatatggacggcatacaattagtacgcgaactcaaagcgcgcgcctcggaaccgtccgtagtaatcatgaactcagccgccgactggagcgccatcgaagacgaggccaaaagcatcggcgtagacaaatttctcacaaaaccgctcttcccgtccacagtggctgatattataaacgagtgcataggcgtaggcgaaccgcagacggaggaagagcaagccgacatcaccggcatcttcgccggacgccgcatactgcttgtggaagacgtggaaatcaaccgcgaaatcctaatcgccctgctggaaccgacgcaactccaaatagactgcgccgaaaacggcgtgcaagccgtgcaaatgttcagcgacgcccccgacaagtataacctgattttcatggatatccaaatgcccgaaatggacggctacgaggcgacaaggaaaatcagggcgcaaaataccccgacagccaaaaacatccccatcatcgcgatgacggcaaacgttttcaaagaagatatcgagagatgcacggaagccggcatgaacagccacatcggaaaaccggtggacatcgccgacgtgctggtgaaactgagcacgttcttcaaagccaaatga

SEQ ID NO: 35006 - protein, 520 aa, Unknown
  Obtained from environmental sample
  DOMAIN (10)...(75): His Kinase A (phosphoacceptor) domain
  misc_feature (1)..(520): Xaa is any amino acid
MRKATEASKAKGEFLSNMSHEMRTPLNAITGMTAIGKKAKEPERKDYAFSKIQDASTHLLGVINDVLDMSKIEANMLELSPIEFNFEKMLQKIVAVLNFRIDERGQKFTVRIDGAIPKTLIADDQRLAQVVTNLISNAIKFTPENGVIALEASFIGEKDGVCTIQISVSDTGIGISEEQQRHLFNSFQQAESSTTRKYGGTGLGLAISKSIVEMMNGKIWIESEIGKGSTFTFTVEAQRGTTKERLGLLSPEVNWSNIRIMAVDDDPDTLTYFRDITTGLGVQCDTAISGEDALRLVNKNGDYHIYFVDWKMPDMDGIQLVRELKARASEPSVVIMNSAADWSAIEDEAKSIGVDKFLTKPLFPSTVADIINECIGVGEPQTEEEQADITGIFAGRRILLVEDVEINREILIALLEPTQLQIDCAENGVQAVQMFSDAPDKYNLIFMDIQMPEMDGYEATRKIRAQNTPTAKNIPIIAMTANVFKEDIERCTEAGMNSHIGKPVDIADVLVKLSTFFKAK

SEQ ID NO: 35007 - DNA, 864 bp, Unknown
  Obtained from environmental sample
  misc_feature (1)..(864): n is a, c, g, or t
atgaaactcaaacacaagttgccgcttatactctttatcgcgttcgtagccgtcatctctctgacgttcacggtgtcgctgaccaattccgccaaagcgtgcaaggagtcgcaggacgcggccgggaagtctatggccacggtcaggtcggaggaggtcgcgggttttctggagaagaaaataacggagcttagggcgctggaaagaaacatccaagcgatatcgcgcctaaacgacaaagacaaggcggaaattcttagcaaactgctctacgagatgtccgaccagccggtcgtttccgatgtctacgtcgcgtttgagagaggcgcgtatttcggcgcggacaagacggacagcggcaaagtttacaccatagacgcgttccttacggagtccggcaagagatcggtcagcttagaacccaccgacgatatagccgacgacgacgattggtataacgggcctaaagccactaaaaaacttcttttgaccgagccttacgattggacataccccaacgaaacgcgggcgcgtaaaatgttcacgctcagcgcccccatcatggccaacggaaagttcgtaggcgtcgcggggatcgacctgcaattggatttgctgcaaaaattcctatttgacaagatgatagacgggcaaaagggcgcatacgccacattggtatctaacgaaggtttgatagccgcgcacccgaatgaagatatgctgcttacggaagcaggcggagacttggcggacgccgacgagcgtcaggcgctgaaagccgccgttaaaacggcgaataccgccgcgtactcaaagagaaccgcaacaccggcgattctctctgtctctacgcccccgcgataa

SEQ ID NO: 35008 - protein, 287 aa, Unknown
  Obtained from environmental sample
  SIGNAL (1)...(24)
  DOMAIN (163)...(248): Cache domain
  misc_feature (1)..(287): Xaa is any amino acid
MKLKHKLPLILFIAFVAVISLTFTVSLTNSAKACKESQDAAGKSMATVRSEEVAGFLEKKITELRALERNIQAISRLNDKDKAEILSKLLYEMSDQPVVSDVYVAFERGAYFGADKTDSGKVYTIDAFLTESGKRSVSLEPTDDIADDDDWYNGPKATKKLLLTEPYDWTYPNETRARKMFTLSAPIMANGKFVGVAGIDLQLDLLQKFLFDKMIDGQKGAYATLVSNEGLIAAHPNEDMLLTEAGGDLADADERQALKAAVKTANTAAYSKRTATPAILSVSTPPR

SEQ ID NO: 35009 - DNA, 1218 bp, Unknown
  Obtained from environmental sample
  misc_feature (1)..(1218): n is a, c, g, or t
atgaaagatcatctgcgttttgcgattgcgtactggcacagtttctgcggagacggcggagacccgtttggtcccggcacgcatatcttcccttggaatacggaagcaaaagacgcaatggacgccgccgacagaaaaatggatgccgcttttgaattctttacaaaaataggcgcggaattttacgcgtttcatgacagagacatagctcccgaaggctcaagccccgccgagagcgaaaaaaatctgatgacgttagttgcaaaagcgaaaaagattcaaggcgaaaccggagttaaacttctttggggaaccgcaaatgttttcggcaacccccgctttatgaacggagccgctaccaatcccgaattcggcgttgtcgctcttgccgctacacaagtaaaagccgcaattgacgcaaccatcgagcttggcggcgcaggctacactttctggggcggacgcgaaggatacatgagtcttcttaacacagaccttaaaagagaaaaagaaaatcttgcccgcttccttacaatggcaagagattatgcgcgcaaacagggctttaaaggcgttttctatatcgaaccgaaaccgatggagccgacaaagcatcagtacgattttgatactgaaaccgtcatcggcttcctgcgccagtggggtcttgataaagatttccgcatgaatatcgaagccaaccacgctgaacttgccggtcacgaatttgctcacgagcttgagacagcggcggcagcggggcttttcggctcggtagacgccaatcgcggcgacgcccgcaacggctgggacacggatcagttccccatggattatggcgaaaccgcgaaagcaatgttcacgatcttaaaagccgggggctttaccacagggggcctaaattttgacgccaagatccgccgcaactcggtagatcccgacgatctcttcatcgcccacatcggcggcatggacgccttcgccgtcggccttatcgttgcccagaagatcatcgatgacggtaaaatcccggctttcattaaaaaacgttacgcctcgttcaactcaggagacggcgctaaattcgacaagggcgaaataacttttgaagatcttgccaaaattggtacagcagcgggctatggcaaaaccggtatcaccagtggcaaacaggaatacctggaaagcgttctgaatcaatacctattggggctttag

SEQ ID NO: 35010 - protein, 405 aa, Unknown
  Obtained from environmental sample
  DOMAIN (51)...(275): Xylose isomerase-like TIM barrel
  misc_feature (1)..(405): Xaa is any amino acid
MKDHLRFAIAYWHSFCGDGGDPFGPGTHIFPWNTEAKDAMDAADRKMDAAFEFFTKIGAEFYAFHDRDIAPEGSSPAESEKNLMTLVAKAKKIQGETGVKLLWGTANVFGNPRFMNGAATNPEFGVVALAATQVKAAIDATIELGGAGYTFWGGREGYMSLLNTDLKREKENLARFLTMARDYARKQGFKGVFYIEPKPMEPTKHQYDFDTETVIGFLRQWGLDKDFRMNIEANHAELAGHEFAHELETAAAAGLFGSVDANRGDARNGWDTDQFPMDYGETAKAMFTILKAGGFTTGGLNFDAKIRRNSVDPDDLFIAHIGGMDAFAVGLIVAQKIIDDGKIPAFIKKRYASFNSGDGAKFDKGEITFEDLAKIGTAAGYGKTGITSGKQEYLESVLNQYLLGL

SEQ ID NO: 35011 - DNA, 300 bp, Unknown
  Obtained from environmental sample
  misc_feature (1)..(300): n is a, c, g, or t
ttgatggcgagcctcttccttattatgttgtatgggccttatcgctttttcatcgccacagccggcggtatactggtagccaagttcatgaacctcttccttaaagaaaagatcaacccgctcattggttccgccggcgtatccgccgtgccaatggccgcccgcgtttccaacagagtcggtcttgaagaagaccctggcaactttatcctgatgcacgccatgggccccaatgtggccggcgttatcggaaccgccattgccgctggcgtcatgatcgctgtttacggcgcgcattaa

SEQ ID NO: 35012 - protein, 99 aa, Unknown
  Obtained from environmental sample
  DOMAIN (1)...(97): Na+-transporting methylmalonyl-CoA/oxaloacetate decarboxylase, beta subunit
  misc_feature (1)..(99): Xaa is any amino acid
MMASLFLIMLYGPYRFFIATAGGILVAKFMNLFLKEKINPLIGSAGVSAVPMAARVSNRVGLEEDPGNFILMHAMGPNVAGVIGTAIAAGVMIAVYGAH

SEQ ID NO: 35013 - DNA, 606 bp, Unknown
  Obtained from environmental sample
  misc_feature (1)..(606): n is a, c, g, or t
ttgactgaaatttatataccaaaaaatattaccgatattgaaagttctacatttgcttttaaccggcttgaagaggttgatattccctatggcgttacagctattaggagtgatgcatttaccgataacaatttgagcaaggttactattccggcaagcgttacttttattggaaatggcgcatttggaaataacaaattgacggagattgaacttgataaacttgataaacttgaatatctttcaggatttaacaacaacgaattaaccgaaattgacatccccaatacagttatgatcatcggcagcagcgcatttgcgtataacgagctggaagaaattattatttcaaatacagttactgaaattggaaacagagcgtttgcatacaataagttaagcgaaattaccatatctgacaaagtcaaaagtattgggattcaagcgtttataggtaacccgttgaccagtattaccataggagcggatgtaacgcttggcagttccgctttcggcaatggtttcgaaaatttttattatagtaacggcaggaaaaaaggaatttatatctttgccggcgaatggacttataacgctattccctga

SEQ ID NO: 35014 - protein, 201 aa, Unknown
  Obtained from environmental sample
  misc_feature (1)..(201): Xaa is any amino acid
MTEIYIPKNITDIESSTFAFNRLEEVDIPYGVTAIRSDAFTDNNLSKVTIPASVTFIGNGAFGNNKLTEIELDKLDKLEYLSGFNNNELTEIDIPNTVMIIGSSAFAYNELEEIIISNTVTEIGNRAFAYNKLSEITISDKVKSIGIQAFIGNPLTSITIGADVTLGSSAFGNGFENFYYSNGRKKGIYIFAGEWTYNAIP

SEQ ID NO: 35015 - DNA, 444 bp, Unknown
  Obtained from environmental sample
  misc_feature (1)..(444): n is a, c, g, or t
atgttaaagcggattatttcgcgtaacgcagatcaaattcctgtggttatcacttttaaggacaatcataaaattgaaagcggacatattttaacttttaaacaaaaactggatatatttgaaagcttgggcatacaaataacgattgtcattgattttaccaaagaagttaagcaaatgtcggggattgatttcttgaaaattttgttggaacgaggcaacgtcggctttttcgcggtcggcagcgattttaagtgcggtcatcagcaggacaccgacgctgaggcgattcaaaaatttttcgctgatcataacattcccgcggaaatagtgccgaaagttacggaaggctccgcgcctgtcagttcaagccgtatcagagccgcaatcagcgcaggagacattgatttagcgcagaagttgttggggcgaaaatacccgtaa

SEQ ID NO: 35016 - protein, 147 aa, Unknown
  Obtained from environmental sample
  DOMAIN (5)...(125): FAD synthetase
  misc_feature (1)..(147): Xaa is any amino acid
MLKRIISRNADQIPVVITFKDNHKIESGHILTFKQKLDIFESLGIQITIVIDFTKEVKQMSGIDFLKILLERGNVGFFAVGSDFKCGHQQDTDAEAIQKFFADHNIPAEIVPKVTEGSAPVSSSRIRAAISAGDIDLAQKLLGRKYP

SEQ ID NO: 35017 - DNA, 813 bp, Unknown
  Obtained from environmental sample
  misc_feature (1)..(813): n is a, c, g, or t
atggacaaattaatcatcaagggagcgcgcgagcataaccttaaaaacatcgatcttgaacttccgagggacaaacttatcgttatttccggtctctcgggttctggcaaaagctctctggcgtttgacacaattttcgccgaggggcaaaggcggtatgtggaaagcctttccgcctacgcaaggcagtttttggggcgcatggataagcccgatttggactacatcgaaggactttcaccggcgatttccatagagcaaaaaaccactcaccgcaacccacgctccactgtcggcacggtaacggaaatttacgattactaccgccttctctacgcgcgtatcggcgtgccccactgccctgtctgcggaaaggagatacgcgaacagcctgtggattccataatcgagacaattttgcaatttaaggaaggggcgaaattacaactgcttgcgcctgttatccgcgggaaaaagggagaacatcaaaaaatagtcgaggatgcccgcaaggcggggtttgccagagcaagaatagacggagttcccgtaaacttggatgaaagtatcaagctggataaacaaaaaaaacatacgatagaaattatcgttgaccgtcttgtaattggaaaggatatacgctctcggttagcggagtctgtggaaaccgccttgcaaacagcggacgggcttttactggcgcttgttaatgaggagggaaaaaatacggaacattttttctcgcagaaaaattcatgtcccgactgcgggcgtatctatccccgaattacagccgaggcttttttcatttaa

SEQ ID NO: 35018 - protein, 270 aa, Unknown
  Obtained from environmental sample
  misc_feature (1)..(270): Xaa is any amino acid
MDKLIIKGAREHNLKNIDLELPRDKLIVISGLSGSGKSSLAFDTIFAEGQRRYVESLSAYARQFLGRMDKPDLDYIEGLSPAISIEQKTTHRNPRSTVGTVTEIYDYYRLLYARIGVPHCPVCGKEIREQPVDSIIETILQFKEGAKLQLLAPVIRGKKGEHQKIVEDARKAGFARARIDGVPVNLDESIKLDKQKKHTIEIIVDRLVIGKDIRSRLAESVETALQTADGLLLALVNEEGKNTEHFFSQKNSCPDCGRIYPRITAEAFFI

SEQ ID NO: 35019 - DNA, 339 bp, Unknown
  Obtained from environmental sample
  misc_feature (1)..(339): n is a, c, g, or t
atgaccgtcccgacccaattcacatcgcgaataatagccaacgaccgtataggcgaaggtttctacgaactgtcgctggcgtgggaccggcacgttcccaggcctgtgccgggtcaattcctgaccgtacgcgtgggcggcggcgccgtcccgttgttgcggcggcctttcgcctttgccgattttgacgaggcctcctccatagtcacggtaatctacctgaagcgcggcctcgggacgaagcgtttgtcgttggcgcggcccggcggcgagggaatcgacgttatcgggccgcttggaacgccctttgccgttgatatcggtcacaaaaacacgtga

SEQ ID NO: 35020 - protein, 112 aa, Unknown
  Obtained from environmental sample
  misc_feature (1)..(112): Xaa is any amino acid
MTVPTQFTSRIIANDRIGEGFYELSLAWDRHVPRPVPGQFLTVRVGGGAVPLLRRPFAFADFDEASSIVTVIYLKRGLGTKRLSLARPGGEGIDVIGPLGTPFAVDIGHKNT

SEQ ID NO: 35021 - DNA, 480 bp, Unknown
  Obtained from environmental sample
  misc_feature (1)..(480): n is a, c, g, or t
ttgatggccggaatctcctcccttgccgtagacacagccaaggggacgccgctcgttatactcaaggaccacgatgggcgcgtcatcgccgttccgcttgaccactccgacgccaacgccatcgccatgcacaccctgcaggtgcgaaccgacaaaccgctcaccgttgacttggtgcggattgccgtcgagcagttgggcgcggtcgtccatagggtggtggtaagcgatgtgtcggaggagggggtcttctctgcttgcatagtcataaaggccgacggcgggacgtcgataaaggtgattgactgccgtccatgcgacgcgattgcgttggccgcccgcagcggcgccccgatcttcgccagagagcacgtattctccaaacagccggacagttcggggctgacggaagaagagaggctcagggcgtacgttaggtcgatagatacggttgagtttgggaagtatgcgctgggctaa

SEQ ID NO: 35022 - protein, 159 aa, Unknown
  Obtained from environmental sample
  DOMAIN (2)...(139): Uncharacterised ACR, COG1259
  misc_feature (1)..(159): Xaa is any amino acid
MMAGISSLAVDTAKGTPLVILKDHDGRVIAVPLDHSDANAIAMHTLQVRTDKPLTVDLVRIAVEQLGAVVHRVVVSDVSEEGVFSACIVIKADGGTSIKVIDCRPCDAIALAARSGAPIFAREHVFSKQPDSSGLTEEERLRAYVRSIDTVEFGKYALG

SEQ ID NO: 35023 - DNA, 1305 bp, Unknown
  Obtained from environmental sample
  misc_feature (1)..(1305): n is a, c, g, or t
atggcacgagttccccgtcgtcgtaccgtatacagtacgcctaccggcgcgccttccgaggagacgctttttaaaagctctcctttgggagcgggcggttttgatgtaaaccgtattcgcggcgatttccctattctgaatgagagagtcgcgggcggcaaacagcttatctggcttgacaacggcgcgacaacgcaaaaaccaaacgccgtaatagaccgtatctcgtatttttacagacacgaaaattcaaacgtccaccgtggcgcgcacgagcttgccgcccgttccacagacgcttacgaagcggcgcgggaaaccatcgccaaatttataggcgctccctcaaaagacaatattgtctttgtgcgcggaacaacggaaggcgttaaccttgtggctcaaagttatgttaaacccctgctgagtcccggcgatgaaataatactcactatccttgaacaccacgccaacattgtcccttggcagatgatagcgcaggaaacaggcgcggtaataaaagtcgctcccgttgacgatacgggacagatcattttgtccgaatacgcgcgcttgttttgcccgcgcacaaagttcgcttcagtaacgcacgtttcaaacgcattgggaacaattaccccggttcacgagatgattcagatagcgcacggtaacggagtgcgaattcttatcgacggggcgcagtctgtagcgcatacgccgcttaatgtcagcgagttggacgcggatttctttgtgttctccggacacaagatattcggtcctacgggcataggcgcggtgtacggaaaagcggacgctcttgaagaagccaaaccgtatcagggtggcggcaatatgataagggacgtaacttttgaacgcactgtatacaatcccgcaccatccaagtttgaagcgggaaccggcaatattgccgacgcggtagggcttggcgcggcgcttgattacgtttccggcattgggatagcgaacataagcgcgtatgaacatgaattgcttgattacgcgacccgcgagcttaaacgcataaacggtctgcgccttatcggcactgccgctgaaaaggcgagcgttctgtctttcgtgcttgataacgcgagcgttgaaacagtcggcaaacatcttgcaagccacgggatagcggttcgcgcgggacaccactgcgcacagccgattctgcgccgcttcggattggaagcgacagtgcgcccgaacgatgcgttttacaatacagccgaagaaaatgataaactgggtatcgcggntagagaactggtataa

SEQ ID NO: 35024 - protein, 434 aa, Unknown
  Obtained from environmental sample
  DOMAIN (92)...(377): Beta-eliminating lyase
  misc_feature (1)..(434): Xaa is any amino acid
MARVPRRRTVYSTPTGAPSEETLFKSSPLGAGGFDVNRIRGDFPILNERVAGGKQLIWLDNGATTQKPNAVIDRISYFYRHENSNVHRGAHELAARSTDAYEAARETIAKFIGAPSKDNIVFVRGTTEGVNLVAQSYVKPLLSPGDEIILTILEHHANIVPWQMIAQETGAVIKVAPVDDTGQIILSEYARLFCPRTKFASVTHVSNALGTITPVHEMIQIAHGNGVRILIDGAQSVAHTPLNVSELDADFFVFSGHKIFGPTGIGAVYGKADALEEAKPYQGGGNMIRDVTFERTVYNPAPSKFEAGTGNIADAVGLGAALDYVSGIGIANISAYEHELLDYATRELKRINGLRLIGTAAEKASVLSFVLDNASVETVGKHLASHGIAVRAGHHCAQPILRRFGLEATVRPNDAFYNTAEENDKLGIAXRELV

SEQ ID NO: 35025 - DNA, 693 bp, Unknown
  Obtained from environmental sample
  misc_feature (1)..(693): n is a, c, g, or t
atgggcgaggcggagatcgtgatagtcgggtatgtagacaaaggacctgtgctggtagaggagaactggaggggcgtgatgaccccgggcgggagtctgcaaattaacttggtcggcaaaaacaacagaaagggccggcgtacgactttctccacgtcgtcgcctgatataccggcgagccacaggaacaaggtggggggcggggtacacaacataaaaatttcgctgccgtatttggtaacgtcgccgtctagggtggatcgcttctcggcgcggttggacggttcagacggggtatttgagtcggtagtggtgaacaacatcaacttgcaagccgaaaaagcgctggacaacgatttcggcgcgatagtcgccagaacggcgataagagcgatcatccgcgcggtggccaccgacaaaatccaaaatacggacactgggaatctggggctgaatgtactgaaaaatgtcagtacaatggtcgccaacgaggtattggaacacgccgacacccgtatgtgcttcatgctcccgcaaaggataatagtaacccgcatcccagtacaacccggcacccacagcgtgaagttggacgttcgcgacaaaaacgggggggttatagggagtaagtcgtttgacaatattgaggttaagaggggagagaagaaagttttctttaataaatatttatag

SEQ ID NO: 35026 - protein, 230 aa, Unknown
  Obtained from environmental sample
  misc_feature (1)..(230): Xaa is any amino acid
MGEAEIVIVGYVDKGPVLVEENWRGVMTPGGSLQINLVGKNNRKGRRTTFSTSSPDIPASHRNKVGGGVHNIKISLPYLVTSPSRVDRFSARLDGSDGVFESVVVNNINLQAEKALDNDFGAIVARTAIRAIIRAVATDKIQNTDTGNLGLNVLKNVSTMVANEVLEHADTRMCFMLPQRIIVTRIPVQPGTHSVKLDVRDKNGGVIGSKSFDNIEVKRGEKKVFFNKYL

SEQ ID NO: 35027 - DNA, 585 bp, Unknown
  Obtained from environmental sample
  misc_feature (1)..(585): n is a, c, g, or t
ttgggagtaagtacgcgcgtaagcgcttatcatgacttcaacaaggagaaggtcacgcccggacttgtcgcctccttgaaagacggcaaggagattgcgttgataaccgacgccggaacgcccggtgtggcggatccggctttttacttggttagggcggcgattgccgagggtatagacgtggcgccggtgccgggggcgtcggcggttttggcggcgcttgtggccagcgggttgcctacggataggtttatctttgagaattttttgcctaacaaaggtacgcagagacggaagctttttgaattattgaaggatgagcctagaacgatgattttttatgagactccgcaccgcatcgttaaggcgttgaaggatataaaggaggtgttgggcgacgtgcgggttgttatcgcgagagagttgactaagatacatgaggagtttttacgcggtagcgcggaggatttgttggcgcatttcgccgttcatccgccgcgtggggagatggtcgttttatttaatgttagggtgcgagaaaccgtaggggctgaaaaacttcagcccctactaccacaacattaa

SEQ ID NO: 35028 - protein, 194 aa, Unknown
  Obtained from environmental sample
  DOMAIN (1)...(158): Tetrapyrrole (Corrin/Porphyrin) Methylases
  misc_feature (1)..(194): Xaa is any amino acid
MGVSTRVSAYHDFNKEKVTPGLVASLKDGKEIALITDAGTPGVADPAFYLVRAAIAEGIDVAPVPGASAVLAALVASGLPTDRFIFENFLPNKGTQRRKLFELLKDEPRTMIFYETPHRIVKALKDIKEVLGDVRVVIARELTKIHEEFLRGSAEDLLAHFAVHPPRGEMVVLFNVRVRETVGAEKLQPLLPQH

SEQ ID NO: 35029 - DNA, 342 bp, Unknown
  Obtained from environmental sample
  misc_feature (1)..(342): n is a, c, g, or t
atggcgcgggccttaaagggcatgaaaataaacccgaatatccgcatagaggaaaaagacgggatcagcttcgcagtttcatgccgacattgcaagacgccgttatgcgtcaagggatgtatcaccggcagcctgactatcacggacggcgtaattaccattaacaggtcaagatgcgtcagttgttatacctgcattcttagctgccctttcggcgcggtggcgccttcggatgatggcgccgtgcaaaaatgcgagctgtgcgttaatacgaccgaaggaacccccgcctgcgtaaaaggctgccccaacaacgcgatcgtttttgaggaaagagggtag

SEQ ID NO: 35030 - protein, 113 aa, Unknown
  Obtained from environmental sample
  DOMAIN (52)...(75): 4Fe-4S binding domain
  misc_feature (1)..(113): Xaa is any amino acid
MARALKGMKINPNIRIEEKDGISFAVSCRHCKTPLCVKGCITGSLTITDGVITINRSRCVSCYTCILSCPFGAVAPSDDGAVQKCELCVNTTEGTPACVKGCPNNAIVFEERG

SEQ ID NO: 35031 - DNA, 1245 bp, Unknown
  Obtained from environmental sample
  misc_feature (1)..(1245): n is a, c, g, or t
atgaaatatgttatcatcggcaattccgccgcgggcataggcgctgtagagggtattcgccatatagacaagaatggcgagatcaccattataaccaacgaatcgcatcatacctattcgcgcccgctgatttcctatctcctgcttggcaaggttacaagggaggggattaaataccgaaacgacagtttctacaaggattataactgcactctgcttgcagacacgacagtaacgggaattgactctgtggcgaagaatgtaattttacaggacggcggaaaaatcccctacgataagctgctggtcgccactggttcttctccctttgtgcctgtctttgaggggcttgataccgtagttaacaagcatacatttatgagccttgacgacgcggacaggctggacgcggcgctgggtgaggataagcgcgtattgattatcggcgcgggccttatcggcctgaaatgcgccgagggtattcacgagaaagtaaaacacatcacggtacttgaccttgccccgcggattttgtcgagcattctcgatgatgacggcgcgcggctggttcagaatcatctggaaagcaagggcgttgaattcaggctttccgccaatatcaaaagattcaaaaataattccgccgttttagagagtggtgaaacgatagatttcgatatccttgtccttgccgtgggcgtgcgtcccaataccgcgattctaaacgggatagcgaagattgatcgcggcgttattgtcaatgataaatcagaaaccgccgcgccgaatatttacgccgcgggcgactgtacgcaaacggttgacgtttcaagcgggcagagtaaaatcatggccctgttgcccaacgcctatatgcagggcgagtgcgcgggaatcaatatggcaggcggcgacgcacgcttcagcaaagcaatccccatgaacgccatcgggttcttcggcctgcatattatcacggcgggcaattacacgggagacgtttatgccgaaagcacaaacgccgaaaacagcaaagacaattataaacgcctgttttacagcgataacaggcttaacgggtatatccttatcggcaatgtggagaaagccgggatttacaccagccttatccgcgagcatacgccgcttgacgcgattgactttaccctcgtttgtgaaaaaccggggcttatggcgtttacaaaagaggacagggtagcaaaattaggaggaatggcatcatga

SEQ ID NO: 35032 - protein, 414 aa, Unknown
  Obtained from environmental sample
  DOMAIN (144)...(233): Pyridine nucleotide-disulphide oxidoreductase
  misc_feature (1)..(414): Xaa is any amino acid
MKYVIIGNSAAGIGAVEGIRHIDKNGEITIITNESHHTYSRPLISYLLLGKVTREGIKYRNDSFYKDYNCTLLADTTVTGIDSVAKNVILQDGGKIPYDKLLVATGSSPFVPVFEGLDTVVNKHTFMSLDDADRLDAALGEDKRVLIIGAGLIGLKCAEGIHEKVKHITVLDLAPRILSSILDDDGARLVQNHLESKGVEFRLSANIKRFKNNSAVLESGETIDFDILVLAVGVRPNTAILNGIAKIDRGVIVNDKSETAAPNIYAAGDCTQTVDVSSGQSKIMALLPNAYMQGECAGINMAGGDARFSKAIPMNAIGFFGLHIITAGNYTGDVYAESTNAENSKDNYKRLFYSDNRLNGYILIGNVEKAGIYTSLIREHTPLDAIDFTLVCEKPGLMAFTKEDRVAKLGGMAS

SEQ ID NO: 35033 - DNA, 936 bp, Unknown
  Obtained from environmental sample
  misc_feature (1)..(936): n is a, c, g, or t
gtgcttgaggacctaaaggccggcggctggtacataaaagaagaaaacataacccacgcggtggggcattgctaccgctgccatacgataatagagcccttcctttccgagcagtggtttgtaaggatgagacctcttgcggataaagcccttgcctcatggcggagaggggaacttatcttctacccgcgcaaatgggaacacacataccagcactggctggaaaacatacgggactggtgcataagccgccagctctggtgggggcacagaatccccgcgtgggactgcaaagactgcggcaaaacctcggtgtcgcgtaacgacctttcttcctgcccccactgcggttcctcaaacatcgagcaagaccccgacgtgcttgacacctggttttcaagctggctctggcctttcagcacattgggctgggaaggaacagggtccagggtccagggtctggggtctggggaggttccgaaccccgaaccccgaaccccgaacccttcttctgacttcgacctctattatccaactacagccttgataaccgcttatgacatcatctttttctgggtatcaaggatgatcatggcggggcttgaatttaccggcaaagcgccgttccgcgacatttacattcacggactggtacgggacaagcagggccgcaaaatgagcaagagcctgggcaacgggcttgacccgctggaactggtggacgagttcggcgcggacgcgctcaagtttacactggcttttatgtgcgcccaggggcaggacattctggttgataaagaatcatttaaaatgggttccaaatttgccaataagatatggaacgccagccgctatattttaatgaatctggaaagactaaatttagtaccaaatcctgactactccccgtggacaaatggatctactccaggctga

SEQ ID NO: 35034 - protein, 311 aa, Unknown
  Obtained from environmental sample
  DOMAIN (1)...(265): tRNA synthetases class I (I, L, M and V)
  misc_feature (1)..(311): Xaa is any amino acid
MLEDLKAGGWYIKEENITHAVGHCYRCHTIIEPFLSEQWFVRMRPLADKALASWRRGELIFYPRKWEHTYQHWLENIRDWCISRQLWWGHRIPAWDCKDCGKTSVSRNDLSSCPHCGSSNIEQDPDVLDTWFSSWLWPFSTLGWEGTGSRVQGLGSGEVPNPEPRTPNPSSDFDLYYPTTALITAYDIIFFWVSRMIMAGLEFTGKAPFRDIYIHGLVRDKQGRKMSKSLGNGLDPLELVDEFGADALKFTLAFMCAQGQDILVDKESFKMGSKFANKIWNASRYILMNLERLNLVPNPDYSPWTNGSTPG

SEQ ID NO: 35035 - DNA, 753 bp, Unknown
  Obtained from environmental sample
  misc_feature (1)..(753): n is a, c, g, or t
ttggaagatatgaaaaaatatattaccgacgtagtggggcattttaagggaaaaatatattcatgggacgtgcttaacgaggcttttcctgacggcggctacagcgcgggttctgactggaaaaaagtaatgcgttccaataatccatggtataatgcattaggatctgattttgtttatgcaggtttccttgccgctcgtttggcggatcctgacgcgatcctgtattacaacgactacaatacagatcaaactgccaaagcaacaatgatccgcgatatggtgcgcgatgttaaccaaaaatatttagcttccgccgataaacccgcgggagaacccgcaaacaggcttcttatcgaaggcatagggatgcaggaacatcacaatacaggcgtatcggctaacgcgataagaaacgcgttaaacctttttaagccattgggagtaaaaatttctgtcagcgagcttgatgttttaatagtaacttatcaggagtttgcgccttacggtcatggaaccggcaaagaaaattcaattacgggagataaaaagactaatgggttaaagagacaggctgaattatacggcgaatacttcaaagtatatctggatttcagcgacatcatagagcgtgtgtcgttctggggcgtcaccgacgataaaagctggcgatcagctgctctgccgctgttgtttaatccaggaggatacgctaaagaagcgtacttcagtgtatttggagaaaccaagtaa

SEQ ID NO: 35036 - protein, 250 aa, Unknown
  Obtained from environmental sample
  DOMAIN (1)...(249): Glycosyl hydrolase family 10
  misc_feature (1)..(250): Xaa is any amino acid
MEDMKKYITDVVGHFKGKIYSWDVLNEAFPDGGYSAGSDWKKVMRSNNPWYNALGSDFVYAGFLAARLADPDAILYYNDYNTDQTAKATMIRDMVRDVNQKYLASADKPAGEPANRLLIEGIGMQEHHNTGVSANAIRNALNLFKPLGVKISVSELDVLIVTYQEFAPYGHGTGKENSITGDKKTNGLKRQAELYGEYFKVYLDFSDIIERVSFWGVTDDKSWRSAALPLLFNPGGYAKEAYFSVFGETK

SEQ ID NO: 35037 - DNA, 738 bp, Unknown
  Obtained from environmental sample
  misc_feature (1)..(738): n is a, c, g, or t
atggtatttagtatgataatatgtgaaaatctttctaaaatattcggctcgaattcgggaattaaaaatattaatcttcaatttacgccgggaataatttacggcattatcggctataatggggcgggtaaaacaacattgtttaactgtattgaaggtctttatactccgacatcggggtctgtttctcataatgatattaaaacggtaaatgaggaagaatttctgccttatcgaaaaaatattgcttttttgccaaatgaagattatttgtatccgtatttaacttgtatggaaaacatagaattggcgacaatcttaaaaaccggaaagaatgagctgttgagtgaaactgatgaattaatccgttattttgaaatagacgagtatctgcataaaatattcaaggaatgctctgccggaatgaagaagaaagtgcagatgattatcagtttaatcggagatattaataccattatttgggacgagccgaataacgggcttgatattgtttcaaatataaagattaagaatttacttaaccattataaaagtaaaaatataactatacttttttcaagccatgttatcgaattccttgaaaattttgttgatcattgtatattaattcataaaggagaagttattgaaaataatgacgtgcaaaatatcggatcattggagaaattatttcttaagaatataccggagaatgagttgattttgaatataaaatga

SEQ ID NO: 35038 - protein, 245 aa, Unknown
  Obtained from environmental sample
  DOMAIN (31)...(213): ABC transporter
  misc_feature (1)..(245): Xaa is any amino acid
MVFSMIICENLSKIFGSNSGIKNINLQFTPGIIYGIIGYNGAGKTTLFNCIEGLYTPTSGSVSHNDIKTVNEEEFLPYRKNIAFLPNEDYLYPYLTCMENIELATILKTGKNELLSETDELIRYFEIDEYLHKIFKECSAGMKKKVQMIISLIGDINTIIWDEPNNGLDIVSNIKIKNLLNHYKSKNITILFSSHVIEFLENFVDHCILIHKGEVIENNDVQNIGSLEKLFLKNIPENELILNIK

SEQ ID NO: 35039 - DNA, 996 bp, Unknown
  Obtained from environmental sample
  misc_feature (1)..(996): n is a, c, g, or t
gtggggggcaatgatcgaagggcttctaccggcctttcggccgttatcctgaacaggggaggcaggtatccccgctacactttcttcgaggatctggaaaagcttggatttgactatgttctctctattgaaagctccgcggcccattacgatctggattccctttcgtcaagttttccttttgtccgctttattattccccagggtcatatcaaccggggagaagaaatcaaccttgccgcttccgaattgtcatgccccctgttttttgtcctctggaacgatctgaagtttctccgaagcggcaacgcggaacgcatggcggagcgcctccttaccgccgagccggaagaaaaaaatagctacaaaaggctttgcaccacgccgttgattcaggacgcgcgttctgaaaccatgcccacccttattgccccggctttagtcccggaaaagaaagccggaaaagtcataaaaacaatcctgttcattccgaggaaagaagggcaattaaccctgtacccgtttgacggcattggcatttacgacagggagcgctttatccgcctgaacggattcgatccttttattaaaaattttcactggcagttgatggattttggttttcgctccagcctttggggtgaagaaatcgccgcgacccagctggtaaagctttcgtatgaaaccattgtccccgaggaagacattactgcggacgaaggctactatagattcttcctgaaaaacatgtcgccggttttcaagggcgattacgcccacatccccttgcgacgctttccgggatacttaaaaagaaggggccacctttttatcgcgtgggatgaatttttttctgcccgcgcctgggtcaaaaccaaccgttttcgttttagctcggacgccggaatcatggctgagctattcgcttcgattgaggttgaccctggcgaagctgaaacaggagacactcttggtgagttaagggaggaaaagtga

SEQ ID NO: 35040 - protein, 331 aa, Unknown
  Obtained from environmental sample
  misc_feature (1)..(331): Xaa is any amino acid
MGGNDRRASTGLSAVILNRGGRYPRYTFFEDLEKLGFDYVLSIESSAAHYDLDSLSSSFPFVRFIIPQGHINRGEEINLAASELSCPLFFVLWNDLKFLRSGNAERMAERLLTAEPEEKNSYKRLCTTPLIQDARSETMPTLIAPALVPEKKAGKVIKTILFIPRKEGQLTLYPFDGIGIYDRERFIRLNGFDPFIKNFHWQLMDFGFRSSLWGEEIAATQLVKLSYETIVPEEDITADEGYYRFFLKNMSPVFKGDYAHIPLRRFPGYLKRRGHLFIAWDEFFSARAWVKTNRFRFSSDAGIMAELFASIEVDPGEAETGDTLGELREEK

SEQ ID NO: 35041 - DNA, 1251 bp, Unknown
  Obtained from environmental sample
  misc_feature (1)..(1251): n is a, c, g, or t
atggcggagcggcacctgcgctacagagccgaatattcctacgcggacggatggccctacggccttgcgccggaaatccttgggcccggaatcgccgggatcctcgcaaagctttcggaaaattgtgatggacctgtcgaaagggatgcgctgttcttcacaattcagaaggacataaacgcttttgatatagagacggaaatttccccgattgatctaaggccatacaggcttagccttacggctgactccaaaaggaacctcctcctccttacccgttttatgggggatctaaggcagcccggttcaaactatgctatctccgcttcggatatcgaaaaaataattctcgaaaaaccttttctgctccgcactcttccggcttttttcaatatacaggtattgggcgcttgcccccaggcttgttccatctgcccctggccctcccacggaggctctgtccctgtcactgagcggaaagatcttatgcccaaggatgccttcgcttcgcttctcgataaaatcgaggaattcgcgggggacgcggtaatagacctttcgctttggggggagctgtcgcttcatccggaacattttgagcttatcgaaatggttctggcgcgctccgccctgtcgcttgtgatagagacttccggcattggctggaaagaggacgagctaaaggccctcgcctcaatacaggctgttccgaggaaaaaccacatggctccgctatcgtggattgtttcgcttgacgcgtttgatcctgagcgctacaaggagctgcgggggcctggtttttcagaggcgcagagctgcgccaaaacgctgttttcgcttttcccgaatgacgcctacgtccaggcggtgcgcttaaagggcgctgaagacgacatcgagaaattttaccgcttttggaagggggagaactcaaagcaggtcataattcagaagtacgatgattttgccggagcccttcccaaaatgcaggccgctgatctttcgccggtgaagcgccgcccctgctggcatattcagcgggatatgaacatactcctggacggcagggtgccgggctgcagggagaaccttgcggctcttaaagaaggagatcaggttttgggaaacgctttttccgacgatctttcgctcatctgggaaaatggcgcggctttgtacaacgggcactgtaaagccgaatatccgggtatttgcgccctctgcgatgaatactatacctacaacttttaa

SEQ ID NO: 35042 - protein, 416 aa, Unknown
  Obtained from environmental sample
  DOMAIN (132)...(306): Radical SAM superfamily
  misc_feature (1)..(416): Xaa is any amino acid
MAERHLRYRAEYSYADGWPYGLAPEILGPGIAGILAKLSENCDGPVERDALFFTIQKDINAFDIETEISPIDLRPYRLSLTADSKRNLLLLTRFMGDLRQPGSNYAISASDIEKIILEKPFLLRTLPAFFNIQVLGACPQACSICPWPSHGGSVPVTERKDLMPKDAFASLLDKIEEFAGDAVIDLSLWGELSLHPEHFELIEMVLARSALSLVIETSGIGWKEDELKALASIQAVPRKNHMAPLSWIVSLDAFDPERYKELRGPGFSEAQSCAKTLFSLFPNDAYVQAVRLKGAEDDIEKFYRFWKGENSKQVIIQKYDDFAGALPKMQAADLSPVKRRPCWHIQRDMNILLDGRVPGCRENLAALKEGDQVLGNAFSDDLSLIWENGAALYNGHCKAEYPGICALCDEYYTYNF

SEQ ID NO: 35043 - DNA, 627 bp, Unknown
  Obtained from environmental sample
  misc_feature (1)..(627): n is a, c, g, or t
gtgttctgcgaatgcggcgcgaccacgcatctctccggcttacgcaaaatttttattcctaccgccagagttttgcatgaattaaaagaattttacgcggcgcaggccgcgccggatgtgctgactttttccggcggcggcgagccgacactggccgccaatctgggcgaggttatgcaggaaatcaaaaagacctatccgcaaaaattatgcctgctgactaattccactttactgtccgaacccaaagtgcggcaggaaatactgccggccgatgttatcattccctcgctcaacgccgtgtcgccggaaatatttgccagaataaaccggccgctgttcggcatcaccccggccaaaataatgcacggcctgctggaattaaaaaaagtttataaaggtcagttattgctggaaatatttatcgtgccgggtctcaacgacacggaacaggaactgaccctgctgagagatttcgccgaaaaattacagccggacggcttgcagttaaactcgctggaccggccgggagcggaaagctgggtagagccggtgccgccggaaaaaatgcaaaagattaaagagtttttccaagagtttaataccagttattatttagcccgataa

SEQ ID NO: 35044 - protein, 208 aa, Unknown
  Obtained from environmental sample
  misc_feature (1)..(208): Xaa is any amino acid
MFCECGATTHLSGLRKIFIPTARVLHELKEFYAAQAAPDVLTFSGGGEPTLAANLGEVMQEIKKTYPQKLCLLTNSTLLSEPKVRQEILPADVIIPSLNAVSPEIFARINRPLFGITPAKIMHGLLELKKVYKGQLLLEIFIVPGLNDTEQELTLLRDFAEKLQPDGLQLNSLDRPGAESWVEPVPPEKMQKIKEFFQEFNTSYYLAR

SEQ ID NO: 35045 - DNA, 633 bp, Unknown
  Obtained from environmental sample
  misc_feature (1)..(633): n is a, c, g, or t
ttgatcgcnggccgcagacaggaaaccataagaaaactgatggacaatttgttagcatacatcaatgagccgaatttgcataaagttgatccgttgataaaaatggccattatccattttcaatttgagagtatccacccattttatgacgggaacgggcggacagggcgcattataaatatgctttatcttgtgctggaaaatctactgcccataccaatactttatttaagccgttacataataggacataaagcggattactatcgtctgttgcagcaggtcagaaaaaaacagaactggacagaatggataatctatatgctggatgccgtagagaagacagccaaagagactacactgctaatagaaaaaatcagacttcagatgctggattacaaacatagaatcagaaaagatttttctaagatatatagtcaagacctaattaataatttatttcgtcatccgtataccaaaatagaatttttgatgcgggatttgaacctcagcaggattaccgcggccaaatatttagatattctggccggagcaggatttttggttaaacacaaaatcaaaaatacgaatttttatgttaataaaccgttatttgatttattaagcaaatag

SEQ ID NO: 35046 - protein, 210 aa, Unknown
  Obtained from environmental sample
  DOMAIN (5)...(98): Fic protein family
  misc_feature (1)..(210): Xaa is any amino acid
MIAGRRQETIRKLMDNLLAYINEPNLHKVDPLIKMAIIHFQFESIHPFYDGNGRTGRIINMLYLVLENLLPIPILYLSRYIIGHKADYYRLLQQVRKKQNWTEWIIYMLDAVEKTAKETTLLIEKIRLQMLDYKHRIRKDFSKIYSQDLINNLFRHPYTKIEFLMRDLNLSRITAAKYLDILAGAGFLVKHKIKNTNFYVNKPLFDLLSK

SEQ ID NO: 35047 - DNA, 1038 bp, Unknown
  Obtained from environmental sample
  misc_feature (1)..(1038): n is a, c, g, or t
ttgtcgtatngggttcagtcttgtttactggtagaggaaaaagcagccattaaagaagtcaaaaataggctcaatgttataaaagcaaatggtggttcagagcgatttacacagccgccattagcaggcgagacagtaatagcgacttatgatttaacttataactattatagtagtggcaaaatggataacttcaatgccggtttgtatggaggagcattaggtagtcagcaacaaaattaccatagtttaccatatttttctccaaatgaagccgcatatagtttattgttaagagccaaatatgattttcaagacattgacatcaatgatattgatgtccgttctatcgtgcagactggtacaacatatagtacgtccgtacaaaaaccaacttatcaaaaaaaagatgatcttaatagctatattgcaacgactactgttcatttcaaaggtactattgtcagtctgtcagggaaaacgtacagcaaagtcgaacataaattacaacaaaccatccaactggaacaaaaatctactgtcgaatacaaaattggcgacaaaggaccggcaggaggaatagtattttacgacgcaaaaagttatgacactggctttcgttatcttgaagccgctcctgccgagactgaatttaaagccaaatggggagcgtataaaaagaatataaaagatacgaattggattaatttcataggacttggcaataagaataccagattaattgtagagcagctaaatgctttaggggaaagcggaagagcagcacaactttgcgcaaaccttaattttggcggctacaatgactggtttttaccgagtcaaaatgaattgatgtcaatgtacaataatctaaaactaaaaggattaggcggatttgctgacgatttttacttgtcttcgtcgcaatacaaaaacagtaaagataaggtgtggggtttgaatttcaccaaagcaaatttcgaaaccagcctaagaaaggacatcgaatataacgtccgtgctattagggctttttaa

SEQ ID NO: 35048 - protein, 345 aa, Unknown
  Obtained from environmental sample
  misc_feature (1)..(345): Xaa is any amino acid
MSYXVQSCLLVEEKAAIKEVKNRLNVIKANGGSERFTQPPLAGETVIATYDLTYNYYSSGKMDNFNAGLYGGALGSQQQNYHSLPYFSPNEAAYSLLLRAKYDFQDIDINDIDVRSIVQTGTTYSTSVQKPTYQKKDDLNSYIATTTVHFKGTIVSLSGKTYSKVEHKLQQTIQLEQKSTVEYKIGDKGPAGGIVFYDAKSYDTGFRYLEAAPAETEFKAKWGAYKKNIKDTNWINFIGLGNKNTRLIVEQLNALGESGRAAQLCANLNFGGYNDWFLPSQNELMSMYNNLKLKGLGGFADDFYLSSSQYKNSKDKVWGLNFTKANFETSLRKDIEYNVRAIRAF

SEQ ID NO: 35049 - DNA, 1026 bp, Unknown
  Obtained from environmental sample
  misc_feature (1)..(1026): n is a, c, g, or t
ttggacgaactggaacttgcaggaacagttaccacaaattcgtttacccataacgcattaccattaaatattgatgatatatattattactacgtcatcgccgttaattcttacggagagagcgactattcaacattcaagtccgttgtaattgataagcctgtagctccggaaagcgtggttgcttcagcgacaggatcatcaacaatagacgtgagatggtcttcggttccgggcgctaccagttatcaggtttattacaatacggtaggtgaatccggcgagaaaaaatcttgggcaaataacacctatacaggaacttcaactggggtgcagggttgcagtcctaatacaacatattatttcttcgttaaagccgtgaatggttttggagagagtgattattcctcggcagggtctacgaaaactcttgccggaggagcaagcaatgctccaacaggcgtaaaagcagagttggtaagctcagatatgataaggataagctggaactctatttccaatgcgtccttctacaatgtctattacacaaccggttctccgaataatactaaatacactttagaatcattttcaagcataaattacagccttcataccccagtacagtcaaatacaacatattattactgggttacagctattcgcggttttaacactgagtcaggtctatcagaaatggtgtctgtaagtacaggttacattcctccgcctacgccattaccgcccacaacagtgacggttccgcctgcggcatcaacgccgccatccggcggaggaaaagatcaaaaaatttgtcctctttgttatggtgacggaaaatgtttttttcattatcttctaaattattgtgatgggaaaggatacatagattgcgttgtatgcgacgggaaaggcactaaaaacggtaaagtttgtacaaactgcaaaggtaaaggcactgaaacatgcggattatgtcacggttcaggcaaatgcagccgttgtaatggcaaaggaaagatttag

SEQ ID NO: 35050 - protein, 341 aa, Unknown
  Obtained from environmental sample
  DOMAIN (54)...(136): Fibronectin type III domain
  misc_feature (1)..(341): Xaa is any amino acid
MDELELAGTVTTNSFTHNALPLNIDDIYYYYVIAVNSYGESDYSTFKSVVIDKPVAPESVVASATGSSTIDVRWSSVPGATSYQVYYNTVGESGEKKSWANNTYTGTSTGVQGCSPNTTYYFFVKAVNGFGESDYSSAGSTKTLAGGASNAPTGVKAELVSSDMIRISWNSISNASFYNVYYTTGSPNNTKYTLESFSSINYSLHTPVQSNTTYYYWVTAIRGFNTESGLSEMVSVSTGYIPPPTPLPPTTVTVPPAASTPPSGGGKDQKICPLCYGDGKCFFHYLLNYCDGKGYIDCVVCDGKGTKNGKVCTNCKGKGTETCGLCHGSGKCSRCNGKGKI

SEQ ID NO: 35051 - DNA, 723 bp, Unknown
  Obtained from environmental sample
  misc_feature (1)..(723): n is a, c, g, or t
atgatacaagacttggagtacctcataaagctgcaggagatagacctgagagtcagggagcaagagcaggccaaggagcagtacccgaaggccgtcgccgatttggaggggcgcataaagagcgccgaagagatgagcgccgccgccggcgacagactcaagaaattggcctccgatatagaggcggcaagcgaccaagccgcgaaactgcgcgaaagcctgagcaagagccaagagaggctgagttccatccaaacaaatcgggagtacgacgcggttcacaaagagatcgaggcgcaaaaggcgctgctggcctccgccgaagctagaaaagccgctttggacgccgacgttgagaagggtaaaaacgctcaggaagatgcggaaaaagcctacgagaacgccaaaaccgaactgcagccgcagatagacgacctgaagaccaagataggcgcgatagactcgaccatagcggagatcatggaggaacgcgccaagataagccccatggtgagccactcgacaatgcgcacctacgactccataagaaaaaagaaaaaaagcggccgtgcggtctcgctggtgaaccaagaaaaaacctgcggcgtctgcttcatgatcctccaaccccagctgtgcagcgaaatcagaagagggacaaagattatactgtgcgagagctgcggatctatgttgatctgggacgaatccgccggtaaatga

SEQ ID NO: 35052 - protein, 240 aa, Unknown
  Obtained from environmental sample
  DOMAIN (1)...(236): Uncharacterized ACR, COG1579
  misc_feature (1)..(240): Xaa is any amino acid
MIQDLEYLIKLQEIDLRVREQEQAKEQYPKAVADLEGRIKSAEEMSAAAGDRLKKLASDIEAASDQAAKLRESLSKSQERLSSIQTNREYDAVHKEIEAQKALLASAEARKAALDADVEKGKNAQEDAEKAYENAKTELQPQIDDLKTKIGAIDSTIAEIMEERAKISPMVSHSTMRTYDSIRKKKKSGRAVSLVNQEKTCGVCFMILQPQLCSEIRRGTKIILCESCGSMLIWDESAGK

SEQ ID NO: 35053 - DNA, 1077 bp, Unknown
  Obtained from environmental sample
  misc_feature (1)..(1077): n is a, c, g, or t
ttgacgttgactttgccgttgactgaatatgcggggtttagccccgcatatatctatgaaagggcgcgtttacgcgccctttcgtctaaatatgaatttgattttaataatttgactttaatgattttgattccgaaccgcgcgtatattatattgattgctatggaatctaacccaaagtccaaatccaagcccgccgtcaaagcgataatagccgtcgtcatcctcctgttgctctccggcggcggagtgtacggttactactactaccagcgtaccgtcgacaaccgtcccaaggagtacgagaccgtccccgtgtcgcgcggcacggtcgaacgcgtcatcgtcagcaccggcacgctcgatcccgtaggttcggttgaggtcggcacacaggtgtcggggacggtcgagaaggtgctggtggatttcaacgacacggtcaaggcggggcagatcatcgccgagatagaccgcagcgtattaacgagcaaacttacggaagcgcaagcatcctactcgcgggccgaggctttatttttgcagagcgaacaggagttcaaacgcggcgaagtgttgtttgagaagggattgatttcagaacaagacttcaccaaggcgcgtaccgactatctgtcgcagaaagcctcgcttcaggtggccaaggccgccgtcaccacggcttccgagaacgtgcgctacgccaccatccgctcgcccgtgcgggggacggtcatcaagcgcgccgtggacgtagggcagacggtggcggcgagtttaagcgcgccgacgctgttcgtcatcgccgaggatttgaagaagatgaagatcatggcgcaggtggacgagacggacataggcaagatcaagaccgcgcaggaggtgcgcttttcggttcaagcgtaccccgacaaaaaatacgccggcacggtgagccagataaggcttcagccggacgtcgtgcagaacgtcgttacttataccgtggtgatattggccgacaacaacgacgggacgctgctgcccggtatgaccgcgaacgtggagttcatagaggcgagggaggtaaacgcctga

SEQ ID NO: 35054 - protein, 358 aa, Unknown
  Obtained from environmental sample
  DOMAIN (125)...(351): HlyD family secretion protein
  misc_feature (1)..(358): Xaa is any amino acid
MTLTLPLTEYAGFSPAYIYERARLRALSSKYEFDFNNLTLMILIPNRAYIILIAMESNPKSKSKPAVKAIIAVVILLLLSGGGVYGYYYYQRTVDNRPKEYETVPVSRGTVERVIVSTGTLDPVGSVEVGTQVSGTVEKVLVDFNDTVKAGQIIAEIDRSVLTSKLTEAQASYSRAEALFLQSEQEFKRGEVLFEKGLISEQDFTKARTDYLSQKASLQVAKAAVTTASENVRYATIRSPVRGTVIKRAVDVGQTVAASLSAPTLFVIAEDLKKMKIMAQVDETDIGKIKTAQEVRFSVQAYPDKKYAGTVSQIRLQPDVVQNVVTYTVVILADNNDGTLLPGMTANVEFIEAREVNA

SEQ ID NO: 35055 - DNA, 384 bp, Unknown
  Obtained from environmental sample
  misc_feature (1)..(384): n is a, c, g, or t
ttgcccacccgtgatgaatggggagatttggctaaattcgccggaggtaccggtgaatacggggctgaaggcgcggcggctgttaagctgaaatcaaagagcggttggaacgataaaggcgttgacggtaacggtacggatgatttcggatttacggccctgccgggcggccactacaaccgcgtccgcagcgatttcataattgacggacgcggtatgtggtggacggcgagcgatgcaagcggcgatttggtgtatcgtcgggaaatgaccgttgacggcgcaaatgtatctgagatcgagaatgtaaaagtccacggcttctccgtgcgttgcgtcgaaaaccaaactgccaaatctttaaaatctaaaaaatctttttaa

SEQ ID NO: 35056 - protein, 127 aa, Unknown
  Obtained from environmental sample
  misc_feature (1)..(127): Xaa is any amino acid
MPTRDEWGDLAKFAGGTGEYGAEGAAAVKLKSKSGWNDKGVDGNGTDDFGFTALPGGHYNRVRSDFIIDGRGMWWTASDASGDLVYRREMTVDGANVSEIENVKVHGFSVRCVENQTAKSLKSKKSF

SEQ ID NO: 35057 - DNA, 1527 bp, Unknown
  Obtained from environmental sample
  misc_feature (1)..(1527): n is a, c, g, or t
atgaatctagtgagtgagatgagcgataaaaataaaaccagccctgttctgcgtatctttatggggaaacgatactataccctcacaaccataaacgaccaggtaagatacatgacgatgaatgccatttttatgatggtaataattccgctggtctcgcttggaatcactatgatggatgtggatattatgaggacaagcattgactttggcattgcctttctttgctttttaagccttatcctaatccgctcaaaaatgccgttaagattggtacctgtattcccggtaaccatatttggggcatattgtctttatttgctttacacggggcatcttaacctttgggccgcagtatgggttttttcattcccgctgatagtgatttttctctgccagattgtcgtcggaattgtagaatctttcataatgcttgccggaatgatccttcttttttttgcgccattcgcgccgccggcacagcaggaattcaccatccgaatccgctttatcatgggctatatccttgttatgggtctggcgatcgtatatgaatacatcagcataaaaaaagaccaaaaggaaaggattctaaaagctgaactggccagggaaaaagatataattncaaccatgaaggataatatcaatcagggtatcttcatgatgaattcggaacttaaaatacttccgctgtattccaggccgcttatttcaattctttcctattacgattccgaactggcagggaaaaattttctcgacatgcttacagcctccctggatgccaggcagctccagaccatgaaaggctacttctccatgattttcacaaaagccaaaagcgtcaaaattcttgagtccgccaatcccatttcggaattcgaataccgcgttgaagatcgcgtaaaaaccctcactacaaaattcagccttattgagcaaccgggggccgaaccggtaattatcggaataatccaggatatcagcagggaaaaagagcacgaaagggaaatgcaggcccaaagggaagcccaggaactggagatgaagaacatattcgacgttctccagattgatcctcttgtatttaacgacttcattgaagatacggaagaaaatttcaattacataaactcaatactgaaagacagatccctgacggaaaagcaggtacttacgaaattctaccagaatgttcacgccatcaagtccaatgcccttatcctcggccttgaaactttcggcaaaaaactccatgcgctggaagacgatataaaagttgtatccgattatgacaagattcaggtaggagatgttctgggtctcgcgttaaaacttgaaagcatattaaaggaaaaagacgaatacataaaaatcacaaaaaaaatagagtcttataaaacctccaaccagatagataccattttattctactctcttacaaaggcagttgagaaactttcggcggagactaaaaagaaggttgagataaaagccggacagatggatattggaattctttga

SEQ ID NO: 35058 - protein, 508 aa, Unknown
  Obtained from environmental sample
  misc_feature (1)..(508): Xaa is any amino acid
MNLVSEMSDKNKTSPVLRIFMGKRYYTLTTINDQVRYMTMNAIFMMVIIPLVSLGITMMDVDIMRTSIDFGIAFLCFLSLILIRSKMPLRLVPVFPVTIFGAYCLYLLYTGHLNLWAAVWVFSFPLIVIFLCQIVVGIVESFIMLAGMILLFFAPFAPPAQQEFTIRIRFIMGYILVMGLAIVYEYISIKKDQKERILKAELAREKDIIXTMKDNINQGIFMMNSELKILPLYSRPLISILSYYDSELAGKNFLDMLTASLDARQLQTMKGYFSMIFTKAKSVKILESANPISEFEYRVEDRVKTLTTKFSLIEQPGAEPVIIGIIQDISREKEHEREMQAQREAQELEMKNIFDVLQIDPLVFNDFIEDTEENFNYINSILKDRSLTEKQVLTKFYQNVHAIKSNALILGLETFGKKLHALEDDIKVVSDYDKIQVGDVLGLALKLESILKEKDEYIKITKKIESYKTSNQIDTILFYSLTKAVEKLSAETKKKVEIKAGQMDIGIL

SEQ ID NO: 35059 - DNA, 738 bp, Unknown
  Obtained from environmental sample
  misc_feature (1)..(738): n is a, c, g, or t
gtgctggtcggaggcggcgccatgaagtacgaccgcgtactgctcaagctctccggcgaggccctcatgggcgagcagaagggcggcatagacccgtccgtcgtgcatcacgtcgcagagcagatcaaggagataagctgcaagggcgttggcattgggatagtgattggcggcggcaacatcttccggggcatagccggcgccacgaagggcatggacagggtgacggcagaccacatgggtatgcttgccacggtcatcaactcgctggccctccaggacgccatagagcacctcggaatccaggccagggtcttgagcggcatagaaatgcagaggatcgcggagcccttcatcagacgccgcgccatgagccacctggagaagggccgcgtggtgatcttcggtgccggcaccggcaacccgttcttcagcaccgacaccgcggccgcccttcgggccacagagattgaggcggacgtggtgatgaaggccaccaacgttgatggcatatacacggacgaccccaagaaggtcaccgacgcgacacgcttcgaccacatatcctaccaggacgtgcttgagaagggcctgaaggtcatggacgccgcggcgatagccatctgccgcgagagcggcattcccatactggtcttcgacatgaatacgcccggcaacctcatcgccgcagtccagggccagcccataggcacgctcgtgacgtctcggccaatctga

SEQ ID NO: 35060 - protein, 245 aa, Unknown
  Obtained from environmental sample
  DOMAIN (11)...(220): Amino acid kinase family
  misc_feature (1)..(245): Xaa is any amino acid
MLVGGGAMKYDRVLLKLSGEALMGEQKGGIDPSVVHHVAEQIKEISCKGVGIGIVIGGGNIFRGIAGATKGMDRVTADHMGMLATVINSLALQDAIEHLGIQARVLSGIEMQRIAEPFIRRRAMSHLEKGRVVIFGAGTGNPFFSTDTAAALRATEIEADVVMKATNVDGIYTDDPKKVTDATRFDHISYQDVLEKGLKVMDAAAIAICRESGIPILVFDMNTPGNLIAAVQGQPIGTLVTSRPI

SEQ ID NO: 35061 - DNA, 432 bp, Unknown
  Obtained from environmental sample
  misc_feature (1)..(432): n is a, c, g, or t
ttgaggggccaggacatcaacttcgcagggaacgccgaagggcgtgacatctggaacggcagcttcgatgtcgtagcctgcgacgggtttgtcggcaacgtggtgctgaagacatccgaggcactggcagagggcatcatcaggggcctgagggacagcatcatgggcagcctgacgagccgcgtcgggggtctgctggtcaagccggccatgaggaagttctacaaaaagctcgactacgccgagtacggcggcgccccgctccttggggtgcagggaatatcaataatcggccacgggcgcagcgacgcccgcgctgtctccgccgccatcagggtcgccatcaggggcgcgaagagcgacataaacggacggattcagcagcggatgaaccagatggcggccaacaaggccgaggtaacgctgcagtga

SEQ ID NO: 35062 - protein, 143 aa, Unknown
  Obtained from environmental sample
  DOMAIN (1)...(125): Fatty acid synthesis protein
  misc_feature (1)..(143): Xaa is any amino acid
MRGQDINFAGNAEGRDIWNGSFDVVACDGFVGNVVLKTSEALAEGIIRGLRDSIMGSLTSRVGGLLVKPAMRKFYKKLDYAEYGGAPLLGVQGISIIGHGRSDARAVSAAIRVAIRGAKSDINGRIQQRMNQMAANKAEVTLQ

SEQ ID NO: 35063 - DNA, 1281 bp, Unknown
  Obtained from environmental sample
  misc_feature (1)..(1281): n is a, c, g, or t
atggacagaatcggccgagaaacttggcacaattcattattgattatctttgcagtcaaaatcttatggtatggctcaacaaaaaatccgcgntacagctttgcaccaagcccaacaggaccgctgcacatgggcggcgtgcgcactgcattatttaactacctttttgcaaaaaaacatggtggtgattttattcttcgcattgaggacaccgacaccaaccgctacgtgtcgggtgcagagaagtacattattgaggcgttgaattggtgcggaataaagtttgacgaaggtgtaggcattggcggtgcgcatgctccctatcgtcagagcgagcgcaaggctatttacttaaagtacgcgcagcagctaatagatagtggaaacgcctactacgcctttgatagcgcagatgagttggaagcattgcgcaaggaaaaggaagccaacggcgaggcgtttatttacaactacgctacgcgcggtggtttgaaaaattctctctctctttcaaaagaagaagttgaacgattgaaacgtgagcgtaacgattgggttatacgtttcaaaattcccgaaaacgaaatcgtaaaaatgtacgacatcattcgcgaggaagttgttgtaaactccaacacgcttgatgataaagtgctgtggaaaaaggcagacgagctacccacctaccaccttgccaacattgttgacgaccatcttatggaaatttcgcacgtcattcgcggcgaggagtggctgccatcgttaccgctgcacgtgctgctgtaccgcgcctttggttggcaaagcaccatgccgcaatttgcccacctctcgctgctgctcaagcctgacggcaagggaaaactcagcaagcgcgatggcgacaaaatgggtttccctgtttttccgctgcaatggaaatcgcccgaaggcgaggtttcgcgcggctaccgcgaagacggatattttcccgaagcctttgtcaacctgcttgccctattgggttggaatcccggcacagagcaggagaaatttagcatgaatgagctaattcagcagtttgatttaaagcgcgtcataaaatccggggcgcgctttaaccccgacaaggcaaagtggtttaatcaacaatacttgaaagaaaaaagcaacgcagaactagcgaagctgtacctgccaatccttactgaaaaaggcataaccgcacctactgactacacagaaaaagtgtgcggcatgataaaggagcgagcaactttgtcaacgactcggccgatctga

SEQ ID NO: 35064 - protein, 426 aa, Unknown
  Obtained from environmental sample
  DOMAIN (34)...(373): tRNA synthetases class I (E and Q), catalytic domain
  misc_feature (1)..(426): Xaa is any amino acid
MDRIGRETWHNSLLIIFAVKILWYGSTKNPRYSFAPSPTGPLHMGGVRTALFNYLFAKKHGGDFILRIEDTDTNRYVSGAEKYIIEALNWCGIKFDEGVGIGGAHAPYRQSERKAIYLKYAQQLIDSGNAYYAFDSADELEALRKEKEANGEAFIYNYATRGGLKNSLSLSKEEVERLKRERNDWVIRFKIPENEIVKMYDIIREEVVVNSNTLDDKVLWKKADELPTYHLANIVDDHLMEISHVIRGEEWLPSLPLHVLLYRAFGWQSTMPQFAHLSLLLKPDGKGKLSKRDGDKMGFPVFPLQWKSPEGEVSRGYREDGYFPEAFVNLLALLGWNPGTEQEKFSMNELIQQFDLKRVIKSGARFNPDKAKWFNQQYLKEKSNAELAKLYLPILTEKGITAPTDYTEKVCGMIKERATLSTTRPI

SEQ ID NO: 35065 - DNA, 738 bp, Unknown
  Obtained from environmental sample
  misc_feature (1)..(738): n is a, c, g, or t
atgggcatagaggcgacggtaggcggcgcggccgttttggccggaaaccgcagactgatggacgagcgtggcgtcgctctcgccgaacttgaggacgccgccgaaaggctcatggccgagggcaagacgcctatgttcgtggccttcgacggcaaagccgccggaatcgtggcggtggccgacgttcttaaaaagagcagcaaggccgcgatagagcggcttcacaaaatgggaatcgaagtagccatgatcaccggcgacaacaaaaagaccgccgacgccatagccaaacaagtggggatagaccgcgtgctcgccgaggtgctgccgcgtgacaagtccgccgaggtgaagaagctgcaagagggcggccgcaaagtggcgatggtgggcgacggcataaacgacgccccggccctggcgcaagccgacataggcatagccataggaagcggcaccgacgtggcgatggaatcggccgacatcatcctgatgcggagcgacttgtcggacgtcccgacggcgatcaacctaagtaaacacacaatacgcaacatcaaacaaaatctgttttgggctttcggatacaacgtgttgggaatacctatagcggcgggggcgctgcacttgttcggcggcccgctgttgaacccggtcttcgcggcggcggcgatgagtctgagttcggtatcggtattgaccaacgcgctgcggttgaagaggtttaaggcgaattaa

SEQ ID NO: 35066 - protein, 245 aa, Unknown
  Obtained from environmental sample
  DOMAIN (1)...(153): haloacid dehalogenase-like hydrolase
  misc_feature (1)..(245): Xaa is any amino acid
MGIEATVGGAAVLAGNRRLMDERGVALAELEDAAERLMAEGKTPMFVAFDGKAAGIVAVADVLKKSSKAAIERLHKMGIEVAMITGDNKKTADAIAKQVGIDRVLAEVLPRDKSAEVKKLQEGGRKVAMVGDGINDAPALAQADIGIAIGSGTDVAMESADIILMRSDLSDVPTAINLSKHTIRNIKQNLFWAFGYNVLGIPIAAGALHLFGGPLLNPVFAAAAMSLSSVSVLTNALRLKRFKAN

SEQ ID NO: 35067 - DNA, 483 bp, Unknown
  Obtained from environmental sample
  misc_feature (1)..(483): n is a, c, g, or t
ttggtcaataccgataccgaactcagactcatcgccgccgccgcgaagaccgggttcaacagcgggccgccgaacaagtgcagcgcccccgccgctataggtattcccaacacgttgtatccgaaagcccaaaacagattttgtttgatgttgcgtattgtgtgtttacttaggttgatcgccgtcgggacgtccgacaagtcgctccgcatcaggatgatgtcggccgattccatcgccacgtcggtgccgcttcctatggctatgcctatgtcggcttgcgccagggccggggcgtcgtttatgccgtcgcccaccatcgccactttgcggccgccctcttgcagcttcttcacctcggcggacttgtcacgcggcagcacctcggcgagcacgcggtctatccccacttgtttggctatggcgtcggcggtctttttgttgtcgccggtgatcatggctacttcgattcccattttgtga

SEQ ID NO: 35068 - protein, 160 aa, Unknown
  Obtained from environmental sample
  misc_feature (1)..(160): Xaa is any amino acid
MVNTDTELRLIAAAAKTGFNSGPPNKCSAPAAIGIPNTLYPKAQNRFCLMLRIVCLLRLIAVGTSDKSLRIRMMSADSIATSVPLPMAMPMSACARAGASFMPSPTIATLRPPSCSFFTSADLSRGSTSASTRSIPTCLAMASAVFLLSPVIMATSIPIL

SEQ ID NO: 35069 - DNA, 633 bp, Unknown
  Obtained from environmental sample
  misc_feature (1)..(633): n is a, c, g, or t
atgatgttgattaacgaattaaggacagaatacagccctacgtcaagacgagcggaatttatcgagttcaaagtaacgaaggcgggaaatttgaacggaataagcgttcatattatgtatgacgctaataatccatttatttacaattttccgaatgtgaatgttagaaaaggcgaatatataacgcttcatctgcggacgcttgaaaacattagcgttaatgaattaggagatgatttaactttatccggcggtattgataatagtcctactgccagagatttatgggtagaaggtaataataagtatctttataaaaccgatattgtctatttacaagacaaaaacggaaaaatattggacgcaatagtaatgaatgagaaaccaagcattacatggaatgaaaaccaatcgcattttcaagctatagtagaaaatttttgtaaagtaggcgcatgggaaagtgaagacggagaaaatcccacggcttatgacgctgttgatacttcatcagtaggtcaaagcatgtataggagcgtttgccgttatgaatatcgagagaaccattttaatacaacagattggtatataaatacctcaacaactgctacccccggaaagccaaataattaa

SEQ ID NO: 35070 - protein, 210 aa, Unknown
  Obtained from environmental sample
  misc_feature (1)..(210): Xaa is any amino acid
MMLINELRTEYSPTSRRAEFIEFKVTKAGNLNGISVHIMYDANNPFIYNFPNVNVRKGEYITLHLRTLENISVNELGDDLTLSGGIDNSPTARDLWVEGNNKYLYKTDIVYLQDKNGKILDAIVMNEKPSITWNENQSHFQAIVENFCKVGAWESEDGENPTAYDAVDTSSVGQSMYRSVCRYEYRENHFNTTDWYINTSTTATPGKPNN

SEQ ID NO: 35071 - DNA, 705 bp, Unknown
  Obtained from environmental sample
  misc_feature (1)..(705): n is a, c, g, or t
ttgacgccttataccagttccataccgggagcaagggtaagtttcagggcaggccgttttatggcttcaagtaccccgatggaaatttcgcttacttccagaaattacgatgctatcatggaaaccgccgatgaaatcgttcacattcttgagcgccatcttcccgagatcgagaacccgacggtgaacatagaagaaggcgcgcctcagttagtcgtcaatatagaccgcgacagggcagccgccctgggggtgtcgctgtcttctatcgcttcggaaatccgtgccgccatggacgggactaccgccgcaaccgtgagcatgggagaccggcttgtaagtgtaagggttcaattgcgcgaggaagaccgcaccggcatcccgaacctggacgcgatctccgtgatgagccgcaatggctcaagggtttccctgtccaatgttgctgaaatttccgagagccgtgcgccgacttccatacgccgtgagaagcaggaacgggttgtccgcgtaacaggggggcttccctcaggaattgccgcaagcgaaatgcagaagcggcttgaagcaacggtgaagggataccttgttccgcacgaaggcgtaacggtcagttttttgggagaagccngcggagattcaacgctactacgggcgttacattctgatagtaataaccgctcggccgatctgatcaatggctaa

SEQ ID NO: 35072 - protein, 234 aa, Unknown
  Obtained from environmental sample
  misc_feature (1)..(234): Xaa is any amino acid
MTPYTSSIPGARVSFRAGRFMASSTPMEISLTSRNYDAIMETADEIVHILERHLPEIENPTVNIEEGAPQLVVNIDRDRAAALGVSLSSIASEIRAAMDGTTAATVSMGDRLVSVRVQLREEDRTGIPNLDAISVMSRNGSRVSLSNVAEISESRAPTSIRREKQERVVRVTGGLPSGIAASEMQKRLEATVKGYLVPHEGVTVSFLGEAXGDSTLLRALHSDSNNRSADLING

SEQ ID NO: 35073 - DNA, 873 bp, Unknown
  Obtained from environmental sample
  misc_feature (1)..(873): n is a, c, g, or t
atgcagacagaattaaccgaacagatcggttacgaaaaaagcgaatccggcgaaaaaccaaacggcaaccgcagaaacggaaagtcatcaaaaacacttaggactgaccaaggaccgatggagatcgaagttccccgcgatcgtgacggcgatttcgaaccgaagattgtcggaaaacatcaaagggaatggcgcggattcgacgacaaaatccttgcgatgtacagccgagggatgtcaactcaaggaatacaggaaacaatcaaggagatttacaacgttgatatatcccctgaacttgtaagcagggtgacagacgaagtaaagggtatggttgatgaatggcgcaaccgccctcttgaggcgttctatcctgttgttttctttgacgctctgagggtaaatatccgtgacgagggacatgtgtgcaaaaaagcggtgtatttggcgcttgcgatacgtctggacggtcaaaaagaactgctgggcatgtggattgaaaaaaatgaaggttcaaaattctggatgggcattttgaacgaacttaaaaacaggggcgttcaagatatattgtttgcggcggtagacgggcttaccggatttcccgacgctattaattcggtgtttcccaagactgaagttcaactttgcatagttcacatggttcgtaactccgtgaaatttgttccgtacaaagaccgcaaggctgttacaacagaattaaaagaaatttaccttgctccgtcagaggatgccgccggcaccgcgttggaaagttttgctgaaaagtgngataaaaaatatccggctatttccaaatcatggcggagccggtggacagaaataattccgtacatgaaattttccccctga

SEQ ID NO: 35074 - protein, 290 aa, Unknown
  Obtained from environmental sample
  DOMAIN (1)...(289): Transposase, Mutator family
  misc_feature (1)..(290): Xaa is any amino acid
MQTELTEQIGYEKSESGEKPNGNRRNGKSSKTLRTDQGPMEIEVPRDRDGDFEPKIVGKHQREWRGFDDKILAMYSRGMSTQGIQETIKEIYNVDISPELVSRVTDEVKGMVDEWRNRPLEAFYPVVFFDALRVNIRDEGHVCKKAVYLALAIRLDGQKELLGMWIEKNEGSKFWMGILNELKNRGVQDILFAAVDGLTGFPDAINSVFPKTEVQLCIVHMVRNSVKFVPYKDRKAVTTELKEIYLAPSEDAAGTALESFAEKXDKKYPAISKSWRSRWTEIIPYMKFSP

SEQ ID NO: 35075 - DNA, 564 bp, Unknown
  Obtained from environmental sample
  misc_feature (1)..(564): n is a, c, g, or t
atgaaaatcaaatacaacgcgccgaccgtgctgacttacacgctgctctgcgccctggtgatggccgtcactttgtacctgctgcccggactgcgcgaatggttcatggttccgggcaggggggatttttcgccgggcagcctgcgatgctggatatcgctgctgtcccatgtcataggccattcgaactgggcccaccttgtcagcaatttttccattatcctccttgtcgggccgatgctggaggagaattacggctcgctcgccctgcttgtgatgatcgccattaccgccctggttaccggcctcctaaacgtgcttttcttcccaaacgccctctggggcgcttccggcgtggtttttatgatgatactgctcgcctcgtttaccaattttacccacggggaaatcccgctgacctttatccttatattaacgctgtacataggcgaccagttgtttaaatcctttggcggcacgggcaatatctcccactttgcccacatcgcgggcggtttctgcggcagcctttttggtttcttcatttcgccgaaacagtattag

SEQ ID NO: 35076 - protein, 187 aa, Unknown
  Obtained from environmental sample
  SIGNAL (1)...(22)
  DOMAIN (42)...(187): Rhomboid family
  misc_feature (1)..(187): Xaa is any amino acid
MKIKYNAPTVLTYTLLCALVMAVTLYLLPGLREWFMVPGRGDFSPGSLRCWISLLSHVIGHSNWAHLVSNFSIILLVGPMLEENYGSLALLVMIAITALVTGLLNVLFFPNALWGASGVVFMMILLASFTNFTHGEIPLTFILILTLYIGDQLFKSFGGTGNISHFAHIAGGFCGSLFGFFISPKQY

SEQ ID NO: 35077 - DNA, 1140 bp, Unknown
  Obtained from environmental sample
  misc_feature (1)..(1140): n is a, c, g, or t
ttggcggcacgggcaatatctcccactttgcccacatcgcgggcggtttctgcggcagcctttttggtttcttcatttcgccgaaacagtattaggatgaagaatccttaccggctcttttttccgattctgctcccggcatttctgttatacgcctgcgcgggccgtccgcacccgacggcggaaacggcaagagaaactccggtaatttttctgccgtctcccgaagaattgccgcctgttatcaaacagccttttgagcaggcgattaaaaaggtaaaacaaaacggaaaagatattgacaagtatttcattctggatggagaagggcggatagttgttaaagccggcctgcgctatgagaacgttgattttgagatcatctatgatttggaaaattcaaaggagatcgagggttcagcctatgaagtgggtttttcctgccgtgataaagaatccgggatgcttctgaaagacacccttgtctggaagccgcttgcctctgaagccgggcttcttctttcttttgacgacgattatacggattcatgggaacggtattttgatctctttgataaatataaagccagggttactttttttgttcagggaaaaccaaactctttctgcgccagagctgttaacagggggcacgatgtcggttaccacagccttaaccatttcgatttacggaaaatgtcaaggaaggattttaacctggagacaatcgagtctgtaaagccatttcgggacgcaggtttgctcctttcgtcattcgcttatccctatggcttttacgaaccctggatgcacgaagctctctttcattccttcgggacgctgaggggctacggtactacttatcgtttgtatagtgaagctgaaatcagacgtgggtatatttcttcccgcgccattgacaatacggtaatcccctcggatgaggttttctaccgcctcgtaacccttatgtttaagaccgctaaattcctggataaaaaactggtattacccctgacgacccacgacatatccgcaaatgccgcctggggcatcagcccccgccgtcttgaatatctgttaaaaacagctaacgacctggggttggcattttattgttacaacgattttacgaagtaa

SEQ ID NO: 35078 - protein, 379 aa, Unknown
  Obtained from environmental sample
  SIGNAL (1)...(18)
  DOMAIN (165)...(274): Polysaccharide deacetylase
  misc_feature (1)..(379): Xaa is any amino acid
MAARAISPTLPTSRAVSAAAFLVSSFRRNSIRMKNPYRLFFPILLPAFLLYACAGRPHPTAETARETPVIFLPSPEELPPVIKQPFEQAIKKVKQNGKDIDKYFILDGEGRIVVKAGLRYENVDFEIIYDLENSKEIEGSAYEVGFSCRDKESGMLLKDTLVWKPLASEAGLLLSFDDDYTDSWERYFDLFDKYKARVTFFVQGKPNSFCARAVNRGHDVGYHSLNHFDLRKMSRKDFNLETIESVKPFRDAGLLLSSFAYPYGFYEPWMHEALFHSFGTLRGYGTTYRLYSEAEIRRGYISSRAIDNTVIPSDEVFYRLVTLMFKTAKFLDKKLVLPLTTHDISANAAWGISPRRLEYLLKTANDLGLAFYCYNDFTK

SEQ ID NO: 35079 - DNA, 1668 bp, Unknown
  Obtained from environmental sample
  misc_feature (1)..(1668): n is a, c, g, or t
gtggacgagcacaacaaggttctctacgcgagcaaaaccctgtcccggctgggtatggtcgaagaaccgatccttgtccagggacgcccccttctcgacctttttcccggaagaaacctgaaggtatacgcggggagaatgctcgcccagaaaggagactacgccgaggattgggaattctcgctgaacgggcaaaaacggtatttcaaggccgcttcgcacagtctgccgggaggctataacaacggcactctgattaacctgtacgacatgacccatctcgcggaacgggatgaaatcgccgccatgaaagacagcatgaagataggccttttcttcatggatcagaattatattatacaggatcattattcacggtatctggaagagatgctgtccgaggccgaccttttcgggaagccttttaccgatataatcgcggattcggttaaccccggtgaattgcggaatatcaaagattatttcgaaatggttatcaagcacactttcgatcaggaaatgctggacgacattaaccccctgaatgagctgcactacgtcaataaaaggaacggcagcaaaaaggttttccaatgcggttttgccaccgtggagcgggggcacggagaggtatttctcctggtaacggtctatgacataaccgccaaagtggaactgcagaaacggcttcaggaagagcanaacaaacggcaggaagagatgcagtccgtattcgagcttattcaggttgactccaatgtttttggcgattttatgcaggacatggaatacgaaatcaacaccattgacaaatnactaaagacagaaaaactgtccacccatgaaacgctggtaaaaacatatcagtccattcacgccataaaatcaaacgcggtaatccttggattaaatatttttggcaataaggcgcacagcctggaatccgtgataaaaaaactccgtgaacagaaggaagaagtgcccttctccgaaatgttgaatctgaccatgcaaatagaacagctttccaatgaaagggaaagtttcaaaatggttattgacaagctcaattcctataccaaagaccagggcggcaaaaatcaaagtttgagcgtcctgattacgtctcttgccaaagccgccgaaaaagccgccgccgatatggggcggaaggtacggtttatcagcagcgacattgatttggcggcggttgaaaacggccccaggcgcgtcatgaaagagatccttatgcagttgatccgcaactccgtggcgcacggaattgaaccgcccgatgtgcgccgcgccaaaggcaaaaacgaaaccggcattataaagctttctattaaacttgtgagtaatattatcaacatagagctgagggacgacggcaaagggcttgattataaaaagatcagcgagaaagcggtgcgcaataaaataatcagaaaagaagacgccgccaacaaaaatatgcttataaaggcgatattcgcgccgggtttcagcaccgcggagaatgaaggaatgcacgccggcaggggcatcggcttaaatctggtccgtgaccgcgtaaaagaggtaaaaggcgcgattaaactgcgctccgagcccaacaagggaaccgcgtttttaatttccattccgatagagagaagaaagcgctaa

SEQ ID NO: 35080 - protein, 555 aa, Unknown
  Obtained from environmental sample
  DOMAIN (407)...(551): Histidine kinase-, DNA gyrase B-, and HSP90-like ATPase
  misc_feature (1)..(555): Xaa is any amino acid
MDEHNKVLYASKTLSRLGMVEEPILVQGRPLLDLFPGRNLKVYAGRMLAQKGDYAEDWEFSLNGQKRYFKAASHSLPGGYNNGTLINLYDMTHLAERDEIAAMKDSMKIGLFFMDQNYIIQDHYSRYLEEMLSEADLFGKPFTDIIADSVNPGELRNIKDYFEMVIKHTFDQEMLDDINPLNELHYVNKRNGSKKVFQCGFATVERGHGEVFLLVTVYDITAKVELQKRLQEEXNKRQEEMQSVFELIQVDSNVFGDFMQDMEYEINTIDKXLKTEKLSTHETLVKTYQSIHAIKSNAVILGLNIFGNKAHSLESVIKKLREQKEEVPFSEMLNLTMQIEQLSNERESFKMVIDKLNSYTKDQGGKNQSLSVLITSLAKAAEKAAADMGRKVRFISSDIDLAAVENGPRRVMKEILMQLIRNSVAHGIEPPDVRRAKGKNETGIIKLSIKLVSNIINIELRDDGKGLDYKKISEKAVRNKIIRKEDAANKNMLIKAIFAPGFSTAENEGMHAGRGIGLNLVRDRVKEVKGAIKLRSEPNKGTAFLISIPIERRKR

SEQ ID NO: 35081 - DNA, 300 bp, Unknown
  Obtained from environmental sample
  misc_feature (1)..(300): n is a, c, g, or t
gtgtttaatgtgctgcgtccaagacatttcggaaatgtggataagcccttcgattcctttttccaattccataaacgcgccgtattcggtaatcgaaactatttttccggttactttcgtgccttcgggatatttggtttcgacgtctttccatggatgttcgtgcagttgtttgagacccagcgaaattctgtctttgtcatcgttaaaatcaagtaccataacgtcgatttcctgattgaccgacaacacgtctttggggtcgttgactcttccccaggacatatccgtaatgtgtaa

SEQ ID NO: 35082 - protein, 99 aa, Unknown
  Obtained from environmental sample
  misc_feature (1)..(99): Xaa is any amino acid
MFNVLRPRHFGNVDKPFDSFFQFHKRAVFGNRNYFSGYFRAFGIFGFDVFPWMFVQLFETQRNSVFVIVKIKYHNVDFLIDRQHVFGVVDSSPGHIRNV

SEQ ID NO: 35083 - DNA, 1290 bp, Unknown
  Obtained from environmental sample
  misc_feature (1)..(1290): n is a, c, g, or t
atgcgtaaattagttaagtacctaaaaccttttacccttcttttcatcctggcggtgttgattctttttctccaggtattttgcgatctcagcctgccgaatatcatgtcccggcttgtgaacagtattcttgggcagaatgtaccggagacaggcgaggcggataacatcctcaatttgggactgcgaatgctgataatcgcattggccggaggcgcggcggctgtgagcgtgagctttctttcaaccagaattgccgccggaatcgctcgcgatctccggttcgcggtgtttcaaaaagtggaaagtttctccagccgtgaattcgacgctttttccacggcttccctcattacccgctgtaccaacgacatcaatcaggtgcaggggattttcataatgggaatccgcatgatctgttacgcgccgatcatgggaataggcgggattgttatggcggttaacaaagcgcccggcatgagctggattatcgttcttgcggtgctggttcttatccttatggtgatagtgatggtttcctttgttatgccgaagtttaagctcattcagactctggttgatcgtatgaacagaatctcgagggagaccctgaacggcctcatggtaatacgcgctttcggagcgcaggatcacgaaaagaaaagattcgacggcgttaacgcggatttaacaaagacatctctttttgtaaacaggatgatgatcctccagatgccgcttatgcaatttatcatgaactccgcgattattttgattatctggacgggcgcgcacaggatcgcggagtcgttcatgggcgtgggcgatatgatggcgtttatccagtacacaatgcagataattttttctttccttttcttttcgatgatgtttgtcatgattccgagaaccgcagtttccgcggacaggatcgcgcaggtgctgaatacagaagtttccatccgcgacccgtcgtctttttcgaacgacacgtcttctgtggaagangtgtcgttcganaaagacgcgcgccggggcgggaaagctgaattcaaaactgtgtccttccgttatgaagggacggacgtagacgctcttaaaattatcaacttttaccggcaagacgttccaacaatcactattatcgttgcgaacggtttaggagaatttccccccgtcaatcctatcaggggttttgccaacgttaaggggggaatattccccctcaaaatcgttgcgggtagaaatttttgcccaccggggcatggggcggaaatctttttgtgttaa

SEQ ID NO: 35084 - protein, 429 aa, Unknown
  Obtained from environmental sample
  SIGNAL (1)...(24)
  DOMAIN (15)...(291): ABC transporter transmembrane region
  misc_feature (1)..(429): Xaa is any amino acid
MRKLVKYLKPFTLLFILAVLILFLQVFCDLSLPNIMSRLVNSILGQNVPETGEADNILNLGLRMLIIALAGGAAAVSVSFLSTRIAAGIARDLRFAVFQKVESFSSREFDAFSTASLITRCTNDINQVQGIFIMGIRMICYAPIMGIGGIVMAVNKAPGMSWIIVLAVLVLILMVIVMVSFVMPKFKLIQTLVDRMNRISRETLNGLMVIRAFGAQDHEKKRFDGVNADLTKTSLFVNRMMILQMPLMQFIMNSAIILIIWTGAHRIAESFMGVGDMMAFIQYTMQIIFSFLFFSMMFVMIPRTAVSADRIAQVLNTEVSIRDPSSFSNDTSSVEXVSFXKDARRGGKAEFKTVSFRYEGTDVDALKIINFYRQDVPTITIIVANGLGEFPPVNPIRGFANVKGGIFPLKIVAGRNFCPPGHGAEIFLC

SEQ ID NO: 35085 - DNA, 912 bp, Unknown
  Obtained from environmental sample
  misc_feature (1)..(912): n is a, c, g, or t
ttgcgggagttgtatgggacctacacccgggtgttttccgagtgctatcacaatcggaccggagttgacgtgttggtcaaccaatctcacgccggatccggggggcaggcgcgcagcgttatagaggggaacgaggccgacgtggtgacgctcgctttggcttacgacatagacgccatcgtcgacgcccgaaaggggcttatagcggaggactggatcaagcggtttccgaacaacagttcgccctatacctccaccatagtctttcttgtccgaaagggcaaccctaagggcgtaaaggactgggacgaccttgtgaagaagggcgtggaggttgtgacgccggatcctaagacttccggcggggcgcgttggaattatctcgcggcgtgggcgtacgctcggaataaattcggcggagacgacaaggcccgcgagtttgtttctaagctctatgccaatgtcaaggttttggattcgggagcgcgcggttccacaaatacctttgtgcagaaaggccagggagacgttttgctggcttgggagaacgaggcccatctgattaacaaagatcttggcggcggcgactacgatataatcaccccgtccctgagcattctggcggaacccaacgtaacgtatgtcgacggcatagtggataaacgcggtacaaaagatgcggctatcgcctacttggagtatctgtattccgacgacgcgcaacggcttatcggcaagcactattaccgtccgtcaaataaggagatcgccaaagagttttcaaatttgttcgtcgatcttagtttggtgacaatcgacaacgatttcggagggtggaggacggcgcaacagacgcactttgccgacggcggcgaatttgacaagataatggcggggctgaagaagaaatga

SEQ ID NO: 35086 - protein, 303 aa, Unknown
  Obtained from environmental sample
  misc_feature (1)..(303): Xaa is any amino acid
MRELYGTYTRVFSECYHNRTGVDVLVNQSHAGSGGQARSVIEGNEADVVTLALAYDIDAIVDARKGLIAEDWIKRFPNNSSPYTSTIVFLVRKGNPKGVKDWDDLVKKGVEVVTPDPKTSGGARWNYLAAWAYARNKFGGDDKAREFVSKLYANVKVLDSGARGSTNTFVQKGQGDVLLAWENEAHLINKDLGGGDYDIITPSLSILAEPNVTYVDGIVDKRGTKDAAIAYLEYLYSDDAQRLIGKHYYRPSNKEIAKEFSNLFVDLSLVTIDNDFGGWRTAQQTHFADGGEFDKIMAGLKKK

SEQ ID NO: 35087 - DNA, 690 bp, Unknown
  Obtained from environmental sample
  misc_feature (1)..(690): n is a, c, g, or t
ttggctatttctcttggcggagacgggacggttctgtattcggcgcgaagcgtcgctcctttgggagtgcctattatgccgatcaatcttgggacgcttggctttattgcggaagtaaataaaaaagactggcttgacgttttcctgaaatgggaaaaaggagagattacccccacgcgcagatgtatgtttgaaatttccgtggaacgcgattctaaaataattaataagtacttctgccttaacgacgccgttatttcgtatacggagatagcgaaacttattaaacttaacgtacatataacagacgctgaattggtttcttacaggtgcgacgggattattatcgcgactcccacaggctctaccgcctattccatgtcggcaggcggaccgattttagacccggaaatggaagcgatgataattaacccaatctgcccgttcgcgctttcaaacaggccgtttgtgcttcattccaggcagacgcttacgatagctgtagccgacgagcaaagatcgggcgtagttttaatggttgacggacaggacaccttcccccttgaatgtaaagataaggttcacattaaacaggctcctttcggagcggaattgatatttaacggacgatctatttattatcaggcgttaagaacgaaacttttctggtcaggggatgcgaatgcttga

SEQ ID NO: 35088 - protein, 229 aa, Unknown
  Obtained from environmental sample
  DOMAIN (1)...(209): ATP-NAD kinase
  misc_feature (1)..(229): Xaa is any amino acid
MAISLGGDGTVLYSARSVAPLGVPIMPINLGTLGFIAEVNKKDWLDVFLKWEKGEITPTRRCMFEISVERDSKIINKYFCLNDAVISYTEIAKLIKLNVHITDAELVSYRCDGIIIATPTGSTAYSMSAGGPILDPEMEAMIINPICPFALSNRPFVLHSRQTLTIAVADEQRSGVVLMVDGQDTFPLECKDKVHIKQAPFGAELIFNGRSIYYQALRTKLFWSGDANA

SEQ ID NO: 35089 - DNA, 891 bp, Unknown
  Obtained from environmental sample
  misc_feature (1)..(891): n is a, c, g, or t
atgcgaatgcttgaagagctttctattagaaattacgctcttattgattccattacgctttctttccgccgtggctttaacgttcttaccggtgagacgggggcgggcaaatcaatcattgtcggctctttaagttttttaatgggcgcgaaggcggagacggacgttatccgctcaggatgcgaagaagccgccgtttccgcgattatttccgtcaacaagaataacgcagacgcgaatgaatggctgaaagcgcgtgacattgaatgtgaagaagacaccgttatcgtgcgcagaagcattaaaacgtcgggcaggggatcggtctttattcaaaatgttcccgtaacgcgccaggatttgtcggagtttatgggactgttattcgatcttcacggccagcataaccacgagtccctactgcgcaaggacagccaccgccgctacctggacagttttgccggaattgaaaatgaagttaaaaatttttcggcgctttttctggaactgaccgacaagcgcaaaactatggaagcttccctaaaaagcgaacgtgagagggaagacaggcttgaaatattaaattatgccgtggatgaaattacaaaagcggcgattcacgccggggagcttcgcgaattggaaaacgaagcgcagaagttatcggactttgaaaaattggcgggttttatcaataccgccgcctcctgttttactgatggcgaacagtcggcgttaagccttacgcgaagggcgaagaacgcccttgacggcgcgtccttggtcgatacgtcgcttggggaaataaacagacggtttgaaaacctgtactatgaagctgaggatatcgcctcggaattccgcacttacaaagagaaccctcgcttttga

SEQ ID NO: 35090 - protein, 296 aa, Unknown
  Obtained from environmental sample
  DOMAIN (3)...(165): RecF/RecN/SMC N terminal domain
  misc_feature (1)..(296): Xaa is any amino acid
MRMLEELSIRNYALIDSITLSFRRGFNVLTGETGAGKSIIVGSLSFLMGAKAETDVIRSGCEEAAVSAIISVNKNNADANEWLKARDIECEEDTVIVRRSIKTSGRGSVFIQNVPVTRQDLSEFMGLLFDLHGQHNHESLLRKDSHRRYLDSFAGIENEVKNFSALFLELTDKRKTMEASLKSEREREDRLEILNYAVDEITKAAIHAGELRELENEAQKLSDFEKLAGFINTAASCFTDGEQSALSLTRRAKNALDGASLVDTSLGEINRRFENLYYEAEDIASEFRTYKENPRF

SEQ ID NO: 35091 - DNA, 531 bp, Unknown
  Obtained from environmental sample
  misc_feature (1)..(531): n is a, c, g, or t
atgcccgcgctgaacgcggctttccatactgcggtgcatattgtcgcgcaggtagtcaaagccaaattcgttatttgtgccgtaggtaatgtcgcaggcgtagttttccttgcgcctgtcgttgtccatgtcggaaagaatcgtcccgacggtcatgcccaggtagctgaaaataggccgcatccactcggcgtcgcggctcgccaggtaatcatttaccgtgacaatgtgtatgcccttgccgggtatggcgttcagataggccgcggcgaccgacatcagcgtcttgccctcgccggttttcatttcgacgatcttgccctggtgcagaacaatggaacccatcacttgcacgtcgtaggggcgctcgcccaggttccgccttgccgcttcccgcgccagggcgaaagcctccggcagaagatgattaaggctttcgccgttgttatagcgctcgcggagtttttccgtctgttttggaaattcatccgcgggcaaagcggcggcccaggcctctttctcgttaactga

SEQ ID NO: 35092 - protein, 176 aa, Unknown
  Obtained from environmental sample
  misc_feature (1)..(176): Xaa is any amino acid
MPALNAAFHTAVHIVAQVVKAKFVICAVGNVAGVVFLAPVVVHVGKNRPDGHAQVAENRPHPLGVAARQVIIYRDNVYALAGYGVQIGRGDRHQRLALAGFHFDDLALVQNNGTHHLHVVGALAQVPPCRFPRQGESLRQKMIKAFAVVIALAEFFRLFWKFIRGQSGGPGLFLVN

SEQ ID NO: 35093 - DNA, 375 bp, Unknown
  Obtained from environmental sample
  misc_feature (1)..(375): n is a, c, g, or t
atgccggcgctgctggagcactgccatatgctggtcgcgcccagcttggtaacggaaacgggcgaccgtgacggcatccggaacggtgtatcatcgaggcgactttcccaaggagtgcccgtggtggccaccgacgtgagcggcatcggcgaagtcgtcatcaacgacacgacagggctgctgattgagcaacgcaatcctcgcgccctggccgaggccatccggactctggccgtggatcgcgcacgggccttggcgatggcggaggaaggcaagcggctggtgcggcgcatgtttgatccgcaaacgaatatccgggcgctgtatacgctgtacgtagagcgcttcaatgccgcgctgcggccggagcggtga

SEQ ID NO: 35094 - protein, 124 aa, Unknown
  Obtained from environmental sample
  misc_feature (1)..(124): Xaa is any amino acid
MPALLEHCHMLVAPSLVTETGDRDGIRNGVSSRRLSQGVPVVATDVSGIGEVVINDTTGLLIEQRNPRALAEAIRTLAVDRARALAMAEEGKRLVRRMFDPQTNIRALYTLYVERFNAALRPER

SEQ ID NO: 35095 - DNA, 819 bp, Unknown
  Obtained from environmental sample
  misc_feature (1)..(819): n is a, c, g, or t
atgaggtatcttgccagaagaaagatccccgctcccatgaagaaaaaaaattcctacagcatggatgacaacctttggcatatttctcacgaggggctggagcttgaagacccggcgaatgagcctatgtacaaaaaaatgctctccatgacggttacgcctgaaaaagcgcctaacaaacccgaatatgttgaaattgaatttgaaaagggcattcccgtttcgcttaacggaaagaaaatggacggcgtggctcttatcaatcagcttaacaaaatcggcggagcgaacggaatcggcatcgtagaccttgttgagaacagggttgtcggaatgaagagcagaggcgtgtacgaaacgcccggcgggtctattctttattacgcgcacggcgagcttgaacacctctgtcttgacaggcagacttactctttcaaacagcaggcggctcttaaaatgggcgagcttatttacgggggactgtggtttactccgttacgcgaagctatttccgcttttgttgactgcactcaagcgtcggtcaacggtaaggtgaggctcaagctttacaagggttcgattagcgcggcgggggttacatccgccaattcgctctacaatacaagtctcgccagttttacaacgggcgaattgtttaatcacgcggacgctaaggggtttatcaaactttacggcctgccggtttatgttcgggcgcttatgcagcttgagaaaaaggggggagctaaagcggccttggcgaaggtagcttcggctaaagcggcgtcagctaaaaccaaaacaaaaggaaagaagtga

SEQ ID NO: 35096 - protein, 272 aa, Unknown
  Obtained from environmental sample
  DOMAIN (1)...(241): Arginosuccinate synthase
  misc_feature (1)..(272): Xaa is any amino acid
MRYLARRKIPAPMKKKNSYSMDDNLWHISHEGLELEDPANEPMYKKMLSMTVTPEKAPNKPEYVEIEFEKGIPVSLNGKKMDGVALINQLNKIGGANGIGIVDLVENRVVGMKSRGVYETPGGSILYYAHGELEHLCLDRQTYSFKQQAALKMGELIYGGLWFTPLREAISAFVDCTQASVNGKVRLKLYKGSISAAGVTSANSLYNTSLASFTTGELFNHADAKGFIKLYGLPVYVRALMQLEKKGGAKAALAKVASAKAASAKTKTKGKK

SEQ ID NO: 35097 - DNA, 771 bp, Unknown
  Obtained from environmental sample
  misc_feature (1)..(771): n is a, c, g, or t
ttgataagtataggagaaattaccatgaactggcaaagtttgacaaaagcaatccaatttattgaaagcaacctgaccaatgaaatcactctggatgacgtagctaatcatgtatacgcttccggcgctcattatcaacgtgtgttttctttaacaaccggtattactataggtgactatatccggaacaggcgcttgagtttagccgggcaggacttacttctttcaaaaaataaaattattgatgttgccatgaaatatcaatacgattcacaggaaagttttacaaaggcctttacgcggtttcatggaataactcctaatagcgcaaggaaacaaagtcatctgcttaaatacttccgtccgttgaccatcaatataattattcaaggaggacttgaaaagtcaggttatcgtgaaattttatcattagcgcaatactcatcttatgagtcggattccatcgcaagattgattgcgagagcggaatcaccacgtgaagcaaacaaaataaaagaatacaaaaagattgagccatggcaaaattattttctttgttctgctgtatgttctatcggtttaaaactgggctcggacattcatgacttcaaattttacgctaatttaaccggagacaatttcacttatatgtattcagaaaaagccggtaaccctgacaaaattcagaccgatagcggcgtaaccaactatttcttcgccccgcagtttgtgaagaaagcatttgccgcttttggttatgattgcatctaa

SEQ ID NO: 35098 - protein, 256 aa, Unknown
  Obtained from environmental sample
  DOMAIN (68)...(112): Bacterial regulatory helix-turn-helix proteins, AraC family
  misc_feature (1)..(256): Xaa is any amino acid
MISIGEITMNWQSLTKAIQFIESNLTNEITLDDVANHVYASGAHYQRVFSLTTGITIGDYIRNRRLSLAGQDLLLSKNKIIDVAMKYQYDSQESFTKAFTRFHGITPNSARKQSHLLKYFRPLTINIIIQGGLEKSGYREILSLAQYSSYESDSIARLIARAESPREANKIKEYKKIEPWQNYFLCSAVCSIGLKLGSDIHDFKFYANLTGDNFTYMYSEKAGNPDKIQTDSGVTNYFFAPQFVKKAFAAFGYDCI

SEQ ID NO: 35099 - DNA, 348 bp, Unknown
  Obtained from environmental sample
  misc_feature (1)..(348): n is a, c, g, or t
ttgnagcgttacggaagacacgcgatgagaaaatacgggaacaaagaattgagcaaggcacaaatggcatataaccggtatgtgataatcgtcacgtcaataacggatgtggcttctgagttgatccttgacttgtaccggcagcggtggcagatagagctggcattcaaacggttaaagtcgttatttaaataccatgagataccggttcatgttgaacagagcgcatgggcatggttttacgggaaattgttattggcggctctttgtgaagcctgggttaacaaagggcgtttttccccctctgcagggaagcgatcccgaacaagagtggtctctatggtgtga

SEQ ID NO: 35100 - protein, 115 aa, Unknown
  Obtained from environmental sample
  misc_feature (1)..(115): Xaa is any amino acid
MXRYGRHAMRKYGNKELSKAQMAYNRYVIIVTSITDVASELILDLYRQRWQIELAFKRLKSLFKYHEIPVHVEQSAWAWFYGKLLLAALCEAWVNKGRFSPSAGKRSRTRVVSMV

SEQ ID NO: 35101 - DNA, 726 bp, Unknown
  Obtained from environmental sample
  misc_feature (1)..(726): n is a, c, g, or t
ttgaacactatgcttttgagaagcctaaagagggccgaatatagtgccgagaacgtaggtcactcgggcctagccctaggcgagtacctgcacttcactagccccatacgccgctaccccgacttggtggtgcatcggctgctaaaaaaattgctgaaaaaagaaaaaatccgcgatggattgcaaagccacttggccatcctagccaagcgggcctcggattgcgagcagattgcaacagaggccgaaagggaaaacgaccgctggaaaacgtgcttgttgatgaagcaaaagatcggacaaaaatttcagggtacaatacagggcttttcaaacaaggccgcatttgttcgcttggacagcccattcgtggaagtcagtgtgcctctaagtgcgctgggtggccatttttccgttgacgagcatcgcaccaaggccgttggaatgaggggccaaatcgaattgtccctaggcgcgcaggtgctggtggaaattacatccattgacgaaagccagcaccgcgtctctgcatggattcttgaggccaagaccaaagacgccagcggcaaaaccatcacattcacgcccacgctgacagggccaatgtcattgcgcgaagcggattttgtcgagaccggcccaagaaggcggacggccccaagaggcaggggcagaggtctggggagtaagcgagggccgactcgcatgcgaggcggttcccgctga

SEQ ID NO: 35102 - protein, 241 aa, Unknown
  Obtained from environmental sample
  misc_feature (1)..(241): Xaa is any amino acid
MNTMLLRSLKRAEYSAENVGHSGLALGEYLHFTSPIRRYPDLVVHRLLKKLLKKEKIRDGLQSHLAILAKRASDCEQIATEAERENDRWKTCLLMKQKIGQKFQGTIQGFSNKAAFVRLDSPFVEVSVPLSALGGHFSVDEHRTKAVGMRGQIELSLGAQVLVEITSIDESQHRVSAWILEAKTKDASGKTITFTPTLTGPMSLREADFVETGPRRRTAPRGRGRGLGSKRGPTRMRGGSR

SEQ ID NO: 35103 - DNA, 300 bp, Unknown
  Obtained from environmental sample
  misc_feature (1)..(300): n is a, c, g, or t
atggggcttatctattatgaactggaacagtttgattccgccgaggaatgttatcaaaatgctctgggtcgtgacagcgattctccgaaaatatggaataacctgggggttttgtacttttcccaaaaagattatgaggctgcccgccgctgttttgaaagagccataagtctctttccaatgtactatgacgccctttttaacctgcgcgacacatgcagggagcttacagattacagggcggcggcggaatttgaacgtattttgcaaggtatagggcgtgaagggggattacactga

SEQ ID NO: 35104 - protein, 99 aa, Unknown
  Obtained from environmental sample
  DOMAIN (29)...(62): Tetratricopeptide repeat
  misc_feature (1)..(99): Xaa is any amino acid
MGLIYYELEQFDSAEECYQNALGRDSDSPKIWNNLGVLYFSQKDYEAARRCFERAISLFPMYYDALFNLRDTCRELTDYRAAAEFERILQGIGREGGLH

SEQ ID NO: 35105 - DNA, 933 bp, Unknown
  Obtained from environmental sample
  misc_feature (1)..(933): n is a, c, g, or t
gtgaagggggattacactgaaagccctttcatgccattggttccttgcaaaatgaaagtccaaaaagaattgaaaattctttacattgccgagatcgtaggcaaaacagggatttacgccctgaaaaaatgtctgcctgagcttaaaagcataaaaaagcccgatttgatcattgcctgcgccgatggcgcaacaggcggaaacggcctgggaaggaaccatgccgcttacatccggaaacttggagtacaggttataacaacgggcgaatgttgcttctataaaaaggatctgacagaaaatttcggaaaaattccatacgtactaagaccggataacctgaaccccgaagcccccgggcttggctcacggatttacaatattgggggggatgtttccgcatcaaaaaaagcggctgttgccgtgcttttaggccagagcggctttagtaggcttcacggcaataaccctttttcctcccttccagccctcatggaaaggctacgccaggaaaccccctttgtaattattgatttccactcccaggcaactgcggaaaaacagactttttttgccatggccgacggcctctgctccgcgattatcggctctcatacccgagttcagaccgccgatgaacgcgtccttcccggcgggaccgcagtcataaccgacgcggggcgcaccggcagcatggaatcagtcggaggaaacgacagggacagccgtataaaggagtacatttccggcattcccgactggactaaagatgcctgggaaaaaccggaactgcagggagtttttattgatattgccgaaaccggtaaggccctttcaattgagcgcgttcgcctaagcgccccgcatattaccgaaagcgggaatgacatacccgaagatgatgccgcaaatgcggagggcacccatgattga

SEQ ID NO: 35106 - protein, 310 aa, Unknown
  Obtained from environmental sample
  misc_feature (1)..(310): Xaa is any amino acid
MKGDYTESPFMPLVPCKMKVQKELKILYIAEIVGKTGIYALKKCLPELKSIKKPDLIIACADGATGGNGLGRNHAAYIRKLGVQVITTGECCFYKKDLTENFGKIPYVLRPDNLNPEAPGLGSRIYNIGGDVSASKKAAVAVLLGQSGFSRLHGNNPFSSLPALMERLRQETPFVIIDFHSQATAEKQTFFAMADGLCSAIIGSHTRVQTADERVLPGGTAVITDAGRTGSMESVGGNDRDSRIKEYISGIPDWTKDAWEKPELQGVFIDIAETGKALSIERVRLSAPHITESGNDIPEDDAANAEGTHD

SEQ ID NO: 35107 - DNA, 585 bp, Unknown
  Obtained from environmental sample
  misc_feature (1)..(585): n is a, c, g, or t
atgaaaaagtatacgcttttttttatctgctgtttggtgtcgcttattgtggtggtaaccgcttgttccccgggccttttagacctcgacgatgactcatccacgcggtcgttctctaatctcgacgttaactcgtcaacaccggagacctctaattgcgcctgttccgacccagccgttgacccttcatcgccgccatcctccggttccggcgctaatccgccatcgccgccacttcctggccccggcgtcaaaccgccatcgctgccacctcacgaccacgacgctaacccgccaccgccgccacctcacgaccacggagctaacccgccaccgccgccacctcatgaccacggagctaacccgccgccgccgcctcacgaccacggagctaacccgccaccgccgccatctcacggccctggcgttaaaccgcctgcaccgccatcctccggctccggcggtaacccatctgcaccgccttcctccggctcgggcgataatccgccaccgcaacaaggaaccgatactgagcagccgccagaaactgaagaaccctcagaggagatagaagtatgcaactaa

SEQ ID NO: 35108 - protein, 194 aa, Unknown
  Obtained from environmental sample
  SIGNAL (1)...(21)
  misc_feature (1)..(194): Xaa is any amino acid
MKKYTLFFICCLVSLIVVVTACSPGLLDLDDDSSTRSFSNLDVNSSTPETSNCACSDPAVDPSSPPSSGSGANPPSPPLPGPGVKPPSLPPHDHDANPPPPPPHDHGANPPPPPPHDHGANPPPPPHDHGANPPPPPSHGPGVKPPAPPSSGSGGNPSAPPSSGSGDNPPPQQGTDTEQPPETEEPSEEIEVCN

SEQ ID NO: 35109 - DNA, 525 bp, Unknown
  Obtained from environmental sample
  misc_feature (1)..(525): n is a, c, g, or t
atgatcagatcggccgagcccggtgcgcattttgtttacgataacggcagcactttccttgcctccgccatgtttacaaaggcgatgggtatcactgtgcgcgagtttttgcttgacgcgctgttccgtcccctggacattcccgatccccaatggccggaaagcaaggacggccacactgtcggcgccaccgatttggtactcgccacatctgaccttgcgcgtttcggccagtttctgcttcagcgcggccaatggcagggcaggcagttggtatcctccgcatggattgacaacgccggccgcccccagataaatacccgctcgcgcaggccggactgcggcattggctacggttttgggctttggccctgccgttacggggcgtaccgcgccgacggcaaaaaaggccaattcgtcgtggttcttcctcgtcaggacgcggtggttgcaattaattcaaacgaggaaaaaccttatcctattctttatgcagtttgggaagagattttgccgttactgtaa

SEQ ID NO: 35110 - protein, 174 aa, Unknown
  Obtained from environmental sample
  misc_feature (1)..(174): Xaa is any amino acid
MIRSAEPGAHFVYDNGSTFLASAMFTKAMGITVREFLLDALFRPLDIPDPQWPESKDGHTVGATDLVLATSDLARFGQFLLQRGQWQGRQLVSSAWIDNAGRPQINTRSRRPDCGIGYGFGLWPCRYGAYRADGKKGQFVVVLPRQDAVVAINSNEEKPYPILYAVWEEILPLL

SEQ ID NO: 35111 - DNA, 813 bp, Unknown
  Obtained from environmental sample
  misc_feature (1)..(813): n is a, c, g, or t
gtgggagcagccgctcccgccggagcatttaacacaagcgacggacagtattctttgcttgggcattttaatgtgctggttgcggaaaatgatatgaaacctgaatctgtaatgccaagcggatggcagaattcggcgtcatctcccgcttacaatgcatcccaatcataccgttggacagaagctgataaattggttaattatgcgctggcaaataacacaaaaatacgcggtcatgttcttttctggcatgaacagactcccgcagtcttttttaagacaggtaatttaacaagcgcttatgtttcaaaggaagtgttttatacccgaatggaacagcatgtaaaaaccgtttttcaaaaatacggcaacaaagttctctggtgggacgtagccaacgaaactgtaggagatgacggcaatcccagagttacaggcggagccaatgtcgcgggcagtgacggcaaatcgggttttacagcggtcatggaagcgtcgggtcttactggcgataaccgctatgagtggatagtaaacgcttttaaatatgcccgaaaatatgccgatgaaaacggaggaaaaaatgtaaaactcttccttaccgaatacgatattgaaaaaagttatgcctcaactaaaaaggacggatttctaagactgcttgattacctgattaaaaacggcactcctattgacggtgtaggcattcaaggtcataccagaatacaggaaagccaaggttatgtaaccggtcttggaagtctaattgaccaaattgcgaccaggaaaaatcctgtaacggaaaaaatctga

SEQ ID NO: 35112 - protein, 270 aa, Unknown
  Obtained from environmental sample
  DOMAIN (1)...(269): Glycosyl hydrolase family 10
  misc_feature (1)..(270): Xaa is any amino acid
MGAAAPAGAFNTSDGQYSLLGHFNVLVAENDMKPESVMPSGWQNSASSPAYNASQSYRWTEADKLVNYALANNTKIRGHVLFWHEQTPAVFFKTGNLTSAYVSKEVFYTRMEQHVKTVFQKYGNKVLWWDVANETVGDDGNPRVTGGANVAGSDGKSGFTAVMEASGLTGDNRYEWIVNAFKYARKYADENGGKNVKLFLTEYDIEKSYASTKKDGFLRLLDYLIKNGTPIDGVGIQGHTRIQESQGYVTGLGSLIDQIATRKNPVTEKI

SEQ ID NO: 35113 - DNA, 1059 bp, Unknown
  Obtained from environmental sample
  misc_feature (1)..(1059): n is a, c, g, or t
atgcttctgcgccggggacagatggtagcggctcacagtttaaaaatgggaacggtaattatcgaccagcgttcacggcagggatttaacacaggcgttttttatgaacgctatcttaatgaaaacataaaaaatactctgggacacttaaatctggaaatggatcttgcccatatccgcatgatagttgcatccagcggcgacgctcgtcttgttgcggatagaataggaaaagaattaaatgaaaattgcagaactattaaccgtgaagatttttttaagtttatagaaaaagtccgcaactacagcatagaagaaagtatgcgtgaattcggaataacttacgctgatgcggaaggtcttgttcttggtctcttggtgcttaagcttttccttgaacagacaggggcggcgaatatcgctgttccgcttgttacgattcgggacggctatcttgtcgatttagtttccggcgttgattcttctctgcaagatgaattcttttcgcagattatcgcttccgccgtcaatcttggccgtaaataccattttgatgaagcgcacggcaaacttgtcgccaaccattgcatgacattattcgacgctcttacaaaagaacacggtatgaacaggcgtcataggataatgctggagacagccgctattctgcacgatgtcggcacttacataaaagaatcgggtcatcaaaagcacggtcagtacatagtcgccaattcggaaatcttcgggcttcatcaggacgagcttggaataatcgccaacgtaataaactgtcatcgaggcgagactcccactcagtccgaccttgagtttatgacactccagcgagaggagcgagtccttgttctgaaaatggcttctattttaagggttgcggatgttttggatcgaggtcatactcagcaggtaaaaaaattcaccgtggaacgccggccggagacagtcgttcttcatgtcgataaagtttatgatctttcccttgagcttatgggtattgaagaaaaagngcggaatgtttcaagatgtatttggctataa

SEQ ID NO: 35114 - protein, 352 aa, Unknown
  Obtained from environmental sample
  DOMAIN (192)...(305): HD domain
  misc_feature (1)..(352): Xaa is any amino acid
MLLRRGQMVAAHSLKMGTVIIDQRSRQGFNTGVFYERYLNENIKNTLGHLNLEMDLAHIRMIVASSGDARLVADRIGKELNENCRTINREDFFKFIEKVRNYSIEESMREFGITYADAEGLVLGLLVLKLFLEQTGAANIAVPLVTIRDGYLVDLVSGVDSSLQDEFFSQIIASAVNLGRKYHFDEAHGKLVANHCMTLFDALTKEHGMNRRHRIMLETAAILHDVGTYIKESGHQKHGQYIVANSEIFGLHQDELGIIANVINCHRGETPTQSDLEFMTLQREERVLVLKMASILRVADVLDRGHTQQVKKFTVERRPETVVLHVDKVYDLSLELMGIEEKXRNVSRCIWL

SEQ ID NO: 35115 - DNA, 849 bp, Unknown
  Obtained from environmental sample
  misc_feature (1)..(849): n is a, c, g, or t
atgacgatcggcatattaaccaacagttttcagcgtatgagcaacgctttgaatatttttggaaagtttacaaaccgcgatattgccataaaggccatgagggggcatataaaaccgcgggggactgccgaaacacgcgactatcttttttcggatattcgcaattttaccgctatatccgaagtgttttcgaataatttcggaggggattcctccgaccgcattgttttctggcttaataactatcttacacagatggtggaatgtgtggaaaaaaccaacggagttgttgacaaatttatcggcgacgcggtaatggcgcattggggtaccgcttacagcgccggaagtccgcgcaaagacgcctttaattgtgtcatggctgcattgatgatgcgcaaggcgctttatgatttgaataacagccggagaagagacgatcacggcaaccctgctataaggatagggtgcggtataaatacgggcattgttaccgccggacaaattggttccgaactgcgcatggagtatactgttatcggcgatcccgtaaatatcgcgtccagggtcgaatcgcttaacaagcctcttggtacggatattctgataacggagaacacatggaatcttgtaggcagtaaatttattaccgaagaaatgccgccggtaacagtaaaaggaaaggaaaggcctctgcggttattcgcggttgttaatcatgttgacaatcataaagggccgtttacgcttgccgatctaagggagcttttggatattgagcctccggaaatgtcaaaggtagatgttaatgcatacgaagaaaagtatagaatcggcgcagccatataa

SEQ ID NO: 35116 - protein, 282 aa, Unknown
  Obtained from environmental sample
  DOMAIN (41)...(239): Adenylate and Guanylate cyclase catalytic domain
  misc_feature (1)..(282): Xaa is any amino acid
MTIGILTNSFQRMSNALNIFGKFTNRDIAIKAMRGHIKPRGTAETRDYLFSDIRNFTAISEVFSNNFGGDSSDRIVFWLNNYLTQMVECVEKTNGVVDKFIGDAVMAHWGTAYSAGSPRKDAFNCVMAALMMRKALYDLNNSRRRDDHGNPAIRIGCGINTGIVTAGQIGSELRMEYTVIGDPVNIASRVESLNKPLGTDILITENTWNLVGSKFITEEMPPVTVKGKERPLRLFAVVNHVDNHKGPFTLADLRELLDIEPPEMSKVDVNAYEEKYRIGAAI

SEQ ID NO: 35117 - DNA, 645 bp, Unknown
  Obtained from environmental sample
  misc_feature (1)..(645): n is a, c, g, or t
ttgaatccgaatttaagatttttactgagcggcataagcgctataaatacggattttttcgcggcaacatgggcgaacgtgaagccgttaattaacaaaacggcgggtattataaataaaatatttaaaagtgacttaagcatgcgatcgggatataccggaaaaaatgaaaccggaaaaactgttatgcgccagtctgtggcgtttacaaaattaaacagttctaacgcggtggtaattaccggtattgaatacgacagggtttttgagggaataaccgccactacaaggcgtaatatataccttaccgtcgcggtgttaagtttttccgtaatttttatgtggtttttctcaaaatcaatctctattccgataaaggcgttggctgtcgccgcgcggagcatcgaaggcggtgaatttaaaatagatttaaagcaaaaaagcaacgatgacgatcggcatattaaccaacagttttcagcgtatgagcaacgctttgaatatttttggaaagtttacaaaccgcgatattgccataaaggccatgagggggcatataaaaccgcgggggactgccgaaacacgcgactatcttttttcggatattcgcaattttaccgctatatccgaagtgttttcgaataa

SEQ ID NO: 35118 - protein, 214 aa, Unknown
  Obtained from environmental sample
  SIGNAL (1)...(21)
  misc_feature (1)..(214): Xaa is any amino acid
MNPNLRFLLSGISAINTDFFAATWANVKPLINKTAGIINKIFKSDLSMRSGYTGKNETGKTVMRQSVAFTKLNSSNAVVITGIEYDRVFEGITATTRRNIYLTVAVLSFSVIFMWFFSKSISIPIKALAVAARSIEGGEFKIDLKQKSNDDDRHINQQFSAYEQRFEYFWKVYKPRYCHKGHEGAYKTAGDCRNTRLSFFGYSQFYRYIRSVFE

SEQ ID NO: 35119 - DNA, 1011 bp, Unknown
  Obtained from environmental sample
  misc_feature (1)..(1011): n is a, c, g, or t
ttgttttgggattgggataaaagcgaatacttgaaagaacggcggaaacgccggaagctgacacaggcgtatgcggacaagaacaaaaaggttgtcgattttacgcacataccgtatttcgggaaaatgaagcttgacgctatttcaggcgaggcaatcgacaaatggctggactacatgattgcggagaaatacgagaattcaacaatcaacggctattacggaaccatgcagacaatgctgaaatgggcagccaagaagcggattatcgagcgcgatccgtttttggacgtggaaaggcttcttaacgaaaagaaggacaagaagattatcacccccgacgaattcaaggctttgttttccgacgattggaaaaaggtgtggaacaatgacttgctgctgtgtacggccaataagctggcggcattgaccggaatgaggtgttgcgaggtattaggattgcggggcgaattcgtttttgacgaccatatatttatctgcgcacagcacgatcataaatacggctaccgtgacactaagacaaaaataaagcaccatatccctttggccggggcggtagtcgccgatttgaaaaaactgaaaaaggtaaacggcgacggctatgtcttttcgctgaccgggggggacaagcccgtaaccggaaggcatatttacaacggcctaagaaaggcatttaagaacattggcattagcgaggaagaaattgaggaacgtgggcttaacgtccatgcgtggaggcatttctgcaatacggagctgcaaaaggcggggctgaccatacaaaaggtgcaggcggttacggggcacaagaccgaccggatgtcggaatggtacagccattttgacccgatggatttcgccgaagtaccgaagatacaggaaggctggctgtcgggcggatcgggggacgggcctgaaggcggcggggaatcaacgcgccctgtcgaattgcggattgtgaagcctgaaccggaacggaagatggcctag

SEQ ID NO: 35120 - protein, 336 aa, Unknown
  Obtained from environmental sample
  DOMAIN (101)...(295): Phage integrase family
  misc_feature (1)..(336): Xaa is any amino acid
MFWDWDKSEYLKERRKRRKLTQAYADKNKKVVDFTHIPYFGKMKLDAISGEAIDKWLDYMIAEKYENSTINGYYGTMQTMLKWAAKKRIIERDPFLDVERLLNEKKDKKIITPDEFKALFSDDWKKVWNNDLLLCTANKLAALTGMRCCEVLGLRGEFVFDDHIFICAQHDHKYGYRDTKTKIKHHIPLAGAVVADLKKLKKVNGDGYVFSLTGGDKPVTGRHIYNGLRKAFKNIGISEEEIEERGLNVHAWRHFCNTELQKAGLTIQKVQAVTGHKTDRMSEWYSHFDPMDFAEVPKIQEGWLSGGSGDGPEGGGESTRPVELRIVKPEPERKMA

SEQ ID NO: 35121 - DNA, 537 bp, Unknown
  Obtained from environmental sample
  misc_feature (1)..(537): n is a, c, g, or t
ttgtgggtaaaagcggaaggcgttatatacgacaagtttgacgaaagcatgatcgccaaggccgccgacttgcctgaaagctttgacaggtacgctgccggacaggatttcggtttgaacattactttcgtaaaaatcggctggcttggagatgcggttttcgtcctgggcgattacggcgcatacaacatgactacccaaagctttaacgaggaagtaaccgcaaggggcttgcttgattgcccggatagtatgggtatgcccgtttactgcgatccggctggcggcgagcgcatacaggaaattaccgggggcgttaaagctaataattccgtagacagcgggattgacttcatctgcgccaagatagaacgccgccaattttttgtttccgaaaaatgtaccggggtgctttcggagatttgggactattgcagggacgaggctgggcagattgtaaaggtcaacgatcactttcttgacgctttgcgttatgcggtattttccgatgtgcagcatggggtaatcctgtcgtga

SEQ ID NO: 35122 - protein, 178 aa, Unknown
  Obtained from environmental sample
  misc_feature (1)..(178): Xaa is any amino acid
MWVKAEGVIYDKFDESMIAKAADLPESFDRYAAGQDFGLNITFVKIGWLGDAVFVLGDYGAYNMTTQSFNEEVTARGLLDCPDSMGMPVYCDPAGGERIQEITGGVKANNSVDSGIDFICAKIERRQFFVSEKCTGVLSEIWDYCRDEAGQIVKVNDHFLDALRYAVFSDVQHGVILS

SEQ ID NO: 35123 - DNA, 627 bp, Unknown
  Obtained from environmental sample
  misc_feature (1)..(627): n is a, c, g, or t
atggggaatgagggaatggggacgagcgtaatttttaagcctacgactatacagcgaaaagctcttactttgattaagagtggggctaaacatattttattgtttggcggttcacgctctggtaagactacggtgctggttatggtgattatttttcgggctttgttttatgcggggtcacgacatcttatttgccgttatagggctaaagacgctcgttcatcggtactgcgggaaacgctgataccgtggcttgataataccattggaaaaaacggttatacctaccttgcccatgaaagtatgattactctttataacgggtcggagatttggattggggggctgggggacagagagcaagcggacaagatacttggtcacgaatattgcacgatttattttaatgagattagtcaactttcttatgcggcggttactactgcttattcacggctggctatgcggattaagggctgccgtaacctgtttttatatgactgtaatccgggttcgcctttgcattgggcttataaagtttttgtactgaaacggacttttctttccggcgaacctttagagaaacctgaactttatcaatcaatgttattaaacccngcaagataa

SEQ ID NO: 35124 - protein, 208 aa, Unknown
  Obtained from environmental sample
  misc_feature (1)..(208): Xaa is any amino acid
MGNEGMGTSVIFKPTTIQRKALTLIKSGAKHILLFGGSRSGKTTVLVMVIIFRALFYAGSRHLICRYRAKDARSSVLRETLIPWLDNTIGKNGYTYLAHESMITLYNGSEIWIGGLGDREQADKILGHEYCTIYFNEISQLSYAAVTTAYSRLAMRIKGCRNLFLYDCNPGSPLHWAYKVFVLKRTFLSGEPLEKPELYQSMLLNPAR

SEQ ID NO: 35125 - DNA, 354 bp, Unknown
  Obtained from environmental sample
  misc_feature (1)..(354): n is a, c, g, or t
atgtttcatgagttttttgatcttttgttcagctatttctctcctttccgcgtattcgcgtatttaacattcaggagcgcttttgccgcgcttactacgctgttaatttgctttatcttcggcggaaggattattgaatatttacgaaaattaaaaatcggtcagtctatacgcgaagacggtccgcagactcatcttgtaaaatcgggaacgccgactatgggaggaatatttataattctttccgtcgtaatcgccatgctgttctggggcgatttgcataataaatcaatctggatagcgatgggcgcgtttttagggttcggcgcaatcgggttatctcggccgatctga

SEQ ID NO: 35126 - protein, 117 aa, Unknown
  Obtained from environmental sample
  misc_feature (1)..(117): Xaa is any amino acid
MFHEFFDLLFSYFSPFRVFAYLTFRSAFAALTTLLICFIFGGRIIEYLRKLKIGQSIREDGPQTHLVKSGTPTMGGIFIILSVVIAMLFWGDLHNKSIWIAMGAFLGFGAIGLSRPI

SEQ ID NO: 35127 - DNA, 591 bp, Unknown
  Obtained from environmental sample
  misc_feature (1)..(591): n is a, c, g, or t
ttggaaggcactgaaattatctgggctgcgaaaaaagttcatttcgcccttcccgcaaaacacagtcttgacgacgctattgccgccatcgccatagcgaaagagattcctgtttcagataacgcgattattcgcgggctggaatccgttaagccgcttttcggcaggcttgaaatccttaatggacagcgtgcgacggtaatccgagattgttataacgctaaccctgagtctacggcaaagagcgttgaattctgcgattcgcttgagtggcccggaagaaaagtttatgtaattgccgacatgcttgaattgggcggcagttccgcgtccgaacatgaaaaattgggattccttttatcggtgtccggggcgaaaaaagtctttttgttcggcaatgaaattaaaaccgctctttccggcatggaagaaaacggcaagcctgttttttactcaaatgatattaacgaactgacagacgcgattaacggttatgtgaataaaggcgatcttgttctgcttaaaggttcgcggggatgcgcgcttgaaagattaaccgaaatgttaacgggggtaagcgatgtttcatga

SEQ ID NO: 35128 - protein, 196 aa, Unknown
  Obtained from environmental sample
  DOMAIN (53)...(135): Mur ligase family, glutamate ligase domain
  misc_feature (1)..(196): Xaa is any amino acid
MEGTEIIWAAKKVHFALPAKHSLDDAIAAIAIAKEIPVSDNAIIRGLESVKPLFGRLEILNGQRATVIRDCYNANPESTAKSVEFCDSLEWPGRKVYVIADMLELGGSSASEHEKLGFLLSVSGAKKVFLFGNEIKTALSGMEENGKPVFYSNDINELTDAINGYVNKGDLVLLKGSRGCALERLTEMLTGVSDVS

SEQ ID NO: 35129 - DNA, 1617 bp, Unknown
  Obtained from environmental sample
  misc_feature (1)..(1617): n is a, c, g, or t
atgccatcatcagaaaatttaccgggagtattttcctttgctcagcggcctgctgtagtggcagggagagtaggaggaaggccggtaggcagaaaatctcaccatgatacggatgtgccaagcagtcccccccaaaacaagtccggtttcggcagccatgctggcgcggcaggcaggaccgggaacaagcaaggacagtctaatttttcaaacgctccccggcaaggcggcggacgtttcggctacgctgctggtcatgagggcggacgtgccggcggtcacagtcccggtcatgccgccgggcatactgcctccccgcacggaagcccacggtcaggcggagccggaagggcgggttttgcgtcccgaccgggtataggacgcggcggacaagggggcgctccgcttcccagccctctacccgaaggtaaaacggcaaaacgcagctttaaagctaaaaaacccagttataaccgcaaggaaaaagaacttgagatggaggaaaaactcctccagaccaaaaagaaaatcacctatattgccaatccggtacccaaatccattgacataatggaagttatttccgtgtcagagttggcaaaaaaaatgaatctgaaagcatcggacctcatccaaaagttaatgaagatgggaatgatggttaccattaaccagcagatagacgccgatactgccacgatactggccggtgaatttggcgccgatgtgaagatcatcagcctgtacgatgaaacagttatagaaaccggatcggatgaaggcgcggaaatggtgccaaggccgccggttgtcaccgttatggggcatgtcgatcacggcaagaccaaactcctggacgccatccgcgaatccaatgtggtcgacacggagtcgggcggcattacgcagcacatcggcgcgtatcaggtacacaccaggcacggaagcatcacctttatcgatactcccgggcatgaggcctttgcgagtatgcgcgagcgcggcgcgaaagttacggatatcgtcgtgcttgtggtcgccgcggatgatggggttatgccgcagaccctggaggcggcgcgccacgcgattcaggcgaaggttccgatagtggttgcgataaacaagatggataaggccgacgccaatgtcgatcgcgtcaaacagcagctcgcggatcgccttgatcttctggctgaggactggggtgggaaaacgatatgcgtccctatctcggctctccagaaaaagggcattccggaacttttggacgccattttgctgcaagcggagatgctggagcttaaagccgatccgggcaaactgggcacgggttccgtgcttgaggcgcgcatcggcggcaagggtataactataaccgtgctttgtcaggcgggttccatgtctgtgggtgataattttgtagccggtgtacactacggcaggatccgcgcgatgtatactgatcgcggagagcgtgtcgataagatcggtccctcaatgtgcgtcgagatattggggtcttccggtttaccgcaggcgggggatcctctccatatagtcgagagcgaaaaacgcgcgcgcacgatctccgcaaagcggctctgccgatcctga

SEQ ID NO: 35130 - protein, 538 aa, Unknown
  Obtained from environmental sample
  DOMAIN (269)...(378): GTPase of unknown function
  misc_feature (1)..(538): Xaa is any amino acid
MPSSENLPGVFSFAQRPAVVAGRVGGRPVGRKSHHDTDVPSSPPQNKSGFGSHAGAAGRTGNKQGQSNFSNAPRQGGGRFGYAAGHEGGRAGGHSPGHAAGHTASPHGSPRSGGAGRAGFASRPGIGRGGQGGAPLPSPLPEGKTAKRSFKAKKPSYNRKEKELEMEEKLLQTKKKITYIANPVPKSIDIMEVISVSELAKKMNLKASDLIQKLMKMGMMVTINQQIDADTATILAGEFGADVKIISLYDETVIETGSDEGAEMVPRPPVVTVMGHVDHGKTKLLDAIRESNVVDTESGGITQHIGAYQVHTRHGSITFIDTPGHEAFASMRERGAKVTDIVVLVVAADDGVMPQTLEAARHAIQAKVPIVVAINKMDKADANVDRVKQQLADRLDLLAEDWGGKTICVPISALQKKGIPELLDAILLQAEMLELKADPGKLGTGSVLEARIGGKGITITVLCQAGSMSVGDNFVAGVHYGRIRAMYTDRGERVDKIGPSMCVEILGSSGLPQAGDPLHIVESEKRARTISAKRLCRS

SEQ ID NO: 35131 - DNA, 798 bp, Unknown
  Obtained from environmental sample
  misc_feature (1)..(798): n is a, c, g, or t
gtgtacaccggctacaaaattatcacccacagacatggaacccgcctgacaaagcacggttatagttatacccttgccgccgatgcgcgcctcaagcacggaacccgtgcccagtttgcccggatcggctttaagctccagcatctccgcttgcagcaaaatggcgtccaaaagttccggaatgccctttttctggagagccgagatagggacgcatatcgttttcccaccccagtcctcagccagaagatcaaggcgatccgcgagctgctgtttgacgcgatcgacattggcgtcggccttatccatcttgtttatcgcaaccactatcggaaccttcgcctgaatcgcgtggcgcgccgcctccagggtctgcggcataaccccatcatccgcggcgaccacaagcacgacgatatccgtaactttcgcgccgcgctcgcgcatactcgcaaaggcctcatgcccgggagtatcgataaaggtgatgcttccgtgcctggtgtgtacctgatacgcgccgatgtgctgcgtaatgccgcccgactccgtgtcgaccacattggattcgcggatggcgtccaggagtttggtcttgccgtgatcgacatgccccataacggtgacaaccggcggccttggcaccatttccgcgccttcatccgatccggtttctataactgtttcatcgtacaggctgatgatcttcacatcggcgccaaattcaccggccagtatcgtggcagtatcggcgtctatctgctggttaatggtaaccatcattcccatcttcattaa

SEQ ID NO: 35132 - protein, 265 aa, Unknown
  Obtained from environmental sample
  misc_feature (1)..(265): Xaa is any amino acid
MYTGYKIITHRHGTRLTKHGYSYTLAADARLKHGTRAQFARIGFKLQHLRLQQNGVQKFRNALFLESRDRDAYRFPTPVLSQKIKAIRELLFDAIDIGVGLIHLVYRNHYRNLRLNRVARRLQGLRHNPIIRGDHKHDDIRNFRAALAHTRKGLMPGSIDKGDASVPGVYLIRADVLRNAARLRVDHIGFADGVQEFGLAVIDMPHNGDNRRPWHHFRAFIRSGFYNCFIVQADDLHIGAKFTGQYRGSIGVYLLVNGNHHSHLH

SEQ ID NO: 35133 - DNA, 921 bp, Unknown
  Obtained from environmental sample
  misc_feature (1)..(921): n is a, c, g, or t
atggagaagctctccagcggctataggattaaccgtgcgggcgacgacgcggcgggactcgcgatttccgagaaaatgcgagggcaggttcgcggcttgacaatggcctcgaggaactctcaggacaccatctctctgatacagacggcggagggggcgttggcggagacgcaggacatcctacaaaggatgcgcgaattatccgtgcagtccgcaaacgacaccaataccgacgcggatcggtcggaactgcaggcggaggttacgcagttgcgttatgagatagaccggatcgcgaataccacggagttcaatacgaagaagcttttggagggcagcgccaagggcgtggccgacgaagttgtggggacgtcgcgtatgaacaacaactctcgggtcgccctcgactccacaaagaccaaggcaatgatggcgtcggtgtcgaacgacaagaattgggtgttcgacggggcctatatgcttataaagaccaaccaaacttttcaggatggcgacgcggtttactgcccaagcgattacaagcttgtggggccggatggaactgtttacagtttcagagaacttagcgagaatacgaacgttaagtccacggagttggaggcgggaaccataatcgcggacgggggtgcggtgactaaagtaaaaaacgtaggcgcaatcaaaaacgcctttacaacggatcccggaatgatagtgctaggcaacgctatcggcaatcacgaactcgctaacgtttacaaatcgagtattttagcctccggttcaaactttacgatactcgccggtaatgaggttgatatcgattatggtaccaccggcgttgacaaaatcgagtacacatccgaaggagagctcaaactcaccagtacggccggccttgatctcgtcatgaggccgtaa

SEQ ID NO: 35134 - protein, 306 aa, Unknown
  Obtained from environmental sample
  DOMAIN (1)...(141): Bacterial flagellin N-terminus
  misc_feature (1)..(306): Xaa is any amino acid
MEKLSSGYRINRAGDDAAGLAISEKMRGQVRGLTMASRNSQDTISLIQTAEGALAETQDILQRMRELSVQSANDTNTDADRSELQAEVTQLRYEIDRIANTTEFNTKKLLEGSAKGVADEVVGTSRMNNNSRVALDSTKTKAMMASVSNDKNWVFDGAYMLIKTNQTFQDGDAVYCPSDYKLVGPDGTVYSFRELSENTNVKSTELEAGTIIADGGAVTKVKNVGAIKNAFTTDPGMIVLGNAIGNHELANVYKSSILASGSNFTILAGNEVDIDYGTTGVDKIEYTSEGELKLTSTAGLDLVMRP

SEQ ID NO: 35135 - DNA, 1629 bp, Unknown
  Obtained from environmental sample
  misc_feature (1)..(1629): n is a, c, g, or t
atgataaactatcagaatatccccagtatcacctttatcaggaaactggaaaacgactggtatctcggcatcgtaacgcccaaagacgagtatttcacggaagtcaaaagagtaaggcttatcctcatattgctgggagccacgctgtcgttaatattcagcttcattctggctcatataattacggagaaacgaagagccgacaaaaagataaacgaagcggaaaaggcgatagtagccaaccgcgttaaatccgattttctggcaaagatgagccatgaaatacgttcgcctatgaatgtgattttgggtattgtcgaaatgcagctcgagaaaaaagacctgcctccggaaacattgatagcgctgagtaaaatgcagaattccggtcatttgctgcttaatataatcaacgacatactggacctttctaaaattgaatcgggcaagatggaattggtgacgagtaattatgatattccaagcctgatcaacgatacggtacagtttaacgttatacgttttgacagtaagcctattaattttgttttaaatattgatgaaaatattcctgtaagtttattcggcgaccacctgcgcatcaaacagatattgaataatatcctttccaacgcgttcaaatacacagatatgggagaagttgaactgtcgttttccgccgaggtttccggagcaggcaagcctgtaattcttgttttaaatgtaagtgataccgggcatggcatgactcaggaacagttagacaagttgtttgatgattacacgcggtttaatatagatcccaaacgtcaaattcagggcacaggcctgggcatgagcgttaccaaacgctttgttgacatgatgaaaggcgagattaccgttaaaagcgagcagggaaaaggcacggagattaatatacggataccgcagggttatgtcgattcaggcattttgggcaaggatggtacggaaaatctgcagaaattatgcgccgaaagagaggcaagggaaaacgccggcggaattatcagggagtatatgccctacggcaaagtattggtcgtggacgatatggagccgaatctttatgttaccaacatgattcttgccccttacggattgaaaatatccaccgccaaaagcggaaaagaggcgattgaaaaaattaataaaggcagggtttacgatgttatttttatggaccattatatgcctgaaatggacggtatggaaacaacaaaggtaatacgcggtcttgggtacaagaaccctattgtcgcgctgaccgctaacgccctggtcggacaagccaagatttttctggaaaacggctttaacgggtttcttaccaaacctattgatacgcgacagctcaacgcgacgctgaacaaatttgtccgtgacagttaccctgtcgaagttgtcgaagccgcccgaaaacttaaaaagcctgatgaagacgaagatgaagacgaggacgaaggcgaaggcgaaggcgaaggtggagatgaagacctgccggatttaagcggcgtgaaagcgctgattgtggacgatttcaagccgaatttgaacggtgaagccgccatgctcaaagattataagatagaggtggattgcctgtaa

SEQ ID NO: 35136 - protein, 542 aa, Unknown
  Obtained from environmental sample
  DOMAIN (83)...(149): His Kinase A (phosphoacceptor) domain
  misc_feature (1)..(542): Xaa is any amino acid
MINYQNIPSITFIRKLENDWYLGIVTPKDEYFTEVKRVRLILILLGATLSLIFSFILAHIITEKRRADKKINEAEKAIVANRVKSDFLAKMSHEIRSPMNVILGIVEMQLEKKDLPPETLIALSKMQNSGHLLLNIINDILDLSKIESGKMELVTSNYDIPSLINDTVQFNVIRFDSKPINFVLNIDENIPVSLFGDHLRIKQILNNILSNAFKYTDMGEVELSFSAEVSGAGKPVILVLNVSDTGHGMTQEQLDKLFDDYTRFNIDPKRQIQGTGLGMSVTKRFVDMMKGEITVKSEQGKGTEINIRIPQGYVDSGILGKDGTENLQKLCAEREARENAGGIIREYMPYGKVLVVDDMEPNLYVTNMILAPYGLKISTAKSGKEAIEKINKGRVYDVIFMDHYMPEMDGMETTKVIRGLGYKNPIVALTANALVGQAKIFLENGFNGFLTKPIDTRQLNATLNKFVRDSYPVEVVEAARKLKKPDEDEDEDEDEGEGEGEGGDEDLPDLSGVKALIVDDFKPNLNGEAAMLKDYKIEVDCL

SEQ ID NO: 35137 - DNA, 1632 bp, Unknown
  Obtained from environmental sample
  misc_feature (1)..(1632): n is a, c, g, or t
atgtgtttgacccaaatctttttttgcgttgaatatggcgaggaaattttaataatatgggacgcgattaccatgttttatatcacctatcttctcgtctacgacgtcatatatttccattttcgggacaggcaaaaaggggagaaggcggacctgcccatcggcagtatcctggttggcatggtattaggctatgtctgcgggcttatagacattctggataatattttgtttctgaatatctccatcgaactttttccgtacagcatctttgcggttcacacgggaatggcctttactttgtcacagcgcttcagcggaatgtacaaacgcctggaaaaatccaacatcatgctggaaatggcggtacaggagcgcacggtggaactggaaaggcagacgtcgatagccgttcaggcgagccgggccaaaagccagttcctcgcgaccatgagccatgaaatacgcacccccctgaacgcggtaatcggcctgtcggaaattgaactgcaaggcagtgatgcccgctgtgaagccggctctcaggccaacaggctgcctgactccagcagggaaaacataatgcagatacaccagtcaggcgcttcgcttttagggattatcaacgaaattctggatatttccaaaattgaatccggaagttttgagcttgttcccgccgaatatgataccgcgtcgtttattaacgatactgttaacctcaacatggtacggatcggctccaggcccattaactttgttctgaaaataaacggggattttccggcgaaacttataggcgatgaattgcgggtcaaacaggtgttgaacaatctgctttcaaacgcgattaagtataccgatgaagggactataaccctgaacatagcatggtctgcccattgtgccggaatgatcagattgatttttaccgtgcaggataccggtataggcatccgtgcggaagatatacggaaactgttcaccagctacgcgcagcttgataccggggctaaccggagaatcgaaggaaccggcctggggctttcgatcaccaaaaggctggttgaaatgatgggtggcagtatcagtgtggaaagcgaatacggcaaaggctcggtctttactgcggagattattcagggctacattgccgagggagagactggcagtttatccctcggggaagagaccgccgaagctctgcaaaatttccgttacattgccgaggaacagatcaacctatccggggaacaggctagcagtctgtcccctggtaaggaacttttgtggatgccccacgttcaagcgttggtagtggacgatctgccggcaaacctccttgtagcgcgtggtttgcttgctccctatggcttgcagatagacaccgccgcttccgggcgggaagccatagaattagttaagaaccataactacgatattattttcatggatcacatgatgcctgaaatggacggcgttgaaaccgctgcggctgttcgtaaaataaacggctatgaccataagcccattgttgcgttgacagctaacgccttgcggggaatgagagaattctacctggaaaatggctttcaggattacctttcaaaaccgatagccccgaagctttga

SEQ ID NO: 35138 - protein, 543 aa, Unknown
  Obtained from environmental sample
  DOMAIN (143)...(220): His Kinase A (phosphoacceptor) domain
  misc_feature (1)..(543): Xaa is any amino acid
MCLTQIFFCVEYGEEILIIWDAITMFYITYLLVYDVIYFHFRDRQKGEKADLPIGSILVGMVLGYVCGLIDILDNILFLNISIELFPYSIFAVHTGMAFTLSQRFSGMYKRLEKSNIMLEMAVQERTVELERQTSIAVQASRAKSQFLATMSHEIRTPLNAVIGLSEIELQGSDARCEAGSQANRLPDSSRENIMQIHQSGASLLGIINEILDISKIESGSFELVPAEYDTASFINDTVNLNMVRIGSRPINFVLKINGDFPAKLIGDELRVKQVLNNLLSNAIKYTDEGTITLNIAWSAHCAGMIRLIFTVQDTGIGIRAEDIRKLFTSYAQLDTGANRRIEGTGLGLSITKRLVEMMGGSISVESEYGKGSVFTAEIIQGYIAEGETGSLSLGEETAEALQNFRYIAEEQINLSGEQASSLSPGKELLWMPHVQALVVDDLPANLLVARGLLAPYGLQIDTAASGREAIELVKNHNYDIIFMDHMMPEMDGVETAAAVRKINGYDHKPIVALTANALRGMREFYLENGFQDYLSKPIAPKL

SEQ ID NO: 35139 - DNA, 1404 bp, Unknown
  Obtained from environmental sample
  misc_feature (1)..(1404): n is a, c, g, or t
gtgcatccgaaaaagacgaatccgcaaagaagatgggataaaatgcaaggatgtatgttggtatttatattattcctcgctaacatttatgtttttgcggcagataatgttcttgatattcgtattttgagggttgagttcaaaaaagaggaaccgaataattccttgaccacaggagacggaacattcacaaattatgacgaggaatattggaagagccatataaaatttgcagaaaattattataaaaaagcaagtgatggcaaggtttcaataaatgcggaaatttatccaaaaagcaaagaaccctacaaactggataaacacataatagactacaaccgcacaagccgtaaaaaaggcgaaaaactggctgagtttgattcttcaagagcggcggattatgcaagttttgtgaatgatgttttgaaactcgcaaaaaaagaccctgcgaacccgctttctttttccaaagagagagctattttgatagttcacgcaggtgcttcgcgccttgttgatggcggaaccttgggcagcagaggcgcaaacacccccggagattttatagatgcttatgttgacacaagctggggcgatttttggcgtggatttgaagctgagaacggcgatacaatcacctctgttatggtggtgagcgaaaccgcttcgcaagatggtttatattggggcattaacggaacaataacaagccaaatagggcgtgaacttgggcttccatattcttacgatgtggtgaaaggctattcaaggcttgggtattttgacggaatggattttgcgggcagcaatgccggcaatggtttttttcccagcttgccaagcgcgtggatgagagcatacagaggatgggcaaatgttaaggaaatcaataaaaaagagagcgttgaaatttgcgccgcaggttatgacaagtgcggctctgccacgcaaatagtgaaaattcccataaacagcaacgaatatattttgctggaaaacaggcaaagaacatatagagatgacgggaaaatttcaataaaaatagagggaaaatcagttgagattccagtagatagtctgagttctcttttctctaaaaaagaacccggagtaatagaatccatagaagaaatagatgctggcttgcctgcaagcggcatagttgcttggcacgtgaatgattggtatataagagaaattctctcttatggcgcagtaaatgcttggaatggcgacacttcaaaagaccatcaatttggcatatctttaattgaggcagatggaattttggggcttggcaaggaattcaagaatgggggagagagctttttttatttcggttctggcagcgatttaatcccgcacaaaagaaaaaaacaaacagataccacctgtcaataa

SEQ ID NO: 35140 - protein, 467 aa, Unknown
  Obtained from environmental sample
  misc_feature (1)..(467): Xaa is any amino acid
MHPKKTNPQRRWDKMQGCMLVFILFLANIYVFAADNVLDIRILRVEFKKEEPNNSLTTGDGTFTNYDEEYWKSHIKFAENYYKKASDGKVSINAEIYPKSKEPYKLDKHIIDYNRTSRKKGEKLAEFDSSRAADYASFVNDVLKLAKKDPANPLSFSKERAILIVHAGASRLVDGGTLGSRGANTPGDFIDAYVDTSWGDFWRGFEAENGDTITSVMVVSETASQDGLYWGINGTITSQIGRELGLPYSYDVVKGYSRLGYFDGMDFAGSNAGNGFFPSLPSAWMRAYRGWANVKEINKKESVEICAAGYDKCGSATQIVKIPINSNEYILLENRQRTYRDDGKISIKIEGKSVEIPVDSLSSLFSKKEPGVIESIEEIDAGLPASGIVAWHVNDWYIREILSYGAVNAWNGDTSKDHQFGISLIEADGILGLGKEFKNGGESFFYFGSGSDLIPHKRKKQTDTTCQ

SEQ ID NO: 35141 - DNA, 825 bp, Unknown
  Obtained from environmental sample
  misc_feature (1)..(825): n is a, c, g, or t
ttgttttcgcctggttttttggtacgcccggcttcccttgtttcaattgggttttggagtgaacatgcctttcaatatggcttttatcaaaacaggatgcagaacgcaggtctttctataaggccagtgagcggtataaccgcaagctggaatgcaaacataaaaaattatgagcaattaaagcatttttcttcgcaggtgaggcagaacatattgcttgaactggaggcttttgatttaactcttggtttggaatatccccttgtggcaccggacgataacggtgaattaaggctctctctttccgctgctctcggctcacatttaaatgcttcttatgccattgatgcaggcgatgcgtatttgagaaataattttaatttcagaaaatttagtttgataagacattccgcattaaatgagagttctttgggatatagcatagttcacgtccatttgggaagcataaatgagaaaagcaacggatggagcgtttttggtgagcaagaaaacgatttggaaactttaaaaaatacctttgtccttttggaaagatccagcaccaaagctgtgctctttgacttttccaattacagaggcgggcttagcatttcccaagagattcgcaggggaattgcctctttaaaaagtaggggtataaaagttgcggcttatacaaatgactaccgcccctctattatatttgccgcatctgctgcggataaaataattttacagccatccacatttgtgaacttcaaagggcttgccagcgaagttctttactacaaaggattattagaccggggttggcataaaatttga

SEQ ID NO: 35142 - protein, 274 aa, Unknown
  Obtained from environmental sample
  misc_feature (1)..(274): Xaa is any amino acid
MFSPGFLVRPASLVSIGFWSEHAFQYGFYQNRMQNAGLSIRPVSGITASWNANIKNYEQLKHFSSQVRQNILLELEAFDLTLGLEYPLVAPDDNGELRLSLSAALGSHLNASYAIDAGDAYLRNNFNFRKFSLIRHSALNESSLGYSIVHVHLGSINEKSNGWSVFGEQENDLETLKNTFVLLERSSTKAVLFDFSNYRGGLSISQEIRRGIASLKSRGIKVAAYTNDYRPSIIFAASAADKIILQPSTFVNFKGLASEVLYYKGLLDRGWHKI

SEQ ID NO: 35143 - DNA, 681 bp, Unknown
  Obtained from environmental sample
  misc_feature (1)..(681): n is a, c, g, or t
atggcaaatgatttttacgagttggaattaggcgacgtttacacagggcctttggatttgttgtatctcttgatgaaaaaagaggaaatttcctttgaaaaaatttccatagccaaaattgcagaccagtatttggagcatataagcgacccggaaaacatagatttatcttatgcgggggattttttagaccttgcgagccgcttgatggtgttgaaagcaagagagcttttgcctaaagatgaacagagcgatgaaaatatgctggattttgaaatagaacgcgaaacgcttataagacaaatgcaggaatatcaaaaatttaagcgggttgcacttggtttgcaggaattggaggataagaattttggcacttacgggcgcgggcgcatggaaaaaatatccagagattctcagcttgcggatgctaatatatggcagttgctcaaggctttccacaaaacattgcaagcccattcttacaacagcgtgcatacggtggaagttgacaatgtgaccattgaagatagggaacagcatataaacggttatcttgagcaacgcggcagagccatgttcgatgatttattagggaaagagaaagtgcctataatgactgcggttacttttatagcgatgctggaactcacaaagatagatagcatagctcggccgatctga

SEQ ID NO: 35144 - protein, 226 aa, Unknown
  Obtained from environmental sample
  DOMAIN (24)...(226): ScpA/B protein
  misc_feature (1)..(226): Xaa is any amino acid
MANDFYELELGDVYTGPLDLLYLLMKKEEISFEKISIAKIADQYLEHISDPENIDLSYAGDFLDLASRLMVLKARELLPKDEQSDENMLDFEIERETLIRQMQEYQKFKRVALGLQELEDKNFGTYGRGRMEKISRDSQLADANIWQLLKAFHKTLQAHSYNSVHTVEVDNVTIEDREQHINGYLEQRGRAMFDDLLGKEKVPIMTAVTFIAMLELTKIDSIARPI

SEQ ID NO: 35145 - DNA, 804 bp, Unknown
  Obtained from environmental sample
  misc_feature (1)..(804): n is a, c, g, or t
ttgggaggttgccaaggcctactccgtagccacgggcgagagggacgggcgcaagaccgtagatggagacaagatgacgccggatggcgtgtattttatgatcgggcgcagcacaggagcgagcttacgaatatttacgggccggcggcgttcatcctcgactatcctaacgaggacgacaggcgggagcggcgcacggggcacgggatatgggtgcacgggtcggagcgcggcaacattcccccgctcttcacgcaggggtgcgtggcggtcgccaatcaggacatcctcgacatcgccgcgactttcaagagcggctggccgggggtgcccgtcgtcatcgtgagcggcgaggaggacgccaagaagcacgtggcctccgtcgatttccaaaagctgaaggcgcggcgcgcggcggtcgtcgccgagcataacgcgaggcagagcgagtttgagggcatagtgacgggctggaagacggcgtgggaggcgagggacatagacacctattccaccttctacttcacctccggcttcatggacggctctatgaactggacggcgtttcgcgaccggaagaaggggctgttctcgtcgtactcggcgatatacgtggaccttagcgacatcacgctcaccgagtacactgacaatatggcgacggtcaagttctttcaggtgtacaacaccaacaggaacaaccgtatggagaacgctaagcggttgatattcaggagagatgatcaggggcagtggaaaatatacagggaaatacctttcccaaaagaggagcttctcttatga

SEQ ID NO: 35146 - protein, 267 aa, Unknown
  Obtained from environmental sample
  misc_feature (1)..(267): Xaa is any amino acid
MGGCQGLLRSHGREGRAQDRRWRQDDAGWRVFYDRAQHRSELTNIYGPAAFILDYPNEDDRRERRTGHGIWVHGSERGNIPPLFTQGCVAVANQDILDIAATFKSGWPGVPVVIVSGEEDAKKHVASVDFQKLKARRAAVVAEHNARQSEFEGIVTGWKTAWEARDIDTYSTFYFTSGFMDGSMNWTAFRDRKKGLFSSYSAIYVDLSDITLTEYTDNMATVKFFQVYNTNRNNRMENAKRLIFRRDDQGQWKIYREIPFPKEELLL

SEQ ID NO: 35147 - DNA, 903 bp, Unknown
  Obtained from environmental sample
  misc_feature (1)..(903): n is a, c, g, or t
atgatcgggatcctggacgcgccggtttacgtggcgcgcgcctcagtccacaccttcaaggccattatgcaggcgcggaagagtatcaggaaggcattgcaggcgcaaaaggacgcaagggtttttgcgctggtggagatactggcgccctgtccctcgggctggaaggtgagcccgcaggactgcgccgcctgggttgagaagaatgtattgccggtattttcgcttggcgaatttaaggatgaaacagcaagccgcaaaggcatttcccgcgcgcgcgcggccgcgagtgacgagcagatcgtttcagtgctcggactggacacgatagagccgcatttcgcgccggtcaatacgaaggccgcttcattgcgcgtgctctgcgcggggtttggcgggcaggggatcatgctgctggggcagatgctcgcgcatctggggatgcggcacgggctggaggtttcgtggctgccctcctatggtccggagatgcgcggcggcacggcgaattgttcggtggtcttttctgaagaggcggtcggttcccctgttgtggagcatccgaatctgctggtgatcatgaacgggccgtcactggataaatttctgcccgcgcttgttccgggcggggtgcttgtctgcaactcctctatcattgagcgcgcgccggagcgtgatgacgtgactatcatttccgttccggcaagcgagcttgcgctgcgtgccgggagtgagcgcgccgcgaatatcgtgatgttcggggtactggtttcctggtacggctcatttcatgaagaagcgtacagccatctgcttgcggagttttttacgtccggggcaatcctggagataaacgagaaagctttgcgcttgggcatggagtatgcgcaaagccttcggtga

SEQ ID NO: 35148 - protein, 300 aa, Unknown
  Obtained from environmental sample
  DOMAIN (132)...(294): Pyruvate ferredoxin/flavodoxin oxidoreductase
  misc_feature (1)..(300): Xaa is any amino acid
MIGILDAPVYVARASVHTFKAIMQARKSIRKALQAQKDARVFALVEILAPCPSGWKVSPQDCAAWVEKNVLPVFSLGEFKDETASRKGISRARAAASDEQIVSVLGLDTIEPHFAPVNTKAASLRVLCAGFGGQGIMLLGQMLAHLGMRHGLEVSWLPSYGPEMRGGTANCSVVFSEEAVGSPVVEHPNLLVIMNGPSLDKFLPALVPGGVLVCNSSIIERAPERDDVTIISVPASELALRAGSERAANIVMFGVLVSWYGSFHEEAYSHLLAEFFTSGAILEINEKALRLGMEYAQSLR

SEQ ID NO: 35149 - DNA, 432 bp, Unknown
  Obtained from environmental sample
  misc_feature (1)..(432): n is a, c, g, or t
atgatttcaagagcggttttaaaagcggacgatggatttacgtttatagaaacgataatcaccatcacaattatcctcatactttcggcagcggtcggcttttcagcgattaagtacgttgaaagggctagagtggcagcgtgccgaaatcaaatcgaaacattcaggcttgccctgcaatcttattttctggattgcgggctataccccacagaagcccaaagcctggaggctctgtgggaaaagccgatcttgtctccggctccggaaagctggagcggtccttacgttgacaggcagattcccaaagacccgtggggaaatgcttatgtttacaaaaaccccggcgaaaagaatttgccgtttagcattatgtcgcacggttcaagcgcaggaggagaaccaggcaatgaaattcattcgtgggactga

SEQ ID NO: 35150 - protein, 143 aa, Unknown
  Obtained from environmental sample
  DOMAIN (35)...(142): Bacterial type II secretion system protein G
  misc_feature (1)..(143): Xaa is any amino acid
MISRAVLKADDGFTFIETIITITIILILSAAVGFSAIKYVERARVAACRNQIETFRLALQSYFLDCGLYPTEAQSLEALWEKPILSPAPESWSGPYVDRQIPKDPWGNAYVYKNPGEKNLPFSIMSHGSSAGGEPGNEIHSWD

SEQ ID NO: 35151 - DNA, 738 bp, Unknown
  Obtained from environmental sample
  misc_feature (1)..(738): n is a, c, g, or t
ttgagcccgttttacccggtgatgttctttgacgcgctgcgggcaaacatccgggacgaaggccaggtgagcaagaaatcggtatatttggccttggcgatacggctggacggccaaaaagagcttttagggatgtggattgagaggaacgagggttcaaagttttggatggggatactgaacgagcttaagaaccgcggggtcaaagacgccctgatagcggctgtggatgggctcactgggtttccggaggcggtaaacgctgtctttccgaataccgaagtccagctttgcatggttcacatggtgcgcaattcggtaaaatacatttcgtacaaagaccgcaaggcggtaacatccgaccttaaggaaatttatcttgccccctcggaagaggccgccggcaatgccctggatcgcttcggcgaaaaatgggacggcaagtacccgaccatttccatgtcatggcggaacaggtggaacgaggtaatcccgtttatgaaattctcccccgagatacggaaggctatatataccaccaacgctattgagtctgtaaattacaatttgcaaaggaaccttaagacccgccagtcatttcccaacgacgaagcggccatgaaactaatatttatgatcttgcggaggatctcaaaaaagtggacaatgccgattaggaattgggcttcggcgttaaaccagtttgcgctcatttacggggacagagtcccgttatga

SEQ ID NO: 35152 - protein, 245 aa, Unknown
  Obtained from environmental sample
  DOMAIN (2)...(224): Transposase, Mutator family
  misc_feature (1)..(245): Xaa is any amino acid
MSPFYPVMFFDALRANIRDEGQVSKKSVYLALAIRLDGQKELLGMWIERNEGSKFWMGILNELKNRGVKDALIAAVDGLTGFPEAVNAVFPNTEVQLCMVHMVRNSVKYISYKDRKAVTSDLKEIYLAPSEEAAGNALDRFGEKWDGKYPTISMSWRNRWNEVIPFMKFSPEIRKAIYTTNAIESVNYNLQRNLKTRQSFPNDEAAMKLIFMILRRISKKWTMPIRNWASALNQFALIYGDRVPL

SEQ ID NO: 35153 - DNA, 330 bp, Unknown
  Obtained from environmental sample
  misc_feature (1)..(330): n is a, c, g, or t
atggaagaacgccggatcgtttgggatgaggccaagaacgctgacaacaagcgaaagcataaagtcggttttgaggtagctcaatatgtgttcactgatccgttgcggatatggcggtttgacaggagcgaaaaaaatacgtctggcgagcctcgttggcaaactatcggcaaggtcggaaaaactttctttgtggtctatacagagcaggaagaagagaatgaaaatgtaacccgccttataacggcgcgggaagctgagaaacatgagaggagaagttacaatgggcactatcaaatcgacagtaagggttggacaaaagatacctaa

SEQ ID NO: 35154 - protein, 109 aa, Unknown
  Obtained from environmental sample
  DOMAIN (8)...(97): Protein of unknown function (DUF497)
  misc_feature (1)..(109): Xaa is any amino acid
MEERRIVWDEAKNADNKRKHKVGFEVAQYVFTDPLRIWRFDRSEKNTSGEPRWQTIGKVGKTFFVVYTEQEEENENVTRLITAREAEKHERRSYNGHYQIDSKGWTKDT

SEQ ID NO: 35155 - DNA, 369 bp, Unknown
  Obtained from environmental sample
  misc_feature (1)..(369): n is a, c, g, or t
atgagaggagaagttacaatgggcactatcaaatcgacagtaagggttggacaaaagatacctaaagaaattctgaaactggcaaaagagcaggtaagagaagctcgaaaaatgcctaaggtttatgatcctgattgtccgccttcctcgccggaggctcttgccgaattcgcggctatggcgcgagaattacggaaaaacaaacgaaacccttcccccgtggttgcgttacgcgtcaagccggatgtcctttcaaagtataaggccctgggtaagggctataccggtatcatggccgatgtgctgaactatgttgccgataaccccgagatactttcaagggcctccggagtagtagttacccgataa

SEQ ID NO: 35156 - protein, 122 aa, Unknown
  Obtained from environmental sample
  misc_feature (1)..(122): Xaa is any amino acid
MRGEVTMGTIKSTVRVGQKIPKEILKLAKEQVREARKMPKVYDPDCPPSSPEALAEFAAMARELRKNKRNPSPVVALRVKPDVLSKYKALGKGYTGIMADVLNYVADNPEILSRASGVVVTR

SEQ ID NO: 35157 - DNA, 432 bp, Unknown
  Obtained from environmental sample
  misc_feature (1)..(432): n is a, c, g, or t
atgatcagatcggccgagccctgctaccgaaaagaactgcgccgttcgccgttggacacggtatatggacggacactgacttttgtcggcggcaaaatactggcaatcgccggggaaaaccggggcagcggcgctatacggcttattgagataaacggcagtacgctggaaatggccaagcagggcaatgatgatttgcagcccaacagccttatctgggtaaatggcagcgacctttacgccattaccgtaaatctcagcgatggaacgcttaatttgggccgttttaacgcggatttggcgttacaggcaaagtcaaaaattgccgtgcatcccaacgctacggtaagcatacagcagggcagccttttgacccaacgggcggacggcactgcggcgcttctgaatgcggcggatttaacggaaaaatag

SEQ ID NO: 35158 - protein, 143 aa, Unknown
  Obtained from environmental sample
  misc_feature (1)..(143): Xaa is any amino acid
MIRSAEPCYRKELRRSPLDTVYGRTLTFVGGKILAIAGENRGSGAIRLIEINGSTLEMAKQGNDDLQPNSLIWVNGSDLYAITVNLSDGTLNLGRFNADLALQAKSKIAVHPNATVSIQQGSLLTQRADGTAALLNAADLTEK

SEQ ID NO: 35159 - DNA, 612 bp, Unknown
  Obtained from environmental sample
  misc_feature (1)..(612): n is a, c, g, or t
gtggtgggatcggataaggacgcttcgctctatacatacgtgcagtcggttgtggagggcgtgcgctttaccggagagggggcgatgatcaagatcggcgggaaagagatttccatcggcgaggtgctcgatgtgtcgatgaacacggttggcgagagcggcagttacatcactccgtcgaacgcgctgtccatgataggtaagacggtaagggccaagtatgatgagatcaggcacaccgcttacgacatcgcggagggcgacgtaacgtacccgatacacgtgaacgcgccgcgcggcagtactgtcgaggtgcagattaaggacggtcgcggcgatgttatcgcgaccatgaagaaaacggcgaacgaattcggcgaagcggagttcgtttgggacgggctcacgtcggacggcgatgtcgccaccgccggcgtgtacaagatcgaagtggtcggctcggacaagaacaagaatctgtattcgtacacggagggcgtggtggacggaataacgggcctcaccggagacttccaaatgaaagtcaacggcgtggaggtgtcgcttagcgatattatcagtgtcactacaaccaaatcgtccgatacgtga

SEQ ID NO: 35160 - protein, 203 aa, Unknown
  Obtained from environmental sample
  misc_feature (1)..(203): Xaa is any amino acid
MVGSDKDASLYTYVQSVVEGVRFTGEGAMIKIGGKEISIGEVLDVSMNTVGESGSYITPSNALSMIGKTVRAKYDEIRHTAYDIAEGDVTYPIHVNAPRGSTVEVQIKDGRGDVIATMKKTANEFGEAEFVWDGLTSDGDVATAGVYKIEVVGSDKNKNLYSYTEGVVDGITGLTGDFQMKVNGVEVSLSDIISVTTTKSSDT

SEQ ID NO: 35161 - DNA, 825 bp, Unknown
  Obtained from environmental sample
  misc_feature (1)..(825): n is a, c, g, or t
atgcagcaggctttccgttttaaaataattttttccattaccgccaccatcctgtatttcaccctcagttggaccatacctcacagaatgataggcatgatggttttgggcaacgcccagcgaaatgaaattatcagtctgggaagcgattacataaagctggtctcatggacttttatccctatggcaatttcattttccatcggaaccagctttcgtgaaatttcccgcccgaaggttcccctgattatttccgccgcggcaaccctggtaaacacggcggggaattggatactgatatacggcaatctcggcgccccccgcctggaagtcaggggcgcggcttacgcgacaatcatagcgcgtgtttttgaacttgttgtttttcttgtttataccgcgaaggtcaaagctccgttttatgtcagaatcacaaggttttttaatatccattggaaattttttgtcgaggtattttataagtccggaatgatatttgtctccgaattgtcatggatcagttccgaaacaataatgaccgccatgtataaccgccggggaggcgcggaagtagtcgccggtatggcggccggttttacaatcgcgaatattttctttatgctttttggcgggatatggacagcttcgggagttcttgtcgggggcgcgctcggcgccggtaaacttgaagaggcacgcagccgcgccgcctggctaaaatccggcgccattgccgccggcgttattatcgcgatttttggggcaggtttttccgccctgataatccccgttttttttccaacctcagcgccgcggctcggttaa

SEQ ID NO: 35162 - protein, 274 aa, Unknown
  Obtained from environmental sample
  misc_feature (1)..(274): Xaa is any amino acid
MQQAFRFKIIFSITATILYFTLSWTIPHRMIGMMVLGNAQRNEIISLGSDYIKLVSWTFIPMAISFSIGTSFREISRPKVPLIISAAATLVNTAGNWILIYGNLGAPRLEVRGAAYATIIARVFELVVFLVYTAKVKAPFYVRITRFFNIHWKFFVEVFYKSGMIFVSELSWISSETIMTAMYNRRGGAEVVAGMAAGFTIANIFFMLFGGIWTASGVLVGGALGAGKLEEARSRAAWLKSGAIAAGVIIAIFGAGFSALIIPVFFPTSAPRLG

SEQ ID NO: 35163 - DNA, 627 bp, Unknown
  Obtained from environmental sample
  misc_feature (1)..(627): n is a, c, g, or t
ttgttgaagatgaccgcctcatggtcagagataaaaaccctctgcgatgaggcggttcgtttcaaaacggcgtccgtatgcatcccgccgtcgtatgtcaaacctgttttcgctgaatttgggaaagttttagttgtctgcacggtggttggttttccgttggggtatacctatacatccgtcaaagttaatgagaccggcctcgcgctggaaaacggagccggcgagattgacatggtaataaacgcgggcgacgtgaaaaacggcaattacgatttggttcaggatgaaataaaaaccattaagaaagtatgcgaaaaaaaaattctcaaggttattgtcgaaacctgttatctgaacgaagaagaaaaaatacggctctgcggcattgtcaccggggcgggggcggatttcattaaaacctcgacaggctttggcactgccggcgcgaccattgccgacgtaaagctgttcaaacagcacatcgggccaaaagttaaggttaaggccgcgggcggcataaaaacccgcgaggatcttgaagcgtttattcaggcgggagccgaccgcatcggcacaagctccgcggtaaaattgctttccggcggcattgcggctggatattga

SEQ ID NO: 35164 - protein, 208 aa, Unknown
  Obtained from environmental sample
  DOMAIN (1)...(202): DeoC/LacD family aldolase
  misc_feature (1)..(208): Xaa is any amino acid
MLKMTASWSEIKTLCDEAVRFKTASVCIPPSYVKPVFAEFGKVLVVCTVVGFPLGYTYTSVKVNETGLALENGAGEIDMVINAGDVKNGNYDLVQDEIKTIKKVCEKKILKVIVETCYLNEEEKIRLCGIVTGAGADFIKTSTGFGTAGATIADVKLFKQHIGPKVKVKAAGGIKTREDLEAFIQAGADRIGTSSAVKLLSGGIAAGY

SEQ ID NO: 35165 - DNA, 354 bp, Unknown
  Obtained from environmental sample
  misc_feature (1)..(354): n is a, c, g, or t
atgggtccttcaattatacttgtgacaagttacaaagaaaaagaaggcgagctttccatgattgcctcggataaaaaagaaatatataaaattacaacgcctgaattgccgcttggcaagggcgtagcgggtacgggcgacatgaccacggctgtatttttatcgcggtatcttgaaaccaaaaaccttaaaaaaacgcttgaactgtgtacagcgtcagttttcggcattttagacgccagttttaaagcggcggataaaaacgaaaaattgattgagcttaaaatcatcgacacccagcaggagcttgtctctccgtccaattcatttaaggcggaaaaaataaccgcgtga

SEQ ID NO: 35166 - protein, 117 aa, Unknown
  Obtained from environmental sample
  misc_feature (1)..(117): Xaa is any amino acid
MGPSIILVTSYKEKEGELSMIASDKKEIYKITTPELPLGKGVAGTGDMTTAVFLSRYLETKNLKKTLELCTASVFGILDASFKAADKNEKLIELKIIDTQQELVSPSNSFKAEKITA

SEQ ID NO: 35167 - DNA, 831 bp, Unknown
  Obtained from environmental sample
  misc_feature (1)..(831): n is a, c, g, or t
atggaacgccttgccggcaaagcacgccgatatgtgacgcttgacgatattaaagcaagaatgctggcgaaaactgaccctcaaaggtttattgacgaaaaccctccgcccgtgataatagacgaggcgcaatatgcccccgagctttttacctacataaaaatctatgcggataaaaaaaagaaggacggtctttttctgctgaccggttcgcaaaaatacagtcttatgaagggtataaaggaaagccttgccggacgtgtggctattctcaatatgctcggtttctcctataaggaaataatcaagaaaccgaaagattcaacgccgtttctgccgtcgcttaatttgacaaaaaaagtttcgtcgggcagaccgttaacatcgcccgaagttttcaaattaatctggcaaggttcgtttccccgtataatcacaaataaaaacgcttccgccgcaagaaaactcttctatgattcatatatccagacttatatcgaacgagatgtaaaggatttttacaatatcgagaacgaaataaacttttataattttcttgtagcagcggcggcaagaacaggacagcttctcaattactccgatcttgcgcgcgatgttcacatagatataagaaccgcaaaattgtggcttgaaatccttgagcgttcctgtcttattcaactgctttatccttatagttcaaatatagcgaaacgcacaataaagactcccaaattgtattttctggacaccggacttgcgtcgcatttgtgttcatgggaaaccgcagatgcgctcagaaacggcgcacaaagcggagctatgctttga

SEQ ID NO: 35168 - protein, 276 aa, Unknown
  Obtained from environmental sample
  misc_feature (1)..(276): Xaa is any amino acid
MERLAGKARRYVTLDDIKARMLAKTDPQRFIDENPPPVIIDEAQYAPELFTYIKIYADKKKKDGLFLLTGSQKYSLMKGIKESLAGRVAILNMLGFSYKEIIKKPKDSTPFLPSLNLTKKVSSGRPLTSPEVFKLIWQGSFPRIITNKNASAARKLFYDSYIQTYIERDVKDFYNIENEINFYNFLVAAAARTGQLLNYSDLARDVHIDIRTAKLWLEILERSCLIQLLYPYSSNIAKRTIKTPKLYFLDTGLASHLCSWETADALRNGAQSGAML

SEQ ID NO: 35169 - DNA, 609 bp, Unknown
  Obtained from environmental sample
  misc_feature (1)..(609): n is a, c, g, or t
atgaagatagcccttgcaagcagcgacggaaaatttgtctcaaagcactttggcaacactccttcttttgtgattgccgaagcggacggcaaaaaatggacatacgtcgaaaaaagagacaactctcctgcttgcggcaaagacggtcacagtcaggagaactttaacgcaagcgtacagttaatatccgattgcgctgtggtcatatgctcccgcataggaaattttgcgcaagtaggtcttagagcaaagaatattgaacctgttgaaaagccgggatttatcgaagatatattagatgagtatgttaagtctcttgcgcgtaacgaacaacaaaaaaataaaaacaaacacccctgttttgatcattccgctcatgctaaatacgggcgtattcatttgcctgtaagcgcaaagtgcaatatcaagtgccgtttttgcgagcgaaacataaactcggacgaaatgtgcccaggcgtaacgtctcaaatacttacgccggaacaagcggtagaaacccttgctacagcgttggaactttgccccgaattgactgtcgcaggcattgccggtcccggcgacgcgctcgccgataattccgcgatttga

SEQ ID NO: 35170 - protein, 202 aa, Unknown
  Obtained from environmental sample
  DOMAIN (9)...(104): Dinitrogenase iron-molybdenum cofactor
  misc_feature (1)..(202): Xaa is any amino acid
MKIALASSDGKFVSKHFGNTPSFVIAEADGKKWTYVEKRDNSPACGKDGHSQENFNASVQLISDCAVVICSRIGNFAQVGLRAKNIEPVEKPGFIEDILDEYVKSLARNEQQKNKNKHPCFDHSAHAKYGRIHLPVSAKCNIKCRFCERNINSDEMCPGVTSQILTPEQAVETLATALELCPELTVAGIAGPGDALADNSAI

SEQ ID NO: 35171 - DNA, 534 bp, Unknown
  Obtained from environmental sample
  misc_feature (1)..(534): n is a, c, g, or t
gtgtttcaagacccgactctttttccatggctgaatatttacgaaaatatcgcgttcgggttaaagacgcggaatatttataaagacaaaaaaaatgacgttaagcattttataaaacttgtcgggcttaacggttttgaaaagtcctatcctcatcagttgtcgggaggcatggcgcaaagagccgcgctcgcaagagcgttagtgaaccacccgaaggtattgcttcttgacgaaccgttcggcgcgcttgacgcttttacccgtatgaatatgcaggacgagcttatcaatatttggaaagaacgcggaaccacaacgataatggtaacgcacgatgttgacgaggcgatatatctaagcgacaaaatatttgtaatgtcggcgcgccccgcaaaaatagaaagcgttatcgacgtacagcaaggtcgcccccgcgcgagggacgcgcctgattttctttatcttcgggcgaagatactgcaaatacttcattttgcgggaaagtccgaagacatacagtattatttgtaa

SEQ ID NO: 35172 - protein, 177 aa, Unknown
  Obtained from environmental sample
  DOMAIN (2)...(130): ABC transporter
  misc_feature (1)..(177): Xaa is any amino acid
MFQDPTLFPWLNIYENIAFGLKTRNIYKDKKNDVKHFIKLVGLNGFEKSYPHQLSGGMAQRAALARALVNHPKVLLLDEPFGALDAFTRMNMQDELINIWKERGTTTIMVTHDVDEAIYLSDKIFVMSARPAKIESVIDVQQGRPRARDAPDFLYLRAKILQILHFAGKSEDIQYYL

SEQ ID NO: 35173 - DNA, 534 bp, Unknown
  Obtained from environmental sample
  misc_feature (1)..(534): n is a, c, g, or t
ttggattatggccgagcatggtgtgattatatatctttgactgttggaatgaatacggatgtttgcaattatatgttcggcagtattttggctataaaacaagaagaaatgtatttgtgcgttgttatttctgttgtgatacttactttgttcgtatttttttacaataaaattttctctgtgatttttgatgagaactatgccaaagcgagcggaacgaacattgaattttacaatatgctacttgcgcttttaaccgctgttataatagttataggaatgcggattatgggagcgatgcttatttcaagtttgattatttttccagcactaacctctatgaggcttttgaaaacatttaagtcggttgttgtgtgctctgcctttctctctgttatttgcttttttgtgggaatggtaatttcatttgcttacaatgttccaacgggggctagcattgttgctgtgaatctgatttcgtttttagttttttgtttgatttcgtttcttaaaagaaaaaaggagttgctatga

SEQ ID NO: 35174 - protein, 177 aa, Unknown
  Obtained from environmental sample
  DOMAIN (1)...(168): ABC 3 transport family
  misc_feature (1)..(177): Xaa is any amino acid
MDYGRAWCDYISLTVGMNTDVCNYMFGSILAIKQEEMYLCVVISVVILTLFVFFYNKIFSVIFDENYAKASGTNIEFYNMLLALLTAVIIVIGMRIMGAMLISSLIIFPALTSMRLLKTFKSVVVCSAFLSVICFFVGMVISFAYNVPTGASIVAVNLISFLVFCLISFLKRKKELL

SEQ ID NO: 35175 - DNA, 774 bp, Unknown
  Obtained from environmental sample
  misc_feature (1)..(774): n is a, c, g, or t
gtgaacttctgtcacaacggcattatctaccctaaatgcggcgggctggagtatgacccgtcacggcaaacttgcaacgtcacagaaattgttgatatagtcggtaaacctaaatgcaacgggcttgaatacgatgccgctgcgagcttctgctacagtaataccatatacgccaaatgcggcggattggagtatgacccgtcgcggcagacatgtaacggtacgacgattgtcaatattccgccggatacgccgccaaaaaccaaattcttcgtctacttcaacgcaaacggcgggatggaaggctcggatccccccaaaacaatggaagcggactccggcagcagcataaaaattccgggtcagcaaacggtatcgagaaccggctacacgttcgacgggtggaatacaaacgcgagcggcaccggaaccacttataccgcaaattggttttacaccgttaacggcgacgtcaccctttacgctaagtggacgtcgacatcaacaacaaacacaacgtacacgctaacgaccagtgtgagcccgtcaggcggcgggacggtgtcgcgcagcccgaatcagacaagttacacatcaggaacaagtgttacagtgacggcgacggcggcgagcggttacacgtttactgggtggtcgggggcgtcgacgtctacaagttcttccgtgacgattacaatgaatggcgacaaaacgctggcggctaatttccacagactgctacaaatacgtcgtacacgctcacgaccggcgtaa

SEQ ID NO: 35176 - protein, 257 aa, Unknown
  Obtained from environmental sample
  misc_feature (1)..(257): Xaa is any amino acid
MNFCHNGIIYPKCGGLEYDPSRQTCNVTEIVDIVGKPKCNGLEYDAAASFCYSNTIYAKCGGLEYDPSRQTCNGTTIVNIPPDTPPKTKFFVYFNANGGMEGSDPPKTMEADSGSSIKIPGQQTVSRTGYTFDGWNTNASGTGTTYTANWFYTVNGDVTLYAKWTSTSTTNTTYTLTTSVSPSGGGTVSRSPNQTSYTSGTSVTVTATAASGYTFTGWSGASTSTSSSVTITMNGDKTLAANFHRLLQIRRTRSRPA

SEQ ID NO: 35177 - DNA, 384 bp, Unknown
  Obtained from environmental sample
  misc_feature (1)..(384): n is a, c, g, or t
ttgggcgcggcaatggcggcatgtccggcgggctggcatttaccgacacgtgaggagtgggccgatttaactattgctgttggaggtaccggtacttatggtaccggcggtatggccggtaaggtgctgaaatcagcaagcggttggggtagtaacagtagttacaacggtactgatgcgtacggattttcagcgttgccaggcggccacaataggggccagaacctcgaactcggccacagcggctactggtggacggcgccggaggagggccctcgcaatttcacctactaccggtacatgagctacgacatcgactacgtgggcgaggacaacaacagcaatatattccacgcctattctgtgcggtgcctccaggactga

SEQ ID NO: 35178 - protein, 127 aa, Unknown
  Obtained from environmental sample
  misc_feature (1)..(127): Xaa is any amino acid
MGAAMAACPAGWHLPTREEWADLTIAVGGTGTYGTGGMAGKVLKSASGWGSNSSYNGTDAYGFSALPGGHNRGQNLELGHSGYWWTAPEEGPRNFTYYRYMSYDIDYVGEDNNSNIFHAYSVRCLQD

SEQ ID NO: 35179 - DNA, 747 bp, Unknown
  Obtained from environmental sample
  misc_feature (1)..(747): n is a, c, g, or t
atgggcaccatttatccagccagcccccccccttccggtcgttccctgcccctgccggcctggaccaaggacaccgtgccggtgaccgatggttccgaacggcagttgggcaaggatgccttcctgaccttgctcctgacccagcttcagaaccaggatcccaccagccccatggaaaacaccgacatggtggcccagttggcccagttctcccagttggagcagatagccaacgtggccaagagcattgactccatgaccggttacatgcaggcccagaaccagttccagaccctgaccatgatcggcaaggacgtcatggccgaaagcaaccaggtgggcttaaccaacggcaagcccgacgccaagaccgagatcatcaccaacgaaacctgcaaggtcacggtttacatcatcaacgccaagggcgagcgggtgcggaccattgaaatgggcaccctggagccgggcacgcacggtttcgtctgggaaggccgcaatgatggcggcagccaggttccggacgggaattacctcttccaggtcacggcccataacctgcagaaccaggtcttggaagacggcgtctatccccagatttcgggcaagatcaccgcggtttcctttgactcctccggccagcccgtcatccacatgggcaacgccgccatagccctgggccaggtcttgcagattttggaaagcggccgcctggccgccggcgacgcggcggccggttcaagctga

SEQ ID NO: 35180 - protein, 248 aa, Unknown
  Obtained from environmental sample
  DOMAIN (11)...(150): Flagellar hook capping protein
  misc_feature (1)..(248): Xaa is any amino acid
MGTIYPASPPPSGRSLPLPAWTKDTVPVTDGSERQLGKDAFLTLLLTQLQNQDPTSPMENTDMVAQLAQFSQLEQIANVAKSIDSMTGYMQAQNQFQTLTMIGKDVMAESNQVGLTNGKPDAKTEIITNETCKVTVYIINAKGERVRTIEMGTLEPGTHGFVWEGRNDGGSQVPDGNYLFQVTAHNLQNQVLEDGVYPQISGKITAVSFDSSGQPVIHMGNAAIALGQVLQILESGRLAAGDAAAGSS

SEQ ID NO: 35181 - DNA, 480 bp, Unknown
  Obtained from environmental sample
  misc_feature (1)..(480): n is a, c, g, or t
gtggatgtgaaaatttttccggagcggttgaacggcgacgttaacgccattccttccaagtcgcaggcgcacagggcgctcatatgcgcggctctggcggataaaccaacacacgtcgaatgtaacggcgagtctgaggatattttggcaacggcggcttgcttgtccgcccttggtgcggaaattgaacgcgagtcaggcgcttatgttgtgcgtcctttaaatcgggggccggaagggaacggcggcactgcaacgctgccctgcggggaaagcggcagtacgttccgattcatgctgccgatcgtcggcgcgctgggccggaaagtttcatttatcctgaaaggacggctgcctgaacgcccgctctcccctttgtacgaagagcttgtcggccacggagccgaattatcgccgcagggctccgtcccgtttactcaggcgggcggcttgcgccgggatgtatctcggccgatctga

SEQ ID NO: 35182 - protein, 159 aa, Unknown
  Obtained from environmental sample
  misc_feature (1)..(159): Xaa is any amino acid
MDVKIFPERLNGDVNAIPSKSQAHRALICAALADKPTHVECNGESEDILATAACLSALGAEIERESGAYVVRPLNRGPEGNGGTATLPCGESGSTFRFMLPIVGALGRKVSFILKGRLPERPLSPLYEELVGHGAELSPQGSVPFTQAGGLRRDVSRPI

SEQ ID NO: 35183 - DNA, 705 bp, Unknown
  Obtained from environmental sample
  misc_feature (1)..(705): n is a, c, g, or t
ttgagcgttgtcgccgggcattatcatttccacgccttcggccaacttgatcgtaccggtgacgtctgttgtgcggaaatagaattgcgggcggtagccgttctcaaagttcgtgtgacggccgctttcgtctttagtcaatacataaatgtggaccttgaagttggtgtggggagtgatggaaccgggggttgcaagaacttgaccgcgttcaacatctgttttctacgcgccgcgaagcagcaagcccacattgtggcatgcctgcgcatagtcaagcagcttgcggagcatatcaacgccagtcaccacaaattcgttggtctcgccaaagcatacgcgctgaacctggtcgctcagggacagtttgccgcgctgtatacggcgagcgggtacagttcctcggcttgcgatggcgaacacgtcttatatgggcatgaggaaaggttcgtcaacatcgcgggcggggtgcgggataaagtcatcgcaggccttcatcagttccattatcgccgtcgaggctttgtggcgtcgccttcaagggctttcagggcggagcctctgcctatgggggtcgtgtcgccggggaactggtatttggagagcaggtggcggatttccatcttgattatgtccagaagcttcgggtcgtcaaccatgtcaaccttgttcatgaacaccactatagtggggacgcttacctga

SEQ ID NO: 35184 - protein, 234 aa, Unknown
  Obtained from environmental sample
  misc_feature (1)..(234): Xaa is any amino acid
MSVVAGHYHFHAFGQLDRTGDVCCAEIELRAVAVLKVRVTAAFVFSQYINVDLEVGVGSDGTGGCKNLTAFNICFLRAAKQQAHIVACLRIVKQLAEHINASHHKFVGLAKAYALNLVAQGQFAALYTASGYSSSACDGEHVLYGHEERFVNIAGGVRDKVIAGLHQFHYRRRGFVASPSRAFRAEPLPMGVVSPGNWYLESRWRISILIMSRSFGSSTMSTLFMNTTIVGTLT

SEQ ID NO: 35185 - DNA, 630 bp, Unknown
  Obtained from environmental sample
  misc_feature (1)..(630): n is a, c, g, or t
atgtgtaaacaaatcgaaagcggcgcaaaacgcgcttatgcaatcgtcgggagggatagactgatgatactcttaatcgacaattacgacagtttttcctataacctgtaccagtgcataggctcaattgatcccgacattaaagttgtgcgtaacgatgaaatcaccgtggacgaaataaaaaaactctctccctcgcgcattgtaatctctcccggtcccggcaagccgtccgacgcgggtatttgtatcgaagttataagaaatctctattccatgtcgccgattatcggcatttgtctaggccatcaggcaattttcgaggcttttggcgggactgtctcttacgcaagccgccttatgcacggaaaatcatcggaagtaaaagttgacacaagcaaccccctgttcaaagggttgccgcaaaaaattcaggcggcgcggtatcattcgctggcgggaattaaatctacattgccggatgtcttgcgcgttatcgccgaaaccgccgacggcgaaattatgggagtgtgccataaagagtaccccatatatggcgtacaattccaccctgagtcaatccttacgccggaagggaagactattattgaaaattttatgaataattag

SEQ ID NO: 35186 - protein, 209 aa, Unknown
  Obtained from environmental sample
  DOMAIN (22)...(192): Peptidase C26
  misc_feature (1)..(209): Xaa is any amino acid
MCKQIESGAKRAYAIVGRDRLMILLIDNYDSFSYNLYQCIGSIDPDIKVVRNDEITVDEIKKLSPSRIVISPGPGKPSDAGICIEVIRNLYSMSPIIGICLGHQAIFEAFGGTVSYASRLMHGKSSEVKVDTSNPLFKGLPQKIQAARYHSLAGIKSTLPDVLRVIAETADGEIMGVCHKEYPIYGVQFHPESILTPEGKTIIENFMNN

SEQ ID NO: 35187 - DNA, 960 bp, Unknown
  Obtained from environmental sample
  misc_feature (1)..(960): n is a, c, g, or t
ttggtcaatatcaatgttgaaaatattaaagcggagtataaaagcggcgtcgaaaaacttgacgatttaaaaagcatgataaaaaacggagtgccccaacagccggaaaaggcgaaggtaaagtccgagctaaaatcgctgtttacaaaaaatgaatactgcgaaatggtaaaaaaggcaaaagggcatatcaaagagggcgatatttttcaggttgtgctttccaaccgttttgaggcggattttgaaggcagtctttttgacacctaccgcgtgatgcggacaataaacccgtcgccgtatatgttttatttcagcggaagcgatcttgaaatcgccggcgcatctcccgaaacgcttgtaaaattgcatgacggaaaattattcacctatccgcttgccggtactcgtccgcgcggcaaagacgacgacgaagattcggcgcttgaaagagaactgcttgcggacgaaaaagaacttgccgaacataacatgctggtagaccttggcagaaacgatttagggaaaataagcaaattcggaacggttaaagtagagaagtacatgtccattctgcgcttctcccatgttatgcatataggttcgactgtgagcggggaaatcaacgaaggaaaaacaggcttggacgcgataaacgccattcttccggcgggcactctttcaggcgctcctaaaatacgcgccatgcagataatcaatgaactggagcggaacaagcgcggcatttacggcggcgcggtcggttatcttgactttaccgggaatatggacacctgtatcgcgattcgaattgtgtacaagaaaaaaggtaaagtgtttatccgctgcggggcggggatagtcgcggacagcaatcccgaatccgagtatcaggaatgtgtaaacaaatcgaaagcggcgcaaaacgcgcttatgcaatcgtcgggagggatagactga

SEQ ID NO: 35188 - protein, 319 aa, Unknown
  Obtained from environmental sample
  DOMAIN (49)...(311): chorismate binding enzyme
  misc_feature (1)..(319): Xaa is any amino acid
MVNINVENIKAEYKSGVEKLDDLKSMIKNGVPQQPEKAKVKSELKSLFTKNEYCEMVKKAKGHIKEGDIFQVVLSNRFEADFEGSLFDTYRVMRTINPSPYMFYFSGSDLEIAGASPETLVKLHDGKLFTYPLAGTRPRGKDDDEDSALERELLADEKELAEHNMLVDLGRNDLGKISKFGTVKVEKYMSILRFSHVMHIGSTVSGEINEGKTGLDAINAILPAGTLSGAPKIRAMQIINELERNKRGIYGGAVGYLDFTGNMDTCIAIRIVYKKKGKVFIRCGAGIVADSNPESEYQECVNKSKAAQNALMQSSGGID

SEQ ID NO: 35189 - DNA, 357 bp, Unknown
  Obtained from environmental sample
  misc_feature (1)..(357): n is a, c, g, or t
atgccgcgcttgttccgctccagttcattgattatctgcatggcgcgtattttaggagcgcctgaaagagtgcccgccggaagaatggcgtttatcgcgtccaagcctgtttttccttcgttgatttccccgctcacagtcgaacctatatgcataacatgggagaagcgcagaatggacatgtacttctctactttaaccgttccgaatttgcttattttccctaaatcgtttctgccaaggtctaccagcatgttatgttcggcaagttctttttcgtccgcaagcagttctctttcaagcgccgaatcttcgtcgtcgtctttgccgcgcggacgagtaccggcaagcggatag

SEQ ID NO: 35190 - protein, 118 aa, Unknown
  Obtained from environmental sample
  misc_feature (1)..(118): Xaa is any amino acid
MPRLFRSSSLIICMARILGAPERVPAGRMAFIASKPVFPSLISPLTVEPICITWEKRRMDMYFSTLTVPNLLIFPKSFLPRSTSMLCSASSFSSASSSLSSAESSSSSLPRGRVPASG

SEQ ID NO: 35191 - DNA, 1332 bp, Unknown
  Obtained from environmental sample
  misc_feature (1)..(1332): n is a, c, g, or t
atgaaattgaaatatttttttgaaacctacggttgtcaaatgaacagcgccgaatcggcggcattggctcttgtttgcaaagaacgcgggtgggcgcaggcggataacagcgaagacgcggatatcattttgcttaacacctgttccgtgcggctgacggcggaaaaacgcgcccttgggcgtatcgctgattacgccggaattaaaaagaaacaaaaccgccgctttacgctggttgtcgcgggttgtatggcggaaaggttaggtgaaaagctaaaagaaaaatattcgcaggtggattatgttatgggaacatcagcccgctctgtttttcccctgatccttgaagctgtagaaaacggagtaaaagccgagtttgatctgaacgaaaagcctgttttctctttttccgattcgcacatggaagaaggacagtttcgcagttttgtcccaatcatgcacggttgtaacaatttttgctcttactgcattgttccgtatgtgcggggcagggaagtctcccgcgaccctcaaaatatcgcgcgggaaatcagtcttgtgggcgaaaggggagtgcgtgaagttactttgcttgggcagaatgtaaacagttatttttgggaagatgaaaagatggatttttcatcgctccttaaatatgccgcggcgcaggctgaaaaaagcggtgtaaagcggatacgttttctttctgcgaacccccgtaatttttcttatgaggcggttaaggtaatggcagaaaatcccgtcttctgccggcatctgcacctgcctgtccagcacggctcggacagcgtgctaaaggcgatgaaccgcggctactcggcggaacaatttctcgatttagtcggggaaatccgttcccgaatgcctgaaatcaccctttccaccgatattctcgtgggctttcccggtgagacggaagatgatgtcgaaaaaacccttaacttaatggagaaggtgaagttcctctattcatatatgtaccattacaatccccgtgaagggactaaggccttcgatatgcctgataaaatcgacgagaaagtaaaaaaagaaaggctttcccgtgtgattgctttacagaaaaagcataccgcagagcttttaaaaggcaggattggaaggacagaagttgtacttgtagaggggatttcaagaaaaaatgccgatgaattaataacaaggactgaaaaagacgaaatggttgtagttcccgggtcaaagtcattaatcggctcattcgccaggcttactctttcatctttaaagggaaatacattcagagcgaaggaggctttcagtttatcatga

SEQ ID NO: 35192 - protein, 443 aa, Unknown
  Obtained from environmental sample
  DOMAIN (377)...(441): TRAM domain
  misc_feature (1)..(443): Xaa is any amino acid
MKLKYFFETYGCQMNSAESAALALVCKERGWAQADNSEDADIILLNTCSVRLTAEKRALGRIADYAGIKKKQNRRFTLVVAGCMAERLGEKLKEKYSQVDYVMGTSARSVFPLILEAVENGVKAEFDLNEKPVFSFSDSHMEEGQFRSFVPIMHGCNNFCSYCIVPYVRGREVSRDPQNIAREISLVGERGVREVTLLGQNVNSYFWEDEKMDFSSLLKYAAAQAEKSGVKRIRFLSANPRNFSYEAVKVMAENPVFCRHLHLPVQHGSDSVLKAMNRGYSAEQFLDLVGEIRSRMPEITLSTDILVGFPGETEDDVEKTLNLMEKVKFLYSYMYHYNPREGTKAFDMPDKIDEKVKKERLSRVIALQKKHTAELLKGRIGRTEVVLVEGISRKNADELITRTEKDEMVVVPGSKSLIGSFARLTLSSLKGNTFRAKEAFSLS

SEQ ID NO: 35193 - DNA, 1167 bp, Unknown
  Obtained from environmental sample
  misc_feature (1)..(1167): n is a, c, g, or t
atgccttttggagtgtgcacgatgtcagaacaaagaaagtctctcgtgaaagagataaaatccggcgagcaaggaataagtgctctttgccgcaaatatggagtaagccgcccaacggcatataaatggatcagccgtagcgaatcaggctgttcaatggagaatatgagcaaggctccgttgaaaagcccctgcaagacatctgtttccgtggaagagatagtcaagcaggcaaggcataagcatccttgctggggcggtcgcaagctgaaagcatatttggagcgtgcaggcgaagcccatgttccttccgcaagcacgataacagcaatcctgcatcgcaacggtcttataagcaaggaggcaagccttgccgcgaaaccgttcaagcgttttgagatggatgcccccaatgacttgtggcagactgatttcaaagggcattttgctatggagaacggtagccgctgccatccattgactgtaacggacgacatgagccgcttcagcctatgcatatccgcgaaggacaatgagcggcttgccggcgtcaaagacagcttccgcttgctgttcatggagcatggccttcccaaagccgttctctgcgacaacggcaacccatgggggacaggtgccttttttggctacaccaagttcgaggtgtttttaatggattacggcgtgcttcccatacacggcaggccgctgcatccgcaaacgcaaggcaaagaagagcgattccacaggacattgaaaagagaactgctgtcaaggatttctatgagagacctgcaccatgcacagaaagaatttgacacattcaggttggaatacaacgaggagagaccgcattgcgccattggatacgccgttcccgccgacagatatagggatagcgacagggttgcgccagaaaaagtgcagaaatgggaatacccagaaaaaagccatgtccgcaaaatgagaaaaaatggctatataagttttggcaatggcctttattatctgtccgaggcttttgatggcattgagatagctttaataaaaactcaggatgacagccttattgatgtcatttacagaaatttcaggatagctgttattaatctgaaacaaagagtttttatttcaagaaaaataactagattagagaaaaatatgtaa

SEQ ID NO: 35194 - protein, 388 aa, Unknown
  Obtained from environmental sample
  DOMAIN (133)...(298): Integrase core domain
  misc_feature (1)..(388): Xaa is any amino acid
MPFGVCTMSEQRKSLVKEIKSGEQGISALCRKYGVSRPTAYKWISRSESGCSMENMSKAPLKSPCKTSVSVEEIVKQARHKHPCWGGRKLKAYLERAGEAHVPSASTITAILHRNGLISKEASLAAKPFKRFEMDAPNDLWQTDFKGHFAMENGSRCHPLTVTDDMSRFSLCISAKDNERLAGVKDSFRLLFMEHGLPKAVLCDNGNPWGTGAFFGYTKFEVFLMDYGVLPIHGRPLHPQTQGKEERFHRTLKRELLSRISMRDLHHAQKEFDTFRLEYNEERPHCAIGYAVPADRYRDSDRVAPEKVQKWEYPEKSHVRKMRKNGYISFGNGLYYLSEAFDGIEIALIKTQDDSLIDVIYRNFRIAVINLKQRVFISRKITRLEKNM

SEQ ID NO: 35195 - DNA, 504 bp, Unknown
  Obtained from environmental sample
  misc_feature (1)..(504): n is a, c, g, or t
atgaccggaaccaacgccgctttatcggtgactaacaaatcgtcttctcccgtttatataaggtacacggctaaaggactccccgttgaaggaaaagagcctgctctctcagaaggtctttcccttaccgttgaataccacgacgccaactacagggtaatcgctcccgaaagtttaaagttaggtgaagatatggaaatctccgtgcgcgtgcgtaatactttttcccagtccgtggaagaagccgctcttattattccccttcccgcatcatgggagattgtcaacacgcgcgttggcggcagcgtgtcttcatcgaactaccgttatcaggacataagggacgacagggtgatgacatactttaatcttaaccgtggcgaagaacgcgttataagtttcagggtaaacaaatcctatgaaggctctttcttcagaccggcaatacatgtttacgcgatgtatgatgagtcaataagggcgttaattcccggagtaaggtga

SEQ ID NO: 35196 - protein, 167 aa, Unknown
  Obtained from environmental sample
  misc_feature (1)..(167): Xaa is any amino acid
MTGTNAALSVTNKSSSPVYIRYTAKGLPVEGKEPALSEGLSLTVEYHDANYRVIAPESLKLGEDMEISVRVRNTFSQSVEEAALIIPLPASWEIVNTRVGGSVSSSNYRYQDIRDDRVMTYFNLNRGEERVISFRVNKSYEGSFFRPAIHVYAMYDESIRALIPGVR

SEQ ID NO: 35197 - DNA, 414 bp, Unknown
  Obtained from environmental sample
  misc_feature (1)..(414): n is a, c, g, or t
atgattatcattggctgctccttttttgtgagcgaccccgatgttacccgaatgaccattggcgtgcgactggccaccgtgctttacggctttgtggcagtaggcaccacgggctacacgattgacctgttgctgtcgggtgcgcgccagtcgcaacaattttttgtgttttctaaacactacgaaaccattgctcaacgcattgccgtagagatgcaccgcggcgtgactatgattgatagcaccggctggtacaccaaagaaaaccaaaaaattttgatgattattgcccgcaaaaccgaatcaaatgaaatttaccgcattataaaagatgtggataaagatgcttttctttcggtaggtaatgtgatgggcgtgtacggcaaagggtttgaggcgatacggacgaagtaa

SEQ ID NO: 35198 - protein, 137 aa, Unknown
  Obtained from environmental sample
  misc_feature (1)..(137): Xaa is any amino acid
MIIIGCSFFVSDPDVTRMTIGVRLATVLYGFVAVGTTGYTIDLLLSGARQSQQFFVFSKHYETIAQRIAVEMHRGVTMIDSTGWYTKENQKILMIIARKTESNEIYRIIKDVDKDAFLSVGNVMGVYGKGFEAIRTK

SEQ ID NO: 35199 - DNA, 708 bp, Unknown
  Obtained from environmental sample
  misc_feature (1)..(708): n is a, c, g, or t
gtgaataattcacttgttgacgacctgcaaataagcggtactaacagtatgtacaatggcaaccaaaccacctggagtgttacccctgccggctccggcgcttggtcaagtggtaataatgctgttgctaccgtgagtaacgcgggtgtggttaggtgtgttgctactggtagcgcagttataacgtacagtagagatgcaattgcctgcaaacgttctgttacacgtacagtcagttgcacactggatccgtgtaatccgtgttccagttcgtgcggttcctataaaacttgttggaacgggtccaccacttgtggtaactgtccacctgatccgtgtaatccgtgttccagttcgtgcggctcttataaaacttgttggaatggatccatcacttgcggcacatgtcccaccgatccttgtaatccatgttctagtagttgtagtacctataaaacgtgcgggaatggtactacgacctgcttagactgcccgccaactcagcgtatcaactgctggcgagatctattcataccatgccctacttgcccagtttcatttgagggaggtacttgcacttgccaccaagttgaagattatgattggaatggtacgatggtaggtttgtgctgtgtaagctggggccaatgcatgtcagacgctaatagctgccggtctcaatcggggaaatggatgtgcaatgattag

SEQ ID NO: 35200 - protein, 235 aa, Unknown
  Obtained from environmental sample
  misc_feature (1)..(235): Xaa is any amino acid
MNNSLVDDLQISGTNSMYNGNQTTWSVTPAGSGAWSSGNNAVATVSNAGVVRCVATGSAVITYSRDAIACKRSVTRTVSCTLDPCNPCSSSCGSYKTCWNGSTTCGNCPPDPCNPCSSSCGSYKTCWNGSITCGTCPTDPCNPCSSSCSTYKTCGNGTTTCLDCPPTQRINCWRDLFIPCPTCPVSFEGGTCTCHQVEDYDWNGTMVGLCCVSWGQCMSDANSCRSQSGKWMCND

SEQ ID NO: 35201 - DNA, 525 bp, Unknown
  Obtained from environmental sample
  misc_feature (1)..(525): n is a, c, g, or t
atggtttatagtaacagaatgcaggaactaacagaaaaaagagtgctggaaataatgacacgttacgggaacgatccccagcagctcattgccatacttctggacattcaggcagcttcaaacagaaattacgtggaacagcgatgggcggaactggcttcatcggttttaaatatcccgctttccaaaatttacgatgtgctgactttttacgccatgttcagcacaaaaccgcgcggcgaatttgtaatagaaatttgcaaaagcgcaccctgccatttttcaaacgccgaagaagttaagcgatggtttgaggaggcctcgggaatcaatattggagaaactactcaggacggcaggctctccctttcccgcaccagttgcatcggcgcttgcgacatagggccggcggtaaaaattggcgagcatgtgttcggaaacctgacggaggaaaaagtcagagcgctggtgaagtgctgcatagaaggaagagcggaggagctggaatcgttatgtcaaaactag

SEQ ID NO: 35202 - protein, 174 aa, Unknown
  Obtained from environmental sample
  DOMAIN (9)...(161): Respiratory-chain NADH dehydrogenase 24 Kd subunit
  misc_feature (1)..(174): Xaa is any amino acid
MVYSNRMQELTEKRVLEIMTRYGNDPQQLIAILLDIQAASNRNYVEQRWAELASSVLNIPLSKIYDVLTFYAMFSTKPRGEFVIEICKSAPCHFSNAEEVKRWFEEASGINIGETTQDGRLSLSRTSCIGACDIGPAVKIGEHVFGNLTEEKVRALVKCCIEGRAEELESLCQN

SEQ ID NO: 35203 - DNA, 1002 bp, Unknown
  Obtained from environmental sample
  misc_feature (1)..(1002): n is a, c, g, or t
ttgcatgtgggataccaaactaacggattacaagattaccagccggagctgtcccttttcgataacaagcgcgccgatattgtttccaatgtatttgaggcgttccgccgccagggcctgggcattgccgcccctattttcaaagccgactggaacgtgccgtcttactgggcggaaggacagtataagggcgaatttacttcccggggaccgtcatacctgcctgccgaacagccggaattgtgggaaaagtttgtaaactttacgcacggccaggtaatggagcttgtaacggggtacggcaggctggacattctatggttcgacgcgggctgggtaaaccgccggaacgggcaggatatccgcattgaggaattggtggaaaaagcgcgaaaggtgcagccgtggctcctgtccgccgaccgtacctgcggcggtatctgcgaaaactacgtaacgcctgagcaaagcgtaccaagcaagccccttaatgtgccctgggaaagctgcgtaagcatgggcaaaggcttcgcgtactcctacgacgataatttcaaatcgacaaaacgcttgataaggctgcttattgacatcgtgtcaaagggcggcaacctggcgcttaacgtcgcgccccagccggacgggcgtttgccctggcccgcgctgcgccgcatggcggaaatgggcgcctggcttaagcagtacggcgaggcgatttactgtacccgcgtttgcgccccctatgcatccggcaaatttgcctttacccaaaatgcggcaaagggcaaggtattcgctttttatctgggcgacggcgggtttacgcctgaattaaccataccttacagcgaaaaacctgttgttgcggtaaaaaacatgaccacaggcgggaatttgccttttaaggccaaaggcggcgagattgccgttaccatggatacatccgcaccctcatcgatggagagcttcggcggcgaatttatcgccgaagtgttgaactga

SEQ ID NO: 35204 - protein, 333 aa, Unknown
  Obtained from environmental sample
  misc_feature (1)..(333): Xaa is any amino acid
MHVGYQTNGLQDYQPELSLFDNKRADIVSNVFEAFRRQGLGIAAPIFKADWNVPSYWAEGQYKGEFTSRGPSYLPAEQPELWEKFVNFTHGQVMELVTGYGRLDILWFDAGWVNRRNGQDIRIEELVEKARKVQPWLLSADRTCGGICENYVTPEQSVPSKPLNVPWESCVSMGKGFAYSYDDNFKSTKRLIRLLIDIVSKGGNLALNVAPQPDGRLPWPALRRMAEMGAWLKQYGEAIYCTRVCAPYASGKFAFTQNAAKGKVFAFYLGDGGFTPELTIPYSEKPVVAVKNMTTGGNLPFKAKGGEIAVTMDTSAPSSMESFGGEFIAEVLN

SEQ ID NO: 35205 - DNA, 624 bp, Unknown
  Obtained from environmental sample
  misc_feature (1)..(624): n is a, c, g, or t
gtggctgataacgttattgacgacatgcatggatgtctggaagaagaaaactatgtgcgcccggaagatccgcaagttttaaagcggctggaatggttccaggaccagaaactggcgctgatgatgcactggggcatttattcccagattggcattgttgaaagctgggccatgagcgacggcgactcggactggagccgtcatggcgttgactgggatgtagattcccagtcgcttaagaggcaataccgggatttgtacaaatcttttaaccctatacggtttgagccggataaatgggcaaaggctgccgccaatggcgggtttaagtacctgatttttaccaccaagcaccacgacggcttttgcatgtgggataccaaactaacggattacaagattaccagccggagctgtcccttttcgataacaagcgcgccgatattgtttccaatgtatttgaggcgttccgccgccagggcctgggcattgccgcccctattttcaaagccgactggaacgtgccgtcttactgggcggaaggacagtataagggcgaatttacttcccggggaccgtcatacctgcctgccgaacagccggaattgtgggaaaagtttgtaa

SEQ ID NO: 35206 - protein, 207 aa, Unknown
  Obtained from environmental sample
  misc_feature (1)..(207): Xaa is any amino acid
MADNVIDDMHGCLEEENYVRPEDPQVLKRLEWFQDQKLALMMHWGIYSQIGIVESWAMSDGDSDWSRHGVDWDVDSQSLKRQYRDLYKSFNPIRFEPDKWAKAAANGGFKYLIFTTKHHDGFCMWDTKLTDYKITSRSCPFSITSAPILFPMYLRRSAARAWALPPLFSKPTGTCRLTGRKDSIRANLLPGDRHTCLPNSRNCGKSL

SEQ ID NO: 35207 - DNA, 318 bp, Unknown
  Obtained from environmental sample
  misc_feature (1)..(318): n is a, c, g, or t
atgcgtattctggtcggcggcatgaaccatgagtccaattcccttaaccccatcatcaccggtgaagaagactttgtggtctataggggaaatgaaattattgaaaaagggatgctccccggttattcgtccacagggataatcactacccttaaagaagccggagccgaaatcataccggcggttttatgccgcgcggttccaaacggcattatttcggcggatttttacaaaaagattaaggctgagttcattgaccgcgcggtacaagcgcgtaatgccggggctatgacggcgtatgcctctcggccgatctga

SEQ ID NO: 35208 - protein, 105 aa, Unknown
  Obtained from environmental sample
  misc_feature (1)..(105): Xaa is any amino acid
MRILVGGMNHESNSLNPIITGEEDFVVYRGNEIIEKGMLPGYSSTGIITTLKEAGAEIIPAVLCRAVPNGIISADFYKKIKAEFIDRAVQARNAGAMTAYASRPI

SEQ ID NO: 35209 - DNA, 519 bp, Unknown
  Obtained from environmental sample
  misc_feature (1)..(519): n is a, c, g, or t
ttgtcggataaggatttacggattaatgaacagattcgggtgcgggaagttcgtctcattcaggacggcggggaacgccaggggattatgacaactcaggaggcgcttgagatcgcacgggaatcgggtttggatctggtggaagttgctccacaggcggttccaccggtagttaaaatcctggattacggtaagttcaaattcgagaatgaaaaaagggttcgggattcaaagaagaagcagaaaatccttaaacttaaagaaattcggatgcagccaaaaatagatgatcacgatctggatttcaagtcaaagcatataaaggaatttcttgccgaaggcaacaaagtcaaggttacggtccggttcaggggccgggaacttgcgcataccgaactgggactggatgtcctcaaggatgttcttgcgcggattgagggagaatatgtgctggacaaaccgccggcaatggaaggccggtttatgtccatggtattgagtcccaagtccaaaaagtaa

SEQ ID NO: 35210 - protein, 172 aa, Unknown
  Obtained from environmental sample
  DOMAIN (3)...(78): Translation initiation factor IF-3, N-terminal domain
  misc_feature (1)..(172): Xaa is any amino acid
MSDKDLRINEQIRVREVRLIQDGGERQGIMTTQEALEIARESGLDLVEVAPQAVPPVVKILDYGKFKFENEKRVRDSKKKQKILKLKEIRMQPKIDDHDLDFKSKHIKEFLAEGNKVKVTVRFRGRELAHTELGLDVLKDVLARIEGEYVLDKPPAMEGRFMSMVLSPKSKK

SEQ ID NO: 35211 - DNA, 360 bp, Unknown
  Obtained from environmental sample
  misc_feature (1)..(360): n is a, c, g, or t
atgtcaagagcagttgacggttccaaaagaaaggaacaccgaaaaaaaatactcaaacaggcaaaagggttctgggggcgcaggcactcaaactataagaccgccaaagacgcggttaccaaagccctgttctatgcgtaccgggaccggcgggaccggaaaggcgattttcgcaagttgtggatcatcaggattaacgccgccgtccgtgaggaagggctttcctattcccggtttatcgccgggcttgacaaggcggggattatcatcaaccggaaggctctggcgcatcttgccgtagaagatgttccggcttttaaagcggttgttgccaaagtaaagactgcgctgggggcgtaa

SEQ ID NO: 35212 - protein, 119 aa, Unknown
  Obtained from environmental sample
  DOMAIN (2)...(109): Ribosomal protein L20
  misc_feature (1)..(119): Xaa is any amino acid
MSRAVDGSKRKEHRKKILKQAKGFWGRRHSNYKTAKDAVTKALFYAYRDRRDRKGDFRKLWIIRINAAVREEGLSYSRFIAGLDKAGIIINRKALAHLAVEDVPAFKAVVAKVKTALGA

SEQ ID NO: 35213 - DNA, 1611 bp, Unknown
  Obtained from environmental sample
  misc_feature (1)..(1611): n is a, c, g, or t
atgataagatttatccttatggttttggggacggcgctggcggcggtactcagcgccatcctgatccggattgtcaagggaaaacaaaaggccgacgctgaaaaacaaaaggccgacgcgatgttaaaagaagcggagggcctgatagaaaacatccatgtcatgcaaagaatccttaacagtcttgacgcgataatctacattaccaatccccaaaccggagaaataatatttatcaacgacaattcaaagaagtattataatgttgacgatagctgcatagggaagttatgccatgaggtttttcagcaagggctggactcaaggtgcggtttctgcccttgcttccagcttgataaaaatccggacaaagttattgaatggctggaattcagcgcggtgacaaaacgccactaccgtaataaagcctgttatatcacatggcttgggggcgagttggcgcatctgcggtattccgttgacataacggaactgtataaggcgaaagaacaggcggaaaccgccaaccacgttaaaagcgatttccttgcgaggatgagccatgaaatacgctcgccgatgaacgcgattttgggcattacggaaatgcagcttgaaaaagaggaacttccgcctgataccgcggaagcgctggataaggtgaacaattccggccatttgctgcttaacataattaacgacatactggatctttcaaaaatcgaatccggcaagatagaattgacgccggcgaattatgacgttgcaagcgtgatcaacgatgccgtacagtttaaccttntgcgtttcggaggcaaaccaattcaatttgttttaaacgtagatgagaatacgccggcaaaattattcggcgacgatattcgcattaaacaggtattgaataatcttctctccaacgcgttcaagtacacggattcgggacaggtatcgctgtcggtatccgtcgaagtcgctcctataaacattataacgcttgttttccgcgtgagcgataccgggcgcggcatgtctaaggatcaggtggcaaagctgtttgacgattatgcccgctttaacctggaaaccaaccggcaaattgaaggaacgggccttggcatgagcattaccaaaaactttattgatataatgaaaggagaacttaaagttgaaagcgagccgggaaaaggctctacgtttatcctcaggttaccgcaaggttatgttaattcggccgtattgggcaaggaaggcgtggaaaacctacaacagcataatcttgataaaaaaacaaaacaaaaaagagctcaaaaaattcaacgggaatatatgccttacggcaaaatattggttgttgacgatatggaaccgaatctttatgtcgctaaaggacttatgtccccgtacggattgtcaatagataccgccttaagtggggaaaaagcgattgaaaagattaaaaacgggcttgtttttgatattatctttatggatcattacatgccggaaatggacggaatggaaacgacaaaagcaatacgcgctcttggttataaggaaccgattatcgcgctgaccgccaacgctttggtaggacaggccgaggttttatga

SEQ ID NO: 35214 - protein, 536 aa, Unknown
  Obtained from environmental sample
  SIGNAL (1)...(18)
  DOMAIN (446)...(536): Response regulator receiver domain
  misc_feature (1)..(536): Xaa is any amino acid
MIRFILMVLGTALAAVLSAILIRIVKGKQKADAEKQKADAMLKEAEGLIENIHVMQRILNSLDAIIYITNPQTGEIIFINDNSKKYYNVDDSCIGKLCHEVFQQGLDSRCGFCPCFQLDKNPDKVIEWLEFSAVTKRHYRNKACYITWLGGELAHLRYSVDITELYKAKEQAETANHVKSDFLARMSHEIRSPMNAILGITEMQLEKEELPPDTAEALDKVNNSGHLLLNIINDILDLSKIESGKIELTPANYDVASVINDAVQFNLXRFGGKPIQFVLNVDENTPAKLFGDDIRIKQVLNNLLSNAFKYTDSGQVSLSVSVEVAPINIITLVFRVSDTGRGMSKDQVAKLFDDYARFNLETNRQIEGTGLGMSITKNFIDIMKGELKVESEPGKGSTFILRLPQGYVNSAVLGKEGVENLQQHNLDKKTKQKRAQKIQREYMPYGKILVVDDMEPNLYVAKGLMSPYGLSIDTALSGEKAIEKIKNGLVFDIIFMDHYMPEMDGMETTKAIRALGYKEPIIALTANALVGQAEVL

SEQ ID NO: 35215 - DNA, 810 bp, Unknown
  Obtained from environmental sample
  misc_feature (1)..(810): n is a, c, g, or t
gtgaaacgatttttgctaaaaaacttaaagattatagcccacaatgcaaagatgtcgtttgaagcgctctctacatacagggcggctacattgctcaagctatttataaacgcattcatgatcctgatttatatttttttgtggaaagccctttatggcgaaaactctgttgtgaacggatatggcctgaatgaattgctgctttttattatcctgctgcgtatgctgcgaaccatttatccgttccatatcagttccatgtatggctatatgataaaggacggctcgatagtatcatggctattgaaaccaacccatgtagaaatacgtttattgtcgcaggcaataggacaagccgcctataattttctattttgctgcattccgtcattggcgctggtttttatttttgtacgcattccgccaatcccctttacatcataccttatgctatttctttggataatcagcgcttttgtgttcgcatttatgctagaaataaatattggggttatgagttattacactgtaagcatttgggggattaataattttaagtcaacaattatcgcttttctggcgggcgaattactgcccctcagtttctaccctttaaggctatataaaattttggaactatttccatttgcctcgatatattatattccgatttctgtgtttgtcggagaatacaatggcccgctatggatgcctttatatattctatggttttccatcgttcttttcctgggaacatacttaatattatcaaagaaaatgataaaaaaaataatggttcagggaggctga

SEQ ID NO: 35216 - protein, 269 aa, Unknown
  Obtained from environmental sample
  DOMAIN (35)...(269): Protein of unknown function (DUF990)
  misc_feature (1)..(269): Xaa is any amino acid
MKRFLLKNLKIIAHNAKMSFEALSTYRAATLLKLFINAFMILIYIFLWKALYGENSVVNGYGLNELLLFIILLRMLRTIYPFHISSMYGYMIKDGSIVSWLLKPTHVEIRLLSQAIGQAAYNFLFCCIPSLALVFIFVRIPPIPFTSYLMLFLWIISAFVFAFMLEINIGVMSYYTVSIWGINNFKSTIIAFLAGELLPLSFYPLRLYKILELFPFASIYYIPISVFVGEYNGPLWMPLYILWFSIVLFLGTYLILSKKMIKKIMVQGG

SEQ ID NO: 35217 - DNA, 378 bp, Unknown
  Obtained from environmental sample
  misc_feature (1)..(378): n is a, c, g, or t
atgaagaaaaccagtgatgttacgctgatattaaccacgcatgatttggaggatatgtgcaaaatatgtgacagggcaatagtcatcaataacggagaggttttgcttgaaaaagacattgatttattattgttcttaaacaaccagcaaaagcggcttgtttttacaacagaaaatgaatctgcgccgccaataacctttgaaaaagatataaaggtatcatacgaaccacacaaaattatatgcgaacgagtcgaaagagaagaagtccaggaagtaattgctacagtaacaaaacagtgctttatattggatttaagcattgaagaaagcaattttaccgagattatcaaatcgtacttaaagagacaaccgtga

SEQ ID NO: 35218 - protein, 125 aa, Unknown
  Obtained from environmental sample
  misc_feature (1)..(125): Xaa is any amino acid
MKKTSDVTLILTTHDLEDMCKICDRAIVINNGEVLLEKDIDLLLFLNNQQKRLVFTTENESAPPITFEKDIKVSYEPHKIICERVEREEVQEVIATVTKQCFILDLSIEESNFTEIIKSYLKRQP

SEQ ID NO: 35219 - DNA, 519 bp, Unknown
  Obtained from environmental sample
  misc_feature (1)..(519): n is a, c, g, or t
ttgtttcacggttcaacacgggacggcctgactgaaaaatggaacagcgagcaccaaactacgccggaagcggtaacgtttcatcttcttttggcacaaatgctgaggaacggagcagagttcgctgtgctggaatcaagctcccacgggctttcaaaaaaaaccaaccgccttggggacgttgattttgacattggggtgatgacctgtgtaacgcacgagcatctggaattccacggaacatgggagcagtaccgcagcgataaggcggagcttttccgcgctctggacgcttcaccttccgcgcacaggaagcggggcttgcaggtgccctcctttggcgtagtcaacgccgacgacgcaagcgttgaatacttcgccgccgctaccgggaataaaacctattcgttcagtgtcaaaggagcaaaagcggatatttcagttaaaaaaatagaaagcgaagctgacggaaaccagtacgaggtttttgtttcttcaaaaggaaaagttattgtataa

SEQ ID NO: 35220 - protein, 172 aa, Unknown
  Obtained from environmental sample
  DOMAIN (5)...(172): Mur ligase middle domain
  misc_feature (1)..(172): Xaa is any amino acid
MFHGSTRDGLTEKWNSEHQTTPEAVTFHLLLAQMLRNGAEFAVLESSSHGLSKKTNRLGDVDFDIGVMTCVTHEHLEFHGTWEQYRSDKAELFRALDASPSAHRKRGLQVPSFGVVNADDASVEYFAAATGNKTYSFSVKGAKADISVKKIESEADGNQYEVFVSSKGKVIV

SEQ ID NO: 35221 - DNA, 555 bp, Unknown
  Obtained from environmental sample
  misc_feature (1)..(555): n is a, c, g, or t
ttgagaagaaccgtaaaaatagttattattgcaaacgaaatggaaactaatagcgctttttcccgccatatcggcgatttccttgacggcgcggtcgccgaaaaagccggaatcatcgaaatacggataggcacttccgctccggctccttttgccgcttttccctggcctgccgcttccgtcataaccgggctaaagtacgattcccgaaacgtcgttcccggcgatctctactttgccctgcccggtttgcacacggacggtcatggttttataccgcaggcagttgagcgcggggcactggcggtgatccaccaaaatgaatgcgccgaatttcgcgaggggattatttatatacgtgtaaaagattcccgctttgccatgtccccaatagcggacgctttttataatttcccgtcccgcaagatgggaattatcggcgttacaggcaccgaggggaaaagcaccaccgtttaccttatctaccagctcctcaaacttctgggacgaaaagccggttttgtttcacggttcaacacgggacggcctgactga

SEQ ID NO: 35222 - protein, 184 aa, Unknown
  Obtained from environmental sample
  DOMAIN (61)...(136): Mur ligase family, catalytic domain
  misc_feature (1)..(184): Xaa is any amino acid
MRRTVKIVIIANEMETNSAFSRHIGDFLDGAVAEKAGIIEIRIGTSAPAPFAAFPWPAASVITGLKYDSRNVVPGDLYFALPGLHTDGHGFIPQAVERGALAVIHQNECAEFREGIIYIRVKDSRFAMSPIADAFYNFPSRKMGIIGVTGTEGKSTTVYLIYQLLKLLGRKAGFVSRFNTGRPD

SEQ ID NO: 35223 - DNA, 582 bp, Unknown
  Obtained from environmental sample
  misc_feature (1)..(582): n is a, c, g, or t
atgtttgcgtgtccgccctgtaccagtaaatttctcccaagagaataccggggcattgcagaaaaattatttccccccgatggcttttccgacggcaaagagccctccgttgaagctgccggagcttttgccaacatacttggcattggggaggattacaagcggctctgggacaattataaatccggccttactgcggggaattttttggagcattttcagaataatctggatcttttaattcaaaagacctgggtggaaaaagcggacgaggcgcgaaaggaagacctgcaagatcaggttccgccttttatcgcgtttatagaaagcggggattacgccaaggctcttgaagaatttggcgcaatactggaagaactggcgtatctattctttagtacacagagccaaaaggacgattttgccgaatacgttttgcggattgatacgcaaatggggcttttttggtggtacgggggacagatcaacggcgtaaaaggagcgccctgggtaaaaagcgttgacagaaacgtgatttatgcccttctgctccttggtatatgctaccttacgaatttttaa

SEQ ID NO: 35224 - protein, 193 aa, Unknown
  Obtained from environmental sample
  misc_feature (1)..(193): Xaa is any amino acid
MFACPPCTSKFLPREYRGIAEKLFPPDGFSDGKEPSVEAAGAFANILGIGEDYKRLWDNYKSGLTAGNFLEHFQNNLDLLIQKTWVEKADEARKEDLQDQVPPFIAFIESGDYAKALEEFGAILEELAYLFFSTQSQKDDFAEYVLRIDTQMGLFWWYGGQINGVKGAPWVKSVDRNVIYALLLLGICYLTNF

SEQ ID NO: 35225 - DNA, 486 bp, Unknown
  Obtained from environmental sample
  misc_feature (1)..(486): n is a, c, g, or t
ttgcaagggttttcactgcgaaacgtagccttgcaaagtaaatgggaaaacttgtcgtggattgaatttcattcaaaaacattgcttgaactcaacaaagaattgccaacttatttggagagtgttccaaagagattaaaaaacacccttttggatattccgctaagaatttcaattttgtgcgatttgggcttggggcatttgagtttgggacgcttggcagaaactttgagcagcggcgaagcgcaaaggataaggcttgccgcactttgcacaggtcatttgaacggaattttgctctgcatagacgaacctgcaagtggcttgcacgaaaaggatattgaaaaattatggaacgtattgctccggttaaaagagagaggcaatactcttgccattatagaaaccacccgatgcttattaggcgagcggacaatgttattgaaatgggacctggcgcaggcgaggaaggtggcgaaatattga

SEQ ID NO: 35226 - protein, 161 aa, Unknown
  Obtained from environmental sample
  misc_feature (1)..(161): Xaa is any amino acid
MQGFSLRNVALQSKWENLSWIEFHSKTLLELNKELPTYLESVPKRLKNTLLDIPLRISILCDLGLGHLSLGRLAETLSSGEAQRIRLAALCTGHLNGILLCIDEPASGLHEKDIEKLWNVLLRLKERGNTLAIIETTRCLLGERTMLLKWDLAQARKVAKY

SEQ ID NO: 35227 - DNA, 456 bp, Unknown
  Obtained from environmental sample
  misc_feature (1)..(456): n is a, c, g, or t
atggatcagatcggccgagggtttattgaacttatgccccttggttccgccggaacattaaaacctgttcccggcggagaaatcgcggcgttgcttgaagaagcctatggacctcttacgcctttttccggcatccggggaaacggcccggctgtttattacagccttccggattttaccggaaagataggttttattaatgccctaagctgcagcttctgcgagacttgtaaccgcctccgcctgacttccgaaggattactaaagccctgtctcgcgaatgacctgtgcatagacttgagagaaatgcttcgttccagcgcttctgacggagaccttatacaggccgtcaacgaagccgtagcgaaaaagccgcagtttcactctctttcgaaagtgtacggcgcgtcttcggaggaaaagcacagcgccggtatgtcttgtatagggggatga

SEQ ID NO: 35228 - protein, 151 aa, Unknown
  Obtained from environmental sample
  DOMAIN (8)...(130): Molybdenum Cofactor Synthesis C
  misc_feature (1)..(151): Xaa is any amino acid
MDQIGRGFIELMPLGSAGTLKPVPGGEIAALLEEAYGPLTPFSGIRGNGPAVYYSLPDFTGKIGFINALSCSFCETCNRLRLTSEGLLKPCLANDLCIDLREMLRSSASDGDLIQAVNEAVAKKPQFHSLSKVYGASSEEKHSAGMSCIGG

SEQ ID NO: 35229 - DNA, 429 bp, Unknown
  Obtained from environmental sample
  misc_feature (1)..(429): n is a, c, g, or t
ttgttagtcgcaatgggaaaaattgtggcggtttgtaccagcccggaaaaagggacggcaaagcgtaacgtgggaagagccgaatttgtcgccggtcacggcatcgccggcgacgcccatgccggcccctggcacaggcaggtgagccttctttctcataataaaattgaggcttttcgattaaaaggggcccaagtagaagacggagcctttggggaaaaccttgtggtggaaggcattgatttcagcagtcttcccgtggggacggttcttgaatgtaatgacgtgcttttggaaatgactcaaattggaaaggaatgtcacagccattgcgccatctataaggtcatgggggactgcatcatgccccggaagggggttttcgcgaaggtctgcgtggcgggtttatcggcgtccgagacgaaatga

SEQ ID NO: 35230 - protein, 142 aa, Unknown
  Obtained from environmental sample
  DOMAIN (33)...(138): MOSC domain
  misc_feature (1)..(142): Xaa is any amino acid
MLVAMGKIVAVCTSPEKGTAKRNVGRAEFVAGHGIAGDAHAGPWHRQVSLLSHNKIEAFRLKGAQVEDGAFGENLVVEGIDFSSLPVGTVLECNDVLLEMTQIGKECHSHCAIYKVMGDCIMPRKGVFAKVCVAGLSASETK

SEQ ID NO: 35231 - DNA, 516 bp, Unknown
  Obtained from environmental sample
  misc_feature (1)..(516): n is a, c, g, or t
atgaaaatcccgggaaaagcctcctataaggtttggatcatcactgccagcgacaaaggttcaaaaggtgaaagaatagattcaagcggcccggttatccgggatattgccgtgtgcgcgggatacattgcggcaggctataccctgctttccgatgatcagacgacgctggaacaggaactcaggcgaatctgcgatgacgggctggcggatctcatacttactaccggaggcaccggtttttctcccagagattgtatgccggaagccactgccgcggtggcggaacggcttgtaccgggaattgccgaggccatgcgggccggaagtatgaagataaccaaacgggctatgcttagccgggctattgcggctatcaggaaaagcaccctcattattaacctgccgggaagccccagggccgcgcgggaaaatctggagtttatcattcccgaactgcagcatggactgggcatactcacaagcagggaagaggagtgcggagaaaagaattaa

SEQ ID NO: 35232 - protein, 171 aa, Unknown
  Obtained from environmental sample
  DOMAIN (12)...(155): Probable molybdopterin binding domain
  misc_feature (1)..(171): Xaa is any amino acid
MKIPGKASYKVWIITASDKGSKGERIDSSGPVIRDIAVCAGYIAAGYTLLSDDQTTLEQELRRICDDGLADLILTTGGTGFSPRDCMPEATAAVAERLVPGIAEAMRAGSMKITKRAMLSRAIAAIRKSTLIINLPGSPRAARENLEFIIPELQHGLGILTSREEECGEKN

SEQ ID NO: 35233 - DNA, 426 bp, Unknown
  Obtained from environmental sample
  misc_feature (1)..(426): n is a, c, g, or t
atggcngtatcgcgtaaagcggtacagatcgcggaatcattgaggccggattgcccgattgaccgcgaactgttaaaagccgccgcgcttctgcacgatattaaaagaacggaagaaaatcacgataaggcgggtttcaattatttacttaaatgcggttatccgcgtatcgctaatattgtactctcacatcataaactcgcgcctgaagatttggaaactttaaccgaaagcacaatagtcttttacgccgacaagcttatttgcgggacagaagaggtgactcttgaggaacgcttttcaaaaagcagtgaaaaatgcctgacacccgaagctcaagtctcgcacaagcttcaatatgatcaggcgaagagggcgcgggaattgattaattcttttctccgcactcctcttccctgcttgtga

SEQ ID NO: 35234 - protein, 141 aa, Unknown
  Obtained from environmental sample
  DOMAIN (2)...(90): HD domain
  misc_feature (1)..(141): Xaa is any amino acid
MAVSRKAVQIAESLRPDCPIDRELLKAAALLHDIKRTEENHDKAGFNYLLKCGYPRIANIVLSHHKLAPEDLETLTESTIVFYADKLICGTEEVTLEERFSKSSEKCLTPEAQVSHKLQYDQAKRARELINSFLRTPLPCL

SEQ ID NO: 35235 - DNA, 432 bp, Unknown
  Obtained from environmental sample
  misc_feature (1)..(432): n is a, c, g, or t
atgaaaatgacaatgcgctggttcggaccaggctacgatcccgtaactttagacaagatacggcagattcccggcattagcggagtaatcacaacactgtacggcgttccgcccggcgaagaatggaaaaaagaagaactgtcagcgctaaaaaaacaagttgaggataacgggcttgtaatcgcggggatagaaagcgtcaatgttcatgacgctataaaaaccgccggcaaagagcgcgatatgtatatcgaaaaatatatcaacacgctgaaaataatcgcgcaggcggatatacaccttgtttgttacaatttcatggcagtctttgactggacgcgctccgatttagcgaagccccgtcccgacggcgcttttgtaatggcgtatcaacaaaaactaatagacggagtaatcctcgtgccgatctga

SEQ ID NO: 35236 - protein, 143 aa, Unknown
  Obtained from environmental sample
  DOMAIN (1)...(143): D-mannonate dehydratase (UxuA)
  misc_feature (1)..(143): Xaa is any amino acid
MKMTMRWFGPGYDPVTLDKIRQIPGISGVITTLYGVPPGEEWKKEELSALKKQVEDNGLVIAGIESVNVHDAIKTAGKERDMYIEKYINTLKIIAQADIHLVCYNFMAVFDWTRSDLAKPRPDGAFVMAYQQKLIDGVILVPI

SEQ ID NO: 35237 - DNA, 717 bp, Unknown
  Obtained from environmental sample
  misc_feature (1)..(717): n is a, c, g, or t
ttggtcggttcccctgtagatgagcttgtaaaaataacaaaaaaacttgcgaaagacgttgacgtgctgggtcttaactaccatgagcctttatatcaggcttataccgccgcgataaataaacccatactcggcaccgagtgttatgaattttattcaagcgtaggaacaaattttgaggatgtctcggcaaaaaacccctggcgctttgttcttgagaataacaatgtaatcggccagtttatctgggcgggaattgattatcttggagaaagcccgtggccggtaaaaggctggacagcttcaattctggatatatgcggttttatgaagcctaacgcttttttcagaaaaagtatctggtcgaatgagccttttgtataccttgcgttttatgatcaggaacgtaaaccggattacgcgaggggacgctggtcgtttccgtcaatggcgtctcatcttaattttgatcattttcacggaagaaatgtgaaggccgcggtctttaccaactgcgaagaagtagaattgcgggttaacggaaaaaaaatgggacggcgcaggcttgcggattttgagaacggaataattgaatggccgcttgagtataacagcggcaatatggaaataaaaggatttaacaaaggtaaggaagtttgtttttatgttttaaaaaccgcaggccttccgcaaaaaataaaacttattccccgataa

SEQ ID NO: 35238 - protein, 238 aa, Unknown
  Obtained from environmental sample
  misc_feature (1)..(238): Xaa is any amino acid
MVGSPVDELVKITKKLAKDVDVLGLNYHEPLYQAYTAAINKPILGTECYEFYSSVGTNFEDVSAKNPWRFVLENNNVIGQFIWAGIDYLGESPWPVKGWTASILDICGFMKPNAFFRKSIWSNEPFVYLAFYDQERKPDYARGRWSFPSMASHLNFDHFHGRNVKAAVFTNCEEVELRVNGKKMGRRRLADFENGIIEWPLEYNSGNMEIKGFNKGKEVCFYVLKTAGLPQKIKLIPR

SEQ ID NO: 35239 - DNA, 561 bp, Unknown
  Obtained from environmental sample
  misc_feature (1)..(561): n is a, c, g, or t
gtgcattcgatgcggcacggcggctaccgtccaggagacagggttgtcgtcttcggggcgggaggcatcggcctggcggtagccctgacattgcgccaatatggggcaggcgaccttctcatgtttgaacccaatcccttgcgcttggagaccgccagagcactggggctgaacgcccttccttttggctccgacgttgtgaacgaaatatccggaaaaatggatggaggcgcggattgtgttttcgactgtgccgggcatcaatcggttatcgacgttctgccggacgctgtaaggatcaacggaagaatcgtcatcgtcgctgggtacaaaatacctcctcaaatggattttcaaaaaggtatgatgcgcgaattcaccatacaattcgtccgcaactgcacgaggcgagactttgagatcgcctgttcactcaccggcagagaacctggctatgaaaaactggtgaattacgctcttcccgtggaggaggcgcaaaaaggtttcgaccttctgagcgcccctggcgacgcggtcaaagtcatgttccgatttgaatag

SEQ ID NO: 35240 - protein, 186 aa, Unknown
  Obtained from environmental sample
  DOMAIN (11)...(148): Zinc-binding dehydrogenase
  misc_feature (1)..(186): Xaa is any amino acid
MHSMRHGGYRPGDRVVVFGAGGIGLAVALTLRQYGAGDLLMFEPNPLRLETARALGLNALPFGSDVVNEISGKMDGGADCVFDCAGHQSVIDVLPDAVRINGRIVIVAGYKIPPQMDFQKGMMREFTIQFVRNCTRRDFEIACSLTGREPGYEKLVNYALPVEEAQKGFDLLSAPGDAVKVMFRFE

SEQ ID NO: 35241 - DNA, 729 bp, Unknown
  Obtained from environmental sample
  misc_feature (1)..(729): n is a, c, g, or t
atgatgtcagcgccttgtaagcaggcttttgccgacgcggacatgaaaaaaaagtttgtcctttcttccgcgaattccattaacatatcacggcttataccgcaggcggcttattacgcggcggcggcgggaggagctacgggaggtactttttccgtcccgtccggcaatttcggaaacctgacagccggcctttacgcctggaagatgggcgctcctatcgggaaatttatcgcggcgacaaacataaacaaaacagtgcctgattaccttgaaagcgggagctacgaggagaggctttccaaagccacgctgtcaaacgcgatggacgttggcgctcccagcaactttgaacgcatggcggctcattttacatggggcgaaatgtgtaacattattatgggagcctcggtcagcgacgatgaaaccagggaaacaatttctgaagtattcacccgctatggctattaccttgatcctcacagcgccgtggcgtggaaggccgcggataaaataaaagaagccgggaaactggcgaaagaaaaagatctggcgattttttccaccgctcacccggcaaaatttgccgaaacggtagagccgcttacagggccggtgcctgttccggtttcgcttcaaaaggcgatggaacggactgtcgttgccaaagccattccggcgaaactggaagcattaaaagaaattttatcgaaagaaattttatcgtaa

SEQ ID NO: 35242 - protein, 242 aa, Unknown
  Obtained from environmental sample
  misc_feature (1)..(242): Xaa is any amino acid
MMSAPCKQAFADADMKKKFVLSSANSINISRLIPQAAYYAAAAGGATGGTFSVPSGNFGNLTAGLYAWKMGAPIGKFIAATNINKTVPDYLESGSYEERLSKATLSNAMDVGAPSNFERMAAHFTWGEMCNIIMGASVSDDETRETISEVFTRYGYYLDPHSAVAWKAADKIKEAGKLAKEKDLAIFSTAHPAKFAETVEPLTGPVPVPVSLQKAMERTVVAKAIPAKLEALKEILSKEILS

SEQ ID NO: 35243 - DNA, 1191 bp, Unknown
  Obtained from environmental sample
  misc_feature (1)..(1191): n is a, c, g, or t
atggttattgagcagaaatacgatcaggaaattctggacgatataaaccccctgaatcaactgcactacctaaataaaaataccagttccagaaaagtattccagtgcggttttgccgttgtggaacgcgggcgcggtgagatctttattctggtaacggtctatgacataaccgccagggtggaactgcagaaacggcttgaggaagagcaaaacaagcggcaggaagagatgcagtccgttttcgaacttattcaggttgatccggccgtatttggcgactttatggaagacattggacaggaattcgacgccattgacaaagtattaaagaataaagaactgtccacccatgaatcattggttaaaatttatcaatccgttcacgccataaaatccaacgcggtaatactgggattgaatgtgtttggcaacaaggtacataacatggaatccgtgataaaaaaactgcgtgaacagaaagaagaagtgccctttgttgaaatgctgaacctgaccatggatatagaaaaactttccaatgaacgggaagggttcaaagtggttattgaaaaactccagtcctataccaggggcggaggcgaagtcgccgtcagcaaaaaacaaaacgtgaccgtcctgattgagtctctcgccaaaaccgccgaaagggccgccgccgatatggaacgaaaagtaaaattaataagcggcgacgtggaagcggcggcgattgaccgcggccccaggcgcgttatgaaagagattctcatgcagttaatccgtaactccgtggcgcacggaattgaaccgcccaaagaacgcgttgccaaaggcaaaaaagaaaccggcattgtaaaacttacgattaaacttgtaaataatgttatcaacatagagttgagggacgacggcagggggcttgattacaaaaaaatcgccgaaaaagcggtacgcaataaaataatcagaaaagaagacgccaataataaaaatatgcttataaaagcgatatttgcgcccggattcagcaccgcggacaaggaagggatgcacgccggcaggggcatcggcctgaatctggttcgtgaccgcgtgaaagaagtaaacggcgcgattaagctgcgctccgagcccaacaaggggacggcgtttttaatcaccattcctgtggacagaagaaaaagatag

SEQ ID NO: 35244 - protein, 396 aa, Unknown
  Obtained from environmental sample
  DOMAIN (248)...(392): Histidine kinase-, DNA gyrase B-, and HSP90-like ATPase
  misc_feature (1)..(396): Xaa is any amino acid
MVIEQKYDQEILDDINPLNQLHYLNKNTSSRKVFQCGFAVVERGRGEIFILVTVYDITARVELQKRLEEEQNKRQEEMQSVFELIQVDPAVFGDFMEDIGQEFDAIDKVLKNKELSTHESLVKIYQSVHAIKSNAVILGLNVFGNKVHNMESVIKKLREQKEEVPFVEMLNLTMDIEKLSNEREGFKVVIEKLQSYTRGGGEVAVSKKQNVTVLIESLAKTAERAAADMERKVKLISGDVEAAAIDRGPRRVMKEILMQLIRNSVAHGIEPPKERVAKGKKETGIVKLTIKLVNNVINIELRDDGRGLDYKKIAEKAVRNKIIRKEDANNKNMLIKAIFAPGFSTADKEGMHAGRGIGLNLVRDRVKEVNGAIKLRSEPNKGTAFLITIPVDRRKR

SEQ ID NO: 35245 - DNA, 648 bp, Unknown
  Obtained from environmental sample
  misc_feature (1)..(648): n is a, c, g, or t
ttgaacaaacatatcgaagtaaaagataaccttcccggctctttcaacataggcaatgttcttgcggccatcctgacagtctccaatttgctaaatttaccgttatgcgaaattgttccgcatgtaagtaaattaaaaccggtacgcggaaggatgaccgccataaacaaggggcagccctttgaacttgtcgtggattacgcgcatacgccttcttcttttatggcgatattccccccgttaagagagcgtcttgataaatcaggcggcaggataatcagcgtattcggctccgccggagagcgtgacacgcaaaaacgcgctgaacagggaaaaatcgcaggctactactcggactttatcgttattacggacgaagacccccgtggagagaaaccaatggatattctggaagagatcgcaaggggagttgaaacaggcgaagaaagcgtaaaattcaggcgcgaagaaaatttgtttttaatacccgaccgcccaagcgcgattcggaaggcgctgagcatagcgcgtaaaggcgaccttgtccttcttttggggaaaggtcatgagaactcgattatatacgcggatcatgttatggcttacgacgagattgcggaggcggagaaggcattaggtgagatttaa

SEQ ID NO: 35246 - protein, 215 aa, Unknown
  Obtained from environmental sample
  DOMAIN (48)...(137): Mur ligase family, glutamate ligase domain
  misc_feature (1)..(215): Xaa is any amino acid
MNKHIEVKDNLPGSFNIGNVLAAILTVSNLLNLPLCEIVPHVSKLKPVRGRMTAINKGQPFELVVDYAHTPSSFMAIFPPLRERLDKSGGRIISVFGSAGERDTQKRAEQGKIAGYYSDFIVITDEDPRGEKPMDILEEIARGVETGEESVKFRREENLFLIPDRPSAIRKALSIARKGDLVLLLGKGHENSIIYADHVMAYDEIAEAEKALGEI

SEQ ID NO: 35247 - DNA, 885 bp, Unknown
  Obtained from environmental sample
  misc_feature (1)..(885): n is a, c, g, or t
gtgtataatttaaaggaacgttttttttatacacttggcgggcacagtctgaccatgccgttacggatcggttccataccattattgtattatattaaatccaaactaccggtagactgggatttcttaatcgtggaagaaagtgtcaaaaaaacacaggcttattcggcaattttcgcgcttttgtgctgcatcgcggcaatgtatttgcaatacatacccgtcgcgattttctgctttggcacatatatcgttcttcggctgaacaaactaccgccgtttcttgaaaaacacggcgggaaagtttttatagccctttctgcgttgatcatttgtttcggtatagccgtaaggatagttatgtacacaaaatgccgctcgctgtgggttgatgaggcgatgcttgccgagaacattgccgcgcgaaattggaggggattgctcgcgcaaccgttcggcaacggccaatcggcgcctgttttgtatgtgattgccgtaaaagcgatcggttccgttttggggtattcggagttttcgctgcgtatattttcatttctttcgtttttggggcttttggtttgcgaatggatgtttttgaaaaaggttctgaacgtagacgacataagaacagctgtcgctttgataataacgacggttgcgcctagttacgtttactattccaacgaactaaaaccctacatgagcgacgccttttttattgtccttgctatcttgttatacggcttttatacgcaaaacaagatatccattataaagttaaccgttttttatgcgttgattttgggttttagcaccccggcgatcttttttatcggccggatattgagccgcggagcttttggctactttacttggaaaaaataa

SEQ ID NO: 35248 - protein, 294 aa, Unknown
  Obtained from environmental sample
  misc_feature (1)..(294): Xaa is any amino acid
MYNLKERFFYTLGGHSLTMPLRIGSIPLLYYIKSKLPVDWDFLIVEESVKKTQAYSAIFALLCCIAAMYLQYIPVAIFCFGTYIVLRLNKLPPFLEKHGGKVFIALSALIICFGIAVRIVMYTKCRSLWVDEAMLAENIAARNWRGLLAQPFGNGQSAPVLYVIAVKAIGSVLGYSEFSLRIFSFLSFLGLLVCEWMFLKKVLNVDDIRTAVALIITTVAPSYVYYSNELKPYMSDAFFIVLAILLYGFYTQNKISIIKLTVFYALILGFSTPAIFFIGRILSRGAFGYFTWKK

SEQ ID NO: 35249 - DNA, 366 bp, Unknown
  Obtained from environmental sample
  misc_feature (1)..(366): n is a, c, g, or t
ttgctggatattcttgtcagaacaggaaaaataaccgacagggaatccgctttggccgccattatggaaagagaagataaaatgtctaccggtatgaagcacggtatcgcgattccccacggtaaaagcgcctctattccggatctggttgcctgcataggtatttccgaaaaaccggtagagtttgattcgctggatcatgagccatgcaggatttttatcatgaccctttcgccggtggaaaaaacgggaccgcatttgcaatttttagcggaggtctctctgctttttaaaagctccgaaaaacgcaaagaaattctgaatgccaaaactcccgaagaaatacaaaaaatactggcggaataa

SEQ ID NO: 35250 - protein, 121 aa, Unknown
  Obtained from environmental sample
  DOMAIN (1)...(121): Phosphoenolpyruvate-dependent sugar phosphotransferase system, EIIA 2
  misc_feature (1)..(121): Xaa is any amino acid
MLDILVRTGKITDRESALAAIMEREDKMSTGMKHGIAIPHGKSASIPDLVACIGISEKPVEFDSLDHEPCRIFIMTLSPVEKTGPHLQFLAEVSLLFKSSEKRKEILNAKTPEEIQKILAE

SEQ ID NO: 35251 - DNA, 513 bp, Unknown
  Obtained from environmental sample
  misc_feature (1)..(513): n is a, c, g, or t
atgcgcatcaaagataatttgattcttgatgacgaaggcagaacccttattctccgcggagtaaatctgggcggagattcaaagattccatatactgcgcccggcggtgaaatttctcccgattttcttgacagaaaaaaagaagtctcatttgttggcaggccgttcccccttgaggaagcggaaactcattttcgccgcttgaaaaaagcggggatgacttttttgcggtttcttgttacatgggaggctgttgaacatgaaggaccgggaatttatgacgaggcgtatttagcctatctgcgaaaaatactgcaagccgcggaaaaagaaggcatcagcgtctttatcgatcctcatcaggacgtgtggagcaggtggacaggcggagacggcgccccggcgtggacaatggaaaagattggaatggacttggagctgctcgaccgctgcggcgcggcattacaagacaacgttacgccgtatgccacgattcatcttacccaaaaatga

SEQ ID NO: 35252 - protein, 170 aa, Unknown
  Obtained from environmental sample
  misc_feature (1)..(170): Xaa is any amino acid
MRIKDNLILDDEGRTLILRGVNLGGDSKIPYTAPGGEISPDFLDRKKEVSFVGRPFPLEEAETHFRRLKKAGMTFLRFLVTWEAVEHEGPGIYDEAYLAYLRKILQAAEKEGISVFIDPHQDVWSRWTGGDGAPAWTMEKIGMDLELLDRCGAALQDNVTPYATIHLTQK

SEQ ID NO: 35253 - DNA, 504 bp, Unknown
  Obtained from environmental sample
  misc_feature (1)..(504): n is a, c, g, or t
ttgtacaccgcctgtgaagtcgacctgcagggtccgggcggctatagctatatgagaaagataaacgccctgaccggagccttggtttgggaacataaaatcaggtgcgcttacgatgtggacgtgaacgggggagccctgtccacgccggtggtcggccggggcccaatcaaggatttggtgatttttaacatttccaaggtcaacaacaccatggccggccaaatgctggcttttaaaaaatacgacggcgaattggcctgggagcttgactttccaagttacggctggagttccccggccctgacctatgcccgggacggccggccctaccttatccaatgcgattcggccggcctgatgcatctgattgatccagaaaccggggtcgttaaggattccttgcgcttgaacggcaacgtggaaggctcgccggtgatctttgacgatatgatcgtcgtgggcacccgggaaatgaagatttacggggtaaggcttttatga

SEQ ID NO: 35254 - protein, 167 aa, Unknown
  Obtained from environmental sample
  misc_feature (1)..(167): Xaa is any amino acid
MYTACEVDLQGPGGYSYMRKINALTGALVWEHKIRCAYDVDVNGGALSTPVVGRGPIKDLVIFNISKVNNTMAGQMLAFKKYDGELAWELDFPSYGWSSPALTYARDGRPYLIQCDSAGLMHLIDPETGVVKDSLRLNGNVEGSPVIFDDMIVVGTREMKIYGVRLL

SEQ ID NO: 35255 - DNA, 1254 bp, Unknown
  Obtained from environmental sample
  misc_feature (1)..(1254): n is a, c, g, or t
gtgaggcggcccggtgtttcaaaggccgaggtgcttgtcgcgcagtgggacgcgacggatcccgacgcggcggacatatcggcggtgttagtggaacgcagcagcaacacggcggcgaaaatcgaggtaaccacggacaaggacggtatggcgtactatgtagtgactacaacaaaaccgacggatcttggggcggtggtggcggtaacaaccaacgagctcggccccgtggttaaaaaccatagcggtacgcagaaccagttcgacatcacgttgacgacgggggagcagacggtttacgtagtagtggaagagagtgaatctggtaatgacgcgctcagcgtaaccgcgacaccggtgacggtcccgccgttccagtatgcggtgaagttcggtgcgggagccaacggttcggtgacagcggtgtcgagcggcggggcgtttgataatacggcgtcaggcggcctacttccgaatatcggcggcggtgtcaccaagaacgtgtcacacgggtcaaacgtgacgttcacagcggttcccacgcctgcgagtgggacgaccggcggaggtggcgcgacgggagattatatggttagcggctggacgattacgccagcggtgtcgccggtgtccggaacggatacttcgataacgctaaacgggaagcagcttgtgctgaaggacgtgattaaggattatacaaacgtagaggttacgttcgctgaatccttgtacacgatcacgtttgaggccggaacgggaaccggtagtaaggcttctgaacagaccggaaccggtgcaaatgcgtggaagctcacggcggcgcagttggcgagcacgggttttacgggagatcccggcacaccgtcgtttaccggttggaaaactaaggttggcggtgttgacgtgacggcggccacggtgtttacaaaggccgaggtgcttgtcgcgcagtgggacgcgacggatcccgacgcggcggacatatcggcggtgttagtggaacgcagcagcaacacggcggcgaaaatcgaggtaaccacggacaaggacggtatggcgtactatgtagtgactacaacaaaaccgacggatcttggggcggtggtggcggtaacaaccaacgagctcggccccgtggttaaaaaccatagcggtacgcagaaccagttcgacatcacgttgacgacgggggagcagacggtttacgtagtagtggaagagagtgaatctggtaatgacgcgctcagctaa

SEQ ID NO: 35256 - protein, 417 aa, Unknown
  Obtained from environmental sample
  misc_feature (1)..(417): Xaa is any amino acid
MRRPGVSKAEVLVAQWDATDPDAADISAVLVERSSNTAAKIEVTTDKDGMAYYVVTTTKPTDLGAVVAVTTNELGPVVKNHSGTQNQFDITLTTGEQTVYVVVEESESGNDALSVTATPVTVPPFQYAVKFGAGANGSVTAVSSGGAFDNTASGGLLPNIGGGVTKNVSHGSNVTFTAVPTPASGTTGGGGATGDYMVSGWTITPAVSPVSGTDTSITLNGKQLVLKDVIKDYTNVEVTFAESLYTITFEAGTGTGSKASEQTGTGANAWKLTAAQLASTGFTGDPGTPSFTGWKTKVGGVDVTAATVFTKAEVLVAQWDATDPDAADISAVLVERSSNTAAKIEVTTDKDGMAYYVVTTTKPTDLGAVVAVTTNELGPVVKNHSGTQNQFDITLTTGEQTVYVVVEESESGNDALS

SEQ ID NO: 35257 - DNA, 972 bp, Unknown
  Obtained from environmental sample
  misc_feature (1)..(972): n is a, c, g, or t
atgaaaaaaactcaaacaaaaggtaaatatgtaattgaaacaaaaaatgatattattactatagggtcaaacgagtgttatactttttatcaaagtgttgaacaagtatcaaaatggtttttaaaccatattaataaagattattttaaggataaagttttatatatgaacgccgatgatactaaatcagctttttggttgtatttttataataattttaaagaattaggcttaaaagaaattatagctactcattatgacaattctggtctttcttatggaaacagtgaaacagatattaaacaacttggtttatgggaagaatttaaaggttatattttaagatatgacggtaaaaatataagaagaattcctcccgaaaaagtaaagtccgattttcatggtgattttaaagaaaaaaaatgtttggaaatagccagaaatgaagcagatataataatgactaaccctccattcggaaaagaatgggaacaatatgttaaatgtatgcttgaaacgggcaagaaacttatattttggggggcttgtactacagtaatttataattgggttatgccgcttttaaatgaacataaaatatatataattaaagattgttctcataatgttttaactgatcattttatgactccgaatttttggaaaaaaaatgtcccatgttttatatatacaacagaagacttatcgtggcaaaaacctgataataaacattatcgtaaaaaaaaagaaatgttaaaagatggtactgcatggtatgacgataagaaaatattatgttgtgataacgctaatataccttatgataccaatgaagttttagcagtttcttctaatatatttagacatggaatattaaatgatggatatattatagatgattttcatagatatggcccaattaaaaacaaagaagaggggtttgcgagaacgcttattaaaaaaaataaataa

SEQ ID NO: 35258 - protein, 323 aa, Unknown
  Obtained from environmental sample
  misc_feature (1)..(323): Xaa is any amino acid
MKKTQTKGKYVIETKNDIITIGSNECYTFYQSVEQVSKWFLNHINKDYFKDKVLYMNADDTKSAFWLYFYNNFKELGLKEIIATHYDNSGLSYGNSETDIKQLGLWEEFKGYILRYDGKNIRRIPPEKVKSDFHGDFKEKKCLEIARNEADIIMTNPPFGKEWEQYVKCMLETGKKLIFWGACTTVIYNWVMPLLNEHKIYIIKDCSHNVLTDHFMTPNFWKKNVPCFIYTTEDLSWQKPDNKHYRKKKEMLKDGTAWYDDKKILCCDNANIPYDTNEVLAVSSNIFRHGILNDGYIIDDFHRYGPIKNKEEGFARTLIKKNK

SEQ ID NO: 35259 - DNA, 558 bp, Unknown
  Obtained from environmental sample
  misc_feature (1)..(558): n is a, c, g, or t
ttgggaaccaccatagacgacgctgccggagaggcctttgacaaagtggcgaaacattacaacttcggctatcccggcggaaaagtaatagacgaaatggcgcgtaacggagactcaggcgcattccggtttccgctcccatcccttcacaaaggagatcaccgctacgacgtgtcgtattcggggcttaaaaccgccgttataaatcagcttgatatgttcaaagtaaagaaaaccgaaaccaccaatgaagacatagccgcctcttttcagaaaaccgccgtagaaatccttttacgcgccctgttaaacgccgccgaagataccggccttacgacaatcgtggctggcggcggcgtcgcggctaacagttaccttcgctcgtgcctcgcggagcagaaacatcttcactgcgttttccccccgcttgacctgtgcggcgacaatgccgccatgatagcggggattgggtatcagtaccttgcaaggggagagcggtcttcgcttaatgttaccgcaagcgcgcgggtgtcggggtttaagaagaagtatccttaa

SEQ ID NO: 35260 - protein, 185 aa, Unknown
  Obtained from environmental sample
  misc_feature (1)..(185): Xaa is any amino acid
MGTTIDDAAGEAFDKVAKHYNFGYPGGKVIDEMARNGDSGAFRFPLPSLHKGDHRYDVSYSGLKTAVINQLDMFKVKKTETTNEDIAASFQKTAVEILLRALLNAAEDTGLTTIVAGGGVAANSYLRSCLAEQKHLHCVFPPLDLCGDNAAMIAGIGYQYLARGERSSLNVTASARVSGFKKKYP

SEQ ID NO: 35261 - DNA, 606 bp, Unknown
  Obtained from environmental sample
  misc_feature (1)..(606): n is a, c, g, or t
ttgcttcaattttttgatactgaagaaaaattacatgactatctcatcaatgaatatgaaattgccaaaaagaatgaagccgcgtcggaagtaaatcatatcagacaagctttgcttgacaggggcattcccacgacgcctgaagctcttgcccagtgtgttgccgaaaataaagtggaagaagtttctctctttttatccgcgggttttttgcccgatacaaaagacaaaaaaggaattcccctgctttgtattgccgccagaaacggacatttaaataccgttgaatttctgctccgttccggagcccaggtggatatccttgccgatgacaggagatcaaccgctcttattgacagcgctatggaaagacataaagatgtgattaaaacccttattaaagccggaacagatgtaaatatcaagaatggggacggacagaacgcgttgattatcgttgtaggcgccggggatgcggaaattgttgaaatactggttaacgccggagctgaccctgacattgaagatgattttggcgtcagtgccagaatgtacgctaatctctttaaaaacgaaaaaataaaagccatttttgacgctaaatga

SEQ ID NO: 35262 - protein, 201 aa, Unknown
  Obtained from environmental sample
  DOMAIN (78)...(110): Ankyrin repeat
  misc_feature (1)..(201): Xaa is any amino acid
MLQFFDTEEKLHDYLINEYEIAKKNEAASEVNHIRQALLDRGIPTTPEALAQCVAENKVEEVSLFLSAGFLPDTKDKKGIPLLCIAARNGHLNTVEFLLRSGAQVDILADDRRSTALIDSAMERHKDVIKTLIKAGTDVNIKNGDGQNALIIVVGAGDAEIVEILVNAGADPDIEDDFGVSARMYANLFKNEKIKAIFDAK

SEQ ID NO: 35263 - DNA, 849 bp, Unknown
  Obtained from environmental sample
  misc_feature (1)..(849): n is a, c, g, or t
atggaattatcagagttagaacaattgcaaaatgaacattcgaagaatgaacattcgaagaatgaacattcgaagaatgaacattcgaagaatgaacatccgcctgtaaaaattgaacggcggatgaattttcgaaatgtgaaaatggagatagtagctcctctgttttttggattaataggctctcttcttttatgcgcggttgtatccgccgatactgcgattttttccaaagattacggcgcaataagaataagaggcgagcttggggaagacattgaagacagtgatttttttcttgcggtatcggaaagggctcccgaccctattattgaatattaccgcagaagcgaatataaagactgggtaattgatttttttaccgatatttgttcaagcaaggaaatatcgcaggtaattttgatgaacgcggatgaatttgaagtgccggccgcgcttgcctttgccctaagctgggaagagagcaggtttaacccgcgcgctgtttcaaggcctaaccgcgacggcagcatagaccgcggcctgtttcagcttaacaacaagtctttccccgatttggatccgcttgcttattttaacattcgatataatacgcgtgtcggtataggccatctgcgctactgcctggatacaggcggcagcgagatttcggctcttgccatgtacaacgccggcgccggaagggtaaaatcaacaggcgccccggaggtcactctaaattacacaagccgcattttggataaccgtagaaaactggaaaaccgctttttttcaagacttcttaaagaagaggaaaaacgcctaactgttaattccccctcagagtga

SEQ ID NO: 35264 - protein, 282 aa, Unknown
  Obtained from environmental sample
  DOMAIN (138)...(252): Transglycosylase SLT domain
  misc_feature (1)..(282): Xaa is any amino acid
MELSELEQLQNEHSKNEHSKNEHSKNEHSKNEHPPVKIERRMNFRNVKMEIVAPLFFGLIGSLLLCAVVSADTAIFSKDYGAIRIRGELGEDIEDSDFFLAVSERAPDPIIEYYRRSEYKDWVIDFFTDICSSKEISQVILMNADEFEVPAALAFALSWEESRFNPRAVSRPNRDGSIDRGLFQLNNKSFPDLDPLAYFNIRYNTRVGIGHLRYCLDTGGSEISALAMYNAGAGRVKSTGAPEVTLNYTSRILDNRRKLENRFFSRLLKEEEKRLTVNSPSE

SEQ ID NO: 35265 - DNA, 789 bp, Unknown
  Obtained from environmental sample
  misc_feature (1)..(789): n is a, c, g, or t
atgttcgacactcactgccacttacaggatgaaagaatctccgcccgtaccggcgacatcgtcgccgcggccaaccgcgccggcgttaccggtatgctctgctgcggcagcggcacagcggactgggacggcgtggcgcgcataggagcggcgtacgcggacagcggagtggtctgcgcgtacggagtgcaccccttctacgtcgaaagcgtaaatcccggcggcaatgattggacggacgaactttcaagacgccttgcctgcgacccgtacgcggccgtcggcgaaatcggcctcgaccacgccgtcacgcctcgcgacgacgagaggcaagcggaggtcttcgtccgccagctgcaaatcgcggaacggtacgaacgcccggtatcgatacactgccgcaaagccttcgggacgatgctgtcaatactaaaggacaaccgcggcctgaaattcggcggggcgatccactcctacggcggcccgcccgaactgattgacgaacttgtggaattaggatgccacatatccttctccggatcgatactaataccaaactgcaaacgggcgatagcgtcgttgaaaaaagtacccgaaaacagattactgatagaaacggacagccccgacctgctgccgtacggcgcgaccggcgcgttcaacgaaccggcgaatcttttgccggtactgaacaaagtagcggagatactgggggagcccgcgcgaaagattgcggaagtgacaaatgagaacggatgcaggttgtatcgttgctctgtatctttttaa

SEQ ID NO: 35266 - protein, 262 aa, Unknown
  Obtained from environmental sample
  DOMAIN (1)...(257): TatD related DNase
  misc_feature (1)..(262): Xaa is any amino acid
MFDTHCHLQDERISARTGDIVAAANRAGVTGMLCCGSGTADWDGVARIGAAYADSGVVCAYGVHPFYVESVNPGGNDWTDELSRRLACDPYAAVGEIGLDHAVTPRDDERQAEVFVRQLQIAERYERPVSIHCRKAFGTMLSILKDNRGLKFGGAIHSYGGPPELIDELVELGCHISFSGSILIPNCKRAIASLKKVPENRLLIETDSPDLLPYGATGAFNEPANLLPVLNKVAEILGEPARKIAEVTNENGCRLYRCSVSF

SEQ ID NO: 35267 - DNA, 936 bp, Unknown
  Obtained from environmental sample
  misc_feature (1)..(936): n is a, c, g, or t
atgcgcaaactgtatacctacccctggcttattgtcgctataaccgccctcattaccgtcttttttgccttccaactgccccatgccgaactggagaacaacaacctccgctttgtgccgccggatgatccggcgcttaaaacttcccaatggatagaccgcgcgttcggcagttcgttttttattctggttggcctggagcggcaatacggcacggtctttgaccgcgaatttctggaacgcatacgggaatatacgcaggctgttcaggaaatatccgtggtcagggaagtaagttctctgctcagcgccgattacatcacttccgatggcgacgccatcgtggtggaaaaacttgtcggcgatgatttttccggatcgccggaagagattgcggaactgaaacgccgcctgctttcgtgggacatgtatgagcgggcgttgttttccgatgattttacggcgactcagattctgattcctttttcaataaaatccgatgaagcgggattgtcggaagtgtcggaaacttttatgcgtatcagggatatcgcgcgggaaacctttgccggttacgccaccgtctatgtgacggggatgccggttatagccgcgaccattaacgaggcaatgaacgccgacctcaagctgctgctgccccttgtcatattggtggttctggctgttttgtttttctcgttcagggggcttacgcctgtcgcattgcccctgctgacagtggtaatcgccgtcatctggtcagtaggtgcgatgccccttttcggcgtaaaactctcggtgatctccacggtgctgcccgtaatcctcgtggcggtgggaagcgcctacggcatccatatcgtcacccattaccttcacggccgctctacaaaaccgatgaacaacagggaacaccgggagcttgtcctgagatag

SEQ ID NO: 35268 - protein, 311 aa, Unknown
  Obtained from environmental sample
  SIGNAL (1)...(29)
  DOMAIN (148)...(261): MMPL family
  misc_feature (1)..(311): Xaa is any amino acid
MRKLYTYPWLIVAITALITVFFAFQLPHAELENNNLRFVPPDDPALKTSQWIDRAFGSSFFILVGLERQYGTVFDREFLERIREYTQAVQEISVVREVSSLLSADYITSDGDAIVVEKLVGDDFSGSPEEIAELKRRLLSWDMYERALFSDDFTATQILIPFSIKSDEAGLSEVSETFMRIRDIARETFAGYATVYVTGMPVIAATINEAMNADLKLLLPLVILVVLAVLFFSFRGLTPVALPLLTVVIAVIWSVGAMPLFGVKLSVISTVLPVILVAVGSAYGIHIVTHYLHGRSTKPMNNREHRELVLR

SEQ ID NO: 35269 - DNA, 450 bp, Unknown
  Obtained from environmental sample
  misc_feature (1)..(450): n is a, c, g, or t
ttgggtataagccagcagcaggcgcaggaaacgcagacggatattacagacctcttgagggggcagcatatacttctggcggaggatgtggacattaaccgtgaaattgtcaagacattgcttgaaccgacgcgcatagagatagactgcgcggaaaacggcgtggaagccgtgcgtatgtttaccgaaaccccgaataagtataatatgatctttatggatgtgcagatgcctgaaatggacggctatgaggcgacgcggcgtattcgcgccgccgaaggaaaactacggttggaaggacacccgcagagaattcccataattgccatgaccgccaatgtatttcgggaggatattgaaaagtgtcttgaagccggtatggacagccatgtcgggaaacccctggacattaatgaggttttggataaacttcgcacctatttaaggtaa

SEQ ID NO: 35270 - protein, 149 aa, Unknown
  Obtained from environmental sample
  DOMAIN (22)...(145): Response regulator receiver domain
  misc_feature (1)..(149): Xaa is any amino acid
MGISQQQAQETQTDITDLLRGQHILLAEDVDINREIVKTLLEPTRIEIDCAENGVEAVRMFTETPNKYNMIFMDVQMPEMDGYEATRRIRAAEGKLRLEGHPQRIPIIAMTANVFREDIEKCLEAGMDSHVGKPLDINEVLDKLRTYLR

SEQ ID NO: 35271 - DNA, 876 bp, Unknown
  Obtained from environmental sample
  misc_feature (1)..(876): n is a, c, g, or t
atgggtgaaataatatcgaataacgacagggctgcggttttaatccacgcgctgccctatattcagaaattccggggaaaaaccatcgtcgttaaatacggcgggaacgccatgcagagcgacgaactgaaaaaagccgtaatcgacgacataatccttatggcctgcgtgggaatacacacagtgcttgtgcatggcggcggccctgaaatcgaggcaatgctgaaaaagacgggcaaggagagccgctttatcaacgggcttcgctacaccgatgaagagacaatggacatagtccagatggttctgtgcggcaaagtaaacaaggagataaccgcccttatcgaaaaaaacggaggcagcgcgataggtttatgcggcattgacggcggcatgttaaaagcgagccggatgaagggcgagaccgaccttgggcttgtcggagagattgaacaggtaaacgttgaactgttaacctcaatcttaaattcgggcgctattccggtcatatcctctgtcgcctacggcacggggctggatgaaggaaaagccctcaatataaacgccgatattgccgccgcaaaaatagccgccgccctgaatgccgaaaaactggtgcttatgaccgatgttcggggcattttgcgcgatataaacgatgaaaattcccttatgaaagccgtggaaagatcccagttggacacccttaaaaaagagggcgttctgaccaagggaatgatcccaaaggcggactgctgcgctctcgcgctggacagcggagtgaaaaaagcccatataatcgacggacggcttccccatgccatacttattgagctctttaccgacgagggaatcggaaccatgatttcaccttag

SEQ ID NO: 35272 - protein, 291 aa, Unknown
  Obtained from environmental sample
  DOMAIN (27)...(268): Amino acid kinase family
  misc_feature (1)..(291): Xaa is any amino acid
MGEIISNNDRAAVLIHALPYIQKFRGKTIVVKYGGNAMQSDELKKAVIDDIILMACVGIHTVLVHGGGPEIEAMLKKTGKESRFINGLRYTDEETMDIVQMVLCGKVNKEITALIEKNGGSAIGLCGIDGGMLKASRMKGETDLGLVGEIEQVNVELLTSILNSGAIPVISSVAYGTGLDEGKALNINADIAAAKIAAALNAEKLVLMTDVRGILRDINDENSLMKAVERSQLDTLKKEGVLTKGMIPKADCCALALDSGVKKAHIIDGRLPHAILIELFTDEGIGTMISP

SEQ ID NO: 35273 - DNA, 717 bp, Unknown
  Obtained from environmental sample
  misc_feature (1)..(717): n is a, c, g, or t
atggacagaatcggccgaggcggcatgcgtaaaggctcaggcatgatacaccctaacatggcaaccatgctctgcttcctgaccaccgatgtttccatttcgcgggaactcctggaggcaagcctgcgccgggcggtagaacgctcctttaaccgcgtcactgttgacggcgatacctcaaccaacgacatggccctgattatggcgaacggggcgtcaggcctgacagtcacagcggacagtgttgaataccaggccttttccctggcgcttgaacaggtatgtgtaactctggcgaaagcaatggcgcgggacggcgaaggcgcgacaaaactggtgacagtcaccgtaaacggcgcaactgacgaaaaagccgccgaggctctggcaaaagccgtcgcgtcctccagcctggtcaagaccgcctgtttcggcgcggacgcaaactggggcagaatcctctgcgctatgggttattccggcgcggaatttgatccggacaaggcaagcgtgagtttcaaaagcaaagcgggggaaatcgccgtgtgttcaaacggcgggccgctgccattctccgaggataacgcgaaggcggtattgtcagaagaagaaatcgaaatcctgattaacgcgggagaaggaaacggcgcggcttcggtatggggctgcgatctgacttatgactatgtaaagatcaacggggattacaggtcctag

SEQ ID NO: 35274 - protein, 238 aa, Unknown
  Obtained from environmental sample
  DOMAIN (2)...(238): ArgJ family
  misc_feature (1)..(238): Xaa is any amino acid
MDRIGRGGMRKGSGMIHPNMATMLCFLTTDVSISRELLEASLRRAVERSFNRVTVDGDTSTNDMALIMANGASGLTVTADSVEYQAFSLALEQVCVTLAKAMARDGEGATKLVTVTVNGATDEKAAEALAKAVASSSLVKTACFGADANWGRILCAMGYSGAEFDPDKASVSFKSKAGEIAVCSNGGPLPFSEDNAKAVLSEEEIEILINAGEGNGAASVWGCDLTYDYVKINGDYRS

SEQ ID NO: 35275 - DNA, 1074 bp, Unknown
  Obtained from environmental sample
  misc_feature (1)..(1074): n is a, c, g, or t
atgcccccttccatccttgcactgacgcccgaaagcctcggcatcatccttcttaaccccagggggcggcagattctttccacagtgcgttgtgtgatcctggacgagatacacgcagcgctgggcagcaagcgcggctgctacctttcctgccaggttgaccgcctttcgcttgttgccggtaatttccagcggatcgctctttccgccaccgtcaagccaccggaagccgcggcgaatcttgtcgggaaaaaaatccacatcgtctcgccggaagaaaaatcagaccgaaggtctaaggaaattcaatttaaggtgatatttcctgaaagtgagggaaagccttattcaggcgaaaccggcgtagaacgctacggcaagcgttatacggaacttatcaaatttgttttaggcaggataaggtctaatgacaaaaaagcggcaatacttgttttcacggattcaaggcgcagggctgagcggatcagctttctattgaataaaaccgcggaaaatgaagctgaattctccggtcgtcctgtcgcttattgccaccacggctccctctcgaaggaagtacgcagggaggtggaaatagccctcgcttccggggagatttcctgcgtggttgcgacaggctctctggaactgggaattgacatcggcaacgtcgatgaggtgattctggcgggcagtcccatttcaacagcggtagctttgcagagggtaggacgttcaggccacgcggtcggcatgacaagccggggctggctcatgccctttcacggcatagatctgcttcaggcggcggcactgtcaggcgcggtagatgaaagggagattgaaggaactgaaagcgtcgcgaatccactggccgtgctcgcccagatcatcaaaaaaaaatgcaccgaaacggatcaaaacgaggatgagctttttcaaacgatccggggatttgacgtgtgccgcaatctgtacagagaaggcttcgacggagtatgtgggaaggctttccggcagttaggaagatgcgcgggttgggggactcaagcggggtgtggtccgggcagatga

SEQ ID NO: 35276 - protein, 357 aa, Unknown
  Obtained from environmental sample
  DOMAIN (175)...(250): Helicase conserved C-terminal domain
  misc_feature (1)..(357): Xaa is any amino acid
MPPSILALTPESLGIILLNPRGRQILSTVRCVILDEIHAALGSKRGCYLSCQVDRLSLVAGNFQRIALSATVKPPEAAANLVGKKIHIVSPEEKSDRRSKEIQFKVIFPESEGKPYSGETGVERYGKRYTELIKFVLGRIRSNDKKAAILVFTDSRRRAERISFLLNKTAENEAEFSGRPVAYCHHGSLSKEVRREVEIALASGEISCVVATGSLELGIDIGNVDEVILAGSPISTAVALQRVGRSGHAVGMTSRGWLMPFHGIDLLQAAALSGAVDEREIEGTESVANPLAVLAQIIKKKCTETDQNEDELFQTIRGFDVCRNLYREGFDGVCGKAFRQLGRCAGWGTQAGCGPGR

SEQ ID NO: 35277 - DNA, 777 bp, Unknown
  Obtained from environmental sample
  misc_feature (1)..(777): n is a, c, g, or t
atgacgacaggctttcagccggctgactttatcattataggcgcgcggccttccgtaggtaaaaccgcccttgctctgaatatggccgcccacatcgcttttaagaacaatatcccaatcgcgtttttctcgctggaaatgacagatatgtcccttgcccagcgccttatttccagcgccgcccaggtggacggaaacaaaatgaggagcgggcacattacctccgatgatttcaggaggatacgcgatactctggggattttttgcgacgctccgttttatattgtcgaaataccgaacaaggaactccatgaactgcgttcccaggcccgcaaactgcgttccaaagaaggggtgcagatcatctttgtagactatatagggcttatagtacatgagaacagcaaactgccgcgccacgagcaaatcggggaaatttccagatcgctgaaaggccttgccagggaacttgatatacccattgtcgccctttgccagcttaaccgcgatatggaaaagaccggccacgggcagcagcctacgctggcgaatctgcgggattcaggctctattgaacaggacgccgatttggtgatgtttctccacaggaagccgccctcaaaagataaaaaaggcgcggaagaggagccggtaacgaacattgaaggcattcccacggaattgatcattgccaaacagaggaatggaccggtaggatttattgatcttatgctccaggcgaagtatacccgcttgtccccgggaaaaagatcataa

SEQ ID NO: 35278 - protein, 258 aa, Unknown
  Obtained from environmental sample
  DOMAIN (1)...(185): DnaB-like helicase C terminal domain
  misc_feature (1)..(258): Xaa is any amino acid
MTTGFQPADFIIIGARPSVGKTALALNMAAHIAFKNNIPIAFFSLEMTDMSLAQRLISSAAQVDGNKMRSGHITSDDFRRIRDTLGIFCDAPFYIVEIPNKELHELRSQARKLRSKEGVQIIFVDYIGLIVHENSKLPRHEQIGEISRSLKGLARELDIPIVALCQLNRDMEKTGHGQQPTLANLRDSGSIEQDADLVMFLHRKPPSKDKKGAEEEPVTNIEGIPTELIIAKQRNGPVGFIDLMLQAKYTRLSPGKRS

SEQ ID NO: 35279 - DNA, 657 bp, Unknown
  Obtained from environmental sample
  misc_feature (1)..(657): n is a, c, g, or t
gtgaaatttctgccggacaaagcctggtggctgtactttggaaaaacattaaaatactcgctttataccagtgttcatcccctggacggtttttgggatttatcccacgaaaaacgcgggtccctggcggcggcgaatgtcattgtcgccctcgccatactggttgatatattgcgcctaacgctgaccagtttccagtttgttacggttaacatggagtactttaactcggttattgtaatgatgcggataatcctgccgattttcctgtgggttgtggcgaactggagccttaccaccctgatggacggcaaaggaaggatgagagatatttatatggctattgcctatgctcttgttccgtatgtaattatcaatgccattatgattattttaagtcagatacttgcattcgatgaaggcgcggtgtactggttccttgccgggttttcaacattgtggacaggtatattaatccttgccggcatgatgatggtacatgactacagtgttggcaaaaccattctttcaagttttcttacggtaattggaatgggcgtaatggtgtttatttttgtacttttcttcagtcttatcagcgattctgtagcatactttatctcgctgtataaagaaattctattcagggtaatataa

SEQ ID NO: 35280 - protein, 218 aa, Unknown
  Obtained from environmental sample
  misc_feature (1)..(218): Xaa is any amino acid
MKFLPDKAWWLYFGKTLKYSLYTSVHPLDGFWDLSHEKRGSLAAANVIVALAILVDILRLTLTSFQFVTVNMEYFNSVIVMMRIILPIFLWVVANWSLTTLMDGKGRMRDIYMAIAYALVPYVIINAIMIILSQILAFDEGAVYWFLAGFSTLWTGILILAGMMMVHDYSVGKTILSSFLTVIGMGVMVFIFVLFFSLISDSVAYFISLYKEILFRVI

SEQ ID NO: 35281 - DNA, 498 bp, Unknown
  Obtained from environmental sample
  misc_feature (1)..(498): n is a, c, g, or t
gtgtacgattttcagggaaatctgttatacgctttcggcggtctgggcaacagggaggggtgcttcctgcagccaacagcccttgcccaaatgggacgctccctgtatgccctggattcacgcgccgccgcccttacccgctttgatatgacagcttacggggaaaagataaacagcgcccttgacgagtaccatgccggccgctacgaatcctcagcgcgggaatgggaagaagtgcttaaaatgaacggtaattatgatcttgcctatatcggtattggccgggcggcgctgcggcagggcgaataccaaaaggcgatgaagtactacaagttgaagcattaccgcgaaggctacggcaaggctttccagttataccgtaaacaatttatggaagagaacctctggaaaatcctgcttgtcctggcggttattttatttgtcccgccgatcattaaaaccgcgcttaaagtcgcaaaggagatcagggaagcgtga

SEQ ID NO: 35282 - protein, 165 aa, Unknown
  Obtained from environmental sample
  misc_feature (1)..(165): Xaa is any amino acid
MYDFQGNLLYAFGGLGNREGCFLQPTALAQMGRSLYALDSRAAALTRFDMTAYGEKINSALDEYHAGRYESSAREWEEVLKMNGNYDLAYIGIGRAALRQGEYQKAMKYYKLKHYREGYGKAFQLYRKQFMEENLWKILLVLAVILFVPPIIKTALKVAKEIREA

SEQ ID NO: 35283 - DNA, 627 bp, Unknown
  Obtained from environmental sample
  misc_feature (1)..(627): n is a, c, g, or t
atgccgaaaccgcttcaataccgcacaggttcgcttatatatttccagggagatcccgcggataaaatatatattctgcaaaacggcaagataagccttgtttcccaggatatagaaaccggcgaggatatacgcgagtcggtgcagcccggcgaattcttcggggtaaaatccgcgcttggacgctatccgcgcgaagaaaacgcaatggccttatccgatacaaccgttatggtttttaccgtgcaggaatttgaagccgtagcgatggcaaacacaagaattatcatgaagatgcttaaagttttctccaaccagatgaggcgcgtgcatagacaagtgtcaaaattgatggcgaaagcggaagaacagcccgccgacggtctgttcagtatcggtgaattttatttaaagaacaaacggttcacccacgccaaatatatattcagccgttatctgatatattatccttccggaaaaaacgcgcatcaggcgacaaaaaatcttgaaattgccgagaacgcgctttcccgctacggggacggcaaaggaccgggcgtcgcccgtagttcaggcgggcggcccgcaggcggcgtccgccggtgttttcgccgcttcattcggtga

SEQ ID NO: 35284 - protein, 208 aa, Unknown
  Obtained from environmental sample
  DOMAIN (4)...(94): Cyclic nucleotide-binding domain
  misc_feature (1)..(208): Xaa is any amino acid
MPKPLQYRTGSLIYFQGDPADKIYILQNGKISLVSQDIETGEDIRESVQPGEFFGVKSALGRYPREENAMALSDTTVMVFTVQEFEAVAMANTRIIMKMLKVFSNQMRRVHRQVSKLMAKAEEQPADGLFSIGEFYLKNKRFTHAKYIFSRYLIYYPSGKNAHQATKNLEIAENALSRYGDGKGPGVARSSGGRPAGGVRRCFRRFIR

SEQ ID NO: 35285 - DNA, 405 bp, Unknown
  Obtained from environmental sample
  misc_feature (1)..(405): n is a, c, g, or t
gtgttttcgccgcttcattcggtgatgatccttccaaaatttacaatgacgcgattatccttattttcaaggggaaatatccgggaagcgtttatgtcatttaaattgataacggactccggaacagacgccggctggacggcaaaagcctcttatgaaatcgggcgctgtatgttcctgatgaacaagtttgacgaaagcctgaaatatttaacgaatatgcttaccaagtatcccaagcatcccaatctgttagacgccatgcttgttatcggccagtgccacgagaagatgggaagaaaggaacaggcggcggctttctttaaaaagataatttccatgggcggcagcagcgacggcaccgcggaaaaagcaaaaagggcgttagccgccctgggagcgtaa

SEQ ID NO: 35286 - protein, 134 aa, Unknown
  Obtained from environmental sample
  misc_feature (1)..(134): Xaa is any amino acid
MFSPLHSVMILPKFTMTRLSLFSRGNIREAFMSFKLITDSGTDAGWTAKASYEIGRCMFLMNKFDESLKYLTNMLTKYPKHPNLLDAMLVIGQCHEKMGRKEQAAAFFKKIISMGGSSDGTAEKAKRALAALGA

SEQ ID NO: 35287 - DNA, 1320 bp, Unknown
  Obtained from environmental sample
  misc_feature (1)..(1320): n is a, c, g, or t
atgataattttgactttaaattgcggttcatcttcggcaaaataccaggtgtacgattgggaagcaaaagacattctggcagtaggggttgtggaaaaagtgaccataggaggttcttttatcactcacaaggcaaagggcagggaagaggtggttataaaccacgattgccccacccacaccgacgcggtggaactgattatcaaactcctgaccggcaaggaacacggggttatcagcgatatgtccctgataaaggccgtaggccaccgggttgttcatggaggcacgaaattcacaaaaagcgtgattgtggacgacgcggcaatggcggcttttgaagaggtaaaagacctggggcccctgcacaacccggcgaacattatgggcatagaggcggcgaggaaagtgctgcccaaagtgccgcactgcgcgactatggataccgcctggcaccagaccatgccgccggagtcgtatctttacgccattcccaaagaatggtatgaaaaataccaggcgcggcgctacggcttccacggcaccagtttcctctacaccgcgaaaagggcggcggtgctgctggggcaggatcctttcaaaaccaatctcgtgatttgccatttggggaacggcgcttcggtaaacgccgttaaaaacggttgctcctttgacacgagcatgggaatgaccccgctggagggccttatcatgggaacccgctccggcgacatcgatcccgccctccccttttatataatgaaaaagactggcatgagcgcctccgaggttgaaagcgtcctgaacaaaaaatccgggcttttgggcctgaccgggcagtacaccgaccgccgcgacatacaggccgccgccgtgaaaggagacaagcaggcgctcctggcgcagcatgttgaggcacaccatgtaaagaagtacatcggcgcgtaccaggccacgctcggcagggtagacgccctagtctttaccgccggcgtgggggaatttgcctggttcatgcggaacaagatccttgacgggctggaaggcatcggcatggtatacgatcccaaaaagaacgagatgtcccatacccgcaacaccgagaccataatcagcaagcccgaatcgaagatacccatttacataatcccgaccgacgaggaactggtgatgaccgaggacacctacgccctgatgaagggcacctatgacatccatacanaattcacctattccttccagaagcaggactatgtgaacaagggccgcgccgaaagcctggaacacgagctggaaaacacccggaactggcggagatag

SEQ ID NO: 35288 - protein, 439 aa, Unknown
  Obtained from environmental sample
  DOMAIN (2)...(393): Acetokinase family
  misc_feature (1)..(439): Xaa is any amino acid
MIILTLNCGSSSAKYQVYDWEAKDILAVGVVEKVTIGGSFITHKAKGREEVVINHDCPTHTDAVELIIKLLTGKEHGVISDMSLIKAVGHRVVHGGTKFTKSVIVDDAAMAAFEEVKDLGPLHNPANIMGIEAARKVLPKVPHCATMDTAWHQTMPPESYLYAIPKEWYEKYQARRYGFHGTSFLYTAKRAAVLLGQDPFKTNLVICHLGNGASVNAVKNGCSFDTSMGMTPLEGLIMGTRSGDIDPALPFYIMKKTGMSASEVESVLNKKSGLLGLTGQYTDRRDIQAAAVKGDKQALLAQHVEAHHVKKYIGAYQATLGRVDALVFTAGVGEFAWFMRNKILDGLEGIGMVYDPKKNEMSHTRNTETIISKPESKIPIYIIPTDEELVMTEDTYALMKGTYDIHTXFTYSFQKQDYVNKGRAESLEHELENTRNWRR

SEQ ID NO: 35289 - DNA, 549 bp, Unknown
  Obtained from environmental sample
  misc_feature (1)..(549): n is a, c, g, or t
atggttagcgaatctggttccccaattagggaaccggtggttccccaatttaactctcaaataagctggaaacaatacatcttgttgatgcgcattaccaatcccaaagaacggaacttttatgaaattgaaattgccaataacggatggtcatttagtgaattacaacgccagtatgacagctctctctatgaacgactggctctctccggaaataaaaaaagaatccgtcaactggcggcaaaaggacaagtaatcaatacccctcaagacttgttcaaagaaccgtatgtgctggaatttaccggtttgcccgaaaaggccgaatatactgaaaatgatcttgaacaaaaacttattgatcacttacagcaatttttactggaattaggcaatggttttgcttttatgggccgtcaagtccgctttacctatgaagacgaatcattctttgttgatcttgttttctataatcgcctgcttaaatgctttgttttaatagatttgaaaattggcagattaaaacatcaggatattgggcaaagatga

SEQ ID NO: 35290 - protein, 182 aa, Unknown
  Obtained from environmental sample
  DOMAIN (1)...(181): Protein of unknown function (DUF1016)
  misc_feature (1)..(182): Xaa is any amino acid
MVSESGSPIREPVVPQFNSQISWKQYILLMRITNPKERNFYEIEIANNGWSFSELQRQYDSSLYERLALSGNKKRIRQLAAKGQVINTPQDLFKEPYVLEFTGLPEKAEYTENDLEQKLIDHLQQFLLELGNGFAFMGRQVRFTYEDESFFVDLVFYNRLLKCFVLIDLKIGRLKHQDIGQR

SEQ ID NO: 35291 - DNA, 744 bp, Unknown
  Obtained from environmental sample
  misc_feature (1)..(744): n is a, c, g, or t
atgttcctctcaatggtttcaatggactttttgtcaaagccaatagatactattaaactcaatgcagtgcttgcaaaatggcttccaagagaaaagcaagaaaaattaagcacagatgcaaaaataactgataccagtgataataatcccgaagaaccgaaaatagagatagaaggcttggatgtaaagaaaggcataatcatgacaggcggtgtttttgaaaactatgtgcaagcactttccgcatttcataaagatgggttccagaaaattggcgagataaagaaatgcctggaaacgaataactattctttatacacaacttacgtacacgcgctaaagagtgccagcgcaagccttggggcttatgatttgtctgagcaagcaaaggcattggaagaagcgagcaagcagaaagattccaaatttattgattcaaacaatcctcaatttttaacgtctttggaaatgattttaaacaatatatacaaggcgttaaacagtttgaaaaaagaagaaacttatgttgattttgaggtactgaaaagcaggctttgcaaactaaaagaagctcttgatgctttagactttggagccattgatgaagtatccagcaatttgcagaaattcacgcaagcaccaaaaataggagaaactgtggaaagcattttgcaaaacatagttgtaggcaaatacgaagaagctggagaggcgataaactctttgctaatggaggtaaaatga

SEQ ID NO: 35292 - protein, 247 aa, Unknown
  Obtained from environmental sample
  misc_feature (1)..(247): Xaa is any amino acid
MFLSMVSMDFLSKPIDTIKLNAVLAKWLPREKQEKLSTDAKITDTSDNNPEEPKIEIEGLDVKKGIIMTGGVFENYVQALSAFHKDGFQKIGEIKKCLETNNYSLYTTYVHALKSASASLGAYDLSEQAKALEEASKQKDSKFIDSNNPQFLTSLEMILNNIYKALNSLKKEETYVDFEVLKSRLCKLKEALDALDFGAIDEVSSNLQKFTQAPKIGETVESILQNIVVGKYEEAGEAINSLLMEVK

SEQ ID NO: 35293 - DNA, 843 bp, Unknown
  Obtained from environmental sample
  misc_feature (1)..(843): n is a, c, g, or t
ttgatcagatcggccgaggaaatagccatagcgataagcgccgtagtattggccctgctgattttggcggcgttattcctgtccaagtccatcagcaagccaatcatccatgtagcgggtacccttaaagacatatccgaaggcgaaggcgatttgaccaaacgaataacaatcagatccgccgatgaaatcggcgatcttggccgctgcttcaacattacgatggaaaaaataaggaatctcgtaggtgcaataaaatacaaaatcaacgggcttaaccataccagttttgaactttccaccaatatgggccagacttctacggcagtccagcagattacagcgaatcttgacagcatgaagaacctcatggtcaagcaggaaagcggcgcggaagaagcgggcaaggccgtaggggatattaaggaaagtattgacagccttaaaaagatgatagaagaacagactgaaagcgtgaacaaatcgtcttccgccattgaggaaatgacggccaatattcattcggtgacgcagacactggcagaaaacagcaaaaacgtcagcgcattgaccgaagcgtcggagaacggcaaatcgggcgttcagacagtggcgcaggaaatccaggaaatagcgcgggagtcagagggactgctggaaataaacgcggtaatggacaatatcgcaagccagacaaatctgctttcaatgaacgccgcgatagaagcggcccacgcgggggaagcgggcaagggctttgccgtcgtagccgatgaaatccgcaaacttgccgagtcgtcgggagagcagtcaaaaaccaccacggcgatgctcaaaaaataa

SEQ ID NO: 35294 - protein, 280 aa, Unknown
  Obtained from environmental sample
  SIGNAL (1)...(23)
  DOMAIN (153)...(279): Methyl-accepting chemotaxis protein (MCP) signaling domain
  misc_feature (1)..(280): Xaa is any amino acid
MIRSAEEIAIAISAVVLALLILAALFLSKSISKPIIHVAGTLKDISEGEGDLTKRITIRSADEIGDLGRCFNITMEKIRNLVGAIKYKINGLNHTSFELSTNMGQTSTAVQQITANLDSMKNLMVKQESGAEEAGKAVGDIKESIDSLKKMIEEQTESVNKSSSAIEEMTANIHSVTQTLAENSKNVSALTEASENGKSGVQTVAQEIQEIARESEGLLEINAVMDNIASQTNLLSMNAAIEAAHAGEAGKGFAVVADEIRKLAESSGEQSKTTTAMLKK

SEQ ID NO: 35295 - DNA, 759 bp, Unknown
  Obtained from environmental sample
  misc_feature (1)..(759): n is a, c, g, or t
gtgttggcgcgttttgaagcaatagattcgggcgtaaaaacagtttcgcggcatgagcaaaatattcttaacgcgatggaagaacaggaaacgggcggaaaacaaatattggaatccatcagccgcttgagagatttaacggcatcagtcaagaaaggatccgacagcatggaagaatccggaaagactcttgtaaaggatacggacggattcataaagaccagccaggaaacggtagaaggtatgaatgagatactgaaaggcattaatcagataaatgtttcggtgagccatgtagacgaaatgagccatgaaaacgacaaaaactttgaatcattaaaacaggaaacgcaaaaatttaaagatactcttggcaatgaaaaaccgaaaattctcatggtagatgacgacagtatccatcttgaaatggtgaaaacggcattacaggatgagtatgacatatctaccgccgaatccggaaaagaagcgctggggttattctatcagggactggttccgcaattgatattattagacttgataatgcctggaatggacggatggcatacttacggcagaataaaagcgataagtaacttacacgatattccgatagcgtttttcacggcttcaaccgatccaaaagataaaaaccacgcgcatgagataggggcggttgattttatcaaaaaaccttatgacagaagcgatctgttaaacaggacgcgaaaaatcttaagacaaaaaataagcgcataa

SEQ ID NO: 35296 - protein, 252 aa, Unknown
  Obtained from environmental sample
  DOMAIN (129)...(243): Response regulator receiver domain
  misc_feature (1)..(252): Xaa is any amino acid
MLARFEAIDSGVKTVSRHEQNILNAMEEQETGGKQILESISRLRDLTASVKKGSDSMEESGKTLVKDTDGFIKTSQETVEGMNEILKGINQINVSVSHVDEMSHENDKNFESLKQETQKFKDTLGNEKPKILMVDDDSIHLEMVKTALQDEYDISTAESGKEALGLFYQGLVPQLILLDLIMPGMDGWHTYGRIKAISNLHDIPIAFFTASTDPKDKNHAHEIGAVDFIKKPYDRSDLLNRTRKILRQKISA

SEQ ID NO: 35297 - DNA, 702 bp, Unknown
  Obtained from environmental sample
  misc_feature (1)..(702): n is a, c, g, or t
ttgctcgaacttcgcccttgtaaggctcttctgcaaatgtttggggccgttctggtcggcggtgataaagggcaggttgatttcggtagtctgggtagaggaaagctccttctttgccttttcggaagcttccctaagccgctgcagagccattcgatccttgcccaggtcaatgccggtgtcctttttgaattcctcaatcagccagtccaggactttaaggtcgaagtcgtccccgcccaggtgggtgtccccgtttgtggattttacttcaaaaaccccctcccccaattccaggatcgaaatatcgaaagtgccgcctcccaaatcgtagacagcgattgttttttctttcttttgatctttgttgaagccaaaggccagcgacgcggcagtcggctcgttgatgatgcgctttacgtccaatcccgcgattttgccggcgtcctttgtcgcctgacgctgggcgtcgttgaagtaagctggaacggtaattaccgcctcggtaacggactcgcccaggtaatcctcagcggtctgtttcattttctggagcacaaaggcggatatctcttgcggagaatagggtttatcgccgatctttacccttacatcatccccctgctcaacaatacggtaaggcacccgcttcatctcgcttgttacttcggagtagcgccttcccataaaccttttaattga

SEQ ID NO: 35298 - protein, 233 aa, Unknown
  Obtained from environmental sample
  misc_feature (1)..(233): Xaa is any amino acid
MLELRPCKALLQMFGAVLVGGDKGQVDFGSLGRGKLLLCLFGSFPKPLQSHSILAQVNAGVLFEFLNQPVQDFKVEVVPAQVGVPVCGFYFKNPLPQFQDRNIESAASQIVDSDCFFFLLIFVEAKGQRRGSRLVDDALYVQSRDFAGVLCRLTLGVVEVSWNGNYRLGNGLAQVILSGLFHFLEHKGGYLLRRIGFIADLYPYIIPLLNNTVRHPLHLACYFGVAPSHKPFN

SEQ ID NO: 35299 - DNA, 378 bp, Unknown
  Obtained from environmental sample
  misc_feature (1)..(378): n is a, c, g, or t
ttgcgacagggctccttggttttctccagaagatccgacaccagttgctcgaacttcgcccttgtaaggctcttctgcaaatgtttggggccgttctggtcggcggtgataaagggcaggttgatttcggtagtctgggtagaggaaagctccttctttgccttttcggaagcttccctaagccgctgcagagccattcgatccttgcccaggtcaatgccggtgtcctttttgaattcctcaatcagccagtccaggactttaaggtcgaagtcgtccccgcccaggtgggtgtccccgtttgtggattttacttcaaaaaccccctcccccaattccaggatcgaaatatcgaaagtgccgcctcccaaatcgtag

SEQ ID NO: 35300 - protein, 125 aa, Unknown
  Obtained from environmental sample
  misc_feature (1)..(125): Xaa is any amino acid
MRQGSLVFSRRSDTSCSNFALVRLFCKCLGPFWSAVIKGRLISVVWVEESSFFAFSEASLSRCRAIRSLPRSMPVSFLNSSISQSRTLRSKSSPPRWVSPFVDFTSKTPSPNSRIEISKVPPPKS

SEQ ID NO: 35301 - DNA, 1080 bp, Unknown
  Obtained from environmental sample
  misc_feature (1)..(1080): n is a, c, g, or t
ttgatgggggccatgaccatagtggcaatagtggatgccaacgatggtttttcaataataacctcccgaataaaaactaacgatgttcgagccttgatgtggataatatcctggatagctttctttttaagcgcggttctagacaatttgaccaccactatagtgatggtaaccctatcgcgcaaactcgttgaagattcaaaaatgaggctttatttagctggtgtaatagttatagctgcaaatgcaggcggtgcatggagcccaatcggcgatgtaacaactacaatgctttggattggtcatcagatttccgctgggggcatagttaaagtgcttattttgcctagcatagtttcgttgctcgttcccttagctgttttaagcatttcgataaagggcagaattaattcggattttcaagtcgctacccaagaatcctcttcgtttgacagaaatgtgctgtttaccgctggtgttggcggtcttttaatggttccggttatcaaaacggttttccatgttccgccatatatagctatgttgtttattttgggcattctttggacggttgtagagcttcttggcagaaggcatcaggttcttccgcaacgccttaatatttaccatgtgataaaagaggttgatgtgccgagcgttctgttctttgccggtattttgctcgcagttggggtgttgggcgcaacgggtcagcttgccacgcttgccaaaatattggaagacagcataggccataccagcataatagttcttataataggtgtgctctccgctgtggttgataacgttcctttggttgccgctacaatgggtatgtatagccttcaagagttcccaatagataattttttgtgggaatttatagccttctgtgctggaacaggcggttctatgttggtgataggttctgcggctggtgtcgcggcaatgggcatagatagaaatctgtcttttggctggtatttgagaaagatgaccccgttggcagcgttgggttacggctcaggtgccggaacttacttgctgctttcagattttatttttcatactgttaaataa

SEQ ID NO: 35302 - protein, 359 aa, Unknown
  Obtained from environmental sample
  misc_feature (1)..(359): Xaa is any amino acid
MMGAMTIVAIVDANDGFSIITSRIKTNDVRALMWIISWIAFFLSAVLDNLTTTIVMVTLSRKLVEDSKMRLYLAGVIVIAANAGGAWSPIGDVTTTMLWIGHQISAGGIVKVLILPSIVSLLVPLAVLSISIKGRINSDFQVATQESSSFDRNVLFTAGVGGLLMVPVIKTVFHVPPYIAMLFILGILWTVVELLGRRHQVLPQRLNIYHVIKEVDVPSVLFFAGILLAVGVLGATGQLATLAKILEDSIGHTSIIVLIIGVLSAVVDNVPLVAATMGMYSLQEFPIDNFLWEFIAFCAGTGGSMLVIGSAAGVAAMGIDRNLSFGWYLRKMTPLAALGYGSGAGTYLLLSDFIFHTVK

SEQ ID NO: 35303 - DNA, 318 bp, Unknown
  Obtained from environmental sample
  misc_feature (1)..(318): n is a, c, g, or t
atggcaagcgatggcatcagaggcaaactcgttgatagccacagcggaagcgatgatttaaccacatatctttcgcagaacggcaaaaagaaaaccttgctcgttgtgaacaaaagcccatacacagctatcaacggcacgctcaagatccctggctttgccggaaaagcaaaggtagaggttttggctgctccaaaagggcaaaccgctagcaagacgattaaagttgacccaccaaaagctagcacacaagacataaaagaaggcagtgcagtaacattccctgcgcactctgtaactctgataactatagaataa

SEQ ID NO: 35304 - protein, 105 aa, Unknown
  Obtained from environmental sample
  misc_feature (1)..(105): Xaa is any amino acid
MASDGIRGKLVDSHSGSDDLTTYLSQNGKKKTLLVVNKSPYTAINGTLKIPGFAGKAKVEVLAAPKGQTASKTIKVDPPKASTQDIKEGSAVTFPAHSVTLITIE

SEQ ID NO: 35305 - DNA, 351 bp, Unknown
  Obtained from environmental sample
  misc_feature (1)..(351): n is a, c, g, or t
atgccccatgtaatggcttgcgcggaacttgtgatgggcagaagcggcgcgggcatttgggaatgggcggttttgggaaagcccatgctgttaatccctttgagaggttcaggcacaaggggcgatcaggtggagaacgcccgttattttaatgaggcgggagccgcgcttgtattatcaggagacgaagcgaatcccgaatcgctgttaagcgccattaaattattggcgcaggataacggaaaacggacagctatggcggaagcttctttaaaaatcgggaaaaaagacggcgctggctttatcgcgaaaacgcttgcggatgaaataaataaattagacggagggtga

SEQ ID NO: 35306 - protein, 116 aa, Unknown
  Obtained from environmental sample
  misc_feature (1)..(116): Xaa is any amino acid
MPHVMACAELVMGRSGAGIWEWAVLGKPMLLIPLRGSGTRGDQVENARYFNEAGAALVLSGDEANPESLLSAIKLLAQDNGKRTAMAEASLKIGKKDGAGFIAKTLADEINKLDGG

SEQ ID NO: 35307 - DNA, 486 bp, Unknown
  Obtained from environmental sample
  misc_feature (1)..(486): n is a, c, g, or t
atgagtttttcggtaattgattatatttttttagggatattagggctttttatgatccgctgttatctgaaagggtttataagcgaacttttaacaatggcggctgttgttcttgggcttcttgcgtcattattcttttttaaaaacggcgccgtttttgtaagagagagatttcttcccgatataaaagtaattccggaaattctcgcgtttatcgccctgtttataattgtatttataattgttaaactatttgagatgcttcttaaaggcgtaattgaaggcgtaaagcttaaaggcgccgatcattttatcggcattattttcggtcttgtggaaggcgtggtggttatcagcctgatactttttatcttgagtattcagcctttatttgatccttccgcgttattgaatgacagttttttcgcaaggatactgcttccgttaattatcggaaagaatatagggagcgccgcgggtgtttga

SEQ ID NO: 35308 - protein, 161 aa, Unknown
  Obtained from environmental sample
  DOMAIN (5)...(158): Colicin V production protein
  misc_feature (1)..(161): Xaa is any amino acid
MSFSVIDYIFLGILGLFMIRCYLKGFISELLTMAAVVLGLLASLFFFKNGAVFVRERFLPDIKVIPEILAFIALFIIVFIIVKLFEMLLKGVIEGVKLKGADHFIGIIFGLVEGVVVISLILFILSIQPLFDPSALLNDSFFARILLPLIIGKNIGSAAGV

SEQ ID NO: 35309 - DNA, 837 bp, Unknown
  Obtained from environmental sample
  misc_feature (1)..(837): n is a, c, g, or t
atgaaccacaaaataaaaacgatattgctaacagtaaatatcttctcatattcccagtatctgccgcacctcttcatcaacaagggtttcccggctgagcagagcgtcggcgagcgcttcaagcccggctttctgctcatggataatgcgctccgcttccccccgcgctatatccagtatttccttaacagccttgtcgatacgccgggctgtctcttcggaataatctttatgccttgcgatttccttgccgaggaaaataggctcttcttctttaccataagccaccggccccagttcatcggccatgccccattcgcaaaccatgtggcgggccatttccgtcgcctgctgaatatcctgtttggttccggtggtagtttcgtcataaaaaagtttttccgcaagccagccgccgtagcaaatcgcaatgcgatcctcgatccaacccctggtgcggctataggtatcttcctcggggagagacagggccatgcccaacgcgcgcccgtgaggaacaatggtaactttatggagagggtcggcgtttttcaggaaatagtgcagcagggcatgaccagcctcatgagttgccgtcatgcggcgttctttatcagacaccaccaaagttttgcgggcgacgcccatgagtatcttgtcccgcgcttcctcaaaatcgtgcatctccacttccggcttgtctttgcgggcggcaaacaaagccgcttcattgaccagattggcaatatcggcgccgctcatccccggcgttgcccgcgcgatgcggaaaagatcaatgttcttgctcatcggtatctttgccgagtgaatctgtaa

SEQ ID NO: 35310 - protein, 278 aa, Unknown
  Obtained from environmental sample
  misc_feature (1)..(278): Xaa is any amino acid
MNHKIKTILLTVNIFSYSQYLPHLFINKGFPAEQSVGERFKPGFLLMDNALRFPPRYIQYFLNSLVDTPGCLFGIIFMPCDFLAEENRLFFFTISHRPQFIGHAPFANHVAGHFRRLLNILFGSGGSFVIKKFFRKPAAVANRNAILDPTPGAAIGIFLGERQGHAQRAPVRNNGNFMERVGVFQEIVQQGMTSLMSCRHAAFFIRHHQSFAGDAHEYLVPRFLKIVHLHFRLVFAGGKQSRFIDQIGNIGAAHPRRCPRDAEKINVLAHRYLCRVNL

SEQ ID NO: 35311 - DNA, 669 bp, Unknown
  Obtained from environmental sample
  misc_feature (1)..(669): n is a, c, g, or t
atgagaagatatttactgttagcaatatcgtttttattttgtggttcatttttatttgccgaacttaataagtctcaattgtgggcaatatcattaaccggaatactaagtgaaacaaatggaagtaaccgtaattcccttaatgaatccgaaatggatgaaaaaggcagaaatatctggctggaagtgcttagaagggattgggaaataaccacaagggaagaattacttaaaacacttacgaatttggaaaacgaagggcatacggcttctttaagagaaataaagaaaatcataagtgaaatcacagaagccaaaaatgaatctgatattggaactgtttttggtatatatgaatggaatcaaactagaattaatcgtctaaaatatatatcagccaactgggaacagtataataatcgtacaatcagggcgtgggatttaggaagaagtatttctctgtgcagatggggttataatgtcggctttataacagaagaagaggcatgggaaaaaatttttcatatcgcanaaataattcaatcgcattataattcatgggaagaatacggatatgattattttatgggaagggtattctgggcttccggtttcggaaaagaggaagactatcttaccagaacagagccctgttatnnaacgatataa

SEQ ID NO: 35312 - protein, 222 aa, Unknown
  Obtained from environmental sample
  SIGNAL (1)...(20)
  misc_feature (1)..(222): Xaa is any amino acid
MRRYLLLAISFLFCGSFLFAELNKSQLWAISLTGILSETNGSNRNSLNESEMDEKGRNIWLEVLRRDWEITTREELLKTLTNLENEGHTASLREIKKIISEITEAKNESDIGTVFGIYEWNQTRINRLKYISANWEQYNNRTIRAWDLGRSISLCRWGYNVGFITEEEAWEKIFHIAXIIQSHYNSWEEYGYDYFMGRVFWASGFGKEEDYLTRTEPCYXTI

SEQ ID NO: 35313 - DNA, 603 bp, Unknown
  Obtained from environmental sample
  misc_feature (1)..(603): n is a, c, g, or t
gtgcagggcaaaattttgaacagcacactgctgccgttgattgacggcgcgaaaagcggtgcgctctacctgtttttccttgacgtttcacactttgtgatgggtggttcttcgggacgttgctggtcagttgtgcgcaaatgggtgaagacggcttgcgggcgtcaacgattcaatgtgtttggcgcattggatttcgtaaataagaaagttgaaactattgttaatgcaacgtacataacatcaacccaagttaacgaaatgcttgaaaaattggctcaaaaatatgttgggaaaccgttgaaaataattttggataatgctaaatatcagcgttgcagtgcggtttccgaaactgccaaacgtctaaatattgagttaattttcttaccaacgtattcaccgaatctcaatctaatcgaaagagtgtggaaattagttaaatcggaagttcttaattctgcataccatgaaactttcgaatgtttttctcataaaataaaaaactgtatcggatcgcttcatacaaaattcgctgcccaaatggcaactctcgtaactcaaaaatttcatattgtcgatacaaaaaatattatctcttaa

SEQ ID NO: 35314 - protein, 200 aa, Unknown
  Obtained from environmental sample
  misc_feature (1)..(200): Xaa is any amino acid
MQGKILNSTLLPLIDGAKSGALYLFFLDVSHFVMGGSSGRCWSVVRKWVKTACGRQRFNVFGALDFVNKKVETIVNATYITSTQVNEMLEKLAQKYVGKPLKIILDNAKYQRCSAVSETAKRLNIELIFLPTYSPNLNLIERVWKLVKSEVLNSAYHETFECFSHKIKNCIGSLHTKFAAQMATLVTQKFHIVDTKNIIS

SEQ ID NO: 35315 - DNA, 750 bp, Unknown
  Obtained from environmental sample
  misc_feature (1)..(750): n is a, c, g, or t
atgagcctttccaatggatcaatagcagccattatatgcgccgcaggctcctcctcccgtatgggtggcgccaaaaaagaatatctgcccctgcccggcgcccttgattctcttacagttctgggcgcggctgtttcagcttttgcccttgttcccgaaatcagaattatcgtaatagttgtgccggatgagccagaaaccggagaaaccgcggcgcgaaacgccctgcctcccgccggaatcgcccagtcagtgcgtttcgtcaccggtggcagtacccgccgcgcttcggtacttaacgcccttcgcgcacttgccgctgacgccccaggttacgcgcttatacatgacggcgcgcgtccctggatcagcccagctctaatcgagcgtgtaattaagagcgtcaagcaataccgcgccgttatccccctgcttccgttgacggagacccccaaagaaactgacttgccgattgacggctttgttggcaacggcacttttgccgccgactctcggggccctgtttttattaaacaacagttaaagagggcgtttatcggaaccgcgcagacgccccaggctttcgcctttccggaaattctcgccgcccatgaaaaggccgctgttcaggatggcagggagtttacagatgacgccgaagtctgggcggaattttgcggccctgtcgcggttatccccggcgagatcgtaaacagaaaaataacttttaaggaagatatatcatgttaa

SEQ ID NO: 35316 - protein, 249 aa, Unknown
  Obtained from environmental sample
  SIGNAL (1)...(22)
  DOMAIN (8)...(248): Uncharacterized protein family UPF0007
  misc_feature (1)..(249): Xaa is any amino acid
MSLSNGSIAAIICAAGSSSRMGGAKKEYLPLPGALDSLTVLGAAVSAFALVPEIRIIVIVVPDEPETGETAARNALPPAGIAQSVRFVTGGSTRRASVLNALRALAADAPGYALIHDGARPWISPALIERVIKSVKQYRAVIPLLPLTETPKETDLPIDGFVGNGTFAADSRGPVFIKQQLKRAFIGTAQTPQAFAFPEILAAHEKAAVQDGREFTDDAEVWAEFCGPVAVIPGEIVNRKITFKEDISC

SEQ ID NO: 35317 - DNA, 522 bp, Unknown
  Obtained from environmental sample
  misc_feature (1)..(522): n is a, c, g, or t
atgccagaaggcgggagaggatcgtacttaagaacttttctccatcttggtgtcgggacaatggtctatacggatgaatatgaatcgattaagccgcttcgcggtcgggatctgcctgacatattgcgcataatggagcctctgatgaaatccggaaccctaatcaggcgcacggcggagcagatccaggaaaagagggaagattacgttgtttttgagattgacggctccgtccacgcctgcggcgcgctgcatgactggggcgaggaccagggtgaaatcgccgcggttgcaagcgatcccctgtattcaggcatgaatcttggccgccgcatcgtgggctatttaatagaaaaggcccgcaaaaaaggcatgaagcgcgtcttcgtccttaccaccgtcacacaggactggttcgaggctctcggtttccgcgaagcccgcctggacagcctgcccgaaaagaagcggcaagtttacgatcaaagccggaagagcaaagtctacgcgctggaattataa

SEQ ID NO: 35318 - protein, 173 aa, Unknown
  Obtained from environmental sample
  DOMAIN (70)...(145): Acetyltransferase (GNAT) family
  misc_feature (1)..(173): Xaa is any amino acid
MPEGGRGSYLRTFLHLGVGTMVYTDEYESIKPLRGRDLPDILRIMEPLMKSGTLIRRTAEQIQEKREDYVVFEIDGSVHACGALHDWGEDQGEIAAVASDPLYSGMNLGRRIVGYLIEKARKKGMKRVFVLTTVTQDWFEALGFREARLDSLPEKKRQVYDQSRKSKVYALEL

SEQ ID NO: 35319 - DNA, 921 bp, Unknown
  Obtained from environmental sample
  misc_feature (1)..(921): n is a, c, g, or t
ttgggcgataaaataaaagaagcgttgcagatattattagatttgggtgttcctaaaggtcagcagaatgaacgtaccgcgctctgtttattggcattgactgacataaagaagaattctcaatggataaaagccaaggatccattaatcggaattacaccgatgatggaatttgcaaaatcggcctacaaaaaagaatatgcgcccaataccagagaaaccttcagaagatttagcatgcaccagttagttgaagccgggattgctttatacaatcctgacaagccagaccgccctgttaacagtccgcaaacagtgtatcaactgacgcctttggtattgcatattgttaaactatttggaactgacgaatatgtaaaagcaattgaagtatatcatcagaaaatagggactttagcggaacgataccaggcgtctcgtgaaatggagatgattccggtacagaatattgagggaatgaaattaagtcccggcaagcatagtcaattgataaaagaaataattgataactttgcccccaggtttgttccgggctccctgttgctgtatgcaggagatacaggaaataagtggggatattttgataaaacagcttttggcaagctcggtatcgtccttgacgagcatgggaaaatgccggattgcattttctttttaaagtcgaaaaactggcttgtacttgtggaatcggttaccagtcatggaccaatcgacagcaagcgaaaaatcgaattacaaaaattattcgatacggatttgacacatatttatgtaacagcgtttcccgacagacaaacttttaccagatttacggcagaaatcgcatgggagacagaagtttggctggcggataacccttcgcatcttattcattttaatggggaaaaattcttggggtaa

SEQ ID NO: 35320 - protein, 306 aa, Unknown
  Obtained from environmental sample
  DOMAIN (7)...(306): BsuBI/PstI restriction endonuclease C-terminus
  misc_feature (1)..(306): Xaa is any amino acid
MGDKIKEALQILLDLGVPKGQQNERTALCLLALTDIKKNSQWIKAKDPLIGITPMMEFAKSAYKKEYAPNTRETFRRFSMHQLVEAGIALYNPDKPDRPVNSPQTVYQLTPLVLHIVKLFGTDEYVKAIEVYHQKIGTLAERYQASREMEMIPVQNIEGMKLSPGKHSQLIKEIIDNFAPRFVPGSLLLYAGDTGNKWGYFDKTAFGKLGIVLDEHGKMPDCIFFLKSKNWLVLVESVTSHGPIDSKRKIELQKLFDTDLTHIYVTAFPDRQTFTRFTAEIAWETEVWLADNPSHLIHFNGEKFLG

SEQ ID NO: 35321 - DNA, 954 bp, Unknown
  Obtained from environmental sample
  misc_feature (1)..(954): n is a, c, g, or t
atgagatatttaatccccggcgattatatggccgaccccgccgtacatgtatttaacggaaaattgtacatttacccttcacacgatgtggattgcgatgtagtcgaaaatgacaacggcgaccactttaacatgaaagattaccatgtgttttcgatggacgacgttaaaggcgaagtaacagatcacggcgttgtccttgatataaaagacatcccctgggcgggccgccagttgtgggacagcgatgtcgcctgtaaaaacggcaaatattacatgtattttccgctgaaagataaaaatgacattttcaaaatcggagtggcgatcagcgacaaaccggaaggccctttcaaaccccagaacgaccccatgaaggggagttacagcatagaccccgcagtttttgaagacaacggcaaacactatatgtacttcggcggattatggggagggcagttgcagcgttaccgtaacaataaagcgctggaatcggccgtgcgtcccgaaggtgatgagcccgcgctctgcgccaaagtcgcgaggttaagcgacactatgctcgactttgccgaggaaccncgcgacgtggtaatactcgacgaaaacggcaaggccctgacggcgggcgataaccaacgccgcttttttgaggcgtcgtggatgcataaatataatggaaaatactatttttcatattcaacgggcgacacccatctgctgtgttacgcgaccggcgacaatccctacggccctttcacttaccggggggtgattctgactccggtgattggctggactacccaccatgccattgttgagtataagggcaaatggtacctgtttcaccatgactctgtcccttcgggcggcaaatcatggctgcgcagcctgaaagttaccgaccttgaatatgacgccaatggagcgataaaaacaatatacggcgtataa

SEQ ID NO: 35322 - protein, 317 aa, Unknown
  Obtained from environmental sample
  DOMAIN (18)...(311): Glycosyl hydrolases family 43
  misc_feature (1)..(317): Xaa is any amino acid
MRYLIPGDYMADPAVHVFNGKLYIYPSHDVDCDVVENDNGDHFNMKDYHVFSMDDVKGEVTDHGVVLDIKDIPWAGRQLWDSDVACKNGKYYMYFPLKDKNDIFKIGVAISDKPEGPFKPQNDPMKGSYSIDPAVFEDNGKHYMYFGGLWGGQLQRYRNNKALESAVRPEGDEPALCAKVARLSDTMLDFAEEPRDVVILDENGKALTAGDNQRRFFEASWMHKYNGKYYFSYSTGDTHLLCYATGDNPYGPFTYRGVILTPVIGWTTHHAIVEYKGKWYLFHHDSVPSGGKSWLRSLKVTDLEYDANGAIKTIYGV

SEQ ID NO: 35323 - DNA, 933 bp, Unknown
  Obtained from environmental sample
  misc_feature (1)..(933): n is a, c, g, or t
ttgtgcggggccgagatggaagcccctcgcaaaatggagccggcgccttggaagcaggcgccagaccccacccccaccatagcgttccacagggtcatggagagggccatcgtccactcaatagccagtgagtccgatttcattgattctggggcggtgcttgcgtccatattgcccgagaccgaaagttttgcgtcgtttgtgctgagcaagcatggggtgcacaggctgccgctgctgcgcttccttagccacggcagtggctcgcagcctaggccgcctaagctatcgaacccaactaggctatcggcggctcatgctggccctttgcagatcccccaccctttgccgacaggcaccgaggaagccgagccagacggcggagccctagaggcattcgcggttgatttgctggaaaaagcgaagcagggcctgatagacccactggttgggcgcgaggccgagctggagcgcatcatgcacgttctctgccgccgcaagaaaaacaaccctttgctagtgggcgaggcgggagttggcaaaacggcattggccgaaggcctggcactgcgaatccaccaaggggccgtgccagatggcctagccgcgactgcatactattcacttgatttgggcggactgctggccggcacccgatacaggggggacttcgaggcaagggtcaaatcggtgctggacgcgctgaaaaagaagccaggcgccttgctgttcatagacgaaatccatgccctagcgggggctgggtctgctggcgaggggaccatggacgccggcaacctgctaaaaccggcccttgccgatgggacgctgcgctgcataggggccagcacctaccaagacctcaagggcggctttgaaaaagacagggcccttgcgcggaggttccagacatcgaacttccagagcccatag

SEQ ID NO: 35324 - protein, 310 aa, Unknown
  Obtained from environmental sample
  DOMAIN (170)...(310): ATPase family associated with various cellular activities (AAA)
  misc_feature (1)..(310): Xaa is any amino acid
MCGAEMEAPRKMEPAPWKQAPDPTPTIAFHRVMERAIVHSIASESDFIDSGAVLASILPETESFASFVLSKHGVHRLPLLRFLSHGSGSQPRPPKLSNPTRLSAAHAGPLQIPHPLPTGTEEAEPDGGALEAFAVDLLEKAKQGLIDPLVGREAELERIMHVLCRRKKNNPLLVGEAGVGKTALAEGLALRIHQGAVPDGLAATAYYSLDLGGLLAGTRYRGDFEARVKSVLDALKKKPGALLFIDEIHALAGAGSAGEGTMDAGNLLKPALADGTLRCIGASTYQDLKGGFEKDRALARRFQTSNFQSP

SEQ ID NO: 35325 - DNA, 603 bp, Unknown
  Obtained from environmental sample
  misc_feature (1)..(603): n is a, c, g, or t
atgattcgctctctttacaccgcagccgctggcatgaaaggtaaccagtccttcatagacaccatagccaataacctttcgaacgtcaattcgataggttataagaagcaaaaagttgagtttgaagaccttatttatcagagtttgcaacgcccgggcggggaaatggaagatggaaaccgtgctccggttggcatagaaataggcttgggttcacgcattgttgctacaaaccgcatgttttcgcagggaaatttggagcaaacaggcaatgaatatgacgtcgccatagctggcgaaggatttttccaagtacgccttccagacggtgaaattggctatacccgcaacggagcgttcaaaaagaacgatgaaggttaccttacaacaagccaaggttatcttcttgaaccacctatagttgtgccagacgatgggcttaacttttccgtatccgcagctggagaagcaacctgtgaaaggaacggaaagacagaagttttagggcagtttgaacttgcgagatttataaacccatcaggtttatccgcaagtggcggaagtatctaccgtgagtcagatgccagtggaacccccatatag

SEQ ID NO: 35326 - protein, 200 aa, Unknown
  Obtained from environmental sample
  DOMAIN (5)...(35): Flagella basal body rod protein
  misc_feature (1)..(200): Xaa is any amino acid
MIRSLYTAAAGMKGNQSFIDTIANNLSNVNSIGYKKQKVEFEDLIYQSLQRPGGEMEDGNRAPVGIEIGLGSRIVATNRMFSQGNLEQTGNEYDVAIAGEGFFQVRLPDGEIGYTRNGAFKKNDEGYLTTSQGYLLEPPIVVPDDGLNFSVSAAGEATCERNGKTEVLGQFELARFINPSGLSASGGSIYRESDASGTPI

SEQ ID NO: 35327 - DNA, 582 bp, Unknown
  Obtained from environmental sample
  misc_feature (1)..(582): n is a, c, g, or t
atggcgcaaaggcttggaaaagaaattttcccaaaacacaaaaccgctcttattcactccaaactgcccgaagatgaaaaaaagcagataatggacgattttagaaaaggcaaaataaaaatacttgccgcaaccagcgttgtagaagtaggtgtagacgttccgaacgccgcctgcatggtaatagaacacgccgagcgtttcggattatccgcccttcatcaattacgcggacgtgtcggcaggggagaggagcagtcatactgtttccttgtttattcagatgatcttacggaagaaggcaaaacccgcctaaaagtaatgctggaaaacagcgacggttttgtaattgcggaagaagatttgaaattaagaggtcccggacaaattgcgggaacggaacaatccggctaccttgttcttggaatagccgacccgattcgtgacatggaaacattggaaagagcgaggaacgatgtgttttcgatattggagaatgatcccgatctgttactggaaaataaccgcgtgattgccagagttctggaacaggcttcaccgttcggcgaagttgtgctttaa

SEQ ID NO: 35328 - protein, 193 aa, Unknown
  Obtained from environmental sample
  DOMAIN (7)...(84): Helicase conserved C-terminal domain
  misc_feature (1)..(193): Xaa is any amino acid
MAQRLGKEIFPKHKTALIHSKLPEDEKKQIMDDFRKGKIKILAATSVVEVGVDVPNAACMVIEHAERFGLSALHQLRGRVGRGEEQSYCFLVYSDDLTEEGKTRLKVMLENSDGFVIAEEDLKLRGPGQIAGTEQSGYLVLGIADPIRDMETLERARNDVFSILENDPDLLLENNRVIARVLEQASPFGEVVL

SEQ ID NO: 35329 - DNA, 1635 bp, Unknown
  Obtained from environmental sample
  misc_feature (1)..(1635): n is a, c, g, or t
gtgctggaaagcctgtcaggaagggttaagcggttatatgccgctgttactcctactgatattcgggcggtaaataccggcaaaaaattaaatattccgcttgcctttattgataattctgtttttttggaacatgaggattacgctgttcataaagtgttgcgagctattgcgcttttgaagactgtaggcaatttgagggcgcaggatacggcgaaaaaagagagaatttttcttacttcaaaggaaattcaccgcaaattgattacttggcttgaagcggtcaaaggtactgaagcaatagctgcgttatgcggttttaacaatttatttgacggctgggtttttccggcttataagactgcttcgttggcagagacagcagacctgtccgcctccgatgaattacggaagcgggtttatgatggcagcgttgaacgttacggagaattgggagacatggaaattgggcggattgattatgaactgaatgtgattgagaaaatggggtttccttcttactttttgattattgacgacattgtaaaaatggcttcaaggacatgcggacgtggttcgggagcggcttcgattgtttcttacggtttgggtattaccaatgtagacccgctgcgtcataatctgtactttgagcggtttctgaaccctaaccgtcctgatccgcctgatcttgatattgattttgcctgggatgagcggaatgatttaataagggcagtaattgaaaaattcggttctgattactgcgctcgtgtcgctaaccataatatgttccgctacagatcggctatgcgggagacggcgaaggcttacggttttggagatgcggaaattacacagattgaaagacggctttttcaaatgggtgataagtctgtttcaatagaaccggtatggcgggaaatttttaccatcgcgaaaaagattgaagggctgccccgtggtttgggtatgcactgcggggggcttgttattacgccggagccgatttatcaatacgcgccgatagaaaaatccgcggaggggtttccgcttttggcgtgggaaaaagaaggcgcggaagcggcggggtttgttaaaattgatctgttaggcaatagaagtctcgcggttatcagagacgctgtggcaaatatcaaatatcaagcaacaaatgacggagagaacagcgatattgaggagagattaagcagggcgataactaacagagaaaccattgaagcgttatcaaagggagacagtatgggggtcttttatattgaaagccccgctatgcggcagttacagaaaaagaccggatgcggagattttgagcatattgtgatccacagttcgattatccgtcccgcggcgaataaatttatcatggaatatgtccggcggcttaaaggcgggaaatggaggccgctgcatccattacttgaaaatatacttgatgagacttacggaatactttgttatcaggaagacgtatcaaaaacggctattgcgcttgccggatttaatgaagcggatgctgacaaactgcgtaaagtaatcgctaaaaaaatgggcggggctaaacttgcggtatacaaaaaccagttttttgagggcgccggaaaaacggcgtaa

SEQ ID NO: 35330 - protein, 544 aa, Unknown
  Obtained from environmental sample
  DOMAIN (76)...(544): Bacterial DNA polymerase III alpha subunit
  misc_feature (1)..(544): Xaa is any amino acid
MLESLSGRVKRLYAAVTPTDIRAVNTGKKLNIPLAFIDNSVFLEHEDYAVHKVLRAIALLKTVGNLRAQDTAKKERIFLTSKEIHRKLITWLEAVKGTEAIAALCGFNNLFDGWVFPAYKTASLAETADLSASDELRKRVYDGSVERYGELGDMEIGRIDYELNVIEKMGFPSYFLIIDDIVKMASRTCGRGSGAASIVSYGLGITNVDPLRHNLYFERFLNPNRPDPPDLDIDFAWDERNDLIRAVIEKFGSDYCARVANHNMFRYRSAMRETAKAYGFGDAEITQIERRLFQMGDKSVSIEPVWREIFTIAKKIEGLPRGLGMHCGGLVITPEPIYQYAPIEKSAEGFPLLAWEKEGAEAAGFVKIDLLGNRSLAVIRDAVANIKYQATNDGENSDIEERLSRAITNRETIEALSKGDSMGVFYIESPAMRQLQKKTGCGDFEHIVIHSSIIRPAANKFIMEYVRRLKGGKWRPLHPLLENILDETYGILCYQEDVSKTAIALAGFNEADADKLRKVIAKKMGGAKLAVYKNQFFEGAGKTA

SEQ ID NO: 35331 - DNA, 912 bp, Unknown
  Obtained from environmental sample
  misc_feature (1)..(912): n is a, c, g, or t
ttgcataacataaaattcagcgagcctgttgtcacagccgccctaacccacgccctttccgtatctgccagcttgttccttaaccccggagatactgttataattccagatttatattgggataactacgacttgattttctgtgagatgtatggggcgcagattaaaacattcaacacttttaaaaacgggagttttgatgtggcggctctcgctgcgactttggaagaaggtagcggcaaaaaagtggtacttttgaatttcccaaataaccccacgggctacacagtaacagaaaccgaagcaaatgaaatttgcgaagtactcaaagcctgtgcccaaaaagggagcgatgttgttgttctcttagacgatgcttattttggcttggtttatgaaaagggcatatacaaagaatccctatttgggcttttggcaaacgctcacgaaaatctattagccgtaaaattagacggtccaacaaaagaagactatgtttggggttttagaatcggttttataacttttgctttccacggagcaagcgtgccacagctcaaagccttggaagacaaagccgctggtatggtgcgcgccaccatatccaacaccgcaagcacatctcaagaaattttgctgaacgcatacagcagtgaaagttacgaaaaagagaagcatgaaaaataccacactctaaaaattcgctacgaaaaaataaagcatattttggcagctcacaaagaatatgagcagtcttttaccgctatgcctttcaacagcggatattttatgtgcgttaaaataaacggcgcagaccccgaagctgtgcggcaggaatgtttgaaaaatcacggacttggagttataatgctctctgggcttattcgcatagcattttcctctgttgcctga

SEQ ID NO: 35332 - protein, 303 aa, Unknown
  Obtained from environmental sample
  SIGNAL (1)...(23)
  DOMAIN (1)...(302): Aminotransferase class I and II
  misc_feature (1)..(303): Xaa is any amino acid
MHNIKFSEPVVTAALTHALSVSASLFLNPGDTVIIPDLYWDNYDLIFCEMYGAQIKTFNTFKNGSFDVAALAATLEEGSGKKVVLLNFPNNPTGYTVTETEANEICEVLKACAQKGSDVVVLLDDAYFGLVYEKGIYKESLFGLLANAHENLLAVKLDGPTKEDYVWGFRIGFITFAFHGASVPQLKALEDKAAGMVRATISNTASTSQEILLNAYSSESYEKEKHEKYHTLKIRYEKIKHILAAHKEYEQSFTAMPFNSGYFMCVKINGADPEAVRQECLKNHGLGVIMLSGLIRIAFSSVA

SEQ ID NO: 35333 - DNA, 399 bp, Unknown
  Obtained from environmental sample
  misc_feature (1)..(399): n is a, c, g, or t
atgcaattcgactgcgccgaattgctaaggagttttttactcactatgagcctgacaaatactcacttttgcgatatattgttttatatgatcaaaaacgcccattttaacttaatttctccaatgcaaaaattgatcggcaacaggcacaccccaacaactgcgcccgaaccggtgagggcgtttacggacaaatgcggcacggtgagaggacaaataaaatccccacttatgaaaaaaggcttcagtccgaaggcaacaggcaacaggcaacaggcaacaggcaacaggcaacaggcaacaggcaacaggcaacaggcaacaggcaacaggcaacaggcaacaggcaacaggcaacaggcaacaggcaacaggcaattatactcattctttaactaa

SEQ ID NO: 35334 - protein, 132 aa, Unknown
  Obtained from environmental sample
  misc_feature (1)..(132): Xaa is any amino acid
MQFDCAELLRSFLLTMSLTNTHFCDILFYMIKNAHFNLISPMQKLIGNRHTPTTAPEPVRAFTDKCGTVRGQIKSPLMKKGFSPKATGNRQQATGNRQQATGNRQQATGNRQQATGNRQQATGNRQLYSFFN

SEQ ID NO: 35335 - DNA, 1017 bp, Unknown
  Obtained from environmental sample
  misc_feature (1)..(1017): n is a, c, g, or t
gtggatttgcaaaattccgagcggctctacgcttatttgaaaaagcgagtgcggaacaagcaaaaatattacatatttttagacgaaatacaaaatgtctctaattttgagaaagtggtggatagtttatttttgaaaaagaatttggatatttacataacgggttcaaatgcttattttttgagcggcgaactcgcaacgctactttcgggaagatatgtggaattgaaaatgctaccgctttcatttaaagaatttgcatctgttcaaaaagaaaaaaatactcgcttgctctataacgaatatcttaaaacttcttttccttatgcaataactcttaatgcagaaaaacaaatacaatatttagagggcatttattcaagcgttgttctaaaagacattgttaagcgtctagcggttgcagatgttgcaacgcttgaactcataataagatatctgtatgcggaaattgggaattttcaaaatatcaataaaatttccaacacattgacaagttatggaaataagattagtgataaaacggtagcccgttatataaatggcattgaaaatagcttgcttgtttatagagcagagcgttataatgtgaaagggaaaaaagtatttgccaataacgcaaaatactatgccgtggataacggcttgaggcggttgatagcaggcgacaggagcgaagattacggtcatattttggaaaatattgtttatttggaacttttgaggcgtggctatcaggtatatgttggaattgttgataatttggaagtggactttttggctaaaaaatcaaacggcgagcaattatatgttcaagtttcatataacacggaaaaagaggttattttgaaaagagagcttcgcccattggaagcgataaaagaccaacatccaaaactgcttttgacaatggacgaaattcttcctgaacagaatataaatggaattatcaagacaagcgcattgaaatggttgatgaatacctttgtcaggggatag

SEQ ID NO: 35336 - protein, 338 aa, Unknown
  Obtained from environmental sample
  misc_feature (1)..(338): Xaa is any amino acid
MDLQNSERLYAYLKKRVRNKQKYYIFLDEIQNVSNFEKVVDSLFLKKNLDIYITGSNAYFLSGELATLLSGRYVELKMLPLSFKEFASVQKEKNTRLLYNEYLKTSFPYAITLNAEKQIQYLEGIYSSVVLKDIVKRLAVADVATLELIIRYLYAEIGNFQNINKISNTLTSYGNKISDKTVARYINGIENSLLVYRAERYNVKGKKVFANNAKYYAVDNGLRRLIAGDRSEDYGHILENIVYLELLRRGYQVYVGIVDNLEVDFLAKKSNGEQLYVQVSYNTEKEVILKRELRPLEAIKDQHPKLLLTMDEILPEQNINGIIKTSALKWLMNTFVRG

SEQ ID NO: 35337 - DNA, 1299 bp, Unknown
  Obtained from environmental sample
  misc_feature (1)..(1299): n is a, c, g, or t
ttgcaaaactngccttatctggaaggcgaaggaaaggggttttccatttcgttctactttagccctttccagtggtatataattataagcgaaaaaagcggcgtgttttattctgacgcaaaccgcatcgccgtgcagtccgtaataacgcttggcgcttccattattctcgcctcgatcctgttgataatattttccgcccatcttaccaatccccttggccgtattgttaaaaccatgaacaacattatcagttcggcggacctctcatccagggtggaggttgaataccaggacgagaccggcaatctcgcctttacatttaaccggatgataggcgaactggacaaggcatacggacagattaagcgttatgcgttcgaagcggtgctggccgggaaaaaagaggaacgcgtgcggcagatcttccagaaatatgttccaaaagacgttatcgaacgcttttttgcctctcctgaaaagatgcttgtcggggacaaccgcaatctttcgattcttttttccgatatccgcagctttaccaccatttcggaaggcatggcccccgatgatctggtgaattcgctgaaccgctatttttcggggcaggttgacattatttataaccgcaaggggatcgttgacaaatacataggcgacgccatcatggccttctggggcgctccggaaaaacatgaggatgactgtctgcaatcggttttggccggccttgatatgattgaggcgcttgccgtctttaacgagaaccagaaaaagcttggcaaaccggaattccgtataggagtaggcattaactacggcgaggtaacggtcggcaatataggcagcgagcgcaagatggactacacggtaatcggcgactcggtgaaccttgcctcgcggatggagggccttaccaaaacctaccattccgaactattgatcagtgaaaatgtatatgttgaattacagaaaaaactgaccgaacccaacgcgccaaagctctatttcaggcttctggacactgtcgcggtcaagggaaagaccagaggggtgaagatatacacggtaaagcgcgttttaagccaggcggaagcggccgcgtggcccgcgcacaaccaggggatggcgcttttttacaaacgctctttccgcgaagccgccgataaatttaaggaagtttaccgccttctttccaaagatcctaacgctgaaaacctgttccaccgctgcgtcgaatacgcgacaaacccgcctccgccggattgggacggggtggaagtgatgaagacgaaatag

SEQ ID NO: 35338 - protein, 432 aa, Unknown
  Obtained from environmental sample
  DOMAIN (47)...(117): HAMP domain
  misc_feature (1)..(432): Xaa is any amino acid
MQNXPYLEGEGKGFSISFYFSPFQWYIIISEKSGVFYSDANRIAVQSVITLGASIILASILLIIFSAHLTNPLGRIVKTMNNIISSADLSSRVEVEYQDETGNLAFTFNRMIGELDKAYGQIKRYAFEAVLAGKKEERVRQIFQKYVPKDVIERFFASPEKMLVGDNRNLSILFSDIRSFTTISEGMAPDDLVNSLNRYFSGQVDIIYNRKGIVDKYIGDAIMAFWGAPEKHEDDCLQSVLAGLDMIEALAVFNENQKKLGKPEFRIGVGINYGEVTVGNIGSERKMDYTVIGDSVNLASRMEGLTKTYHSELLISENVYVELQKKLTEPNAPKLYFRLLDTVAVKGKTRGVKIYTVKRVLSQAEAAAWPAHNQGMALFYKRSFREAADKFKEVYRLLSKDPNAENLFHRCVEYATNPPPPDWDGVEVMKTK

SEQ ID NO: 35339 - DNA, 855 bp, Unknown
  Obtained from environmental sample
  misc_feature (1)..(855): n is a, c, g, or t
atgcgcaaactcatactgactacggcggcggtcgcggcggctattggattggcggggtgctctaagacgcctacgccgaaatccgtctccgcgacgcctgatacggcggccctatcggtcgatacgccgcccgccgacgcttccgctttttccgaaacggcggtcggcgggcaaagttttgaaatggcgttcgtggcgggcgggacgtttacgatggggtgcgccgccgaacaggacagcgattgcgacgacgacgaacgtccggcgcattccgtgacgctgagcgattactacatcgggaagcgcgaggtgacgcagggcctgtggaaagcggtgatgggtgccgataataatccgtcattttttacagggagcgataatttgcccgttgaaaacgtccgttggaatgaggtcaacgcgtttatagacagtttgaatagaaagaccggcaggacgtacagattgccgacggaggcggagtgggagtatgcggcgcgcggggggaataagagcggagggtacaaatattctggtagtaataagttggatagcgttgcttggtatgatgataatagcggtaatataacccatgaagtaggtaggaaagcacctaatgaacttggtatctatgacatgagcggtaacgtgtgggtgtggacgggcgattggtatggagattacggttcgtatgcgcagactaatcgtacagggccgtcaacgggctctgcccgcgtgtggcgggtcggtggttggggcagcgtcgcggggtactgccgtgtctctggtcgctactacgacttccccgactaccgctacggcaacgtaggcttccgccttgtgtcgttgtccccctag

SEQ ID NO: 35340 - protein, 284 aa, Unknown
  Obtained from environmental sample
  SIGNAL (1)...(21)
  DOMAIN (58)...(281): Domain of unknown function (DUF323)
  misc_feature (1)..(284): Xaa is any amino acid
MRKLILTTAAVAAAIGLAGCSKTPTPKSVSATPDTAALSVDTPPADASAFSETAVGGQSFEMAFVAGGTFTMGCAAEQDSDCDDDERPAHSVTLSDYYIGKREVTQGLWKAVMGADNNPSFFTGSDNLPVENVRWNEVNAFIDSLNRKTGRTYRLPTEAEWEYAARGGNKSGGYKYSGSNKLDSVAWYDDNSGNITHEVGRKAPNELGIYDMSGNVWVWTGDWYGDYGSYAQTNRTGPSTGSARVWRVGGWGSVAGYCRVSGRYYDFPDYRYGNVGFRLVSLSP

SEQ ID NO: 35341 - DNA, 321 bp, Unknown
  Obtained from environmental sample
  misc_feature (1)..(321): n is a, c, g, or t
atgcacgagatgaaactcatcatcgatcttgtaaaccgcggcggacttgcctttatgcgttactcgatttccgacacagcggaatacggcgattatattacgggaccgaagatcattaccaaagagacaaaggacacaatgcgtcaggtattaaaggatattcaaacaggcaaattcgcgagggaatggatacttgaaaaccaagtaaaccgtccgttctttaaccgcatgagggcgattgaggcggaacacccaatagagaaaacgggaaacgaactccgcgcaatgatgtcatggttaaagaagaacgaggaaaaataa

SEQ ID NO: 35342 - protein, 106 aa, Unknown
  Obtained from environmental sample
  DOMAIN (1)...(101): Acetohydroxy acid isomeroreductase, catalytic domain
  misc_feature (1)..(106): Xaa is any amino acid
MHEMKLIIDLVNRGGLAFMRYSISDTAEYGDYITGPKIITKETKDTMRQVLKDIQTGKFAREWILENQVNRPFFNRMRAIEAEHPIEKTGNELRAMMSWLKKNEEK

SEQ ID NO: 35343 - DNA, 789 bp, Unknown
  Obtained from environmental sample
  misc_feature (1)..(789): n is a, c, g, or t
atgagcatagaaaacgcaatgccggacggtttattaggcgagatgtggcgaagcattaattggacggagtacgaggccgccttgcggtcgtaccagtacgagatagcacgagccgcaaagagttatactccgggcagtatttataaagcgcaaaaggagctgttgaactcgatagaggctaaagctcttgcggtcaaacacgtctgcgattcagccgcccaatccggcgtagacggcgtacggtggactacagatgccgccaaaatgagggccgctaactcgctccagcccccggagtacacggctcaaccgtcgcggcttgtaaagatcattcaggaaagtaacggcaaggagcgacacgttcagatacccgtatattttgaccgggcaatgcacacgctacacgcttattcccttgacccagtatccgaatcaaaagccgacaaaaaatcttttgctttccgcaaaggccgctccattaccgaagaggcgcagaaggcttacgctccagcctatgcagggaagaatgggaaccatgcccagattcaacaccctttccagcgaatctttgaaaatcttgtccacaagaccggcgtgttccgtgtcaacgccgttttggacgccaagcccccttgcccgcacaaaattgccgattatagcctcaaccttgcttgcggtaaggaatgtcataaatttgctcgctacgtcaaaagccgccatttcaacaaaagggatagtctgttttgttgtgatgcggacggggaaattatcaatagatgtatattttga

SEQ ID NO: 35344 - protein, 262 aa, Unknown
  Obtained from environmental sample
  misc_feature (1)..(262): Xaa is any amino acid
MSIENAMPDGLLGEMWRSINWTEYEAALRSYQYEIARAAKSYTPGSIYKAQKELLNSIEAKALAVKHVCDSAAQSGVDGVRWTTDAAKMRAANSLQPPEYTAQPSRLVKIIQESNGKERHVQIPVYFDRAMHTLHAYSLDPVSESKADKKSFAFRKGRSITEEAQKAYAPAYAGKNGNHAQIQHPFQRIFENLVHKTGVFRVNAVLDAKPPCPHKIADYSLNLACGKECHKFARYVKSRHFNKRDSLFCCDADGEIINRCIF

SEQ ID NO: 35345 - DNA, 525 bp, Unknown
  Obtained from environmental sample
  misc_feature (1)..(525): n is a, c, g, or t
ttgaaggctctactctgttttcaaaaatggactgccccgttaccgaagaccccggctccccagggctgtaaaagatctggctctgctggcaaagacgggcttaaggtaatcattgttcccggcgcaaaagaaaatatcgacgcagttttaaggcagtacaatatcgaatcaaaatatacatctattgataatttccccgtccgcatcacaacaaaacagactatcccttttgttgaaatggcggcttttgacgtagcgagcaaatttatgacattccttaccgcaagcaaggttgaggctataatcggcaattttgtgcgggcaagggggcttggcgtccaaaacggcgttgacacggaacacgccggtcttgtggacaagattttcaaagattcgctggaaagggtgttgaatctgggcatggttcccattcttccctgcataggctggagcgtaagccttctgcgcctcttcggtaatggagcggcctttgcggaaagcaaaagattttttgtcggcttttga

SEQ ID NO: 35346 - protein, 174 aa, Unknown
  Obtained from environmental sample
  misc_feature (1)..(174): Xaa is any amino acid
MKALLCFQKWTAPLPKTPAPQGCKRSGSAGKDGLKVIIVPGAKENIDAVLRQYNIESKYTSIDNFPVRITTKQTIPFVEMAAFDVASKFMTFLTASKVEAIIGNFVRARGLGVQNGVDTEHAGLVDKIFKDSLERVLNLGMVPILPCIGWSVSLLRLFGNGAAFAESKRFFVGF

SEQ ID NO: 35347 - DNA, 312 bp, Unknown
  Obtained from environmental sample
  misc_feature (1)..(312): n is a, c, g, or t
ttggatgtcgatgcagaagtcggcgtgttggccgccgttgaggatgttcatcattggaacggggagaatgtgtgcaccggccccgcccaaatagcgatacagtggctggttgcaagcctttgcggcggcaaccgccgtggccatggaagcgcccaagatggcatttgcgcccagcttggacttgttctcggtgccatccaagttgatcatcaactcatcgatctcgacttgctggaatggatccatcccttgcaacgcgttgttgatatcttcattgatggcctttactggacccagtacgcccttggctaa

SEQ ID NO: 35348 - protein, 103 aa, Unknown
  Obtained from environmental sample
  misc_feature (1)..(103): Xaa is any amino acid
MDVDAEVGVLAAVEDVHHWNGENVCTGPAQIAIQWLVASLCGGNRRGHGSAQDGICAQLGLVLGAIQVDHQLIDLDLLEWIHPLQRVVDIFIDGLYWTQYALG

SEQ ID NO: 35349 - DNA, 489 bp, Unknown
  Obtained from environmental sample
  misc_feature (1)..(489): n is a, c, g, or t
atgaacgccaacaatccatttggcgattttatccggggcagggaattcaagccccgcccggtggttgcgaccaattcgccggccctggatgtcagcgttccctccaattttgcccgctttagctctttttacgatgaagccccagccgttatgcgcaatatagtattcccggcttccataaacgactcggctacgcttaaggcgatggaatttgcctggaaaaaatacggaatgttgctggatcctcatggggctgtggctttggcggcggcgagggattttttcaaccctgataagaattcagttgagcatataattgttcttgcgacaggccatccggcaagagaagctgctatagtagaagcggctactgggcaaaaggtttcgttgcccgaaaggcttgccttgcttgaaaaagaagaggagccggttgccgttatagatccgcatcttggcgctctggaggggctgttaaccggctgcctttag

SEQ ID NO: 35350 - protein, 162 aa, Unknown
  Obtained from environmental sample
  misc_feature (1)..(162): Xaa is any amino acid
MNANNPFGDFIRGREFKPRPVVATNSPALDVSVPSNFARFSSFYDEAPAVMRNIVFPASINDSATLKAMEFAWKKYGMLLDPHGAVALAAARDFFNPDKNSVEHIIVLATGHPAREAAIVEAATGQKVSLPERLALLEKEEEPVAVIDPHLGALEGLLTGCL

SEQ ID NO: 35351 - DNA, 558 bp, Unknown
  Obtained from environmental sample
  misc_feature (1)..(558): n is a, c, g, or t
atggccgagcgccttcgtcaggcccggagccccgcctggaagtctggcccagggcggggacaagcgggcccgggcggccctcttcggccgggccaacctgaattcctacttgtcggtctgccagttgggcataaccatgaccagcctgggcctgggctggctgggcgagccggccgccgccgccctgctgcggcccctcctggacagcctgggcctggaaaacccggatttggccaaaagcctggcctttatcctgggtttcggcttgatcactttcggccatgtggtctttggcgagcaggcccccaagatagtctccatccgggcggccgaggccacggtcctggccctggcccggaccatgcgggtgttctattttcttttccggcccggggtcaggcttttgaacaccgcggccgacctgaccatacggctcttgggcggcgaggccctgggccggcacgaaacggccccttcctcggacgaactaaagctcctggtggcggcctcccgggccgaggggcagctggacgcggacgaggccagaattgtcaataa

SEQ ID NO: 35352 - protein, 185 aa, Unknown
  Obtained from environmental sample
  misc_feature (1)..(185): Xaa is any amino acid
MAERLRQARSPAWKSGPGRGQAGPGGPLRPGQPEFLLVGLPVGHNHDQPGPGLAGRAGRRRPAAAPPGQPGPGKPGFGQKPGLYPGFRLDHFRPCGLWRAGPQDSLHPGGRGHGPGPGPDHAGVLFSFPARGQAFEHRGRPDHTALGRRGPGPARNGPFLGRTKAPGGGLPGRGAAGRGRGQNCQ

SEQ ID NO: 35353 - DNA, 345 bp, Unknown
  Obtained from environmental sample
  misc_feature (1)..(345): n is a, c, g, or t
ttggggcacctgaatgaaatggtcgcgcccggctactccattttggtgaattccagccgggtcttgtatatcaaggaggccgaacggctggccgccgaataccttatcaccggcggtggggctaaaaaccggaactttttgcaaaacaaggtccaatggtccggtttgcccatgcccctggaggaaattctcctggatccccagacttccggcggtttgctcatcagcgttcaccccgacgacgccgaggccctgctggccgacttggccgccctggatccgccctcctgcctggtgggtgaggtcattccccgccaggctcacaacctcatcgtgaccccgtaa

SEQ ID NO: 35354 - protein, 114 aa, Unknown
  Obtained from environmental sample
  misc_feature (1)..(114): Xaa is any amino acid
MGHLNEMVAPGYSILVNSSRVLYIKEAERLAAEYLITGGGAKNRNFLQNKVQWSGLPMPLEEILLDPQTSGGLLISVHPDDAEALLADLAALDPPSCLVGEVIPRQAHNLIVTP

SEQ ID NO: 35355 - DNA, 423 bp, Unknown
  Obtained from environmental sample
  misc_feature (1)..(423): n is a, c, g, or t
ttggttttgcttgtcccgggcgaaagtgcggaaagccgggaagagatacgggagaacttcattgagtatgtccgccggtcgccggtcataatgcgcgaagagggctccggcaccagggcggagaccctggccctcttggccaaaatggggatagactggcgcgatttgcatatccgggcctacttttcagacgcccacagcatactcctggccgtatcgcgcgggatgggcgtggccctggtttccaaaatctcggccgcctggcatgtggaggccggccggctgaaggtggtggaaatgaacagcccgctgttcagccggcagatttacctggcgcacaacaaggagttttggctgtcgcccgtgcaaaaagcctttgccgaccatgcccgggggttttaccggggaggggggccggattga

SEQ ID NO: 35356 - protein, 140 aa, Unknown
  Obtained from environmental sample
  misc_feature (1)..(140): Xaa is any amino acid
MVLLVPGESAESREEIRENFIEYVRRSPVIMREEGSGTRAETLALLAKMGIDWRDLHIRAYFSDAHSILLAVSRGMGVALVSKISAAWHVEAGRLKVVEMNSPLFSRQIYLAHNKEFWLSPVQKAFADHARGFYRGGGPD

SEQ ID NO: 35357 - DNA, 780 bp, Unknown
  Obtained from environmental sample
  misc_feature (1)..(780): n is a, c, g, or t
ttggaattgggcgcgcgggattttatcatgaagccggcggaaaaaagcatactactgcacagaatcgaactgcatcttcgtttcgcttcctatcaggtccagactgaagaaaaagtcacggccctttcagacaacatcgcgatctcatttgcggagatgatcgaatgccgtgatgaaaatacggggggccatgtaattcgcacgtcaaaatacgttgacatactgggcaaagagctgattagcaagggtgtttttccggatgaactcaatgaatccgaattgcagatgatggtgcgcgccgctccgctgcatgatatcggaaaaatcgccatcagcgaccgcgtgttactgaaagccggacggcttgatgatatagaattttccattattaaacgtcacgcggaaataggcgctcaaattgtggaacggatgtaccagcgtatgcccgcccagcggtatctttactatggcagccttattgccggatcccaccatgaacgctatgacggcaagggttacccaaaaggcctggaaaaaaataatattccgctctgcgcgagaattatggcggtggcggatgtttatgacgcgcttatggaaacacgggtttaccgcaagggactgggccatatccaggcaagcaatatcatttttgaaaacgaatggacgcagtttgaccccaaggttgttgaagcgttcagaaatgtagaggagaagataaatgaagtcgcaagcacatggaatgaatctgcaatgaacagcggtggtatatatgcttaa

SEQ ID NO: 35358 - protein, 259 aa, Unknown
  Obtained from environmental sample
  DOMAIN (61)...(198): HD domain
  misc_feature (1)..(259): Xaa is any amino acid
MELGARDFIMKPAEKSILLHRIELHLRFASYQVQTEEKVTALSDNIAISFAEMIECRDENTGGHVIRTSKYVDILGKELISKGVFPDELNESELQMMVRAAPLHDIGKIAISDRVLLKAGRLDDIEFSIIKRHAEIGAQIVERMYQRMPAQRYLYYGSLIAGSHHERYDGKGYPKGLEKNNIPLCARIMAVADVYDALMETRVYRKGLGHIQASNIIFENEWTQFDPKVVEAFRNVEEKINEVASTWNESAMNSGGIYA

SEQ ID NO: 35359 - DNA, 888 bp, Unknown
  Obtained from environmental sample
  misc_feature (1)..(888): n is a, c, g, or t
atggcgaacttacgcgacgtgcgcctgcggatgcgggcggttgaacagacattgcaggtaacaaaagcgatgaaactcatctcgaccgccaaaatgcgcaagagcagaagaatgttaagcgacgccgaaccttacttcagaagaattacaaaatcaatgttcgatattctatccggcacgggccgtttacggagcccctttgtccgcaagcctgatgaatcatcttaccgctccgcaataatagtggtgaccagcgacaagggccttgccggcggctataacgcgaatgttttcagaacggtaaacgatctctgcgcaagactgcaaaagcctatgctgattttgattggcacgataggctaccgttatttcatccattcgccccatgtcattcttgaaaattttacttttcattcgcaaataccaacgctggatcacgccgaggaaattgccgaatacatgatttcgcagtacatgtgggggctgtttgacgaaatacacattgtgtacacccacatgttcaacgccgttaaacttctgcccacggaacggcagatattaccgctggacacaaaaacaattcaagacgagcttacggaaatcggcggagagaaaagggtggaattgcaatttgattatttaccttcggcgaaggaagtttttgacatactggttccgcagtatatgaagggcgtaatttacggggctatggttgaagcctacgcgagcgaacaaaacgcccgcatgaccgccatggacgaggcttcaaaaaacgccgaggatatgcttgcctctttacgtatcaattacaacagagcaaggcaggcgggcattactcaggaaatgacggaaataacaggcggcgcgacagcgttagccgacaggtga

SEQ ID NO: 35360 - protein, 295 aa, Unknown
  Obtained from environmental sample
  DOMAIN (2)...(292): ATP synthase
  misc_feature (1)..(295): Xaa is any amino acid
MANLRDVRLRMRAVEQTLQVTKAMKLISTAKMRKSRRMLSDAEPYFRRITKSMFDILSGTGRLRSPFVRKPDESSYRSAIIVVTSDKGLAGGYNANVFRTVNDLCARLQKPMLILIGTIGYRYFIHSPHVILENFTFHSQIPTLDHAEEIAEYMISQYMWGLFDEIHIVYTHMFNAVKLLPTERQILPLDTKTIQDELTEIGGEKRVELQFDYLPSAKEVFDILVPQYMKGVIYGAMVEAYASEQNARMTAMDEASKNAEDMLASLRINYNRARQAGITQEMTEITGGATALADR

SEQ ID NO: 35361 - DNA, 348 bp, Unknown
  Obtained from environmental sample
  misc_feature (1)..(348): n is a, c, g, or t
ttgaatgaaacggaaaatgttatcaataaagaggagaacgtcctgaccttctttgtcgcggaaatgttccgccatggtcagccccgcaagagcgaccctcatgcgcgctccgggcggttcgttcatctgtccgaatacaagcgctgttttatcaataacgccgctctcgttcatctctttccagagatcggcgccttcacgcgaacgctctcctacgccggcaaacaccgagtagccggaatgttcggtcgctatatttctaatcaactccataataataacggttttccctactcccgcgccgccgaaaagtccgacctttccgcctttcgcgtaaggcgcaattaa

SEQ ID NO: 35362 - protein, 115 aa, Unknown
  Obtained from environmental sample
  misc_feature (1)..(115): Xaa is any amino acid
MNETENVINKEENVLTFFVAEMFRHGQPRKSDPHARSGRFVHLSEYKRCFINNAALVHLFPEIGAFTRTLSYAGKHRVAGMFGRYISNQLHNNNGFPYSRAAEKSDLSAFRVRRN

SEQ ID NO: 35363 - DNA, 681 bp, Unknown
  Obtained from environmental sample
  misc_feature (1)..(681): n is a, c, g, or t
atgacagctaacattaattcggtgacaaaaacattgatagaaaacagcaagaatgtcagcgatttggctcaagcgtccgaaataggcaaaacggggcttcaaaccgtggcgcaggaaatagagggaatcgcccgggattccgaggggcttttggaaattaactcggtaatggacaatatcgccagccaaaccaatttattaagcatgaacgcggcaattgaagcggcccacgcgggggaagccggcaaaggttttgcggtagtcgctgacgaaatacgcaagctggcggaatcatcaagcgagcagtcaaaaacaacggcgggaatgttaaaaaaaataaagtcttcaattgacagtattaccgcgtcttccaacgaagtacttgcccgttttgaagccatagactcgggagtaaaaacagtatctgaacatgaagaagttatccgtaacgcgatggaagaacaggaagcgggcgggaaacaaatacttgacgcggtaggacgcctgaaagacataaccgtagaggttcataaaggcgccgaagaaatggcaagatccggcgatgaaatgatcaagagaacccataattttattaatgtaagcaaacaggtagtcgatggcatgaacagaatggcggatgtagacgtaaaagaaataaagaaccgcgattcaccatgttga

SEQ ID NO: 35364 - protein, 226 aa, Unknown
  Obtained from environmental sample
  DOMAIN (1)...(212): Methyl-accepting chemotaxis protein (MCP) signaling domain
  misc_feature (1)..(226): Xaa is any amino acid
MTANINSVTKTLIENSKNVSDLAQASEIGKTGLQTVAQEIEGIARDSEGLLEINSVMDNIASQTNLLSMNAAIEAAHAGEAGKGFAVVADEIRKLAESSSEQSKTTAGMLKKIKSSIDSITASSNEVLARFEAIDSGVKTVSEHEEVIRNAMEEQEAGGKQILDAVGRLKDITVEVHKGAEEMARSGDEMIKRTHNFINVSKQVVDGMNRMADVDVKEIKNRDSPC

SEQ ID NO: 35365 - DNA, 417 bp, Unknown
  Obtained from environmental sample
  misc_feature (1)..(417): n is a, c, g, or t
atgtctttcaggcgtcctaccgcgtcaagtatttgtttcccgcccgcttcctgttcttccatcgcgttacggataacttcttcatgttcagatactgtttttactcccgagtctatggcttcaaaacgggcaagtacttcgttggaagacgcggtaatactgtcaattgaagactttattttttttaacattcccgccgttgtttttgactgctcgcttgatgattccgccagcttgcgtatttcgtcagcgactaccgcaaaacctttgccggcttcccccgcgtgggccgcttcaattgccgcgttcatgcttaataaattggtttggctggcgatattgtccattaccgagttaatttccaaaagcccctcggaatcccgggcgattccctctatttcctgcgccacggtttga

SEQ ID NO: 35366 - protein, 138 aa, Unknown
  Obtained from environmental sample
  SIGNAL (1)...(24)
  misc_feature (1)..(138): Xaa is any amino acid
MSFRRPTASSICFPPASCSSIALRITSSCSDTVFTPESMASKRASTSLEDAVILSIEDFIFFNIPAVVFDCSLDDSASLRISSATTAKPLPASPAWAASIAAFMLNKLVWLAILSITELISKSPSESRAIPSISCATV

SEQ ID NO: 35367 - DNA, 687 bp, Unknown
  Obtained from environmental sample
  misc_feature (1)..(687): n is a, c, g, or t
gtgcagggcgccgatgcagccctgattataacccgccgtatagagcaggctaaccagtggaagctggccgacgtgcttatagtcggcaggggcggcggctcgcttgaagaccttttaccgttctcggaggaaatcgttgtgagggccgtcgccgaatcgaaaattcccgtggtaagcgccgtaggccatgagattgactgggccttatgcgattttgccgccgacctcagggctcctactccgtcggccgcggcggagctggtcagcggcgaatacgcggctgttctgtcaaatatccaaaacatagccgaaatatttacatcatcaataaaggcaaggatcgaaaaagcgagactcctcttgcggcctttcaatgccgaagaccttgaataccgcttccgttcgattttacaaccgcgcctcgtacgctttgacgacgccaaggaaaatcttgtagagggtatggcggcgcttgtagccggactgcgtaagaggcacgaacttgcccttgccgtacttgaagcgggaagccccctggcggtaatggaaaggggcttttcagttgtaacgaacacaaggacaggcaacattgtccggggaggagacgaagcccgccacggcgaccgccttgagatacgcccgcttcgcggcgctattacggcagtaacggaggaatgttatggctaa

SEQ ID NO: 35368 - protein, 228 aa, Unknown
  Obtained from environmental sample
  DOMAIN (23)...(164): Exonuclease VII, large subunit
  misc_feature (1)..(228): Xaa is any amino acid
MQGADAALIITRRIEQANQWKLADVLIVGRGGGSLEDLLPFSEEIVVRAVAESKIPVVSAVGHEIDWALCDFAADLRAPTPSAAAELVSGEYAAVLSNIQNIAEIFTSSIKARIEKARLLLRPFNAEDLEYRFRSILQPRLVRFDDAKENLVEGMAALVAGLRKRHELALAVLEAGSPLAVMERGFSVVTNTRTGNIVRGGDEARHGDRLEIRPLRGAITAVTEECYG

SEQ ID NO: 35369 - DNA, 1284 bp, Unknown
  Obtained from environmental sample
  misc_feature (1)..(1284): n is a, c, g, or t
atgcttaaaaacggcgaagctgacgcgttcttccgaatggatactgcggaaggggcttttgacgtatacggagacgtggttggcgaagaattttttccattgattttcaggtcgtcctgtctgacaacgcgcaagcaggaacttcggcctgtaatctcagctctggaaagaatattgagtaatagccgtattcttgagtatctgacctcgctgcaaaagaacgggcatcagcaatacatggaaagcagaatatattcgctattgaccgaagaagaacgcgcctttataaaaagccaccctgtaataccaatcggcgcggatttcagcaattatccgatttcattttacaatacccatacgagtaaatgggagggaatatatttcgaggccctgaatgaagtgtcaaagcttaccgggcttgcctttgaacccgccaacaacgaaaaaacgccgctgctcaaggtgatagacaatgttgaagacggcaaagcgcagatcatatccgaattgtaccggataaaagaatataaagaccgtttcttatggtcggatgttccggttttacaggataactacgcgtttataacacgggcggatttccataatattgacataagcgaggtttcgtatctgcacatcggcatccgcaggaactcccattacttcgaattatttaaaaaaatgtttcccgaccaccagaatttcaccgcatatgaaaaccaggaagaaacatgggacgcgctaaaagccggaaagatcgacgtgcttttctccagccggcgaaggctggttatttataccaactaccacgaagaagtgggtttcaagctcaatttaatattcgataatgaatttgacacgtcgtttggttttaacagggacgcgcggattctcaagtcaattatagacaagtccctgggccttatcaaaataaacaatatctcaaaccagtggatgaacagaagttatgattaccgggctaaattgaaggctgcctggctgccctggttaatcggcatgtcggctttatttttccttgtacttctccttgtttcggctcttttaagaagaagccggggcgtcggcaaagggcttgaagccctggtaaaagaacggacaagggaactcgcgttcgagacatccaaacttcaggcggtgattgactcgatccccgatatcatgttttgcaaggatacaggttataaatacacgcaatgcaacaattcattcgagcaatttctgggtgtcagggaatccgaaattgtcggtaaaacgcgacattga

SEQ ID NO: 35370 - protein, 427 aa, Unknown
  Obtained from environmental sample
  DOMAIN (102)...(321): Bacterial extracellular solute-binding proteins, family 3
  misc_feature (1)..(427): Xaa is any amino acid
MLKNGEADAFFRMDTAEGAFDVYGDVVGEEFFPLIFRSSCLTTRKQELRPVISALERILSNSRILEYLTSLQKNGHQQYMESRIYSLLTEEERAFIKSHPVIPIGADFSNYPISFYNTHTSKWEGIYFEALNEVSKLTGLAFEPANNEKTPLLKVIDNVEDGKAQIISELYRIKEYKDRFLWSDVPVLQDNYAFITRADFHNIDISEVSYLHIGIRRNSHYFELFKKMFPDHQNFTAYENQEETWDALKAGKIDVLFSSRRRLVIYTNYHEEVGFKLNLIFDNEFDTSFGFNRDARILKSIIDKSLGLIKINNISNQWMNRSYDYRAKLKAAWLPWLIGMSALFFLVLLLVSALLRRSRGVGKGLEALVKERTRELAFETSKLQAVIDSIPDIMFCKDTGYKYTQCNNSFEQFLGVRESEIVGKTRH

SEQ ID NO: 35371 - DNA, 1215 bp, Unknown
  Obtained from environmental sample
  misc_feature (1)..(1215): n is a, c, g, or t
atggcgtacatactggcggttaatccgggtatgctgggcattatcggtaatggtatgacgccaggggcggtttttactgcgactgccattgcttcggctattgcaaccatcgtcatggcttttacggcaaacctgcctgtggccctggcccctggaatgggtcttaacgcattctttgccttcaccgtggttttgggcatgggctattcgtggcagatggccctgacggcggtattcctggaaggcatcgtttttgtgatcctgtcgctttttaacgttcgggaagcgattatcaacgccattccgatgaatctgaaaaaagccgtcgcggtgggtatcgggctttttatagccctcattggttttgccaacgccggcattgtagtaaatgacgcgggtactgttataggtttgggcaacatttcctctccttctcctttaatggcgcttttgggccttgttatcatcatcattctttattcccttaaagtgccaggctccatcctcatagggattcttgctactacagttttgagcattgtttttggagtagcctccgttccccccggctggtctcttttcagtgttcccgcagcccctctctttttccggtttgattttagcaatatattcagttttcagttctttacggttttctttacttttctttttgtagatatttttgatactgtcggaacgctgatgggggtagccacacaggcgaaccttatcgacaaaaacgggaatattccgcacgtcaagcaggcgcttttgtcggacgcaataggaacggtggttggagcctcgcttgggacatctaccgtaaccagttacattgaaagctctgccggcgtcgcttccggcggtagaacgggccttgccgctcttacaaccgggattcttttcttcctggccctggtactgtcacccctcttccttcttgtaccgacatttgccacggcgcccgcgcttatttttgttggttttcttatgattgcgccggtagttggcattaatttcaaggatcctaccgagggcattccggccttttttgctattgtgatgatgccatttgcgtacagtatagccgaaggtattgtctacggtttgctttcgtatacgcttttgaaagcagccaccggcaagctcaaggatgttcctcttgttacctggatactgtttgtggtatttgttcttaggttctttataagttag

SEQ ID NO: 35372 - protein, 404 aa, Unknown
  Obtained from environmental sample
  DOMAIN (1)...(368): Permease family
  misc_feature (1)..(404): Xaa is any amino acid
MAYILAVNPGMLGIIGNGMTPGAVFTATAIASAIATIVMAFTANLPVALAPGMGLNAFFAFTVVLGMGYSWQMALTAVFLEGIVFVILSLFNVREAIINAIPMNLKKAVAVGIGLFIALIGFANAGIVVNDAGTVIGLGNISSPSPLMALLGLVIIIILYSLKVPGSILIGILATTVLSIVFGVASVPPGWSLFSVPAAPLFFRFDFSNIFSFQFFTVFFTFLFVDIFDTVGTLMGVATQANLIDKNGNIPHVKQALLSDAIGTVVGASLGTSTVTSYIESSAGVASGGRTGLAALTTGILFFLALVLSPLFLLVPTFATAPALIFVGFLMIAPVVGINFKDPTEGIPAFFAIVMMPFAYSIAEGIVYGLLSYTLLKAATGKLKDVPLVTWILFVVFVLRFFIS

SEQ ID NO: 35373 - DNA, 825 bp, Unknown
  Obtained from environmental sample
  misc_feature (1)..(825): n is a, c, g, or t
atgtatgccccgcaatgggtagatattgtcgaaaattacctgaactggcgcgggtttaaatgcgccgcctggtatttccacgctcacaccaatgaatcgttttccaaagaaaaacaaacaattgttgcccactattcgtcaatcgaaccagttgattttcaaaacggtgcttttgacgtggcatggttttgggaagcatataaaatgttagggaaagaccggtttaaagttgtttatgacgcggcgaaatatgttgcgtctgccgggcagcaccggcgcgcccagcttttttccgatgcagttaccggcaatttagatgccgcggaatctgagaaaattattaccgaaaagcgcaataaagaccggcttttagcctattcgctgattccgctgaaaaaaaagaaggacgctttaaaaaggtatgagtttattcaggcttttttcaaggaatcaaaaaaatacggcgcccagcgtcaggaaagcgaaagaaccgctgtcaggattgctctggacaacttggctcgcaacgctggttttgccgacagcagccgctttatgtggcaaatggaaactgacaaactaaccgaagttgctggattgtttaagccaacagcaattgaaggcattgaaatgcaaattgtttttagcgataacggtcaagcgtcagtcgaaatctcgaaaaacgagaaaacattaaaagatgtgccgaccaaacttaaaaaacatgctgatgttgtccgaatcaaaactgtggcgaaagaattaaaacagcagcactcccgggcacgcgccagttggaaaacgcaatattccgctgataattaa

SEQ ID NO: 35374 - protein, 274 aa, Unknown
  Obtained from environmental sample
  misc_feature (1)..(274): Xaa is any amino acid
MYAPQWVDIVENYLNWRGFKCAAWYFHAHTNESFSKEKQTIVAHYSSIEPVDFQNGAFDVAWFWEAYKMLGKDRFKVVYDAAKYVASAGQHRRAQLFSDAVTGNLDAAESEKIITEKRNKDRLLAYSLIPLKKKKDALKRYEFIQAFFKESKKYGAQRQESERTAVRIALDNLARNAGFADSSRFMWQMETDKLTEVAGLFKPTAIEGIEMQIVFSDNGQASVEISKNEKTLKDVPTKLKKHADVVRIKTVAKELKQQHSRARASWKTQYSADN

SEQ ID NO: 35375 - DNA, 375 bp, Unknown
  Obtained from environmental sample
  misc_feature (1)..(375): n is a, c, g, or t
atgaacgtagaaacaaaagtaatcaaaagtcggttaggtttactaagcttagccgaagagctaggcaatgtatcattagcctgcaagtattttgggtatagtagagacaccttctaccgctacaaggacctgctatcggcgggtggcgaggaagcccttcgagacatgagccgtaaaaagcctaacattaagaatcgcattgaagcacaggtagaagagcgcgttgttgcgtttgcggtagagaacccctcctttgggcaaaccagagcctccaatgagctaaagaaagcaggcgtattcatctcgccctgcggagttcgttgtgtctggctgcggcatgacctggaaaccttcaaaagaggcactcggccataa

SEQ ID NO: 35376 - protein, 124 aa, Unknown
  Obtained from environmental sample
  misc_feature (1)..(124): Xaa is any amino acid
MNVETKVIKSRLGLLSLAEELGNVSLACKYFGYSRDTFYRYKDLLSAGGEEALRDMSRKKPNIKNRIEAQVEERVVAFAVENPSFGQTRASNELKKAGVFISPCGVRCVWLRHDLETFKRGTRP

SEQ ID NO: 35377 - DNA, 882 bp, Unknown
  Obtained from environmental sample
  misc_feature (1)..(882): n is a, c, g, or t
atgccgcgaaatatgaaaggtacattgcttcaatcctttataaaagaattaaacgaagctgcatctgcccctgccgaagaatttccaagacaagtacctcgcaaagccgctcctcgtaccaacataaacgaagatttgcgggaaagacttagggaattgaggaatgaaaaagccgcgcagcttaaaatagagttcgggcttttggcaaagcaaagccagctcaatgtgcttgcagattccttaaacggcacttgggaagaaaaatttgaaatagctgaatttatgaattggcaaaaagaaatttggaaaactctggcacccaaagccattttgccaaaaaccccagccgaattcagaaactgggcaaaagaaaagctatctgctatgagcgaagaaagccgagcagaagaatcagagaaattgcttgccgagcttgccagccatcctgtacttgaaaacggttatatagccgcattttatccggcaatgtttgagccgcagataattcctttcttaaaaaaacttgcaaatgaaggcaggttgcttttgccaagggtgcaaggcaaacagaaaatggaatttgtttcggttcaagatttagagagcgaactacaaaagggagcttttggaataatggaaccaaaagcagatttaccagcttatgaaaatttgcccacagcatttatcgttccgggtcttgtttttggaaaagacggcagccgaatcggtcgcggagccggctattacgaccgctatttagcctcggtcaagggaattccacgcctgggcgtggcatattccgctcaaatgagaaattctctgccgcaaaacgcgatggatatgagaatggacgaagtgttatgggtaaaggggggaaactag

SEQ ID NO: 35378 - protein, 293 aa, Unknown
  Obtained from environmental sample
  DOMAIN (115)...(289): 5-formyltetrahydrofolate cyclo-ligase family
  misc_feature (1)..(293): Xaa is any amino acid
MPRNMKGTLLQSFIKELNEAASAPAEEFPRQVPRKAAPRTNINEDLRERLRELRNEKAAQLKIEFGLLAKQSQLNVLADSLNGTWEEKFEIAEFMNWQKEIWKTLAPKAILPKTPAEFRNWAKEKLSAMSEESRAEESEKLLAELASHPVLENGYIAAFYPAMFEPQIIPFLKKLANEGRLLLPRVQGKQKMEFVSVQDLESELQKGAFGIMEPKADLPAYENLPTAFIVPGLVFGKDGSRIGRGAGYYDRYLASVKGIPRLGVAYSAQMRNSLPQNAMDMRMDEVLWVKGGN

SEQ ID NO: 35379 - DNA, 774 bp, Unknown
  Obtained from environmental sample
  misc_feature (1)..(774): n is a, c, g, or t
gtgaacatttcaagccttggcgatgctcgctcacttgaaggaggaacgctcttaatgacccctcttcaaggttccgatggcgaatactatgctcaggcacaaggcgcaattaaccttggctcactctctgcaaaagcaggtcgcaatagctataaaaaaggccacaccaactctggaacactgccaaatggcggggttgtatataaagaaatcgaaagtgcaaacttaaaaagcggcacgcttcgctgggtgctttcaagcccagatttcacaagcgctgtggcaatggcaaatgcgataaatggagttttccctggcgtagcaaaagcagaagatgcttctacagtcttggtaaatgtgccagaaaatatgaaaaatgattatatgtctttcatagcacgtgccgaagttgccgagtttaatccaaacacaaattcacgcattgtgcttaacggaaaaacaggaacagtggttagcggagcaaacgttcaaatagacgaggttgccgtttcacacggaagcataacaattcaaattgccaatacccaagaagcagcacagccaactttcatagggcaggcaactctgataaacaaccagcaattgaatgtacaggaaccacgtacagaaacacgggtttttccagcggtcacaaatgcaggtcagttagcgcaagcattgaacggacttggtgtttcgccgcttgatataatctcaattttccaagccattaaacaagcaggagcattgcacgcagaattggtggttatgtaa

SEQ ID NO: 35380 - protein, 257 aa, Unknown
  Obtained from environmental sample
  DOMAIN (2)...(257): Flagellar P-ring protein
  misc_feature (1)..(257): Xaa is any amino acid
MNISSLGDARSLEGGTLLMTPLQGSDGEYYAQAQGAINLGSLSAKAGRNSYKKGHTNSGTLPNGGVVYKEIESANLKSGTLRWVLSSPDFTSAVAMANAINGVFPGVAKAEDASTVLVNVPENMKNDYMSFIARAEVAEFNPNTNSRIVLNGKTGTVVSGANVQIDEVAVSHGSITIQIANTQEAAQPTFIGQATLINNQQLNVQEPRTETRVFPAVTNAGQLAQALNGLGVSPLDIISIFQAIKQAGALHAELVVM

SEQ ID NO: 35381 - DNA, 1059 bp, Unknown
  Obtained from environmental sample
  misc_feature (1)..(1059): n is a, c, g, or t
ttgccaactaacgataattttaccagcattggctctaacgcattttacggctgcaccggatttacgagcataattataccaagcaccgtaacgagtattgatagagaagcgtttaggaattgtaacaaacttaccagcataactataccgtttgttggcaatacattaaatgggaacacaaataccttttttggatatatattcggcgcgacagtacctggtagtaatagctcttacgttccgtcgtcgttgaaaacagttattattaccggcggcaacagtatccctacaggagcgttcaacggttgcaataaccttaccagtgtaacgataccaaacagtgtaaagagcataggcaatgaggcgtttataaactgcagcaatcttaccggaagcttaactatacccggcggcgtaacgagcattggcgcttccgcgttcagaggttgcagtaaacttaccggcagcttaaccataccaaatgatgttaccagcattgaggctaacgtattttacggctgcagcggtcttaccggcagtttaactatacctgatggtgttaccagcattggggctggcgcattttacggctgcagtggatttaccggcagcctaattatacccaacggcgttacaggtattggtaatgatactttttacaattgcaccggactcacagatgtaacattgcctattaacgataattttaccagcattggctctaacgcattttacggctgcaccggatttacgagcataattataccaagcaccgtaacgagtattgatagagaagcgtttaggaattgtaacaaacttaccagcataactataccgtttgttggcaatacattaaatgggaacacaaataccttttttggatatatattcggcgcgacagtacctagtaataatagcgctttcgttccgtcgtcgctgaaaacagttattattaccggcggcaacagtatccctacaggagcgttcaacggttgcaataaccttaccagtgtaacgataccaaacatagagcaagcatcggcgatctcggccatctga

SEQ ID NO: 35382 - protein, 352 aa, Unknown
  Obtained from environmental sample
  misc_feature (1)..(352): Xaa is any amino acid
MPTNDNFTSIGSNAFYGCTGFTSIIIPSTVTSIDREAFRNCNKLTSITIPFVGNTLNGNTNTFFGYIFGATVPGSNSSYVPSSLKTVIITGGNSIPTGAFNGCNNLTSVTIPNSVKSIGNEAFINCSNLTGSLTIPGGVTSIGASAFRGCSKLTGSLTIPNDVTSIEANVFYGCSGLTGSLTIPDGVTSIGAGAFYGCSGFTGSLIIPNGVTGIGNDTFYNCTGLTDVTLPINDNFTSIGSNAFYGCTGFTSIIIPSTVTSIDREAFRNCNKLTSITIPFVGNTLNGNTNTFFGYIFGATVPSNNSAFVPSSLKTVIITGGNSIPTGAFNGCNNLTSVTIPNIEQASAISAI

SEQ ID NO: 35383 - DNA, 651 bp, Unknown
  Obtained from environmental sample
  misc_feature (1)..(651): n is a, c, g, or t
gtgttcgccttggacagggcggggattgtgggggcggacggtcccacgcaccacggcctctacgacctggcctacctgcgctgcctccccaacatcgcggttatggcccccaaggacgaaaatgagctgaggcacatgctctgcacggccatctacagggacggccccactgcgctgcgctacccaaggggcgcgagcgtgggtgtgcccctggacggctcttttaccccaatccccatgggcaggggcgagctgctgcgcgagggtagggacgcggcgctggtggcgctggggactatggtccagcctgcgctcgccgctgcggccaagctggaaagcgaaggtgtctcgtgcgccgtcgtgaacgctaggttcgccaaaccgctggacaccgacctaatctgcgcccaatcggcaaagactggccgcgtggtcacactggaggagggttgcctgcccggcggcttcggctccgccgtggcagagtgcttggccgacgctggcatgacgaccgtccccctgctcagatgtggcgtggccgaccacctagtgcagcagggcagaaccgacaggctgctgaaggaagaggggctgggcgcggaagagatagccgagagggtgcgcgggttcgtagggaaaggcacaaaatga

SEQ ID NO: 35384 - protein, 216 aa, Unknown
  Obtained from environmental sample
  DOMAIN (81)...(203): Transketolase, C-terminal domain
  misc_feature (1)..(216): Xaa is any amino acid
MFALDRAGIVGADGPTHHGLYDLAYLRCLPNIAVMAPKDENELRHMLCTAIYRDGPTALRYPRGASVGVPLDGSFTPIPMGRGELLREGRDAALVALGTMVQPALAAAAKLESEGVSCAVVNARFAKPLDTDLICAQSAKTGRVVTLEEGCLPGGFGSAVAECLADAGMTTVPLLRCGVADHLVQQGRTDRLLKEEGLGAEEIAERVRGFVGKGTK

SEQ ID NO: 35385 - DNA, 795 bp, Unknown
  Obtained from environmental sample
  misc_feature (1)..(795): n is a, c, g, or t
atgggtaacccgcaaaaagctcttgatctacttatggaaaaagattcccaccagcgggatcgcctggcttccgatctgataagcatgaatgaagagaggaaaaaaatcggcgaggaaatctggacaatggtggaaccggcggcagctgaaaatctacaagcctatcacaataaaattgctttcgcgtacggccctaatatccccaggggggtaaccggcataatggcaaaccgccttatgaaccgcttcaagctccccgcccttgtagtctctttcggcgaagaagtttataccgcttcccttcgttcaacgcgtgggtacagccttcatttccttctggaaacctgttccgacctgtttcttgattggggagggcatgattacgcggcaggtttcagcataacaaaagaaaactggagaccatttcttgaacgccttaaagccaaaacagctgaaataaatttgtccgacgccgacgacggcgaaaccatgaaaattgatgccgagctgccgctttcctatctgaatcctgaaattttcaccctgctggatcgttttgaaccttatggcgagggtaacgagcccattacttttttggccaggaatataaagatcagcgagataagcctgatgggaaaacccgaagcaaagcacgttaagctaattctggacacacagagccacaaatggcccgctgtttactggcaggcggcggataaggtaaggcgggactttgatctcggcgataaggttgacatagttttcaaaattacccgcaacttttcaaaggtctga

SEQ ID NO: 35386 - protein, 264 aa, Unknown
  Obtained from environmental sample
  DOMAIN (84)...(148): DHHA1 domain
  misc_feature (1)..(264): Xaa is any amino acid
MGNPQKALDLLMEKDSHQRDRLASDLISMNEERKKIGEEIWTMVEPAAAENLQAYHNKIAFAYGPNIPRGVTGIMANRLMNRFKLPALVVSFGEEVYTASLRSTRGYSLHFLLETCSDLFLDWGGHDYAAGFSITKENWRPFLERLKAKTAEINLSDADDGETMKIDAELPLSYLNPEIFTLLDRFEPYGEGNEPITFLARNIKISEISLMGKPEAKHVKLILDTQSHKWPAVYWQAADKVRRDFDLGDKVDIVFKITRNFSKV

SEQ ID NO: 35387 - DNA, 765 bp, Unknown
  Obtained from environmental sample
  misc_feature (1)..(765): n is a, c, g, or t
atggaaggatccggccttccgctggccgaaatactttcaaattttcgcggctcgggaaagcgccagaccctggtggtccgatgcgtgtttgacgacccctggcttgccgccgactatgtgttgtgcagcgaacgcgtgcaggaggtagtggagggggctttcattgtcgcgaaagccggcggcggaatagaccgcgtcctttttgccgtttcctgccatgaaaaggagcttggcgagaatatgctctccgaagccgcgttatacgatattcaatcctccctggttctgaccggttcaaagtacccccaaaggaactacagggaactggagcttgttttacggaattacggaaaaaaagaggaaattgatttggggccgcttctggttttgggaccggcgacgcttgccgcggtgcatgacgcggtaaaataccgccgccctatccttgagcgttatgtagccgtcggcggttcggccgtggcaaaaccccaggtaatgagggtccgcgtcggcaagcgcataggcgatctttttgaggaatgcggcggttttaggggcgagcctttccgcattgccgtcggctccccgttttcgggaagaacggtgcgcgaccttgacgagcctgtgacaaagaacagttacgcgatctttgccatgctgaatcccagacgggccttcacccggaaagggactgcatatgctgtggggaatgcaggcgcgtatgccctgtcgggctggatccggaagaattgtataagcggataa

SEQ ID NO: 35388 - protein, 254 aa, Unknown
  Obtained from environmental sample
  misc_feature (1)..(254): Xaa is any amino acid
MEGSGLPLAEILSNFRGSGKRQTLVVRCVFDDPWLAADYVLCSERVQEVVEGAFIVAKAGGGIDRVLFAVSCHEKELGENMLSEAALYDIQSSLVLTGSKYPQRNYRELELVLRNYGKKEEIDLGPLLVLGPATLAAVHDAVKYRRPILERYVAVGGSAVAKPQVMRVRVGKRIGDLFEECGGFRGEPFRIAVGSPFSGRTVRDLDEPVTKNSYAIFAMLNPRRAFTRKGTAYAVGNAGAYALSGWIRKNCISG

SEQ ID NO: 35389 - DNA, 645 bp, Unknown
  Obtained from environmental sample
  misc_feature (1)..(645): n is a, c, g, or t
atgtcatggctgcggctgctgcgaattggtatgcccctccagcctgccgctctcagatatgattatggggaaaaaacggaaatgaccgacatggaactgacgctgaaacagaatcccctcgttaatgtttcccgccccacggcgctccgcatgtggcttgtggcggtctgcgcttttatagccgcgctgcagtccgctatgggggattctttcctgtccctgatcatcgctctttccgctcttttttccgcgttgttaacggaactgcttataacctataaaacgcgcggcttcgggaagataaaggacgggagcgcggcggcttcggcgctgacgctcgcccttctgcttccgaacaatatccaccccgtgtacgcggccttaagcgccgcctttgccatcgccgtggtaaagcacagctttggcggcctgggggcgaactggatgaatcccgctttgggcggctggctctttgcccgtttttcatggccgcgcgccttctcaatcgcgcttaacggttccatgacaagcatggatgaattaggcgtaattgccggcaatatggtaaacagttccctgaataaacaattttttcttttctcggagcggaactgccccccggttacattgaccttttcgcgttaa

SEQ ID NO: 35390 - protein, 214 aa, Unknown
  Obtained from environmental sample
  misc_feature (1)..(214): Xaa is any amino acid
MSWLRLLRIGMPLQPAALRYDYGEKTEMTDMELTLKQNPLVNVSRPTALRMWLVAVCAFIAALQSAMGDSFLSLIIALSALFSALLTELLITYKTRGFGKIKDGSAAASALTLALLLPNNIHPVYAALSAAFAIAVVKHSFGGLGANWMNPALGGWLFARFSWPRAFSIALNGSMTSMDELGVIAGNMVNSSLNKQFFLFSERNCPPVTLTFSR

SEQ ID NO: 35391 - DNA, 1314 bp, Unknown
  Obtained from environmental sample
  misc_feature (1)..(1314): n is a, c, g, or t
atggctgaatttattgaaccaagaatattaaaaggctttcgcgattttctgccttcccaggaaatcgcccggcggaaccttctggaaaagatagaaagctcttttcgcttgtacggatttctgccgattgatacgcccgcgcttgaatactccgagattctgcttggcaaaggcgggggcgaaacggaaaaacagatttaccgttttaaggatcacggagacagggacgttgccctgcgttttgacctgaccgttccctttgcgcgttttcttgcggagcacagggaggcgctggtcttccccttcaagcgctaccacattgccaaagtctggcggggggaaaacacccagcgcggacgctaccgggaattcacccaatgcgattttgacactattggcagcgacagcgccgaagcggattttgagatacttcttatgatgaggaatactttgctcgccatttcaggcggggaggttatcatacaccttaaccaccgtgggattttcaaccgcttcctttcccgtctcaacgtactggacaagtctgttgacatactcagggccgtggataagctcgcaaagatcggcagagacgcggagcgcgaactgctttccgaatcggtaggtgagggcagtgcgaatgagatattaaactacatcgaaatatccggaagttttgatgaaaaactttctgcactaacagaggcggccggtcagggtcaggaaacggataggcttaagcaaatcggcaggtttattcatgacacggcgaatgaagattcgtttgtccttgatccttcaataactcgcgggctggattactataccggagtggtttttgaatcatttctggcggatctgccatccattggctcggtctgttcaggcggccgctacgacaacctggtggggctttacacagccgacaaaagggcggcgctatgcggggtgggtgcaagcattggcatagaccggctaatcgccggccttgaagccctgggccggctgaaagaagaaaaatcctacgccaaaaccgcagtcgcctgggtttcgcctgacgccggaggcgcttgtcaggccatagctgacaagcttcgcggcgaaggcattccctgcgaagtgttccttaacgaggagaagcttacaaagcagtttcaacttgctgaaaaaaaaggcctgttctggcttatcattcccaacagcgaaaacgcgctggaaagccctctcacgctgagggatttatcaaaaagggaaaaccgcgaggggcttgggattgaggagattatcggattaattaccgcgaaccagcactaa

SEQ ID NO: 35392 - protein, 437 aa, Unknown
  Obtained from environmental sample
  DOMAIN (344)...(435): Anticodon binding domain
  misc_feature (1)..(437): Xaa is any amino acid
MAEFIEPRILKGFRDFLPSQEIARRNLLEKIESSFRLYGFLPIDTPALEYSEILLGKGGGETEKQIYRFKDHGDRDVALRFDLTVPFARFLAEHREALVFPFKRYHIAKVWRGENTQRGRYREFTQCDFDTIGSDSAEADFEILLMMRNTLLAISGGEVIIHLNHRGIFNRFLSRLNVLDKSVDILRAVDKLAKIGRDAERELLSESVGEGSANEILNYIEISGSFDEKLSALTEAAGQGQETDRLKQIGRFIHDTANEDSFVLDPSITRGLDYYTGVVFESFLADLPSIGSVCSGGRYDNLVGLYTADKRAALCGVGASIGIDRLIAGLEALGRLKEEKSYAKTAVAWVSPDAGGACQAIADKLRGEGIPCEVFLNEEKLTKQFQLAEKKGLFWLIIPNSENALESPLTLRDLSKRENREGLGIEEIIGLITANQH

SEQ ID NO: 35393 - DNA, 1272 bp, Unknown
  Obtained from environmental sample
  misc_feature (1)..(1272): n is a, c, g, or t
atggatcagattggccgagccatacatgatcattcctgcgctatgtgcggcctgtgcggcgaacaatgcccgcaggggattgacatgcgaaacataatccgtgaggccagggcaagcatggtggataccaataaaatgccgccttccgcccatgatttcgccttgcgggatatggagttttgttccggcagcaatttttttatggtaaaaaaaccgcctaaggttggcggatcggagaacgccggttatatgttctatcccggctgccaactgccggcgtcctgtcccgagcatgtggaaaaggcttatcattaccttttgtccaataacagctcaggagtcggccttatgctgggctgctgcggcgcaccggcggactgggccgggcacagggaactggtgctggaaaatgccggaaggatcagggccgcctgggaagaatccggaaaaccagtctttatactggcctgtaccagttgcatgaacgtatttgaacggtacctgccggaaataaaaattgtatctttgtgggaaataatgaatgattgcggcctgccggcctccgccaggggacgagccggcggacgcgccctgcatatacacgacgcttgcggggcaaggcacaacaataaagtgcaggacagcgtccgcaatatggttacgggtatgggttatcaaataaaggagctcgccttttcgagggataaggccaaatgctgcggttacggcgggatggttttttacgcgaacagaacgcagacaaaaaatttcattgatgacagaataagggaaagcgaagaagatctgctcgtatactgcgccatgtgcaaagatttattcgcgaacgccggaaaacgcacataccatattttggatttgatcttgcgggaaaaccctgaaacgtacgcgatgaaaaaaatgccaggcctttcagaccggcgcgctaacagggcgggtttgaaaaggagactgctgcgggaattatggaatgaaagcgcggacaacagcgcggaaggcaaagctcagactgcaggattgataattccgcaagcaatactcaatataatggaagaaaggctcatcctgattgaagatgtggaggatgtgctggagtattcccgccaatcagggcagcgctttcttaatgtagaggacaacagttttcttgccggatttcgcaagaaaaatgtgacatattgggcgcgctggacggaaaaagaagacggcgcgcatatcatcaacgtatacagccacaggatggcggttagttag

SEQ ID NO: 35394 - protein, 423 aa, Unknown
  Obtained from environmental sample
  misc_feature (1)..(423): Xaa is any amino acid
MDQIGRAIHDHSCAMCGLCGEQCPQGIDMRNIIREARASMVDTNKMPPSAHDFALRDMEFCSGSNFFMVKKPPKVGGSENAGYMFYPGCQLPASCPEHVEKAYHYLLSNNSSGVGLMLGCCGAPADWAGHRELVLENAGRIRAAWEESGKPVFILACTSCMNVFERYLPEIKIVSLWEIMNDCGLPASARGRAGGRALHIHDACGARHNNKVQDSVRNMVTGMGYQIKELAFSRDKAKCCGYGGMVFYANRTQTKNFIDDRIRESEEDLLVYCAMCKDLFANAGKRTYHILDLILRENPETYAMKKMPGLSDRRANRAGLKRRLLRELWNESADNSAEGKAQTAGLIIPQAILNIMEERLILIEDVEDVLEYSRQSGQRFLNVEDNSFLAGFRKKNVTYWARWTEKEDGAHIINVYSHRMAVS

SEQ ID NO: 35395 - DNA, 1071 bp, Unknown
  Obtained from environmental sample
  misc_feature (1)..(1071): n is a, c, g, or t
ttgctggaaaataccctgatcaagcaacattcaccaaaatacaatatcaatctgaaggacggaaaaacatatcccgttattcgcataacgcacgaggatttcccgcgcatttttcgcacccgcagaataatacaggataagagcctttatttcggaccgtttgccgacatacagagcgttaatacgatgatggaattaatcgacaaactttttccgcttcgcaagtgcaaaacgatcaagaaaaacgggccgtgcatgtactaccacatagggcgctgtatggctccatgttgcggaaaaataagcgccaaagattattcactgcatgttgaacgcgtgcaaaaactgctgtcaggtgaaactgaagcgttaattatagaccttactttaaaaatgcacgaggccgccagagttatgcaatttgagcaagccgcgcaaataaggaatacaattagggcgattgaaaagcttaccggagaagacagttccgtggaagatctaaaccccgaagacagggactatatcgcgtgggccgcaaacggggtacttgccacttttaccgtcttttccatgcgcggcggcaaaatgacgggcagagacctttaccgcacgcgctccgccgcggacgaatgggaatcgttggagatttttattacttcttattatgataattcacatcatccgccggggaagatttatatacagaattatctctcgcagaggcgcagaggcgcagagggggaagaggaaagagaagagagaaaagagaaaagtgaaaagggagacggttattctgcgttgtgtggcgaggggaccatgattctttgtgggaagaatttggagttagtgcaaaattggtttaatgagaaatttggacatgagccgcaactgctctcccctgcggaaaaacatcattctgccattatggcgatggccaaacagaacgctgaggaagatttgcgaaaaagactgaaagaaaggggcgttgggcccgccattgacgaattgatgcgcgtgttgagtttgaaatcaaggcctgagcgtatcgaagggtttatatcgcgcagttag

SEQ ID NO: 35396 - protein, 356 aa, Unknown
  Obtained from environmental sample
  DOMAIN (122)...(157): UvrB/uvrC motif
  misc_feature (1)..(356): Xaa is any amino acid
MLENTLIKQHSPKYNINLKDGKTYPVIRITHEDFPRIFRTRRIIQDKSLYFGPFADIQSVNTMMELIDKLFPLRKCKTIKKNGPCMYYHIGRCMAPCCGKISAKDYSLHVERVQKLLSGETEALIIDLTLKMHEAARVMQFEQAAQIRNTIRAIEKLTGEDSSVEDLNPEDRDYIAWAANGVLATFTVFSMRGGKMTGRDLYRTRSAADEWESLEIFITSYYDNSHHPPGKIYIQNYLSQRRRGAEGEEEREERKEKSEKGDGYSALCGEGTMILCGKNLELVQNWFNEKFGHEPQLLSPAEKHHSAIMAMAKQNAEEDLRKRLKERGVGPAIDELMRVLSLKSRPERIEGFISRS

SEQ ID NO: 35397 - DNA, 645 bp, Unknown
  Obtained from environmental sample
  misc_feature (1)..(645): n is a, c, g, or t
atggacgacgggcagcggtgtacttttgtcaacgcgaacggcgctacgactaaatttgtaatgccggcaaaggctgtgacggtgacggcgaactttgaaacgactaaaagttcgttcaccgatgctagggacggtaagcagtataagtatgtaaagataggcagtcaaacatggatggcggagaatcttaattatcaaacatcaagcggatcttggtgttatgataacagcaccgataattgtacgaagtacggcaggttgtacgattggagtacggcaaaaaccgtctgtcctaccggatggcatttgccgtctcgtgatgattggggagtattggctaaggctgtcggtggtaccggcgattacggttataatggcacggcaggtaaggcgctgaaatcgacgagcggttggtataataacggtaatggtacagatacgtacggattttcggccctgccaggcggcttccgcaactctgatggctatttctacaatgccggctactacggcttctggtggatggctacggagacctttagcgactacgcctactaccgggacatgaactacaacaacgacaacgcgaacgaaaactactacaacaagagcaatgggttctcggtgcgatgccttaaagactaa

SEQ ID NO: 35398 - protein, 214 aa, Unknown
  Obtained from environmental sample
  misc_feature (1)..(214): Xaa is any amino acid
MDDGQRCTFVNANGATTKFVMPAKAVTVTANFETTKSSFTDARDGKQYKYVKIGSQTWMAENLNYQTSSGSWCYDNSTDNCTKYGRLYDWSTAKTVCPTGWHLPSRDDWGVLAKAVGGTGDYGYNGTAGKALKSTSGWYNNGNGTDTYGFSALPGGFRNSDGYFYNAGYYGFWWMATETFSDYAYYRDMNYNNDNANENYYNKSNGFSVRCLKD

SEQ ID NO: 35399 - DNA, 879 bp, Unknown
  Obtained from environmental sample
  misc_feature (1)..(879): n is a, c, g, or t
ttggagacgaatttcgggccggagatagatagtgttttggaaagcaccgggtgtatccgcgaggagtatatggacaatatgcgccgcttctacaacggttatcgcttctccaagaacccgctcaccgtctacaaccccttcgggatactcaatcatttcgatcaaaacggtgatttcaggccgtattggtacagaagcggtacgccaaccctcctgacagacctgattaacagtcagaatattgacctcacaaacttaaacaatatgcaggtcgggtacgacgactttgatgctttcgacatagaggagatggaaccggcgccgcttttatatcaaaccggttacctcacgataactgattacgatgaaaaagaaaagtgtttcacgcttgattatccgaatatcgaggtgcgtagcgcctttgcgaaatcgcttgctacgcggtgtctgaagaccccttcaaattggtcatactcgtcatgcaaaaagctaatggcagcgctaaacagcggcgacgtagatgccgcgatggaagcggtgaagctatttttgaccaaaatcccgtatgacttgtttcaaaaacgtgaaaacttcttccaatcggtggtatacgtggtattcgctatgctcggcctcgactgccgcacggaggaaagaatcgccacggggcgtctcgacatggttgtcgaaacacggggcttcgtttactgctttgagttcaaattagagggcacagcggaggctgcgctcgcgcagatcgacagcaaggagtatgccattccttggacgggtcgcggaaagaaggtattcaaagtcggggtgaactttgattttgagaagaagaacatcggggagtgggtgtctgcggcagttgagtaa

SEQ ID NO: 35400 - protein, 292 aa, Unknown
  Obtained from environmental sample
  DOMAIN (1)...(286): Protein of unknown function (DUF1703)
  misc_feature (1)..(292): Xaa is any amino acid
METNFGPEIDSVLESTGCIREEYMDNMRRFYNGYRFSKNPLTVYNPFGILNHFDQNGDFRPYWYRSGTPTLLTDLINSQNIDLTNLNNMQVGYDDFDAFDIEEMEPAPLLYQTGYLTITDYDEKEKCFTLDYPNIEVRSAFAKSLATRCLKTPSNWSYSSCKKLMAALNSGDVDAAMEAVKLFLTKIPYDLFQKRENFFQSVVYVVFAMLGLDCRTEERIATGRLDMVVETRGFVYCFEFKLEGTAEAALAQIDSKEYAIPWTGRGKKVFKVGVNFDFEKKNIGEWVSAAVE

SEQ ID NO: 35401 - DNA, 558 bp, Unknown
  Obtained from environmental sample
  misc_feature (1)..(558): n is a, c, g, or t
atgatgattaaagttacgatacaaaacgacagaatcaaactttgcgtctggcttaagaaaaattatcccgggcttacggcctcgcatatgcagaagctttgccgcataggggaaatccgaatcgatggcaaacgctgttcgccgacggacgcgatggtggctggcgacgagcttaaactgccgccgtacatagaggaatacaaagccgcgcggccacatatgcccaatgtcgccaaagaagatatagaactggtgcgttcccttgtgatgcacgaaacttccgaatacatcgccataaacaagcccgccggaatcgcaagccagggcggaagtgggcagagccgccatcttgacgctatcgccaacgccgcatggccggaacatggcggaaacctgcggcttgtgcacaggcttgatctggaaaccagcggcgtgatgctgctggcgaaaggctatgagagcgcgcggaaactctctgatttgttccgtacgcgcgaggtggagaaggcgtacatcgcgctcgttcacggctcgctcgacatcaaggaggcgagataa

SEQ ID NO: 35402 - protein, 185 aa, Unknown
  Obtained from environmental sample
  DOMAIN (95)...(185): RNA pseudouridylate synthase
  misc_feature (1)..(185): Xaa is any amino acid
MMIKVTIQNDRIKLCVWLKKNYPGLTASHMQKLCRIGEIRIDGKRCSPTDAMVAGDELKLPPYIEEYKAARPHMPNVAKEDIELVRSLVMHETSEYIAINKPAGIASQGGSGQSRHLDAIANAAWPEHGGNLRLVHRLDLETSGVMLLAKGYESARKLSDLFRTREVEKAYIALVHGSLDIKEAR

SEQ ID NO: 35403 - DNA, 798 bp, Unknown
  Obtained from environmental sample
  misc_feature (1)..(798): n is a, c, g, or t
ttggtggttacggggacaacgtccaaacaattaaacagcgaaaagcacatgcttcccatttcttacggctcaatgctggtggaaaccctggtagcggttcttgcccttattgcggtcggttcgctcgcgtggaacgggagaatgccggaaggtactcctcctgttatcttcgcaaccgccgtctccggttttctttcccagcttggcctgccccatcacgcgtcttttaccatagtatcgctggcggtttcatcatttgtgtttacgactctggataccgtcgcccggctgggacggctttctcttcaggaacttttttccgccgacggcatcaacgatgccgacggcaccgccgacgccgttagcgggcaaaaacagaaaaagagactgtgggccttgatacttaataacagggctgccgcttcgatttttaccctgggacccgcctacctcctggcgataatgggttatcaaaatatatgggctttgttcggggcagccaaccagctccttgccgcccttaccttgattgcctgtaccctgtttttcaaaaagaccggcaagcgtatttatgtgattgtcgtcccaaccgtaatcatgctggctgtcacctatacttccctttctctgagcataaaaggcaaaattacgcttttgctaaaaggcacgttcaatacggcggttgacggcgttcaaatgtgcattgctatcctgcttttggtattgggaattcttgtagcggcttcatgcgccggcaaattgctcggtaaagatcaaaacaaggaaaatacctgctga

SEQ ID NO: 35404 - protein, 265 aa, Unknown
  Obtained from environmental sample
  misc_feature (1)..(265): Xaa is any amino acid
MVVTGTTSKQLNSEKHMLPISYGSMLVETLVAVLALIAVGSLAWNGRMPEGTPPVIFATAVSGFLSQLGLPHHASFTIVSLAVSSFVFTTLDTVARLGRLSLQELFSADGINDADGTADAVSGQKQKKRLWALILNNRAAASIFTLGPAYLLAIMGYQNIWALFGAANQLLAALTLIACTLFFKKTGKRIYVIVVPTVIMLAVTYTSLSLSIKGKITLLLKGTFNTAVDGVQMCIAILLLVLGILVAASCAGKLLGKDQNKENTC

SEQ ID NO: 35405 - DNA, 402 bp, Unknown
  Obtained from environmental sample
  misc_feature (1)..(402): n is a, c, g, or t
atgagcgtctatgctcttgattcaaacattgtgtcgttttatctcagaggaaataatactgtaattgaaaacattgaaaaagcaatcggcgaggagcatagtattgtaattacgcctattgcgtattacgaggttaaacgaggattgttattaattgacgcgataaaacaaattaaaaagtttgaagacttttgcagcctttttcctgtaggtagatttggcgattatcttttggaagatgccattactatttatgtacaggaaagaaaagaaaaaagaaatacggaggatgctgatattttcattgcagctttttgtttgcataataactatattcttgttacagacaatactaaacacttcaaaaatattaaaggtttgaacaccgtaaattggcgataa

SEQ ID NO: 35406 - protein, 133 aa, Unknown
  Obtained from environmental sample
  DOMAIN (4)...(132): PIN domain
  misc_feature (1)..(133): Xaa is any amino acid
MSVYALDSNIVSFYLRGNNTVIENIEKAIGEEHSIVITPIAYYEVKRGLLLIDAIKQIKKFEDFCSLFPVGRFGDYLLEDAITIYVQERKEKRNTEDADIFIAAFCLHNNYILVTDNTKHFKNIKGLNTVNWR

SEQ ID NO: 35407 - DNA, 777 bp, Unknown
  Obtained from environmental sample
  misc_feature (1)..(777): n is a, c, g, or t
ttgaataaaaccagccttaattttaaaataggggaaaccggcgccattaccgcctctgttaccccggccaacgcgacatacaagactgttatttggacttcagacaattccggcgtagcaagcgttaataacggagtagtaaccgccgtaaacagcggaacgacaacaattaccgcttctacggtggaaggaataaacacgatatgtacggtaactgtaagagaaccggcagtattgctggatttagccgcaaaacttcaaactctgccggtacagactattaataccggcgcgcaattcaaaaccgcgtttagcggttttccggtaagacccggagacaacatagacacttcacaggtatcataccagataattaatgattccggcatcaaaaaacttcaggttaatgtatatataaactggggttccggattaattattacgaatgagaaatttgagttcaaggcaggcgatattattgaatttaagggagaaatgataagcggtcccagcaattcaatatttatcaatacagattgttggggatatgatcctctccagggatggaacaccggtttttccaatggacaaattattgaagaaacctttactttatccgcaagtgacgcgtccacaataaacacaaacgcggctaaatgcaacggatccgcgattaattttaaaacaggaggaacagaaccctgggatggtactgttttccctgctggtatcggaaaatttgccattgaacagattaaaataatgagaattgaataa

SEQ ID NO: 35408 - protein, 258 aa, Unknown
  Obtained from environmental sample
  SIGNAL (1)...(25)
  DOMAIN (2)...(73): Bacterial Ig-like domain (group 2)
  misc_feature (1)..(258): Xaa is any amino acid
MNKTSLNFKIGETGAITASVTPANATYKTVIWTSDNSGVASVNNGVVTAVNSGTTTITASTVEGINTICTVTVREPAVLLDLAAKLQTLPVQTINTGAQFKTAFSGFPVRPGDNIDTSQVSYQIINDSGIKKLQVNVYINWGSGLIITNEKFEFKAGDIIEFKGEMISGPSNSIFINTDCWGYDPLQGWNTGFSNGQIIEETFTLSASDASTINTNAAKCNGSAINFKTGGTEPWDGTVFPAGIGKFAIEQIKIMRIE

SEQ ID NO: 35409 - DNA, 594 bp, Unknown
  Obtained from environmental sample
  misc_feature (1)..(594): n is a, c, g, or t
gtgtggcacggccaagacgtcgcgaactgtccgtttatcgtaccgcggtcaatggacgttgagacgttcttttgggagactacttacttctcgcggcattgcgtggtggaattcttcggcgaggaacgcttgcttaccgcggattgggagaaagagcggcgcaaaatagccgtacacgcggcgggaattcaaccgacggtctgtatacaccgcgattttcaatcggagaacatacttattgccgatggacatatcaagttcgtagactatcaaggcgcgcgcttagggccggcgcactacgacgccgcgtcgctgatctttgacccatacgtaaatctggggaaagacatgatggagcgtttagtggaatattacatgaccaaaacgaacagcgtctccgcaaagaacgatttttacatttgcgccgcacagcggttaatgcaggcgctaggagcgtacgccaacctgtctttgcacaaagacaaaccgcgctaccgcgaattcatacctacggcgctggagaggctgtattacgtaatggagtttcttcccgattatccagcgataaagggggtcgttcatgggtgccagtag

SEQ ID NO: 35410 - protein, 197 aa, Unknown
  Obtained from environmental sample
  misc_feature (1)..(197): Xaa is any amino acid
MWHGQDVANCPFIVPRSMDVETFFWETTYFSRHCVVEFFGEERLLTADWEKERRKIAVHAAGIQPTVCIHRDFQSENILIADGHIKFVDYQGARLGPAHYDAASLIFDPYVNLGKDMMERLVEYYMTKTNSVSAKNDFYICAAQRLMQALGAYANLSLHKDKPRYREFIPTALERLYYVMEFLPDYPAIKGVVHGCQ

SEQ ID NO: 35411 - DNA, 540 bp, Unknown
  Obtained from environmental sample
  misc_feature (1)..(540): n is a, c, g, or t
atggctaagaagtttagatcaactactataattgcggttcggaaggacgggaagatcgctatggcgggggacgggcaggttacctttggcgagacggtgatgaagaataacgcacgcaaggtacgccgcatgatggacggcaaggtgctttgcggttttgccggttccacagccgatgtttttacgcttcatgaccgctttgaggcgaagcttaaggaatattcaggcgatcttacacgcgccgccgtagagttggcaaaggattggcgcatggaccgcagcctcaggcggcttgaggcgatgctcctcgtcgccgatgtttcaaagactctgcttgtttccggctcgggcgacgttatcgagccggccgacaacaccattgccataggttcaggcggcaattacgcgtacgccgcggccttagccttcttggacggaagcaattattcagccagggaaatcgccgagaaaagtttgaaaatagcgggtaacatttgtatttatacaaatttacaaataacattagaggaattaaattaa

SEQ ID NO: 35412 - protein, 179 aa, Unknown
  Obtained from environmental sample
  DOMAIN (4)...(178): Proteasome A-type and B-type
  misc_feature (1)..(179): Xaa is any amino acid
MAKKFRSTTIIAVRKDGKIAMAGDGQVTFGETVMKNNARKVRRMMDGKVLCGFAGSTADVFTLHDRFEAKLKEYSGDLTRAAVELAKDWRMDRSLRRLEAMLLVADVSKTLLVSGSGDVIEPADNTIAIGSGGNYAYAAALAFLDGSNYSAREIAEKSLKIAGNICIYTNLQITLEELN

SEQ ID NO: 35413 - DNA, 306 bp, Unknown
  Obtained from environmental sample
  misc_feature (1)..(306): n is a, c, g, or t
gtgttattcgtaagcctgaaggggaaacccatttcggcggcgggagtgcgctggattatcggccaatatgcgaaggtatcggggcttggtaaaaatatacacccccacagtttccgccacagctttgccacccatttagtgaacgcgggatgcgacgtgcgcatcgtgcaggaaatgcttggtcatgccaggctttctaccacgcagcgttactcccatgtaagcattgaacggttgaaaaaggtgtacgcgaaggcgcatccccacggacaattagcaattagcaatgagcaattaacaaagtaa

SEQ ID NO: 35414 - protein, 101 aa, Unknown
  Obtained from environmental sample
  DOMAIN (1)...(81): Phage integrase family
  misc_feature (1)..(101): Xaa is any amino acid
MLFVSLKGKPISAAGVRWIIGQYAKVSGLGKNIHPHSFRHSFATHLVNAGCDVRIVQEMLGHARLSTTQRYSHVSIERLKKVYAKAHPHGQLAISNEQLTK

SEQ ID NO: 35415 - DNA, 780 bp, Unknown
  Obtained from environmental sample
  misc_feature (1)..(780): n is a, c, g, or t
gtggaagatgaaaaaacttctgaggtaagggtttatatagaaaaagacatggtttcccttcttgtggatttaagcggggagcctcttttcaaacggggctaccggagtgaaggaggcgctgcgccgctgagagaaactacagcggcttccatgctactcctttccggctggaaacggaagttcccgctttacgatccgttttgcggctcaggaactatccttttagaagcggcaatgtacgcgtgggatatggctcccggactcggcaggcgttttgccattgaagacctgctcatcgctgacggggaaatcgagcagtcaacgcgtgaagaattccgcagtaagatagatttcagccgtcttgtaagaattgccggcagtgatgaagatacgcgctctatttcaatagccgcgtcaaacgcggcgcgtctgtgcgacattgccgaaggcagaacgccgcagaggggaatacgcgaggcagacaagacaaccggtatagaattaaaaaaacttacgatagatgaagcgtcatctccgtttccggatacggggtttcttgttacaaatccgccgtacggcaaaagacttggcgatcaggcaactgccgagcagacctacaaaaaaatgggagatttaagccggcgtttctccggctggaaacttgcggttataacagataacagcggatttgaaagtttttacggtaaaaaagcggactcctgccgcgagatcagcaacggggcaattccttcctattttttccaatatgatatactatag

SEQ ID NO: 35416 - protein, 259 aa, Unknown
  Obtained from environmental sample
  DOMAIN (32)...(255): Putative RNA methylase family UPF0020
  misc_feature (1)..(259): Xaa is any amino acid
MEDEKTSEVRVYIEKDMVSLLVDLSGEPLFKRGYRSEGGAAPLRETTAASMLLLSGWKRKFPLYDPFCGSGTILLEAAMYAWDMAPGLGRRFAIEDLLIADGEIEQSTREEFRSKIDFSRLVRIAGSDEDTRSISIAASNAARLCDIAEGRTPQRGIREADKTTGIELKKLTIDEASSPFPDTGFLVTNPPYGKRLGDQATAEQTYKKMGDLSRRFSGWKLAVITDNSGFESFYGKKADSCREISNGAIPSYFFQYDIL

SEQ ID NO: 35417 - DNA, 573 bp, Unknown
  Obtained from environmental sample
  misc_feature (1)..(573): n is a, c, g, or t
ttgaaagtcgggaatacctatattgtgtcctcaaatgaatggggcaagtttgtcggagaaggcaaacttagaatagtggacggcaagatcgcgaacttttcatggaagccggtcgctatcgacggcacttacgcgccggacgcgcaaatcgccgctctgattacgccttacaaagaaaaggcagacgccagtcttaaagaagtagtcggacaggccgcagacacattcatattcggaaacaggcttacccgctatcaggaaaccgccatcggcaatatgatctgcgacgcgaatacctggtactttaggagcatcggccaggacattgactttgccttccataatggcggaaacatcagggccgagcttcccaaggggccgctgaccagggaacagatccttaccgttctgccgtttgagaattatctttacattgtctcccttaaaggctcgcaggttatcgagctcttcactttatcggaaccgttgcccagggcgcgggcggatccccgcattctcgcgcgaagtccgctatactataaatattccccgcaagacgatnagcaaccctga

SEQ ID NO: 35418 - protein, 190 aa, Unknown
  Obtained from environmental sample
  DOMAIN (68)...(190): 5'-nucleotidase, C-terminal domain
  misc_feature (1)..(190): Xaa is any amino acid
MKVGNTYIVSSNEWGKFVGEGKLRIVDGKIANFSWKPVAIDGTYAPDAQIAALITPYKEKADASLKEVVGQAADTFIFGNRLTRYQETAIGNMICDANTWYFRSIGQDIDFAFHNGGNIRAELPKGPLTREQILTVLPFENYLYIVSLKGSQVIELFTLSEPLPRARADPRILARSPLYYKYSPQDDXQP

SEQ ID NO: 35419 - DNA, 873 bp, Unknown
  Obtained from environmental sample
  misc_feature (1)..(873): n is a, c, g, or t
ttgagccgggagacagtaacagtggaagaagttgagcagattctttaccatgtttcttctaatgacaagatgaagctgcttttgggggttctaaagaacgaaaatcctgaaagcgctgttattttctgcaatacaaagcgttacgctgagattgtggcaaagcggctaaggctaaacggatttgattgcgaatttattatgggggatctgccccagaaaaagcgcttaaaaataattgacgatataaaggcgggaaagcttcacctgcttgtcgccaccgacgttgcggccaggggtctggacattgagggtctcgccatggtggtgaattacgatcttccaaacgaaacagaaaattatgttcaccgcataggccgtactgccagagcgggaaaaaccggtaaagccgttacccttgcgagcgaacaggacgtttacgcgctgccagggatagagcgctacataggccggaaaatcccttccgagaccgttgcatcggaactttttgccgaagataaaagcgaaggcaggcacatccacacggagttttacgaagagcgtggcagtcacagaaccgaaggtcatagaagcgaaggtaggcctgccgatcattcgcggcgcaaagctggcggaggcataaatgccaacagcaaaaagcatgacgcaagccaccatgtcaggaaagatcatcacagccccatggaacaaaaacgtggtgaaaagaaaaacaggattgatttcccaaaaggcataaagctttcggaactttcccttgaagaacgaatggcttattacaagcagaagtatgacaagagcgtaaaaaaaccgatgctcggcaccgagcctgctggtattgatctgaaagcccagtga

SEQ ID NO: 35420 - protein, 290 aa, Unknown
  Obtained from environmental sample
  DOMAIN (55)...(131): Helicase conserved C-terminal domain
  misc_feature (1)..(290): Xaa is any amino acid
MSRETVTVEEVEQILYHVSSNDKMKLLLGVLKNENPESAVIFCNTKRYAEIVAKRLRLNGFDCEFIMGDLPQKKRLKIIDDIKAGKLHLLVATDVAARGLDIEGLAMVVNYDLPNETENYVHRIGRTARAGKTGKAVTLASEQDVYALPGIERYIGRKIPSETVASELFAEDKSEGRHIHTEFYEERGSHRTEGHRSEGRPADHSRRKAGGGINANSKKHDASHHVRKDHHSPMEQKRGEKKNRIDFPKGIKLSELSLEERMAYYKQKYDKSVKKPMLGTEPAGIDLKAQ

SEQ ID NO: 35421 - DNA, 573 bp, Unknown
  Obtained from environmental sample
  misc_feature (1)..(573): n is a, c, g, or t
ttgtcttttcaaatcaacatgctcatggatattcttgagaacatggaagaacagtttgacgcgcttgttgaagaaataaagaaagccggttctccctttatgcgtcatattgacatattaaccagcatgtcaggaatctcggtaattaccgcccttgccattatagcggacattattgacgtttccaggttcaaaaactcaaagcatttcacgtcgtatttacgcagcgcgccgcgggttgaaagttccaatgaaaaaacagtcataaaatcgacgacaaaagccggcaggaagctgtcaattacgcttctatcgcaatctttaaatcatttccgtgatggaaacaaaaagcttaaccgctggtataaccacataatatcatataaaaagaaaggaataatcaggatggcgttgtgcaggaaggtgtttacagagatatttcagatgcttaagaaggaagaatatcattatttcaggaaccctgtcctgcatgggaagaaaatggcggaatatataaaatttcttgaaaaagaacattgtgtttttcctcaagaatttattcttgccgcttga

SEQ ID NO: 35422 - protein, 190 aa, Unknown
  Obtained from environmental sample
  DOMAIN (12)...(121): Transposase IS116/IS110/IS902 family
  misc_feature (1)..(190): Xaa is any amino acid
MSFQINMLMDILENMEEQFDALVEEIKKAGSPFMRHIDILTSMSGISVITALAIIADIIDVSRFKNSKHFTSYLRSAPRVESSNEKTVIKSTTKAGRKLSITLLSQSLNHFRDGNKKLNRWYNHIISYKKKGIIRMALCRKVFTEIFQMLKKEEYHYFRNPVLHGKKMAEYIKFLEKEHCVFPQEFILAA

SEQ ID NO: 35423 - DNA, 444 bp, Unknown
  Obtained from environmental sample
  misc_feature (1)..(444): n is a, c, g, or t
ttgttaattattacctgttacctgttatttgaatatactgtaatgcgtaatttatcatctaaatttggccccatgaatttttaccgggaggcgcttgcgattgcccttcctgtcatgctccagcagcttattatgagcatggtctcccttatcgacaactttatggtcgcgggccttggggatataagcatggcttcggttaatgtgacaaaccagattaactttattttttttgtcatcctcaataccatctgccaggccggaggtatgtatatcgcccagttcaaaggcgcgaatgattctgacgggatgcggcaggcttttcgttttaaggtaatttttgccattattgccgctgtcctgtatttcgccctctcctggaccataccccataaaatgttgggcatgatgattatgggcaacgctcaacaggaagaaatttaa

SEQ ID NO: 35424 - protein, 147 aa, Unknown
  Obtained from environmental sample
  misc_feature (1)..(147): Xaa is any amino acid
MLIITCYLLFEYTVMRNLSSKFGPMNFYREALAIALPVMLQQLIMSMVSLIDNFMVAGLGDISMASVNVTNQINFIFFVILNTICQAGGMYIAQFKGANDSDGMRQAFRFKVIFAIIAAVLYFALSWTIPHKMLGMMIMGNAQQEEI

SEQ ID NO: 35425 - DNA, 666 bp, Unknown
  Obtained from environmental sample
  misc_feature (1)..(666): n is a, c, g, or t
ttgcttaacagtgatatcttaagccgcgttgatcacacgttgttaaagatgaccgcctcatgggcagagattaaaaccctctgcgatgaggcggttcgttataaaacggcgtccgtatgcatcccgccggcttatgtaaaacctgttttcaaggaatttggcaaaaacccggttatctgcacggtgataggtttccctctggggtatacctatacgtctgttaaggtttatgaaacaggcgtcgctctggaaaacggcgcttgtgagattgacatggtaataaacgcaggcgatgtgaaaaacggcaattacgctttggttctggaggaaataaaatcgataaagaaagtatgcggggaaaaaattctcaaggttattgttgagacctgttatctgaatgaagaagagaaaatacggctctgcggcattatcaccgacgctggggcggattttatcaaaacctcgacaggctttggaccagcgggagcgacattggccgatgtaaagctgtttagacagcacatcggacggaaagttaaggttaaagccgcgggcggtataaaaacacgcgaagacctgnaagcgtttattcaggcgggggccgaccgcatcggcacaagctccgcggtaaaattactttccggcggaaccgcgtccggatattaa

SEQ ID NO: 35426 - protein, 221 aa, Unknown
  Obtained from environmental sample
  DOMAIN (5)...(215): DeoC/LacD family aldolase
  misc_feature (1)..(221): Xaa is any amino acid
MLNSDILSRVDHTLLKMTASWAEIKTLCDEAVRYKTASVCIPPAYVKPVFKEFGKNPVICTVIGFPLGYTYTSVKVYETGVALENGACEIDMVINAGDVKNGNYALVLEEIKSIKKVCGEKILKVIVETCYLNEEEKIRLCGIITDAGADFIKTSTGFGPAGATLADVKLFRQHIGRKVKVKAAGGIKTREDLXAFIQAGADRIGTSSAVKLLSGGTASGY

SEQ ID NO: 35427 - DNA, 438 bp, Unknown
  Obtained from environmental sample
  misc_feature (1)..(438): n is a, c, g, or t
gtggagttcaagccggtgcgcggtcttgacggcgtaaagtccgccgaggttgattttggcgtgcctattccgaatggcagcggaaccaaaatccgcatagccgtagcgcaccagatgggaaacatcgccgcggtgctggatgaaatcaaggcggccagagctgccgggaaagagcccccatatcactttgtggaggttatggcttgcaggggcggttgcgttgccggaggcggccagccttacggcgctaccgatgaagtccgcagcaagcgcgcgaaaggcatttaccttgacgatgagaaatccaagtaccgctgttcgcatcagaacccctgcataacccaggtgtacaaggaattccttgaggagccgaacggccataaggcgcatacgctgctgcacaccaaatatacggaacggaaactttacattaggtaa

SEQ ID NO: 35428 - protein, 145 aa, Unknown
  Obtained from environmental sample
  DOMAIN (82)...(141): Iron hydrogenase small subunit
  misc_feature (1)..(145): Xaa is any amino acid
MEFKPVRGLDGVKSAEVDFGVPIPNGSGTKIRIAVAHQMGNIAAVLDEIKAARAAGKEPPYHFVEVMACRGGCVAGGGQPYGATDEVRSKRAKGIYLDDEKSKYRCSHQNPCITQVYKEFLEEPNGHKAHTLLHTKYTERKLYIR

SEQ ID NO: 35429 - DNA, 1410 bp, Unknown
  Obtained from environmental sample
  misc_feature (1)..(1410): n is a, c, g, or t
atgtccggcgaaggcaagacgacgctggcaaaaggttttttacaatggctggaagacacaaacgggttaggcgacagggtgttttggtttagttttgaggatatacacggagccgactacgttatagatacgctggcgggcgaattgttgggcatgcagaccttggccctgccccgagaggaaaggttgtccgccgttgtaagaaaattgagggccgggcggtatttcctgttgtgggataattttgaatcggcttccggcataccggggacggaggtgtccgcgctgatgcccgaagatgacaggcagcggttaaaacaactgctacgagaactgcgcggcgggaagacgaaaatcctcattacgagccggtcgactgaggaatggctcagcgtgcaggaatgtttccgcttcccccttggcggactgcagggcgaggaactctggcagtactgcgaggcggttgtagccgacctggggcttaaaattaacagggatgtgcatttcaccacgttgctggacaagttggaaggaaacccgctggcggtgcgtgctatactgctgcggctcaaggatcgttctgcggcggagttattaagcgaacttgaaataagtttcaacggcatgaaaggcgatgaaagcacgaaacgcatttcagcggcgttggcggtttttgaacaggggctggataaggccttcgcgcctgttttgcgtctgctgggtttacatgagcattttgcgggtgctggtttcattgaatatatgctaaagcatactgaaccggacggtattgcgtatgtggacaaatgtttcgccgcgctggagagcgctggattgtgccatatagttggagaaagaatatataagttacatcccgccttacgcagctgcctagccaggctgcacccggcgggggagtctgacaagcgagcttttgcgggcttaatgggcaggtttgcggatacatatggcgataaagaacttcacgaacagcgggatgtgttctcactgtttggcgcaaatttctaccgggcattgagttttgcgcgggagcttgatacgcggaattatgtattggctctgattcaggcgctggctttttatgcgtacaatataaggaattttgccgaagcggagacgctatgcaaggaattggctgacacggctcataattacaaaactactgaatatgaagctattgcttaccataaactggggatggccgcgcaggaacggctggatttagacgccgccgaggactggtataaacaggcgctggcaattactgagaaacagaaaaacgagcgtcacatggccggtacttaccatcaattggggatggtcgcacaggaacggcgggatttcgacgccgccgaggactggtacaaacgctcgctcgtgccgatctga

SEQ ID NO: 35430 - protein, 469 aa, Unknown
  Obtained from environmental sample
  DOMAIN (2)...(158): NACHT domain
  misc_feature (1)..(469): Xaa is any amino acid
MSGEGKTTLAKGFLQWLEDTNGLGDRVFWFSFEDIHGADYVIDTLAGELLGMQTLALPREERLSAVVRKLRAGRYFLLWDNFESASGIPGTEVSALMPEDDRQRLKQLLRELRGGKTKILITSRSTEEWLSVQECFRFPLGGLQGEELWQYCEAVVADLGLKINRDVHFTTLLDKLEGNPLAVRAILLRLKDRSAAELLSELEISFNGMKGDESTKRISAALAVFEQGLDKAFAPVLRLLGLHEHFAGAGFIEYMLKHTEPDGIAYVDKCFAALESAGLCHIVGERIYKLHPALRSCLARLHPAGESDKRAFAGLMGRFADTYGDKELHEQRDVFSLFGANFYRALSFARELDTRNYVLALIQALAFYAYNIRNFAEAETLCKELADTAHNYKTTEYEAIAYHKLGMAAQERLDLDAAEDWYKQALAITEKQKNERHMAGTYHQLGMVAQERRDFDAAEDWYKRSLVPI

SEQ ID NO: 35431 - DNA, 564 bp, Unknown
  Obtained from environmental sample
  misc_feature (1)..(564): n is a, c, g, or t
atgtctgatgtagtatctattatccttggcggagggaagggaacccgtttgttccccttgacacagtccaggtcaaaacctgccgttcctttcggcggaaaattccgcttggtggatatacccatttcaaattgcataaacgccgatctgcgccaaatatacatagttacccaattcaattcagcctccttgcaccagcatatagggcagacatacctgtttgactcattttccaatggatttgtcgaaatcctcgccgcggaacaaacttttgaacattccggctggtatgaaggaaccgccgacgcggttcgcaagaattttccccatttcaggacccataagcccgcgtactatataatcctttcgggcgatcagctttaccgcatggatctgaaagaactgctgaaaaaccatatcgattccggcgcggcaatcactattgcctgtacccccgtgagcaggagtgacgccagcgccctgggcattatgaaaatcgacaaaagccgcagatacnnngaattcatggaaanacccggccgaccaaagatatttccgatataa

SEQ ID NO: 35432 - protein, 187 aa, Unknown
  Obtained from environmental sample
  DOMAIN (5)...(187): Nucleotidyl transferase
  misc_feature (1)..(187): Xaa is any amino acid
MSDVVSIILGGGKGTRLFPLTQSRSKPAVPFGGKFRLVDIPISNCINADLRQIYIVTQFNSASLHQHIGQTYLFDSFSNGFVEILAAEQTFEHSGWYEGTADAVRKNFPHFRTHKPAYYIILSGDQLYRMDLKELLKNHIDSGAAITIACTPVSRSDASALGIMKIDKSRRYXEFMEXPGRPKIFPI

SEQ ID NO: 35433 - DNA, 1104 bp, Unknown
  Obtained from environmental sample
  misc_feature (1)..(1104): n is a, c, g, or t
ttgccaaaaccggcggtttggcggacantggtctccgcgctttctatcagtcttgccgccctgggtcatgaggtctgtattgtaattccccgctattataacatagacagggacaagttaaagatgctgcccggcgcgctgggagttccgatgggccccggcgaggaatggagcgccgtttattcgaccgcgatgcccgggaccacaaagaanaacccggtaaccgtttattttatcgatcacgaaatatattttggcagggacggcatttacggcgttccatcacagcctgactttcttgacaacttcaggcgttattcgtttctatgccgcggggcgtgtcagctttgccgtaaaataggctggttcccggacgtgatccacgcgcatgactggcctgccgcccttgcgcccgtgtacatgaaattcgcggaaagggttcccgccagcctgaaaggttttgaaaaaacaatatcggttcttaccatccacaacctcggttaccagggcatatacagcaaggataattataattacgccggcctcggctgggacgtgttttacaacgcgggctttgaggactggagtatgcttaatatgcttaaggccggtctgtacagcgcggacagcctgaatacagtttcgcctaactatgcggaagaaacaaaaacccaggaacacggtttccgtcttgacggcgtgctgcgctaccgcagcgccgattattcggggattctcaatggcattgacacaagcgtgtggaatccaaagaaggacaaattgatccccgagcattattctgcaagcgatatgtcgggaaaagccgtcgcaaaggccgctttacaaaaacattttgggcttccggaaaaccccaaagtgccgcttatcggcatggttacccggcttgtcgaacaaaaaggggtgggggagcttttcgggcccacttacggttctctttggaacatctgcaatgattttgatgtgcaggttgtgcttataggcacgggcgaatcctggtgcgagcatgaaattggcagcctttcctacaggcttccgaatttcaaggcgcacatcggctacagcgagaaagtaagccacctatag

SEQ ID NO: 35434 - protein, 367 aa, Unknown
  Obtained from environmental sample
  SIGNAL (1)...(22)
  DOMAIN (11)...(237): Starch synthase catalytic domain
  misc_feature (1)..(367): Xaa is any amino acid
MPKPAVWRTXVSALSISLAALGHEVCIVIPRYYNIDRDKLKMLPGALGVPMGPGEEWSAVYSTAMPGTTKXNPVTVYFIDHEIYFGRDGIYGVPSQPDFLDNFRRYSFLCRGACQLCRKIGWFPDVIHAHDWPAALAPVYMKFAERVPASLKGFEKTISVLTIHNLGYQGIYSKDNYNYAGLGWDVFYNAGFEDWSMLNMLKAGLYSADSLNTVSPNYAEETKTQEHGFRLDGVLRYRSADYSGILNGIDTSVWNPKKDKLIPEHYSASDMSGKAVAKAALQKHFGLPENPKVPLIGMVTRLVEQKGVGELFGPTYGSLWNICNDFDVQVVLIGTGESWCEHEIGSLSYRLPNFKAHIGYSEKVSHL

SEQ ID NO: 35435 - DNA, 426 bp, Unknown
  Obtained from environmental sample
  misc_feature (1)..(426): n is a, c, g, or t
gtggtcggcctccacgccgcccggcgcggcactcgtttcgaggctttggagccgatacggcaaggcctcatcgaccatttcggcgcgatgtcggaaaaagcggcggaggggctggccatacgccacgatcacggcagccagttcatctccagcacctaccagaaagaactgcgcttcctggggattaaaagctcgccgtctttcgtgcgagaaccacaaggcaacggcatcgccgaacgcttcgtccgcaccctaaaagaaaaccttctttggatcaggcgcttcgccaccgtcgaggaattacgcctggccctcttgaaattcaaaaacgcatacaaccacaaatggatggtcggtaggcacggatacaaaacccccgcacaggtcaggtccgctcaaaccttttccctgcctaaggccgcctaa

SEQ ID NO: 35436 - protein, 141 aa, Unknown
  Obtained from environmental sample
  DOMAIN (2)...(131): Integrase core domain
  misc_feature (1)..(141): Xaa is any amino acid
MVGLHAARRGTRFEALEPIRQGLIDHFGAMSEKAAEGLAIRHDHGSQFISSTYQKELRFLGIKSSPSFVREPQGNGIAERFVRTLKENLLWIRRFATVEELRLALLKFKNAYNHKWMVGRHGYKTPAQVRSAQTFSLPKAA

SEQ ID NO: 35437 - DNA, 351 bp, Unknown
  Obtained from environmental sample
  misc_feature (1)..(351): n is a, c, g, or t
atgtcccataccctttttatagtcagcacgccaataggtaatttggaagatattacctttagggctgtaagggtattaaaggaagcaacgctgattttggcagaagatacccgccatagcagaattttgttagaccattttggaatttcaacaaagatggaaagttatcacgatttcaacaaagagcaggtgactccaaaatatgtggaatatctaaagagcaaaggcgatatagcccttgtgtgcgatgccggaacccccggaattgcagacccggcttttaatcttgtccgtgctgctaggcaggagcaaattcccgtgcgggcggtgccgggcgcaaacgctctttaa

SEQ ID NO: 35438 - protein, 116 aa, Unknown
  Obtained from environmental sample
  misc_feature (1)..(116): Xaa is any amino acid
MSHTLFIVSTPIGNLEDITFRAVRVLKEATLILAEDTRHSRILLDHFGISTKMESYHDFNKEQVTPKYVEYLKSKGDIALVCDAGTPGIADPAFNLVRAARQEQIPVRAVPGANAL

SEQ ID NO: 35439 - DNA, 771 bp, Unknown
  Obtained from environmental sample
  misc_feature (1)..(771): n is a, c, g, or t
atgggcaaaaaaggaactataaacgtgcaaggaacagagataacagtattatcttcgtcagaagaaaatgattatatttctttgacagatatggctaacgcaaaggaaggtgaagccagagccgcagatattattaagaattggattagaactcgcattactcttgaatttttaggtgcttgggaacaaatgtataaccagaattttaaagtggtggaatttgaccactttaaaatgcaagctggtttgccaagttttgttttaagtccaggacaatggattgaaaaaacaaacgcaaaaggcatagttgttaaattagggaaatatggtggaacttacgcccacaaagatattgcttttgagttcggggcagcaattagtgcggtatttagattatttttgataaaagaatttcaacgactaaaagaaaatgaacaaaagcagcaatccttggaatggagtttgcagagaactctgtcaaaaataaactaccgcatacatacagatgcaatcaaggaaaaactaatccctttggaattaacaaaagagcaaatattatctgcttacgctaatgaagcggatttattgaatgtggctttatttggcaaaaccgcttctcaatggcgaaaagaaaatccccaagcgagcggcaatataagagataatgcaactttggagcagcttgttgttttgtcaaatatggagagcataaatgctctcttaattcggcaaaatatgtcttcgcaaaaaaggataaaagcagttaaatag

SEQ ID NO: 35440 - protein, 256 aa, Unknown
  Obtained from environmental sample
  misc_feature (1)..(256): Xaa is any amino acid
MGKKGTINVQGTEITVLSSSEENDYISLTDMANAKEGEARAADIIKNWIRTRITLEFLGAWEQMYNQNFKVVEFDHFKMQAGLPSFVLSPGQWIEKTNAKGIVVKLGKYGGTYAHKDIAFEFGAAISAVFRLFLIKEFQRLKENEQKQQSLEWSLQRTLSKINYRIHTDAIKEKLIPLELTKEQILSAYANEADLLNVALFGKTASQWRKENPQASGNIRDNATLEQLVVLSNMESINALLIRQNMSSQKRIKAVK

SEQ ID NO: 35441 - DNA, 1056 bp, Unknown
  Obtained from environmental sample
  misc_feature (1)..(1056): n is a, c, g, or t
gtgaaaaaggcaagggaaaaatggctttcggagtttgatgcctgggcaagggagaaccctgacaagaaaatggaatgggacatattttattccggcaaagccgtgatagctgcgctgccttcttttgctgttggtgaaaaaatcgccacgcgcagtgccggcaacaagtcccttaacgccatagccaacgccaatcccaatctggtgggaggctccgccgatctcaaaggccccaacgccgttggcatctccggcgcggctgtctattcagcttcggagcgcggcggccgctatattcatttcggtatccgcgaattcgccatggcggcaatttccaacggcatttcccttcacggcggtttccgccccttctgctctaccttcatggtcttttccgattacctgcgcccggccttgcgtctttccgctctgatgaaacagcctgtgatttatgtgcttacccacgattcaatttatgtgggggaagacgggcccacccatcagccggttgaacaccttgccgccctcagggccattcccaatgtaagggtgctgcgccccgctgacgcggaggaaaccgcagaagcctgggctatggcgatggaaaggacagatggcccgattgtgctcgcctttacaaggcagaacactgttgtttttgccaaggaagatcccgaatggaaggacaagctccgcacaggcgcttacattgtgagaaagccttccgggtctatcgatgctgtactaatcgccaccggttccgaagtaaacctcgccctggctgccgcggagctttcaggaaaaaatgtgcaggtggtttcaatgatcagcagggaactctntgagtctcaaagcgaggccgtcagaaacggcgtgtttcccccgggtgtaagaacggttgtctgcgaggccgctgtccgccagggctgggaacgatgggcaaaaccggaagacatcttcacaattgaccgcttcggcgaatcaggcccctatgaaaaagcggcggaggctcttgggtttacggcaaaggcactggcggagcttgttgggcgctga

SEQ ID NO: 35442 - protein, 351 aa, Unknown
  Obtained from environmental sample
  DOMAIN (235)...(345): Transketolase, C-terminal domain
  misc_feature (1)..(351): Xaa is any amino acid
MKKAREKWLSEFDAWARENPDKKMEWDIFYSGKAVIAALPSFAVGEKIATRSAGNKSLNAIANANPNLVGGSADLKGPNAVGISGAAVYSASERGGRYIHFGIREFAMAAISNGISLHGGFRPFCSTFMVFSDYLRPALRLSALMKQPVIYVLTHDSIYVGEDGPTHQPVEHLAALRAIPNVRVLRPADAEETAEAWAMAMERTDGPIVLAFTRQNTVVFAKEDPEWKDKLRTGAYIVRKPSGSIDAVLIATGSEVNLALAAAELSGKNVQVVSMISRELXESQSEAVRNGVFPPGVRTVVCEAAVRQGWERWAKPEDIFTIDRFGESGPYEKAAEALGFTAKALAELVGR

SEQ ID NO: 35443 - DNA, 1032 bp, Unknown
  Obtained from environmental sample
  misc_feature (1)..(1032): n is a, c, g, or t
atggaattaagcctccgcggactgaattatttagccggagaacaagccctgtactggcaaggaagggaagaaagttatataaaacagttaaccggaattgcggacataatgggcgaatttgaaatgctgcccgtaaaagatcggaggaatcagtatgataatatgctgaaggctgtcctgaataacaatcccgactttgtccgcatattttccatttggaaaccgaacgccatggacggcatggacagcctttatataggccgtccgggatcatctccaacggggcagtacgcaatgacatggggcagagataccggcactattgaaataaaacccaacctcgtcattgatgagatcaacgcgtggatgaacggccccaacgcgctcaaggttcgggttgaaaaccccgcgccttttaagaataacggaaaagacacctttattatcagaattggggttcccataaccggaagcgccggcggcgaagcggtcggacacttatgtgttcttttagacatagccccaatgcagacagagatagaaaatgccattaaaagtcacgaagaaatatcagcaatggttatttattcgggtaacggaatgataatgggtcattgggttcctgaacgggtaggaaagatgctgactgatgcggatacgatatacggtaattatatgcaggaagcggataaagccgtgcgggaagggatggaatttcaatgcagcagctattcgccggttttaaaagaggatatgaaaataaatatgcttcccttccaaataggcgattccgacatgtactggacggtaatgatagcgacatcagaagcgtacattatgaaagaaattaacaggattaccagatttacaattatccttacggcaatcgttattatagtggcctcggtaatagtgtactctatcttcgatttctcaaccaaaccactggaatgggtaacgtgggaaatacccggcggcatgaacgaaatggcaaacggtacggatcaaacaagtggtaaacaatgtcaatga

SEQ ID NO: 35444 - protein, 343 aa, Unknown
  Obtained from environmental sample
  misc_feature (1)..(343): Xaa is any amino acid
MELSLRGLNYLAGEQALYWQGREESYIKQLTGIADIMGEFEMLPVKDRRNQYDNMLKAVLNNNPDFVRIFSIWKPNAMDGMDSLYIGRPGSSPTGQYAMTWGRDTGTIEIKPNLVIDEINAWMNGPNALKVRVENPAPFKNNGKDTFIIRIGVPITGSAGGEAVGHLCVLLDIAPMQTEIENAIKSHEEISAMVIYSGNGMIMGHWVPERVGKMLTDADTIYGNYMQEADKAVREGMEFQCSSYSPVLKEDMKINMLPFQIGDSDMYWTVMIATSEAYIMKEINRITRFTIILTAIVIIVASVIVYSIFDFSTKPLEWVTWEIPGGMNEMANGTDQTSGKQCQ

SEQ ID NO: 35445 - DNA, 330 bp, Unknown
  Obtained from environmental sample
  misc_feature (1)..(330): n is a, c, g, or t
atggtaagcttggagcaagtaaagctgctggaatccagggtaacaaacataattgaatattataaaaaactgacaggcgaaaattccaagctaaaggaaaagctggattcataccaaaagcgtattgacgagcttgaagtcctggtacatcagttcaaggaaaaccagggcaagattgaagatggaattctttccgccctggacaggcttaaccagtttgaggacgctttggaaagcaagctttccattgagagcaagcctccggttgaaagcaagcctccagttgaaaataccccggatgcggcaaaaaaggagcttgatattttctaa

SEQ ID NO: 35446 - protein, 109 aa, Unknown
  Obtained from environmental sample
  misc_feature (1)..(109): Xaa is any amino acid
MVSLEQVKLLESRVTNIIEYYKKLTGENSKLKEKLDSYQKRIDELEVLVHQFKENQGKIEDGILSALDRLNQFEDALESKLSIESKPPVESKPPVENTPDAAKKELDIF

SEQ ID NO: 35447 - DNA, 876 bp, Unknown
  Obtained from environmental sample
  misc_feature (1)..(876): n is a, c, g, or t
atgctccttgaggaaatcggcgttcttgttgaaagtcataagcaggctgattcatttatcactgaggaaaccacaagccaaaacattcatgaacaaatgaaaaatatgaccggaggcattatcaaaacgaaaatactcgctgaaaaatttgacggaaaagtattttatatcaaagcgagcatgatcgttgacacggaaagcgtagcgagaaaagtgtcggaaatgtcggaaacacatgaagctcaaaaagaactgtcgaatgttcgcgcggaaatttcgaaaatacaagcacgccagaaagaactgtcaagtcttcgatctgtggtatcgcgtcttcaatcagacatggcgcttcttcagtcagaaatgttgagaatagaagcgaatcaaaatgaaatatcgagtcctcaagctgaaatggcgcgtcttgtatcaggcgcatcgaattttcaggaggaatttttgaaaatacagacgggccaaaaagaaatgacgaatcttcaatcagaactggcgaaccttcgctcggacaatctgaaaatacaggcgagccaaaaagaactgccgaatcttcaagcggaagtgtcgagcttgcgagcggaactgttgaaactgcaagcaagccaaaaagaactgccggcgcttcgatcggatgtttcaaagctccaggcaagccacagagaactctccaaagcaagaacgatcgaataccagtgggtcaatcagcctgaaagccctccggcggagcaacaggtcaatgtggcgtccgtgagaaaaggcatgacgaanaaggaagtcatcagcgccgtgggcagaccggcaacggcttccggcaccggcaccggaaggttgcccaatcggaaactgcgcccataa

SEQ ID NO: 35448 - protein, 291 aa, Unknown
  Obtained from environmental sample
  misc_feature (1)..(291): Xaa is any amino acid
MLLEEIGVLVESHKQADSFITEETTSQNIHEQMKNMTGGIIKTKILAEKFDGKVFYIKASMIVDTESVARKVSEMSETHEAQKELSNVRAEISKIQARQKELSSLRSVVSRLQSDMALLQSEMLRIEANQNEISSPQAEMARLVSGASNFQEEFLKIQTGQKEMTNLQSELANLRSDNLKIQASQKELPNLQAEVSSLRAELLKLQASQKELPALRSDVSKLQASHRELSKARTIEYQWVNQPESPPAEQQVNVASVRKGMTXKEVISAVGRPATASGTGTGRLPNRKLRP

SEQ ID NO: 35449 - DNA, 591 bp, Unknown
  Obtained from environmental sample
  misc_feature (1)..(591): n is a, c, g, or t
ttgaacatgtatggctattcaaagcacgtgttcgacctgtgggcgttgcgggagcatctgctcgaccgcatcgcgtgcctcaagtttttcaacgtctacgggccgaatgaataccacaagggcgacatgcgcagcatggtctgcaaggctgtggaacagattctggccaatggggaactgcggctcttccgatccgagaggccggattacgcggacggcgggcagatgcgggatttcgtctatgtgaaggactgcgcggagatcgtctggcggctcttgggcaatccggaagtcaacggcatcctcaatgccggatcgggcgcggcccggacctggaacgatttggccgcggccgtgttcgcggccatggggcggccggcgaacgtggcgtacgcggacatgcccgaagccctgcggggcaaataccagtattttacgcaggccgacatggactggctcaagcggctccggcgcccggcgccgtttcacacgctggaagagggcgtgcgcgattatgtgcgcaactacctgttgcaggacgatccctatttgaaacatgacagccacgcccgcgcggagcatgcgaaatga

SEQ ID NO: 35450 - protein, 196 aa, Unknown
  Obtained from environmental sample
  misc_feature (1)..(196): Xaa is any amino acid
MNMYGYSKHVFDLWALREHLLDRIACLKFFNVYGPNEYHKGDMRSMVCKAVEQILANGELRLFRSERPDYADGGQMRDFVYVKDCAEIVWRLLGNPEVNGILNAGSGAARTWNDLAAAVFAAMGRPANVAYADMPEALRGKYQYFTQADMDWLKRLRRPAPFHTLEEGVRDYVRNYLLQDDPYLKHDSHARAEHAK

SEQ ID NO: 35451 - DNA, 411 bp, Unknown
  Obtained from environmental sample
  misc_feature (1)..(411): n is a, c, g, or t
atgtataaccgcgggctttataaacattacggcatctatattggtaatttaaaagtagtccattatgccgcaccggacggagatttcggcattgatgcaagtatccgtaagacatccttgaaagaatttgagaacggatgtaaggcccaagttgttcaattaccaagggtagaaaaatcaaaaaaactgttttcaccggaggaaacggtctgccgtgcaatgtcccgcattggcgaaaagaaatataatctccttttcaataattgcgagcattttgccttttggtgtaagacaggaataaccaaatccagacaagtcgagaatgttctcaaaaccgcagttttagcaagcatgactgttgttttaaccaagctggttatttcagcaaatgataacaaggagcaaatatga

SEQ ID NO: 35452 - protein, 136 aa, Unknown
  Obtained from environmental sample
  DOMAIN (27)...(109): NC domain
  misc_feature (1)..(136): Xaa is any amino acid
MYNRGLYKHYGIYIGNLKVVHYAAPDGDFGIDASIRKTSLKEFENGCKAQVVQLPRVEKSKKLFSPEETVCRAMSRIGEKKYNLLFNNCEHFAFWCKTGITKSRQVENVLKTAVLASMTVVLTKLVISANDNKEQI

SEQ ID NO: 35453 - DNA, 552 bp, Unknown
  Obtained from environmental sample
  misc_feature (1)..(552): n is a, c, g, or t
atgtcaaattccatagcggaaacgttcgccggatacagccggacgctgctgaatttcatccgagggcgggtcaaccgcttcgaggacgcggaagacatccttcaggatgtcttctttcagttcgccaaggcgagcgatatgatcaacccgatagaaaattcggcggcgtggctctaccgcgccgcccgaaataagatcatagaccactacaaaaagaagaaggacgagccgctgccgggctactacgacgacgaggaggacgggtacgtcatagacgagatagccgacatactaaacggcgaggcggcgacgccggagacggagtacctgcgctcgcttatccttcaggagatcggcgacgcgctgaacgagctgccggaggagcagcggacggtctttgtgcagacggagatagacgggataccggtaaaggaggtcgccgaaaaaaccggcgcgcccgtcaataccgtcctctcaaggaagcgctacgccgtcctattcctgcgaaaacgcctcaaggagctatacgacggggttatgatgggcgtttag

SEQ ID NO: 35454 - protein, 183 aa, Unknown
  Obtained from environmental sample
  DOMAIN (121)...(170): Sigma-70, region 4
  misc_feature (1)..(183): Xaa is any amino acid
MSNSIAETFAGYSRTLLNFIRGRVNRFEDAEDILQDVFFQFAKASDMINPIENSAAWLYRAARNKIIDHYKKKKDEPLPGYYDDEEDGYVIDEIADILNGEAATPETEYLRSLILQEIGDALNELPEEQRTVFVQTEIDGIPVKEVAEKTGAPVNTVLSRKRYAVLFLRKRLKELYDGVMMGV

SEQ ID NO: 35455 - DNA, 792 bp, Unknown
  Obtained from environmental sample
  misc_feature (1)..(792): n is a, c, g, or t
ttggatttttattcccagaaggaactggaagcgtatatccgcaagtcaatttccgaaggcaaggacggagcccttccgccatggatggtgatacagggaataatcggcgaacgatggtttttcagaagggaacattatctgcctatctgcgccaaaatgattggcgacctgcagccccagataaaagcgacgcttatcaaacgctggtcaagattaattaaggaatatttgagcgagccggcgatggaaaaagatccggagtacgagaaactgctgaaaaaactgaccaataatattaacccgcttcttcagaccatacttgaagatccgaaactcctctgggcttatcaggatcttgaaagctctctgggaacagtcccgcagaacatgcgcctgttcaaccgtggcgcgttgtttcctttttatgtcctttattcgttaaggcgcaaggatgttatagccgagataaaatccgagcttccaatctggtactcaaaccccatactccttgccattcttaaattttttaaaaacctgggaagaaaaaaaagcccgaggagccgtgaggaaagtgaagaaaaaccgccggctgccgggaaaaaacccgacaagatgaagagcagcgcccttcagattaagtcagacatcgtgccggaaggtaaaaccgtcgatgagcacctcgactcgctggaaaagcgctggtgcagccttcgtgacgcggatacccgcaagaccatgattgtcggcgtcaaatcactggcgaaagacagtctgcgcaaacacgtcaaatga

SEQ ID NO: 35456 - protein, 263 aa, Unknown
  Obtained from environmental sample
  misc_feature (1)..(263): Xaa is any amino acid
MDFYSQKELEAYIRKSISEGKDGALPPWMVIQGIIGERWFFRREHYLPICAKMIGDLQPQIKATLIKRWSRLIKEYLSEPAMEKDPEYEKLLKKLTNNINPLLQTILEDPKLLWAYQDLESSLGTVPQNMRLFNRGALFPFYVLYSLRRKDVIAEIKSELPIWYSNPILLAILKFFKNLGRKKSPRSREESEEKPPAAGKKPDKMKSSALQIKSDIVPEGKTVDEHLDSLEKRWCSLRDADTRKTMIVGVKSLAKDSLRKHVK

SEQ ID NO: 35457 - DNA, 1044 bp, Unknown
  Obtained from environmental sample
  misc_feature (1)..(1044): n is a, c, g, or t
ttgtgggagtcgggttgcgcctatcaccacgcggggatactgccggcggctaaggagatcgtggagcggctctttaccatggggttgataaaactgttattttgtacggagaccttcgcgctgggcgtcaacatgcctgcgagttctgtgatcttcgacgagcttgaaaagttcgatggtgtgcagttcaactacttgatgacccgcgagtacaaccagatggcgggccgcgccggccggcgcgggatggacgaggtgggctacgtctactcgcaggtgatcccggaggccacagaccccgaccaattggagcgcatactttacggtacaaatgagcgcatcaacagccggttttacgcgtcgtattcgacgatactctccctctacagccaattcggcgacggggcgttcgatattttccgcaagagcctccacaacttccgcaaaggcgtcttttcaatgtctaagatatatcaaaaagaagaggcgcagataaggaacaggataaaattcctgcaatcgagcggttttttggacggtacgaagctgacgcccaagggccagctggcggcggcggtgagcggttacgagatacagaccgcggagctttactattgcagggatttcgaagacgtctcggcggcgcagctgccggtgctattggccgcgctgattaccgaggaggcgcgcagccgcaaagtcccgcccataaccaacgtggcgctcaaattcgacgcccagaagacgatccacaaactgcgccaaaaagagatcaagtacaacatagcgaacccgatccgggagatggacttctcaatggccgccccggtcttcgcgtgggcgagcggttgcgacctgaagcagttagccggtttcggcgtgccggagggggacttgatacgtatactgcggatgacgatacagttgctgcgcacgctgcgggataggattgttgacccggaaataagcgacaagatgcacaacgcgctggaattggtcaatagggacgtggtggacgctcagaatgagttgaacgtggggtga

SEQ ID NO: 35458 - protein, 347 aa, Unknown
  Obtained from environmental sample
  DOMAIN (1)...(82): Helicase conserved C-terminal domain
  misc_feature (1)..(347): Xaa is any amino acid
MWESGCAYHHAGILPAAKEIVERLFTMGLIKLLFCTETFALGVNMPASSVIFDELEKFDGVQFNYLMTREYNQMAGRAGRRGMDEVGYVYSQVIPEATDPDQLERILYGTNERINSRFYASYSTILSLYSQFGDGAFDIFRKSLHNFRKGVFSMSKIYQKEEAQIRNRIKFLQSSGFLDGTKLTPKGQLAAAVSGYEIQTAELYYCRDFEDVSAAQLPVLLAALITEEARSRKVPPITNVALKFDAQKTIHKLRQKEIKYNIANPIREMDFSMAAPVFAWASGCDLKQLAGFGVPEGDLIRILRMTIQLLRTLRDRIVDPEISDKMHNALELVNRDVVDAQNELNVG

SEQ ID NO: 35459 - DNA, 630 bp, Unknown
  Obtained from environmental sample
  misc_feature (1)..(630): n is a, c, g, or t
gtgatgtgcgccccgttcgcctcaggagacgagtcgcgggcaaggttatacgatatgatctgcgagtctattttggattcngatgacgttcctagaagtaaagacggtttcgatcagttaataacaaaagtcaaagaatcaatgcgagggataggtttccgcgtactctccgtatntgaggagtcgttacgcatatttacagacgacgccgcccgcctatcgtcggctaaaaagaaattaccggcggacatccacaaagaattgacaaaagggctcaacggattcttcaaggatattttggacgggcaaacgacgcttgaaatcttcttccagtacccgcgctacctaaaagtcttcgcgacaatcatagaaaaggcctctttcgaaccgtttaaataccgccaaaaacgggccgaggtcaaccaatatgcgtcgatttacaacgatttatccaaaaaaagcgtcaagccggaaaacgcccatcaccgtaaacgattgctgaaagaattcgcgctaacgatacgagagtttgagatcaaccaattcgcgcaacacgtcaagacgctattcccggtatcggagcagcggatggacaagaaggttgaggagataaagaaactctgttcgtaa

SEQ ID NO: 35460 - protein, 209 aa, Unknown
  Obtained from environmental sample
  misc_feature (1)..(209): Xaa is any amino acid
MMCAPFASGDESRARLYDMICESILDSDDVPRSKDGFDQLITKVKESMRGIGFRVLSVXEESLRIFTDDAARLSSAKKKLPADIHKELTKGLNGFFKDILDGQTTLEIFFQYPRYLKVFATIIEKASFEPFKYRQKRAEVNQYASIYNDLSKKSVKPENAHHRKRLLKEFALTIREFEINQFAQHVKTLFPVSEQRMDKKVEEIKKLCS

SEQ ID NO: 35461 - DNA, 648 bp, Unknown
  Obtained from environmental sample
  misc_feature (1)..(648): n is a, c, g, or t
gtgttccgcattgccccgttaatgcgtttcatgcttaattcggtaagtgtttccgcgatgggcagcgtcctaaggctggctttcgcgatgctcgccgcttacgctttctgctattatgatttcaggggaaagacaattctctttatgattatccttggaaccatgatgcttcccggggacactcttgtggttaccaattacatcaccattacgcgccttaacctgctggacaattactttggtatttgcgttacctcccttgccggagccgcgcagatgttcatgctccgccagaatttcaagaccgttccgcgctcctaccgtgacgccgcgttcatggacggctgcggggatctgcgttacctgttttttgtgcttgcgccgctttccgctccggttatttttacattggcggttcagtcctttattgcgttttggaatgcgtatctgtggccgcttcttgttacaaaccgcgttgagatgcgtaccgttcagattggcgtcgcgatgttgaccaatccgctggatacaaattacactaccgtactggctgcggttactttgcttctgataccttcgttattcctttttagtcttctgcgtttggttataaaaagggcaatagaagggggttcccttgtgggctaa

SEQ ID NO: 35462 - protein, 215 aa, Unknown
  Obtained from environmental sample
  SIGNAL (1)...(19)
  DOMAIN (7)...(210): Binding-protein-dependent transport system inner membrane component
  misc_feature (1)..(215): Xaa is any amino acid
MFRIAPLMRFMLNSVSVSAMGSVLRLAFAMLAAYAFCYYDFRGKTILFMIILGTMMLPGDTLVVTNYITITRLNLLDNYFGICVTSLAGAAQMFMLRQNFKTVPRSYRDAAFMDGCGDLRYLFFVLAPLSAPVIFTLAVQSFIAFWNAYLWPLLVTNRVEMRTVQIGVAMLTNPLDTNYTTVLAAVTLLLIPSLFLFSLLRLVIKRAIEGGSLVG

SEQ ID NO: 35463 - DNA, 684 bp, Unknown
  Obtained from environmental sample
  misc_feature (1)..(684): n is a, c, g, or t
gtgtcgcatcttcaaccaagtagtctgaaaggggtaaagaaaatgacactcttttctattctgagcgtaggaacccgcgcgttgcagacctcgcagctgggtattgacatcaccggtcaaaacgtctccaacgccgacgtagacgggtactcccgcaagcgcataaaccaggcgaccatgtacgcctacgactcctcctacggtcagatgggcttgggcgcgcgtgtggtaaacatcgagaggatgcgcaacgtcttcttggacgagcagatacgcaaacagaactcggaggtcggttacttcatgcaggtcaactcgaccttcaaccgcatggaggcaatactctgcgagccgagcgatctcggcgttatgcactacctgaacgagttcttcgactcatgggaaaacctcgcgaacaaccccaaggacatctcggcgcgcactatggtcagaaccaacgcccagatgatgatcgataacttccacaaggccgccgccgaactcgcgaacctccgcgaacagaagaacgaggagatcccggtgcgcgtcgccaggatcaaccagatatcgcacgagatcaggaacctgaaccaagaggtcgcgacggttgaatcggcgaccagaacgccaacgacagccgcgacaggcgcgaggtgctgcttaaagaactctcgcagctcatag

SEQ ID NO: 35464 - protein, 227 aa, Unknown
  Obtained from environmental sample
  SIGNAL (1)...(30)
  DOMAIN (21)...(51): Flagella basal body rod protein
  misc_feature (1)..(227): Xaa is any amino acid
MSHLQPSSLKGVKKMTLFSILSVGTRALQTSQLGIDITGQNVSNADVDGYSRKRINQATMYAYDSSYGQMGLGARVVNIERMRNVFLDEQIRKQNSEVGYFMQVNSTFNRMEAILCEPSDLGVMHYLNEFFDSWENLANNPKDISARTMVRTNAQMMIDNFHKAAAELANLREQKNEEIPVRVARINQISHEIRNLNQEVATVESATRTPTTAATGARCCLKNSRSS

SEQ ID NO: 35465 - DNA, 669 bp, Unknown
  Obtained from environmental sample
  misc_feature (1)..(669): n is a, c, g, or t
ttggggcatacgagcctagtaggcgccgccgatgatattcatgaaattgcgcgtgactcggagggcttgcttgcgatcaacagagtgataaaagacatcgccagccagaccaacttgctttccatgaacgcggctattgaagcggcgcatgcgggtgattacggcagaggtttcgcggtagtcgccgatgaaattcgcaagcttgccgaaagttccagcgcgcagtctaaaacaataagctcagtactcaagaagataaaaggctcaattgacaaagttggctcaaccaccgatgacacgcttacaagatttaacgttatcgatgcggacataaaaaccgtaacggagcaggagggaaatatccgcaacgcaatggaagaacagaacgaaggcagcaaacatatattggaagccgtcagccagcttaatgagattacaaggcaggttaaagatgagtccgaacaaatgcttcaaggcagccgtgaggtgataaaagagagcaggaatcttgagaatgtaacgcatgagattgaagggggcattaacgaaatcgcgttaggagctgaacagatcaacgaggcggttaacatggttaacgacataaccgtgaaaaacagggaaaacatcaattttttagtcaaggaggtttcactgttcaaagtggcataa

SEQ ID NO: 35466 - protein, 222 aa, Unknown
  Obtained from environmental sample
  DOMAIN (2)...(180): Methyl-accepting chemotaxis protein (MCP) signaling domain
  misc_feature (1)..(222): Xaa is any amino acid
MGHTSLVGAADDIHEIARDSEGLLAINRVIKDIASQTNLLSMNAAIEAAHAGDYGRGFAVVADEIRKLAESSSAQSKTISSVLKKIKGSIDKVGSTTDDTLTRFNVIDADIKTVTEQEGNIRNAMEEQNEGSKHILEAVSQLNEITRQVKDESEQMLQGSREVIKESRNLENVTHEIEGGINEIALGAEQINEAVNMVNDITVKNRENINFLVKEVSLFKVA

SEQ ID NO: 35467 - DNA, 312 bp, Unknown
  Obtained from environmental sample
  misc_feature (1)..(312): n is a, c, g, or t
atggaaacgtttttgcaatggtggggcggaataggctatttattgtccaaggtatttattgtccgctcggaaattttggaaaacggcagaaacagccgccttattggctggtttgcgtatttggtgggaatgccggcgtggatcattttattgttaagcaggcaaaactggattgcatcggcagttgaaatagcggggattccctcggtaattctgggaataaaattaacctggaaacaaaacaataatccaaataaatttacaacgggtcaatcagggtctttatcgctctggtcatcttattgggagtag

SEQ ID NO: 35468 - protein, 103 aa, Unknown
  Obtained from environmental sample
  misc_feature (1)..(103): Xaa is any amino acid
METFLQWWGGIGYLLSKVFIVRSEILENGRNSRLIGWFAYLVGMPAWIILLLSRQNWIASAVEIAGIPSVILGIKLTWKQNNNPNKFTTGQSGSLSLWSSYWE

SEQ ID NO: 35469 - DNA, 336 bp, Unknown
  Obtained from environmental sample
  misc_feature (1)..(336): n is a, c, g, or t
atgtatagaatgtttctgaacagtaagttacgcgatgtccgtataacgggtgtgaaccttgagtatgagggcagtattactattgatgaggattacttggagcgcgcggggatactgcctgatgaggaggtgcacgttctgaacgtgaatacgggcgttcggttgactacttatgtgatcaagggggagcgcggctcaggtatcatggagttgaacgggccggcggctcggcttgggatggtgggcgaccggatcatggtgctgacctacgcaatgctcgcgccggaggagatcgcgggacataagccgaccattatcagcgtcggggtgaagtaa

SEQ ID NO: 35470 - protein, 111 aa, Unknown
  Obtained from environmental sample
  DOMAIN (1)...(111): Aspartate decarboxylase
  misc_feature (1)..(111): Xaa is any amino acid
MYRMFLNSKLRDVRITGVNLEYEGSITIDEDYLERAGILPDEEVHVLNVNTGVRLTTYVIKGERGSGIMELNGPAARLGMVGDRIMVLTYAMLAPEEIAGHKPTIISVGVK

SEQ ID NO: 35471 - DNA, 1041 bp, Unknown
  Obtained from environmental sample
  misc_feature (1)..(1041): n is a, c, g, or t
gtgaataccttcggcccccacgggctgcctctgatagggcgggccgactggaacgactgcctcaacctgaactgcttctccaccacgcccgacgaatccttccagacctgcacgagcaaggacggcaagacggcggagtcggtgctgatagcgggcatgttcgtctgcataggcaaggagtacgtgaggatattggagatattaggcaagaaagaggaggcggccaaagcggtcgggcatatagagtccatgaagaagacgatcctgacagcgggctgggacggcgagtggttcgtgcgggcctacgacgactctaagcagaagatcgggagcaaagagtgcgaggagggccagatattcatagagtctcagggtttctgcgtgatggccgaggtgggggtacaggagggctacgcggcgaaggcgctggaatccgcgaggaagcgcttggacacggatcacgggcttgtgctgctcaacccgccgtacacgaagtaccacgtggagctcggcgaggtcagctcctatccgcccggatataaggagaacgccggtatcttctgccacaacaacccgtggataatcatagccgagacggtcttgggtcaggggaacgaggctttcgggcattacaggaagatcgccccggcgtatcgcgaggggataagcgggctgcaccgtatggagccgtacgtctactcgcagatgatcgcggggaaggacgcaaagcgccacggggaggcgaagaactcttggctgacggggacggcggcttggaactttgtggcggtctcgcagtggatattaggcatcaggccggattatgacgggctgacggtcgacccgtgcataccgtcggattggagcgggttcacggcggtcagaaagttcaggggggccacgctcaacatcaccgtgaagaacgagagcaaggcttgcaagggggtcagggtgcttacggtggacgggaaggcgattccggggaatgtcgtgccggtctttacggacgggaaaacacatgagattgtggcggagatgtga

SEQ ID NO: 35472 - protein, 346 aa, Unknown
  Obtained from environmental sample
  misc_feature (1)..(346): Xaa is any amino acid
MNTFGPHGLPLIGRADWNDCLNLNCFSTTPDESFQTCTSKDGKTAESVLIAGMFVCIGKEYVRILEILGKKEEAAKAVGHIESMKKTILTAGWDGEWFVRAYDDSKQKIGSKECEEGQIFIESQGFCVMAEVGVQEGYAAKALESARKRLDTDHGLVLLNPPYTKYHVELGEVSSYPPGYKENAGIFCHNNPWIIIAETVLGQGNEAFGHYRKIAPAYREGISGLHRMEPYVYSQMIAGKDAKRHGEAKNSWLTGTAAWNFVAVSQWILGIRPDYDGLTVDPCIPSDWSGFTAVRKFRGATLNITVKNESKACKGVRVLTVDGKAIPGNVVPVFTDGKTHEIVAEM

SEQ ID NO: 35473 - DNA, 978 bp, Unknown
  Obtained from environmental sample
  misc_feature (1)..(978): n is a, c, g, or t
atgacaataataggtatttccgacggatttcgggggcttatcggggaaagcgtcaggacgctcagaccgcaagattttaacgggattttgaccagaggcggcactatcctgggggcaagcagggaaaaaccttttaaatctgcaattggagagaaagatgatattgaaggtgataaggtagccgcggccataaaaacttaccagaagctgggactggactgcctggtagtactgggaggaaacggtactaatactacaggctaccgttttgcacaggaggggctgaacgtgatcggccttcccaaaacgattgacaacgacattgtaggaaccgatgagacattcggttttaattcggcgctgtctatatgcaccgaggcgattgaccggcttcataccacggcgcagagccacagcagggtaatagtgattgaagtgatgggccataaggccggatggcttgccctttacgccggggttgcgggcggcggtgatatcatccttataccggaaattccctacgataaaaaaatcattggcgatcatcttaaggacagggcaagttcgggcaagactttttccatagtggttgtcgccgaaggggctctttcgatagaagaagcgaaaatggaaaaacgcgagcgcaaaanataccgcgccgaaaacggcccttccgtcgcttttcgtgtcgcccgtgagatacaggaagaaaccggaatggaaacccggtccactgtccttggctatgtgcagcgcggcggcatccccagcgcctctgaccgtgttctcgctaccagccttggcaccgccgccgcggagcttctggcgaaaggcgattacggccgcatggttgcccttatcggcaacgagatcggctctgtcgatctttccgttcccgaaggcaaagtaaaaaccgtgccgttggatcactatatgattgacaccgcaaaagctgttggtacgtgcatgggcgtttag

SEQ ID NO: 35474 - protein, 325 aa, Unknown
  Obtained from environmental sample
  DOMAIN (1)...(277): Phosphofructokinase
  misc_feature (1)..(325): Xaa is any amino acid
MTIIGISDGFRGLIGESVRTLRPQDFNGILTRGGTILGASREKPFKSAIGEKDDIEGDKVAAAIKTYQKLGLDCLVVLGGNGTNTTGYRFAQEGLNVIGLPKTIDNDIVGTDETFGFNSALSICTEAIDRLHTTAQSHSRVIVIEVMGHKAGWLALYAGVAGGGDIILIPEIPYDKKIIGDHLKDRASSGKTFSIVVVAEGALSIEEAKMEKRERKXYRAENGPSVAFRVAREIQEETGMETRSTVLGYVQRGGIPSASDRVLATSLGTAAAELLAKGDYGRMVALIGNEIGSVDLSVPEGKVKTVPLDHYMIDTAKAVGTCMGV

SEQ ID NO: 35475 - DNA, 741 bp, Unknown
  Obtained from environmental sample
  misc_feature (1)..(741): n is a, c, g, or t
ttggtaatcgaagacgcatttccaaacggcaggccggcgcttgaaaaagcgggggtgttgtttgcggacagggaaaccgtggacaaggttgaaaaaatgaaagtctgcacctgccttaacccgctgcacactgctctcgctgtttttggctgcctcctgggttacaaacggatcagcgacgaaatgaaagatcgggatctagtaaaacttattgaaggcatcggttacagggaagggctgcctgttgtgataaatccgggtatcataaatcctgaaaaatttatcggcgaggtaataaacgtccgccttcccaacccgtttatgcccgacactccccaacgtattgcggctgacacatcgcagaaaatcccagtccgttttggtgagaccctcaaggcttataggaattccggtaaagacctgaaagagttaaagcttatcccgctggtttttgccgcctggctccgttatcttttgggcattgacgatcagggcaaaccttttgagccaagccccgatcccctctatgatgatcttgcggcaggcctttccggcatcgcactgggaaaacctgaccaggcggcgttgcacggcaaactggagccaatcctttctaatccggctttgtttggcgtgaacctgtacgaggcggggcttggcaggcaagcggaggatctctttgcggaaatgatcacagggtctggggcggtaagagcagttctttcacgtatggttggttaa

SEQ ID NO: 35476 - protein, 246 aa, Unknown
  Obtained from environmental sample
  DOMAIN (2)...(219): Mannitol dehydrogenase C-terminal domain
  misc_feature (1)..(246): Xaa is any amino acid
MVIEDAFPNGRPALEKAGVLFADRETVDKVEKMKVCTCLNPLHTALAVFGCLLGYKRISDEMKDRDLVKLIEGIGYREGLPVVINPGIINPEKFIGEVINVRLPNPFMPDTPQRIAADTSQKIPVRFGETLKAYRNSGKDLKELKLIPLVFAAWLRYLLGIDDQGKPFEPSPDPLYDDLAAGLSGIALGKPDQAALHGKLEPILSNPALFGVNLYEAGLGRQAEDLFAEMITGSGAVRAVLSRMVG

SEQ ID NO: 35477 - DNA, 954 bp, Unknown
  Obtained from environmental sample
  misc_feature (1)..(954): n is a, c, g, or t
gtgggtgcactcggagcgggaaatatttcggcgcctcccccgccgctcttgcgcagtccctccttgaagaagggtatggaaaaaaccggcataatcgtcgccgaaggatacgacggtgaaataatcgacaagagttttacggcaatagataacctgaccatccttgtaacgctaaaatccgacggaacaacagagaaaaaagttatcgcttccgtcgcccagtcgctcagaatggacaaggaaatggacgcccttaaaaaaatattcgcctccccttccctgcaaatggcaagttttaccattacggaaaaagggtacgctgttaaaaaccgcggcggagaacttttccccgacatagcggaagatataaaaaacggcctcgcgtccgccaaaagctaccttggcagaatcgccgcgctctgccatgaacgttacgcgcatggcgctttgccgctcgcaatggcaagcatggacaactgttcgcataacggagacattctctttgccgctatggaaacaatcgcaaagggttgggcggaaaataacgcaacggacggcggctttttggattatgtccgcgataaaaacaaactctctttcccctggtccatgatcgacaaaattaccccgcgccccgatgacagcgtccgcgatatgctaatttcatcggggcttgaggatatgcagggaacggtaacgtcaaagaacacttatgtcgctccttttgtaaacgccgaagaaacccaataccttgtaatagaagatacttttccaaacggcagacccgcacttgaaaaagccggcgtgctttttacggacagggaaaccgtggacagggttgaaaaaatgaaggtctgcacctgccttaaccccctgcatacaagccttgccgtcttcggctgtctgctcggttacacaaggatcagcgaggaaatgaaggacgccgacctgtaa

SEQ ID NO: 35478 - protein, 317 aa, Unknown
  Obtained from environmental sample
  DOMAIN (1)...(160): Mannitol dehydrogenase Rossmann domain
  misc_feature (1)..(317): Xaa is any amino acid
MGALGAGNISAPPPPLLRSPSLKKGMEKTGIIVAEGYDGEIIDKSFTAIDNLTILVTLKSDGTTEKKVIASVAQSLRMDKEMDALKKIFASPSLQMASFTITEKGYAVKNRGGELFPDIAEDIKNGLASAKSYLGRIAALCHERYAHGALPLAMASMDNCSHNGDILFAAMETIAKGWAENNATDGGFLDYVRDKNKLSFPWSMIDKITPRPDDSVRDMLISSGLEDMQGTVTSKNTYVAPFVNAEETQYLVIEDTFPNGRPALEKAGVLFTDRETVDRVEKMKVCTCLNPLHTSLAVFGCLLGYTRISEEMKDADL

SEQ ID NO: 35479 - DNA, 1599 bp, Unknown
  Obtained from environmental sample
  misc_feature (1)..(1599): n is a, c, g, or t
atggcgggggggcgtgtgttaaatggaaaccaaccgcctatgctcatagataaaaaaggcaaaatgattttgcaaatagactctttaatcactgcttatcctttcaataatggcgtagcaggaataaaagtttatagccgtgggcaggaacaaatgatgttcatagacaaaaaagggaaaccagtggtccctacagtaacaggtgaaaagacaggctctattataagtgatggactgtatagttttcaggataaatcgaacgaaaaatggggatataaaaacaaaaatggtgaaattgtgataaatgcacaatttgacggtggatacattttcaaagacggaatggctgagattttgaatggcaaaaaatggggagccattgacaaaaaaggcaacatcataataaacccgcaatacgactacctagcttatgatggcaagggtttgttcgcagccaaggttggcaacaaatggggctgggtaaataaaaaaaatgaaataacaataaatccgcaatttgatgatgtggagcgcttcaatggaaataaacttgctcctgtgcaaatgggtgaaaaatggggttatataaataaagaagggcaaataataataaatccacagttttataaagcccttccattcaatggcgattacgctatggtagttaataccgagaccaagaccagaggttctggttggagtagtgtaaccattaccaagtacaaagcaggttttatagacaaaactggtagctatgttgtttcgcctttgtactatataagcagtgacgacattaacgaatatataagggcaaccacacaaagtaaaatcggtttgtctttggatggcgtggattttgatatgtacgatagattgagagaaaaaatggaagaagaacgggaaagggctattgctaaagaggccgaagaagccaaaaaagttgaggaaattagagaagttgaggaagccaaagaggttgaagaggtcgaagaagttaaagaggttgaggaagttagagaacgtgaaaagatagtaacaacttctggcatctttaccgatcctcgcgacaacgaaatttacaaaacgataaaaatcggcaaccaaacttggatagcgcaaaacttgaattataatgcgcaaggcagcaagtgctacgaaaataatgaaagcaactgcctaagatatggcaggctttataattggttcgcagctataaaagcctgtccaagcggctggcacttgccaagcaacagagaatgggatgcgctataccgccttgttgacggcaccagcggcacagaaagtccttacaagagcgaaacggcaggcaaatacctaaaggcaaaaaatggctggagctcttttgaaggatattcaggcaacggcacggatgattatggctttgcggctttgccgggcggtcttggcaactctaacggcggtttctccagcattggcaactacggcaactggtggagcagcacagaatccgatggcagccgagcttacaaccacttcaagtcttataagcacaataatgctggttgggagagcgaaactaagagcaaattattcagcgttcgttgcgtacaggattaa

SEQ ID NO: 35480 - protein, 532 aa, Unknown
  Obtained from environmental sample
  DOMAIN (89)...(105): KWG Leptospira
  misc_feature (1)..(532): Xaa is any amino acid
MAGGRVLNGNQPPMLIDKKGKMILQIDSLITAYPFNNGVAGIKVYSRGQEQMMFIDKKGKPVVPTVTGEKTGSIISDGLYSFQDKSNEKWGYKNKNGEIVINAQFDGGYIFKDGMAEILNGKKWGAIDKKGNIIINPQYDYLAYDGKGLFAAKVGNKWGWVNKKNEITINPQFDDVERFNGNKLAPVQMGEKWGYINKEGQIIINPQFYKALPFNGDYAMVVNTETKTRGSGWSSVTITKYKAGFIDKTGSYVVSPLYYISSDDINEYIRATTQSKIGLSLDGVDFDMYDRLREKMEEERERAIAKEAEEAKKVEEIREVEEAKEVEEVEEVKEVEEVREREKIVTTSGIFTDPRDNEIYKTIKIGNQTWIAQNLNYNAQGSKCYENNESNCLRYGRLYNWFAAIKACPSGWHLPSNREWDALYRLVDGTSGTESPYKSETAGKYLKAKNGWSSFEGYSGNGTDDYGFAALPGGLGNSNGGFSSIGNYGNWWSSTESDGSRAYNHFKSYKHNNAGWESETKSKLFSVRCVQD

SEQ ID NO: 35481 - DNA, 717 bp, Unknown
  Obtained from environmental sample
  misc_feature (1)..(717): n is a, c, g, or t
ttgcgcattataattcaagttttgcgctatccaagtttggttgccgatttttatcgttttgtaaatttcgttgtcgcgaggatcggtaaagatgccagaagttgttactatcttttcacgttctctaacttcctcaacctctttaacttcttcgacctcttcaacctctttggcttcctcaacttctctaatttcctcaacttttttggcttcttcggcctctttagcaatagccctttcccgttcttcttccattttttctctcaatctatcgtacatatcaaaatccacgccatccaaagacaaaccgattttactttgtgtggttgcccttatatattcgttaatgtcgtcactgcttatatagtacaaaggcgaaacaacatagctaccagttttgtctataaaacctgctttgtacttggtaatggttacactactccaaccagaacctctggtcttggtctcggtattaactaccatagcgtaatcgccattgaatggaagggctttataaaactgtggatttattattatttgcccttctttatttatataaccccatttttcacccatttgcacaggagcaagtttatttccattgaagcgctccacatcatcaaattgcggatttattgttatttcattttttttatttacccagccccatttgttgccaaccttggctgcgaacaaacccttgccatcataagctag

SEQ ID NO: 35482 - protein, 238 aa, Unknown
  Obtained from environmental sample
  misc_feature (1)..(238): Xaa is any amino acid
MRIIIQVLRYPSLVADFYRFVNFVVARIGKDARSCYYLFTFSNFLNLFNFFDLFNLFGFLNFSNFLNFFGFFGLFSNSPFPFFFHFFSQSIVHIKIHAIQRQTDFTLCGCPYIFVNVVTAYIVQRRNNIATSFVYKTCFVLGNGYTTPTRTSGLGLGINYHSVIAIEWKGFIKLWIYYYLPFFIYITPFFTHLHRSKFISIEALHIIKLRIYCYFIFFIYPAPFVANLGCEQTLAIIS

SEQ ID NO: 35483 - DNA, 1158 bp, Unknown
  Obtained from environmental sample
  misc_feature (1)..(1158): n is a, c, g, or t
gtgctggctctggacgcgggcggaaccaatttaagggccagccttgtacatttcgacgaagaaggcaaggctgtcgcggatgaaacaataaaaaactttatgccgggcacaaaaggccgggtaagtgaaacgcaatttttcgatattatcgccggagccgtcctgccgctgtttgaaaaaagacccaacgtagaagggataggattcactttttcgtatcccatggaaatgcagcctcacgcggacggcattctgctggcattcagcaaggaagttgacgccccggatgtcattgggaaggcaataggcgcggggttgagggaagccctggcccgcaagggacgaaaatatgacgggcctgtcgttatgcttaatgacacggtagcaaccctgctttcaggtattgcgtcaataccggcggacggctggggagagtcaacaaaaaatccctacggctttccgggcgggccggtaattggatgtatattgggaaccggcttcaataccgcgtatcctgaaacgcgaatacccaaaattggctttgactcanagacagccccgcagatcgtggtctgcgagacaggcactttcaaccttcactaccgcggctggctggacaaagaatttgacagcacaaccaaaaaccccggcgcttataatctggagaaaaccgtttcgggcgcgtacctgggccctctgacttttcacatcctgaaacaggcggttaaagacaaactgatccgttttaaaaaatccgatgaattacttgccatgccccagcttgagaccagaatactcaacgagttctcccgcgccccgcgcgccgccgaaggcccgctgggatcattgttcggcccggatgaaggggacgcgcttgccgcggtgcagtacattgtctcaattatcaccgagcgtggggcgctgtttgccgcggcggtgctggctgcaacagtggaaaaaatgcaggtatgccgtgagccgtactcaccggtacgcatagctatagaaggaactacctacatgatctacaggggaatgcgccgcgcccttgaagcccggctgcatacaatgcttataaaggagaagccccgaccatacgtcatatcgcctgtggaacaggccagtctctttggcgcggcagtagcggcttgcggttag

SEQ ID NO: 35484 - protein, 385 aa, Unknown
  Obtained from environmental sample
  DOMAIN (2)...(141): Hexokinase
  misc_feature (1)..(385): Xaa is any amino acid
MLALDAGGTNLRASLVHFDEEGKAVADETIKNFMPGTKGRVSETQFFDIIAGAVLPLFEKRPNVEGIGFTFSYPMEMQPHADGILLAFSKEVDAPDVIGKAIGAGLREALARKGRKYDGPVVMLNDTVATLLSGIASIPADGWGESTKNPYGFPGGPVIGCILGTGFNTAYPETRIPKIGFDSXTAPQIVVCETGTFNLHYRGWLDKEFDSTTKNPGAYNLEKTVSGAYLGPLTFHILKQAVKDKLIRFKKSDELLAMPQLETRILNEFSRAPRAAEGPLGSLFGPDEGDALAAVQYIVSIITERGALFAAAVLAATVEKMQVCREPYSPVRIAIEGTTYMIYRGMRRALEARLHTMLIKEKPRPYVISPVEQASLFGAAVAACG

SEQ ID NO: 35485 - DNA, 318 bp, Unknown
  Obtained from environmental sample
  misc_feature (1)..(318): n is a, c, g, or t
atgcctgaactcaacttagacagcatagcggcgcgtttagagagcttggaggagactatcatccaccgcttgatagaccgcgctcagtggcgcgtaaacgacacggcctacctgcccggcgcaagcggcttccccggagcggagtcgcgctctctctttgaattacgcctgcgcagccaagaggagatggacgcgaggttcgggcgtttctgcgtgccggaggaaagaccgttcaacaaagacttgcccaaaccgctgcgggaggtgcatctccccgacaccgacgttcgcctgaaagattacgatgccgtaaattga

SEQ ID NO: 35486 - protein, 105 aa, Unknown
  Obtained from environmental sample
  misc_feature (1)..(105): Xaa is any amino acid
MPELNLDSIAARLESLEETIIHRLIDRAQWRVNDTAYLPGASGFPGAESRSLFELRLRSQEEMDARFGRFCVPEERPFNKDLPKPLREVHLPDTDVRLKDYDAVN

SEQ ID NO: 35487 - DNA, 516 bp, Unknown
  Obtained from environmental sample
  misc_feature (1)..(516): n is a, c, g, or t
ttgttgacatacgcgaatacaataaaccacctcggagcggcgaccttttgcaggagggcggcgcaggcggggatcgacagtattctgacggccgatatgccgccggaggagtctgtcgatcttgacgcgcagatgcacaaatacggtataggccgcgtgtacatagtgagcgaactcacccctgacgacagaatgcgctacatcggcagccgcgtggactctttcgtctacgtggtaagccgtccgggggtcacgggggctgatacggcgttaagttcatccgtaaaagcgacgcttacgcgcctgcgacgcgtttcgaaaaaaccggcggcggtgggcttcgggattgcgacgccgagccacgtacgggaagttaccgaagcgggggcgcagggcgtgatcgtgggcagcgcgctggtaaatatgattgaggacgcggcgaataggggcgcgagtccggcgcgggcgctgaagaagagggtcagcgagctaaaggcggcgacccgccatgcctga

SEQ ID NO: 35488 - protein, 171 aa, Unknown
  Obtained from environmental sample
  DOMAIN (1)...(169): Tryptophan synthase alpha chain
  misc_feature (1)..(171): Xaa is any amino acid
MLTYANTINHLGAATFCRRAAQAGIDSILTADMPPEESVDLDAQMHKYGIGRVYIVSELTPDDRMRYIGSRVDSFVYVVSRPGVTGADTALSSSVKATLTRLRRVSKKPAAVGFGIATPSHVREVTEAGAQGVIVGSALVNMIEDAANRGASPARALKKRVSELKAATRHA

SEQ ID NO: 35489 - DNA, 588 bp, Unknown
  Obtained from environmental sample
  misc_feature (1)..(588): n is a, c, g, or t
atgatcgcgacttcaagggcgggagtgccgcgagcagataaggcggcggcgggtcggctgccggacgaggtagtcgcctgcgtgggcggcgggtcgaacgccatagggattttcagcgcctttattaaggataaggcagttaggctcacgggcgtggaggccggcgggcgcgggcttaagtgggcgcagcacgcggtaaggctgacgccgtcgccgtactccagcccggggatactgcacggggcgtactcttacgttttgcaggacagaaacgggcaaatcgcggacacgcactccgtgtcggcggggttggattacagcggggtggggccggagcacgcgcacctctttgagagcggccgcgccaattatacctacgccacggacgatgaggcggtgggggcgttcaggctgctctgcgaggccgaggggattatcccggcgctcgagtcgtcgcacgcggtcgcctacgcggtgaagaatgtgcctaagatggcggtcggctccgtaattgtggtgaacttgtcgggcaggggcgacaaggatatggattctgtcgcgaaatttttggaggctcggaagaaatga

SEQ ID NO: 35490 - protein, 195 aa, Unknown
  Obtained from environmental sample
  DOMAIN (1)...(178): Pyridoxal-phosphate dependent enzyme
  misc_feature (1)..(195): Xaa is any amino acid
MIATSRAGVPRADKAAAGRLPDEVVACVGGGSNAIGIFSAFIKDKAVRLTGVEAGGRGLKWAQHAVRLTPSPYSSPGILHGAYSYVLQDRNGQIADTHSVSAGLDYSGVGPEHAHLFESGRANYTYATDDEAVGAFRLLCEAEGIIPALESSHAVAYAVKNVPKMAVGSVIVVNLSGRGDKDMDSVAKFLEARKK

SEQ ID NO: 35491 - DNA, 447 bp, Unknown
  Obtained from environmental sample
  misc_feature (1)..(447): n is a, c, g, or t
atggcagaagacgaagataaaaccgaagaacccaccgctaagaaaaaatccgatgctattaaaaaggggcaaatcggtcgctcaacggatttgtccaatgctatttctctgatagcggctctgtttgggctatatatctttggcggagattttgccagtcaatgtgaaggcataatacgagaattttttacgggttatgccgattggcaacctaccatatccaatttctctgcacttgcatatcatattctacaaataacattgcgtttactagcaccgctgctcttgctttttctatttataggcatagttggcaatttatcccaagtgggtttgcattttacgcttgaaaaattacaacctaaattttcaactattttttccctatctggtttaaagaaaatgtttggaaaagatgcgtggatagagcttttaaaaggcatgtaa

SEQ ID NO: 35492 - protein, 148 aa, Unknown
  Obtained from environmental sample
  DOMAIN (3)...(148): FlhB HrpN YscU SpaS Family
  misc_feature (1)..(148): Xaa is any amino acid
MAEDEDKTEEPTAKKKSDAIKKGQIGRSTDLSNAISLIAALFGLYIFGGDFASQCEGIIREFFTGYADWQPTISNFSALAYHILQITLRLLAPLLLLFLFIGIVGNLSQVGLHFTLEKLQPKFSTIFSLSGLKKMFGKDAWIELLKGM

SEQ ID NO: 35493 - DNA, 447 bp, Unknown
  Obtained from environmental sample
  misc_feature (1)..(447): n is a, c, g, or t
atgaacccttttacagaatttcagagcaatatatttcaaataattttaactattcttttagtagttatattttttgccagtggcagtcatcatttttttataagagtgctttntgaatctttccagtacatcccaattgggaattttgtntgggatacgcgtagctttgcggctattttaattatactatcggcgagttcctttgttgtggcttttcagtttgcggctcctgttatggccgctatttttttatgcacagttacgcttgggcttatgaacagagtgatgccgcagttgcaggtttggatgcttggtattccattaaaagtttttttaggttctttggttttaatttattccctgccgcttatggtgcagattttcaatgcgaactttgagcagttgcaaagagctttattcgctattttgcgagcgggacggggatag

SEQ ID NO: 35494 - protein, 148 aa, Unknown
  Obtained from environmental sample
  DOMAIN (1)...(140): Bacterial export proteins, family 1
  misc_feature (1)..(148): Xaa is any amino acid
MNPFTEFQSNIFQIILTILLVVIFFASGSHHFFIRVLXESFQYIPIGNFVWDTRSFAAILIILSASSFVVAFQFAAPVMAAIFLCTVTLGLMNRVMPQLQVWMLGIPLKVFLGSLVLIYSLPLMVQIFNANFEQLQRALFAILRAGRG

SEQ ID NO: 35495 - DNA, 558 bp, Unknown
  Obtained from environmental sample
  misc_feature (1)..(558): n is a, c, g, or t
gtgggatcatactattattttatagcccagcttccttatcttgtgtacggaacaaaaccgcccatgtcttctgaaaattttaaagcgatggtggggactctattagatgataatgacgcgaaattaatgcaatatctttcctttgatggtgtgttttcaaatgattcctgtgaatgcgattttatcaatagttggcggaattgggaacgcgcccttagattgaatctggcgaaagaaagggcgcttaaattaaagaaagaagttcaggttactgacattccgttctttccgcaagaggccgccgttgccgcttctaaagccgtagacgaaaagtccccgttggacggagaggtattactggataaagcgcgttggaacgccatagacgcgatggctggtaatgaatattacagcatanacggcgtatatgcctattatttaaaattgttactgcttgaaagacgggcagtctttaacgctgagaaaggatttgcagaaaatataaacatgtacgcttccattctggaaagcgcgcaaaattccccggggggaaaataa

SEQ ID NO: 35496 - protein, 185 aa, Unknown
  Obtained from environmental sample
  misc_feature (1)..(185): Xaa is any amino acid
MGSYYYFIAQLPYLVYGTKPPMSSENFKAMVGTLLDDNDAKLMQYLSFDGVFSNDSCECDFINSWRNWERALRLNLAKERALKLKKEVQVTDIPFFPQEAAVAASKAVDEKSPLDGEVLLDKARWNAIDAMAGNEYYSIXGVYAYYLKLLLLERRAVFNAEKGFAENINMYASILESAQNSPGGK

SEQ ID NO: 35497 - DNA, 501 bp, Unknown
  Obtained from environmental sample
  misc_feature (1)..(501): n is a, c, g, or t
atgagcggtaataaaatagaagtaaacggattggatctttattatggtgattttaaggcgttatcaaacatcaatttttcactcgcgaagcaggatgtggcggcgcttatcggaccttcaggctgcgggaaatccacgtttatccgcatattaaaccggatgaacgacttaattcccacatgtcgcataacgggcgaagtatttttggacggcaaggatatttacggaacgatggatgttacggaacttcgcagccgggtggggatggtgtttcaaaagccaaatccctttaacatgagcgtgtttgacaatgtcgcgtacggaaagaggatgcaaggcttaaaaaacaaaggacgcattgcggacattgtggagatttctctgcggaaagcggctctttgggacgaggtgaaggatagattgaaaaaaccgggctcaggctctttcaggcggacaacaacagaggctctgtatcgcgaggacaatagcgatggagcctga

SEQ ID NO: 35498 - protein, 166 aa, Unknown
  Obtained from environmental sample
  DOMAIN (31)...(162): ABC transporter
  misc_feature (1)..(166): Xaa is any amino acid
MSGNKIEVNGLDLYYGDFKALSNINFSLAKQDVAALIGPSGCGKSTFIRILNRMNDLIPTCRITGEVFLDGKDIYGTMDVTELRSRVGMVFQKPNPFNMSVFDNVAYGKRMQGLKNKGRIADIVEISLRKAALWDEVKDRLKKPGSGSFRRTTTEALYREDNSDGA

SEQ ID NO: 35499 - DNA, 306 bp, Unknown
  Obtained from environmental sample
  misc_feature (1)..(306): n is a, c, g, or t
gtgctgccctccgccctgccgggaattgtaacctccgtaattctagcgataggaagggtagtgggagaatcagcgcctgtgctgcttacggtcggtcttacaaaaaatatgccgcgtaccatttttgaatccggaagaacccttacaatccacctttattacctgacaaacgaagctgttcgtcccgaagatttcggcatcgcttttgcgacagccttcatgctgataattcttgttgtagttattaatacagcgacaaagattatgaccgcgaatttcagaaaaaaacttggaggaatactatga

SEQ ID NO: 35500 - protein, 101 aa, Unknown
  Obtained from environmental sample
  SIGNAL (1)...(22)
  misc_feature (1)..(101): Xaa is any amino acid
MLPSALPGIVTSVILAIGRVVGESAPVLLTVGLTKNMPRTIFESGRTLTIHLYYLTNEAVRPEDFGIAFATAFMLIILVVVINTATKIMTANFRKKLGGIL

SEQ ID NO: 35501 - DNA, 507 bp, Unknown
  Obtained from environmental sample
  misc_feature (1)..(507): n is a, c, g, or t
ttgtccgacgcacagcaatcggcacgagaagactcagccagcatcatctacctgcgcccggaaacggcccagggaatctacgtcaattacaaaaacatcatccagtccaacagaatgaagatacccttcggcatagcccaaattggtaaagccttccgtaacgaaattgttaccaaaaactttattttccgcacctgcgaatttgagcagatggagatgcagtactttgtaaagccaggcaccgacgaggaatggtttgccgaatggcgcaagcgccgctggaattactaccaaaagctgggcgtaaaaatggatcacctgcgctggcaccagcacggtcccggcgaattggcccactacgccaaagatgcctacgatattgagtacctattcccgatgggctggcgggaactggaaggtgtccacaaccgcacagactacgaccttgggacgccatacccaaatctcaggcaaagacctccagtacatagatcaggaagacagtaa

SEQ ID NO: 35502 - protein, 168 aa, Unknown
  Obtained from environmental sample
  DOMAIN (1)...(134): tRNA synthetase class II core domain (G, H, P, S and T)
  misc_feature (1)..(168): Xaa is any amino acid
MSDAQQSAREDSASIIYLRPETAQGIYVNYKNIIQSNRMKIPFGIAQIGKAFRNEIVTKNFIFRTCEFEQMEMQYFVKPGTDEEWFAEWRKRRWNYYQKLGVKMDHLRWHQHGPGELAHYAKDAYDIEYLFPMGWRELEGVHNRTDYDLGTPYPNLRQRPPVHRSGRQ

SEQ ID NO: 35503 - DNA, 402 bp, Unknown
  Obtained from environmental sample
  misc_feature (1)..(402): n is a, c, g, or t
atgatcctgtgcgatgcctacgacgaagaacaagtcgcttcagacaaagccggagaagacgaatcgcggacggtactgcgcttccacccaagccttgcgccgattaccgttgccgtcctgcccctgatgaagaaagacggccttgcggagcttgcccaggacattcgaaaggagctgaaggaagacttctccaccgattatgatcaatccggagctattggccgccgctaccgccgccaggacgaagcgggggcgccgttctgtgttaccatcgactacgaatccaaagacaaaggcaccgtaaccttgcgtttccgggattcaatggaacaggttcgcgtgaacagagcggaactggcagcgcgcttgcggaaggaaataaaggaatataagaggggttaa

SEQ ID NO: 35504 - protein, 133 aa, Unknown
  Obtained from environmental sample
  DOMAIN (36)...(126): Anticodon binding domain
  misc_feature (1)..(133): Xaa is any amino acid
MILCDAYDEEQVASDKAGEDESRTVLRFHPSLAPITVAVLPLMKKDGLAELAQDIRKELKEDFSTDYDQSGAIGRRYRRQDEAGAPFCVTIDYESKDKGTVTLRFRDSMEQVRVNRAELAARLRKEIKEYKRG

SEQ ID NO: 35505 - DNA, 996 bp, Unknown
  Obtained from environmental sample
  misc_feature (1)..(996): n is a, c, g, or t
atgtcaaatgatcagaacaacgaaaaaattcttgaagtaaaaaacctccgcacctatttttatacagatgagggagtcgtaaaagcggtagacgatgtttcattttccctgcacaagggggaagtaataggcatagttggggaatccggttcgggcaaatccgtagcaaacctttctgtaatgaatttggttctttcgccgcccggaaagatcgtgggtggcgaagtttttttccatagcgaagatattttgaaactgaaggaaaagcagctccagaaaatacgcggggcaaagatttccatgattttccaggacccgatgacaagcctgaacccgtttttgaggatttccacccagttgatcgagaccattgtgctgcaccagaacctggacaaaaaacaggcccgcgaaaaggccatcgagatgctgaacatggtagggatccccgccgccgcagaaagggtcgactcttacccccaccagttttcaggcggaatgtgccaacgggttatgatagcgatggcgataatttgcggtccaaggcttataatcgcggacgaacntacaacagcccttgatcgggacactcaaagcaagattctcgctttgtttaaagaaattaaccgcgacatgagtacttccattttgtttatttctcacgatatcgaagtgataaaagaattgtgcggcagagttcttgtaatgtattcgggccgtatccttgaagagggaaacacgggcgaggtattttccaatccggctcatgaatacacccgcggccttttaagctctgtcccgtccgctgccatgcgcggaaaggcgctggctgccatcccggggaaaatcccttcattggaagaaggacgaccatccggctgtcccttccacccccgctgcgcaaaagccatgccggaatgtaaaaaggatttccccccagtacgaaaaataagcgccagccatgcaactcgctgtctcttggaggaatttgatgaatag

SEQ ID NO: 35506 - protein, 331 aa, Unknown
  Obtained from environmental sample
  DOMAIN (241)...(306): Oligopeptide/dipeptide transporter, C-terminal region
  misc_feature (1)..(331): Xaa is any amino acid
MSNDQNNEKILEVKNLRTYFYTDEGVVKAVDDVSFSLHKGEVIGIVGESGSGKSVANLSVMNLVLSPPGKIVGGEVFFHSEDILKLKEKQLQKIRGAKISMIFQDPMTSLNPFLRISTQLIETIVLHQNLDKKQAREKAIEMLNMVGIPAAAERVDSYPHQFSGGMCQRVMIAMAIICGPRLIIADEXTTALDRDTQSKILALFKEINRDMSTSILFISHDIEVIKELCGRVLVMYSGRILEEGNTGEVFSNPAHEYTRGLLSSVPSAAMRGKALAAIPGKIPSLEEGRPSGCPFHPRCAKAMPECKKDFPPVRKISASHATRCLLEEFDE

SEQ ID NO: 35507 - DNA, 708 bp, Unknown
  Obtained from environmental sample
  misc_feature (1)..(708): n is a, c, g, or t
atgagtcccaaaggcaggcacgccaaaagtaaggccaggatagcccagtacgagaaactttttttagacgatgagcgggagaagcttaaggaaagcaagatcaccattccggctgggccacggcttgggcagttggttatcgaagccaaggggctttccaaagcttacggcgaccgcctgctttttgaaaacatggaattcaccgtgccgcccggtgcctgcattggaatcattggccccaacggcgcgggcaagaccacgcttttcaaaattatcaccggaagggaaaaagcagacaccgggactctccggcttggcgatagcgtgaagctcgcctgggcggatcagatgcgggaaagccttgatgacgacaagaccgtgtgggaacagctttcagacggcctcgacattatcaggctggggggagaaaacggaaagggcggcaaggaagtgaattccagggcgtactgttcctggtataatttttcgggggcggatcagcagaagaaagtaggcgttctttcgggcggcgagcggaaccgtcttaacctggcgcttatgctgaaagagggcgccaatgtcctgcttttggacgagcccacaaacgaccttgacgtgaataccctgcgtgcgctggaagacgccatcgatacattcgccggaagtagcatggtaataagcacgatcgctggtttttggatcgcatag

SEQ ID NO: 35508 - protein, 235 aa, Unknown
  Obtained from environmental sample
  DOMAIN (72)...(235): ABC transporter
  misc_feature (1)..(235): Xaa is any amino acid
MSPKGRHAKSKARIAQYEKLFLDDEREKLKESKITIPAGPRLGQLVIEAKGLSKAYGDRLLFENMEFTVPPGACIGIIGPNGAGKTTLFKIITGREKADTGTLRLGDSVKLAWADQMRESLDDDKTVWEQLSDGLDIIRLGGENGKGGKEVNSRAYCSWYNFSGADQQKKVGVLSGGERNRLNLALMLKEGANVLLLDEPTNDLDVNTLRALEDAIDTFAGSSMVISTIAGFWIA

SEQ ID NO: 35509 - DNA, 831 bp, Unknown
  Obtained from environmental sample
  misc_feature (1)..(831): n is a, c, g, or t
ttgtgtttttattattatatggcttttacaaatatggcttttacaatacaggaacaaattgccggagcgcgaaagattgttttcaagtttggttcgggaacccttgccggcagcaacgggaaaatagacggttcttttctggatgaatttgccgtgcagacggcaagcctgattgccggggggaaacaggttgttattgtttcatccggggcgcaggtggcgggcctttccacaatggataaatgggcgcggaaaaaggatttacattaccgccaggccctctgcgccgtggggcaggtacagcttatgaacgcgtggcaaatggcttttgagccgcacggctgccatattgcccaaattttgcttacccaggacgattttaacgatcaaatcaggaccctcaacatgagaaataccctgtttaccctggtcgatgaggggattatcccgattatcaacgagaacgacacggtttctgtagaggaaatcaagatcggagacaacgacaccctggcggcgcagtccgcgattctctggagcgccgaccttttggtgcttttcagcgacattgacgggctgtacgataaaaatcccaaggaatttcctgacgcgaagctgttggaactggtccaggacattgaaaccgcgcgaaaaaatgtaaacattggctctgccagcaattttggaacaggagggattgccacaaaactggacgccgcgcaaagggcgtcttcctacggcatagccacgataatcgccaacggcggcaggccccactgtctggaagcccttagcaacggcacccagaaagggactctgtttctggcctga

SEQ ID NO: 35510 - protein, 276 aa, Unknown
  Obtained from environmental sample
  DOMAIN (24)...(254): Amino acid kinase family
  misc_feature (1)..(276): Xaa is any amino acid
MCFYYYMAFTNMAFTIQEQIAGARKIVFKFGSGTLAGSNGKIDGSFLDEFAVQTASLIAGGKQVVIVSSGAQVAGLSTMDKWARKKDLHYRQALCAVGQVQLMNAWQMAFEPHGCHIAQILLTQDDFNDQIRTLNMRNTLFTLVDEGIIPIINENDTVSVEEIKIGDNDTLAAQSAILWSADLLVLFSDIDGLYDKNPKEFPDAKLLELVQDIETARKNVNIGSASNFGTGGIATKLDAAQRASSYGIATIIANGGRPHCLEALSNGTQKGTLFLA

SEQ ID NO: 35511 - DNA, 900 bp, Unknown
  Obtained from environmental sample
  misc_feature (1)..(900): n is a, c, g, or t
atgacagattggcacgaggactgcattcttgccgccggctgtgatattgacgaagaacgccgcaatctctttgcggaaaagtggaaagttcacgtttataaagacgccgccgaaatgcttaaactccacaagcccgatattttgtctatagcaactcaccccgacagccactaccgttattgccgccttgccgctgattacggcgttcctgtcgtcatctgcgaaaagccgcttgcggacaacatccgtgaagcgcgaaaaacggcaaaactggctgaaaaagggaaaatagtcatcattacaaaccacgaacggcgttattcgcaagattacatcaacgctagggctgttcttgatggggagaaacttggccggattttacttgtacgcgcctgtctttatatgggaaaaaccacgcgctttgtagaccagatttggcatgacggaacccatctngccgacgctataatgttccttacttcatccgggttgaaacataaacggcgctggggcgcgaaacttaaaagtaaaagcggaaccgcgtggcttgaaggagaattgcgcaaggaaaaatccgcgccgccggttcccgttatcattgaatcaggcgcgggaagagatcatttggtttttgagattgagttttcctgcgaaaaaggccgtcttcgtatcggaaacggcgtttacgaagtttttgaaagcgtcccaagcccctacgccgaaaagtttcgttctttgcaaaatacaggcgcgcaattcagcggccctacagggtatttcgccaatatgttaaaagacgcggttctttgcgcaaaagacccgagccgcaagccgcgatcatgcgctaaggacgggcttcgtgttatcgaatatttgaacagcgttaagaaatggcggtaa

SEQ ID NO: 35512 - protein, 299 aa, Unknown
  Obtained from environmental sample
  DOMAIN (5)...(103): Oxidoreductase family, NAD-binding Rossmann fold
  misc_feature (1)..(299): Xaa is any amino acid
MTDWHEDCILAAGCDIDEERRNLFAEKWKVHVYKDAAEMLKLHKPDILSIATHPDSHYRYCRLAADYGVPVVICEKPLADNIREARKTAKLAEKGKIVIITNHERRYSQDYINARAVLDGEKLGRILLVRACLYMGKTTRFVDQIWHDGTHLADAIMFLTSSGLKHKRRWGAKLKSKSGTAWLEGELRKEKSAPPVPVIIESGAGRDHLVFEIEFSCEKGRLRIGNGVYEVFESVPSPYAEKFRSLQNTGAQFSGPTGYFANMLKDAVLCAKDPSRKPRSCAKDGLRVIEYLNSVKKWR

SEQ ID NO: 35513 - DNA, 885 bp, Unknown
  Obtained from environmental sample
  misc_feature (1)..(885): n is a, c, g, or t
ttggctgtttccacaaataccgctcttcatcttcccgccatagctggggaggccggatttaaacttgatcttgaacttcttaacaaggtaagcgcagttacgcccaacctatgcagacttgcccctgccggaaaagacgtaatcgaagaactgaacgccgcaggaggaattccagcggttttaaaagaactttccaaaaagaatttaatcgatcttaaagccgttacggtgtacggctgtcttggcgacgctgtgggcaaggctgaaaacaaaaaccccgaagtcataaagccgattgaaaatccctactccgcaacgggcggacttgccgccctgaggggaaacatcgcccaggacggctgtgtagtaaagcgaagcgcggtagcgacttccatgctaaaacacgaaggcccggcaagagtttttgattccgaagaaaccgcttttgaggcgatcatggggaaaaaaataaaggcggaagatgtagtagttatccgttatgaagggccgaagggtggtcccggtatgaaggagatgctcgcacccacggcggctcttgccggaatgggtctagatgataaagtcgccttgattacggacggacgtttctcaggtgcttccaagggcgcgtccattggtcacgtctgtccggaagcggcaatgggaggaaatataggtatcatcaacgaaggagacataatagagattgacattgacgggctttcaataaatgtgaagataagcgaagaagaaatcgcgcggcggcgtaaagattggaaacctctttccaagaccaatacaggttaccttgcccgctacgccgcgcaagtcggctccgccgcgcatggcgcggtttttaattctgattcacgtaaaggaaattaa

SEQ ID NO: 35514 - protein, 294 aa, Unknown
  Obtained from environmental sample
  DOMAIN (1)...(287): Dehydratase family
  misc_feature (1)..(294): Xaa is any amino acid
MAVSTNTALHLPAIAGEAGFKLDLELLNKVSAVTPNLCRLAPAGKDVIEELNAAGGIPAVLKELSKKNLIDLKAVTVYGCLGDAVGKAENKNPEVIKPIENPYSATGGLAALRGNIAQDGCVVKRSAVATSMLKHEGPARVFDSEETAFEAIMGKKIKAEDVVVIRYEGPKGGPGMKEMLAPTAALAGMGLDDKVALITDGRFSGASKGASIGHVCPEAAMGGNIGIINEGDIIEIDIDGLSINVKISEEEIARRRKDWKPLSKTNTGYLARYAAQVGSAAHGAVFNSDSRKGN

SEQ ID NO: 35515 - DNA, 888 bp, Unknown
  Obtained from environmental sample
  misc_feature (1)..(888): n is a, c, g, or t
atgatggccgagnaaatttgctatatgcttgcccaccagaattggccgcgcccaacangcccccagntgggtttaacactcggcctgtacacggtctacggcatcgacggccctgcccaggggcattactattttgaccctgaaaaaaacaaggtggtaaaatccgacagcgcctacaagcggccccaaccccatgcctgttttatcctttctgtagaagacgaccttgttaatgagggcggcatcatggatctggtgacgcgggaagcccggctgttcaagtacggctccgggacaggctccaatttttcccgtatacgcagtctgaacgagcatctttccggcggcggcgtttcttccggcctgctctcttttttgaaaataggagacaggtccgcctcggcgataaaatcaggcggcactacgaggcgcgcggccaagatggtaaccctggacgtggatcaccccgatgtggaaaaatacatttcctggaaagccgaggaagagcataaagtcgcctcaatggtgaccggctcggcaatagtgaaaaaacaccttgacggaattaaaaaggcgctcgccagtttccgggggccggataccgacaaattcaatatcgaaaaaaaccacgagctgaccgcggctctccgctcggcaataggcgataaaattcccccctcctacctgtaccagcagctcaggcggctggagcatggtgacgatgacgtgtattcacagacctactctaccgcatgggacgatgaggcgtacaacacggtttcgggccagagttccaataacagcctgcgtataaatgatgaatttatgtgggcggtgatgaacgacggggactggatcttaccagccgcaccggcggcaatgtcatga

SEQ ID NO: 35516 - protein, 295 aa, Unknown
  Obtained from environmental sample
  misc_feature (1)..(295): Xaa is any amino acid
MMAEXICYMLAHQNWPRPTXPQXGLTLGLYTVYGIDGPAQGHYYFDPEKNKVVKSDSAYKRPQPHACFILSVEDDLVNEGGIMDLVTREARLFKYGSGTGSNFSRIRSLNEHLSGGGVSSGLLSFLKIGDRSASAIKSGGTTRRAAKMVTLDVDHPDVEKYISWKAEEEHKVASMVTGSAIVKKHLDGIKKALASFRGPDTDKFNIEKNHELTAALRSAIGDKIPPSYLYQQLRRLEHGDDDVYSQTYSTAWDDEAYNTVSGQSSNNSLRINDEFMWAVMNDGDWILPAAPAAMS

SEQ ID NO: 35517 - DNA, 849 bp, Unknown
  Obtained from environmental sample
  misc_feature (1)..(849): n is a, c, g, or t
atggcggcttaccagctaaacgacatggtatcaacagccctggcgggcaatgccggggagggcatagtctcaagccttcagtattcgctaaggctacaggagcttattctgggggtttttgcggtttccatagggacggtgcttctgcctgactttgcggagtatgctaaatccgggcgctgggacatttttaacaggcggctttcatcgggcatgaacatcatcgcctttattacgataccaattacctttttttcgctgtcccagggacggagcctgattgccctcctttttcaaaccaggagctttaacgaggaatcggcacggctgaccctggccgcttttcgctttcatatgccggggctttactttattgctcttaaccgtatcctggctccggctttctacgctcaaagcgacgcaaagtctcctacgattgcggggattttttcttttgtcgttaacatggcgcttgccgccattctggcctttccgtttaagggttcaggcattgcctttgccttgtcgtttgccagtgcggtcaatacggcggcgcttctgtttttcctgagaaggaatcgggagataactcttggccgtacccttatatccgccctcggctatgccgtaaaactaattttgttttccgccctttcccttgttcctgtccttctgctgtcgccgcggctctcggagctgttttcgggaagggggcgcattatatcatttggcatcccgctttttataaatgcgtttgcctttgcgggaacgggcttatttcttttagtagtcacaagggacaaacggtttttaagtatgattagaatgataaaagggaatagggaatag

SEQ ID NO: 35518 - protein, 282 aa, Unknown
  Obtained from environmental sample
  DOMAIN (1)...(246): MviN-like protein
  misc_feature (1)..(282): Xaa is any amino acid
MAAYQLNDMVSTALAGNAGEGIVSSLQYSLRLQELILGVFAVSIGTVLLPDFAEYAKSGRWDIFNRRLSSGMNIIAFITIPITFFSLSQGRSLIALLFQTRSFNEESARLTLAAFRFHMPGLYFIALNRILAPAFYAQSDAKSPTIAGIFSFVVNMALAAILAFPFKGSGIAFALSFASAVNTAALLFFLRRNREITLGRTLISALGYAVKLILFSALSLVPVLLLSPRLSELFSGRGRIISFGIPLFINAFAFAGTGLFLLVVTRDKRFLSMIRMIKGNRE

SEQ ID NO: 35519 - DNA, 885 bp, Unknown
  Obtained from environmental sample
  misc_feature (1)..(885): n is a, c, g, or t
ttgatcagatcggccgagaggcttttgagaattggagaaagaatcctacgccgattccgccctgcaggcattaaaagaaaaaatgaagggaagtgccggttgagcgaagaagactccaccgctacggtgaacagcggcagggctttaatacgccacggctctgtcctttccctgctgaccctgggatcgcgcgttttgggcctggccagggaaatgacaaaggcggctcttcttggaacaagcgccctgtctgacgcgttttctgtggctttcatgatcccgaaccttttccgccgcctttttgcggaagggtcagtggcggtggcttttgtcccgactttcaaggaataccttgtgcggaatgaaaccgggcaaggaacgccgaacagcataaaggaatttctttcctgctttcttacttttctaagttttttcgttaccctcacggtgatggcagggattgccctttgccccctgatgatccgtttttttggtatggaagatttttccgaaaccgtgttcctcaccagactgatgttcccgtttcttgcctttatttccatagcggctttttttcagggtatactcaacagtcttagaattttcgctccttcaggtttcgctccgatactcctcaatgccataactattctctgcgcttacggactaagcccttatacacaaaacccggccagagccatggcattgggaattcttatcggtggttttttggaagcggcgattcagcttccttttattttaacgcacaaaagcaggatacgctttttctttaccggtattaaaagggcgataaacaatcccggaacaaaaaaggttctgcgccttgtaggtcctacggtaatggtatggcggcttaccagctaa

SEQ ID NO: 35520 - protein, 294 aa, Unknown
  Obtained from environmental sample
  DOMAIN (74)...(292): MviN-like protein
  misc_feature (1)..(294): Xaa is any amino acid
MIRSAERLLRIGERILRRFRPAGIKRKNEGKCRLSEEDSTATVNSGRALIRHGSVLSLLTLGSRVLGLAREMTKAALLGTSALSDAFSVAFMIPNLFRRLFAEGSVAVAFVPTFKEYLVRNETGQGTPNSIKEFLSCFLTFLSFFVTLTVMAGIALCPLMIRFFGMEDFSETVFLTRLMFPFLAFISIAAFFQGILNSLRIFAPSGFAPILLNAITILCAYGLSPYTQNPARAMALGILIGGFLEAAIQLPFILTHKSRIRFFFTGIKRAINNPGTKKVLRLVGPTVMVWRLTS

SEQ ID NO: 35521 - DNA, 930 bp, Unknown
  Obtained from environmental sample
  misc_feature (1)..(930): n is a, c, g, or t
ttgacccccccatggcgggcatggggcgaagaaaaccgcgactggggcggcgcgtttgcggtttatcgcggccttaccgatttgttgccctaccaccggcttttcaacagccccatatccgaaggcgccgtcgtgggcgcgggcgtgggttatgcgctatccggcggacgggcgctggtggagctaatgtactgcgattttatgggaagggcaggggacgaaatttttaaccaggcttcaaaatggcagtccatgtcagcggggcttcttaaaatgcccctggtggtgcgggtttcggtgggtaacaaatacggcgctcagcacagccaggactggtcggcccttacggcccacattcccgggctaaagtcctacttccccgccacgccctatgacgccaagggaatgttaaatctggcgcttcgcggcacggatccggtgatcttttttgaaagccagctcctttacgacgtaagcgagcagtttgaaaaggccggggttcccgaaggctactacgaggttcccgaaggcgagcccgttatacgcaagcagggcaaggacatcaccattgccactttgggggccacgctctacaaagcggtggaggccgccaaaaaactgaaaacgctattcgacctttccgccgagatcatcgatctgcgttttatcaatccccttaattacgaaaggatcattgagtcggttaagaagaccggaaagatactactcgcaagcgatgcggcagagcgcggctccttcctccacaccgtagccagcaatattcaaaccctggcctttgattaccttgacgcacctgtaacggtagtcgggagcaggaactggatcactccggctgcggaaatggaagagctctacttcccgcaagttgactggctcatcgacgccattcacgagcgcatctgcccctga

SEQ ID NO: 35522 - protein, 309 aa, Unknown
  Obtained from environmental sample
  DOMAIN (1)...(158): Transketolase, pyridine binding domain
  misc_feature (1)..(309): Xaa is any amino acid
MTPPWRAWGEENRDWGGAFAVYRGLTDLLPYHRLFNSPISEGAVVGAGVGYALSGGRALVELMYCDFMGRAGDEIFNQASKWQSMSAGLLKMPLVVRVSVGNKYGAQHSQDWSALTAHIPGLKSYFPATPYDAKGMLNLALRGTDPVIFFESQLLYDVSEQFEKAGVPEGYYEVPEGEPVIRKQGKDITIATLGATLYKAVEAAKKLKTLFDLSAEIIDLRFINPLNYERIIESVKKTGKILLASDAAERGSFLHTVASNIQTLAFDYLDAPVTVVGSRNWITPAAEMEELYFPQVDWLIDAIHERICP

SEQ ID NO: 35523 - DNA, 894 bp, Unknown
  Obtained from environmental sample
  misc_feature (1)..(894): n is a, c, g, or t
ttggcacggacggcgaattactgcccaatctgcccaaagacaggngctctaaaaccagttttactggctcaggtggaaaaccaaaaggccgaaggccttagcgcgcttgcaagaaaaatttggggagaaagggtttttcgtcgcgtggaagcaatccgccttacaggaggctggcagctattcccgcagctttacgatgatatggaaaccgcccttaggcgggaaattgccgtggaatggagcaacgccatgacactgatacgcctgggccgcctttattccaaaaacctcattcgcaatcttgcgtatcttggctgcgcggacacagatggcccggatttctgtgccgcggggattctggcgcttggggcaggcccgtccctggatccctttttaagtgaactttacgctttattcgacgggaaaattccagggccggaaaaaaggctctttaagataatatgcgtgggcgcctgtctccctgcccttgccgattggggtatactgcctgaccttgtggtcattcttgaaagccagcaatggagcttaaggtgttttattggtttacagagcagggagagtaattcgacaaaaattaacgcggctgaagttaatgcgatgatagacctttcggcgctgccggcctcggcccggatgctaaacgggaaacgatatttcttcgccactccttggacggagcttgcgtttttttcgcggcttaaagaaagcggccttcttccggaaaccttcccgccaatgggctcggtcgggcttaacacagtagccctggccctganaacaagctccggtcctgttattgtagggggaatcgacttctcgttttccatggatgcaagccatggcgcgttctacaccccggcgacgggatattga

SEQ ID NO: 35524 - protein, 297 aa, Unknown
  Obtained from environmental sample
  misc_feature (1)..(297): Xaa is any amino acid
MARTANYCPICPKTGALKPVLLAQVENQKAEGLSALARKIWGERVFRRVEAIRLTGGWQLFPQLYDDMETALRREIAVEWSNAMTLIRLGRLYSKNLIRNLAYLGCADTDGPDFCAAGILALGAGPSLDPFLSELYALFDGKIPGPEKRLFKIICVGACLPALADWGILPDLVVILESQQWSLRCFIGLQSRESNSTKINAAEVNAMIDLSALPASARMLNGKRYFFATPWTELAFFSRLKESGLLPETFPPMGSVGLNTVALALXTSSGPVIVGGIDFSFSMDASHGAFYTPATGY

SEQ ID NO: 35525 - DNA, 1050 bp, Unknown
  Obtained from environmental sample
  misc_feature (1)..(1050): n is a, c, g, or t
atggataaagcaaaggcaagatatttatttgaacagataaaaggaacaaaaataaatgatatttgtattgaggaatttatcaataatggaaaatcggctgcggtttttcgtgggagaaaagaagataaattatttgctataaaaatatttgataatgatatagttgaaagatatggaactgaattacagcaacaaagaatagaacttgaattaagtattaaagaacataatatacctaatattgtaaaagtattttatggagaacatatacaaataaacgatatagaatatttttatataataatggagtatattcaaggaacaaatttaaaagaatatattgaaaataataccattactaccgactttattgtaaaaacaatgaatgttttaatagataccaccgaggcattattcaaagaaacaccaccactagtacaccgtgatataaaacctgaaaatataatggtaactgaaaaaggtgaaattattttaatggattttggggtattgaaaatagtcaatacgccatcaatgaccgatattgaagaaaaacaatttttaggaacattacgttatgcgccaccagaatttttaataagggaagaaaatgacagtataaatggttggcgagcggttaatatttaccagataggtgcggtattacatgatatgataatgaaaaaagtattattcgccggaacaggaccatacccagtacttgtagtggctattaaagaagttatgccccagataatttcaacggaatatccaccagacatgatccaacttgcaagggaaatgttgcacaaagattggaaagaacgattaaaattggcatctatagataaaattaaatctgtgttggaaaaatgtttatcatatcaagatgaacctacaaatttttataacaatattaaaaaaaatgcacaaccagtacagaatgagataaaaagacttgaagatattgccagaagcaaagaagaaaaagtaaaaataatgcgtaaaattcacaatagtatttggggcgttatcgaagaaatattttaa

SEQ ID NO: 35526 - protein, 349 aa, Unknown
  Obtained from environmental sample
  DOMAIN (21)...(289): Protein tyrosine kinase
  misc_feature (1)..(349): Xaa is any amino acid
MDKAKARYLFEQIKGTKINDICIEEFINNGKSAAVFRGRKEDKLFAIKIFDNDIVERYGTELQQQRIELELSIKEHNIPNIVKVFYGEHIQINDIEYFYIIMEYIQGTNLKEYIENNTITTDFIVKTMNVLIDTTEALFKETPPLVHRDIKPENIMVTEKGEIILMDFGVLKIVNTPSMTDIEEKQFLGTLRYAPPEFLIREENDSINGWRAVNIYQIGAVLHDMIMKKVLFAGTGPYPVLVVAIKEVMPQIISTEYPPDMIQLAREMLHKDWKERLKLASIDKIKSVLEKCLSYQDEPTNFYNNIKKNAQPVQNEIKRLEDIARSKEEKVKIMRKIHNSIWGVIEEIF

SEQ ID NO: 35527 - DNA, 879 bp, Unknown
  Obtained from environmental sample
  misc_feature (1)..(879): n is a, c, g, or t
atgatggccagagctggtaaacttactttagacggcaaggattactccctgcctatagtaaaggggacacaaaatgagctcgctatagatgtatccaaattgagggaccagagcggctatatcacccttgatgatggttttgccaacacaggtagctgtacaagtgctataacctacatagatggcgataaaggcattttacgctatagaggttactccatagaagaacttgcagaaaaaagtacattcatagaaacggcttgggcaattatatggggcaggcttccaacctcaattgagctacgccgtttttccatacttttaacggaacacgaacttttgcacgaagggcttaggcaccactacgatggctttccaccagatgccccgccaatggcaattttaagtgcgatgataaattcggtaggttgctaccatccagagttacttgcaaatatgaacgactcagattttgaggaagcagccgcaaaactgatttcaaaagttcgcacaatagcggctgccgcatatagaatgagtaccggcaggcccattatgtatgcaatccccgaatatggatatgtacagaattttttgcacatgatgttttccctgcccaaccacccgcatgtgatggacccggatatagtgaaagccctgaacctgattttaattctgcatgcagaccacgagcaaaattgcagcacaagcacggttagaatggtggcaagtggcggggcaaatttatttgcaagcgttgcggccggagtgtgcgctttgtgggggcatctgcacggtggggcaaatcaggcagttgttgaaatgctggaagatattcgcaaacccattgctctgttaaagattttgtggaaaaagtaa

SEQ ID NO: 35528 - protein, 292 aa, Unknown
  Obtained from environmental sample
  DOMAIN (46)...(292): Citrate synthase
  misc_feature (1)..(292): Xaa is any amino acid
MMARAGKLTLDGKDYSLPIVKGTQNELAIDVSKLRDQSGYITLDDGFANTGSCTSAITYIDGDKGILRYRGYSIEELAEKSTFIETAWAIIWGRLPTSIELRRFSILLTEHELLHEGLRHHYDGFPPDAPPMAILSAMINSVGCYHPELLANMNDSDFEEAAAKLISKVRTIAAAAYRMSTGRPIMYAIPEYGYVQNFLHMMFSLPNHPHVMDPDIVKALNLILILHADHEQNCSTSTVRMVASGGANLFASVAAGVCALWGHLHGGANQAVVEMLEDIRKPIALLKILWKK

SEQ ID NO: 35529 - DNA, 1098 bp, Unknown
  Obtained from environmental sample
  misc_feature (1)..(1098): n is a, c, g, or t
atgcgcgaatgttttaaaaaagccggcctgccttctcccgattttacaaccatcaccgccgcggatttaccgcttacttcatcaaaactcaccaatctcgattttcctcttgtaataaaacctgttgacaatatgggaagccgcggctgccgccgtgtggacagtatcgaagaattaaatacagcggcaaaaaccgctatcggcttttcacgatccggccgcgcaattgtcgaatgttacatggaaggccccgagttttctgtagacgcgattgtctatcacggtgaaatcacaatttgcggccttgcggacaggcacatctttttcccgccgtactttatcgaaatggggcacacaatgcccaccgttattgaaacggaaaaacaacaggctatgctggatactttccgctcagggattcacgcgcttggcattgcaggcgcggataatatcggagcggcaaagggcgatataaaattgaccgcaaaaggacctatgataggcgaaatcgcggcgcgcctttcaggcgggtatatgtcgggatggacttacccatattcttccggcgcactgccgataaaaggcgctatccttgccgccatggggcgtaagcctgaagggctgatacctaccaaagaatggacttgcgcggaaagagcgtttatatcaattccggggacactcaagacgattagcgngatcgagcaggcgcgggtaataccaaatgtaaaagacctttttttgcgaatcgcggaaggcggcaaggttactttcccggaaaataacgtaacaaagtgcggcaatatcctgtccgccgcaccgcaaagagccgacgccatagaagccgccgaaaaagccgcccgctcaatctttattaagattgatccggctgataaagaaacaagtgaatttttatcatcaacatccgccttccctccggacgcctttcaattaaccgatgaaataagaatcgcactagaccagctcccagactccccactccccactccccactccnncantccccactccctacatttacccattccctgccctcacttcctcaaatttgaaggattacatgggcagaactgttga

SEQ ID NO: 35530 - protein, 365 aa, Unknown
  Obtained from environmental sample
  DOMAIN (1)...(176): D-ala D-ala ligase C-terminus
  misc_feature (1)..(365): Xaa is any amino acid
MRECFKKAGLPSPDFTTITAADLPLTSSKLTNLDFPLVIKPVDNMGSRGCRRVDSIEELNTAAKTAIGFSRSGRAIVECYMEGPEFSVDAIVYHGEITICGLADRHIFFPPYFIEMGHTMPTVIETEKQQAMLDTFRSGIHALGIAGADNIGAAKGDIKLTAKGPMIGEIAARLSGGYMSGWTYPYSSGALPIKGAILAAMGRKPEGLIPTKEWTCAERAFISIPGTLKTISXIEQARVIPNVKDLFLRIAEGGKVTFPENNVTKCGNILSAAPQRADAIEAAEKAARSIFIKIDPADKETSEFLSSTSAFPPDAFQLTDEIRIALDQLPDSPLPTPHSXXPHSLHLPIPCPHFLKFEGLHGQNC

SEQ ID NO: 35531 - DNA, 516 bp, Unknown
  Obtained from environmental sample
  misc_feature (1)..(516): n is a, c, g, or t
atggatttaattgccatcgcggtgataaaacgcgccgtcggtctacagggacactgcggcgtcatggcctacggcgagacgctcgggcggattgacacccccgccgccgtgtacatcggcgagagcgaccgccgggcgagagagattacgctgtatcaggtcgagttgcgcccgcaaggctacgtggtactgctcgacggcataaacgacagagacacggcggaaaccgttcaaggcctaaacctatacgtcggcgaagatcaactcccaaagttagccgacggcgagtactatcactttcacctaaaagggatgaaagtaatatcatcgtcaacaggggacgagataggcacagtacgcgacacagtcaacctgccgtccacagacgcgttggaagtagtgttgacaaacggtaacgaaatagtaataccgtacaacgatcaagcggtagtcaaggttgataaggaagtaaaagtgataacgattaatgactcatacatagaggaattattgtga

SEQ ID NO: 35532 - protein, 171 aa, Unknown
  Obtained from environmental sample
  DOMAIN (5)...(88): RimM N-terminal domain
  misc_feature (1)..(171): Xaa is any amino acid
MDLIAIAVIKRAVGLQGHCGVMAYGETLGRIDTPAAVYIGESDRRAREITLYQVELRPQGYVVLLDGINDRDTAETVQGLNLYVGEDQLPKLADGEYYHFHLKGMKVISSSTGDEIGTVRDTVNLPSTDALEVVLTNGNEIVIPYNDQAVVKVDKEVKVITINDSYIEELL

SEQ ID NO: 35533 - DNA, 354 bp, Unknown
  Obtained from environmental sample
  misc_feature (1)..(354): n is a, c, g, or t
gtgatggacgacatcatcagggcagtggataggaagcagttgcagaaccgcaatgtggagtatggggcgggggacactattaacgtctcgtttaagattcgcgagggcgacaaggagcgtatccagcagtttcagggcgttgtggtgcagacgagcggtttcggtttgggcgagacggtcaccgtccgcaagtcgagcgggaacgtttacgttgagcgtattttcccgatgcactcgccgcttatcgcggagatcaaggtgctcaagcgcgggcgcgtgcgtagggctaaactctactatctgcgcgggttgaccggtaaggcgacgcgcatcaaggagaagaaggggaagtag

SEQ ID NO: 35534 - protein, 117 aa, Unknown
  Obtained from environmental sample
  DOMAIN (3)...(115): Ribosomal protein L19
  misc_feature (1)..(117): Xaa is any amino acid
MMDDIIRAVDRKQLQNRNVEYGAGDTINVSFKIREGDKERIQQFQGVVVQTSGFGLGETVTVRKSSGNVYVERIFPMHSPLIAEIKVLKRGRVRRAKLYYLRGLTGKATRIKEKKGK

SEQ ID NO: 35535 - DNA, 627 bp, Unknown
  Obtained from environmental sample
  misc_feature (1)..(627): n is a, c, g, or t
gtggtgcaaataccagaatgcaaatacgaccctaaaacgcaagtatgcgaaaaaggaattgtgaaaacttttttcacagatgaacgtgacggcaaaaagtataaatacgtgaaaatcggggaccaagtttggatggcagagaatttgaactttgatgccgaaggtagcaaatgttatggcaacgacaaagccaactgcgatacctacggcagactttacaactgggcaacggcaatgggaagttcggttagctctaataaaaatcccagcggtgttcagggcgtttgcccgtctggctggcatttgccaagtgttgccgaatgggatgagctgacagttaatgtcggtggaggatctgtagctggaaccaaattgaaagcagattctcctttgtggttttatgatagcataagctccacagccacagacgacttcggctttgcggctctgcctggcggctacggcgatgccttcatcgctctcggcaaatacggcaactggtggagtgctacaggtagcggcaatgagacggcttaccaccgggacctatactacaacaccgaaggtatttacataagcaacaacgttaagatcttcttattttcagtccgttgcctcaaagactaa

SEQ ID NO: 35536 - protein, 208 aa, Unknown
  Obtained from environmental sample
  misc_feature (1)..(208): Xaa is any amino acid
MVQIPECKYDPKTQVCEKGIVKTFFTDERDGKKYKYVKIGDQVWMAENLNFDAEGSKCYGNDKANCDTYGRLYNWATAMGSSVSSNKNPSGVQGVCPSGWHLPSVAEWDELTVNVGGGSVAGTKLKADSPLWFYDSISSTATDDFGFAALPGGYGDAFIALGKYGNWWSATGSGNETAYHRDLYYNTEGIYISNNVKIFLFSVRCLKD

SEQ ID NO: 35537 - DNA, 750 bp, Unknown
  Obtained from environmental sample
  misc_feature (1)..(750): n is a, c, g, or t
ttgctgttcggtgacgaacgctacaaggatttgactatcagtttcataagcgcagtcttgggctacaaagacggcgaattggaggacatttccttttacgacactcacctgaaaagggagagcgtggatgacaaactggggattttggacataaaagccaagctctcaaacggaaatattatagacatagagatgcaggcatacagcgttcctgacgtaagaggccggatatcgtattacaaatcgcatctgcttaccgagcagctaggtactggagacccgtattcaaagctaaagcctgctaaatccataatagttgcagattttgattttgtccctgaatcggagaaatgccacacgattttccaaatgctagaaaaggaagaacatttcccgttcaatgatttggaggaaatacacgttctttgcttgaaaaaattatctaaattaaatgatgagaggttacgtgaatggcttaggtttattaactctgagaaaagagaggaatttatggagttggcaggaatagatccagtgtttgtgaaagccgtagatgttttagctacgttcagtgcagacgaccataaccgtatgctttacgaggctcgtttaaaagaatggcgtgataacaagtctaggatagatggggccgtagcagaaggcaaggcggagcgtacgagagagttatttgctctatgggaatcgggtgtttctttagccgaagctaagaaaagaatgggtttgtcttaa

SEQ ID NO: 35538 - protein, 249 aa, Unknown
  Obtained from environmental sample
  misc_feature (1)..(249): Xaa is any amino acid
MLFGDERYKDLTISFISAVLGYKDGELEDISFYDTHLKRESVDDKLGILDIKAKLSNGNIIDIEMQAYSVPDVRGRISYYKSHLLTEQLGTGDPYSKLKPAKSIIVADFDFVPESEKCHTIFQMLEKEEHFPFNDLEEIHVLCLKKLSKLNDERLREWLRFINSEKREEFMELAGIDPVFVKAVDVLATFSADDHNRMLYEARLKEWRDNKSRIDGAVAEGKAERTRELFALWESGVSLAEAKKRMGLS

SEQ ID NO: 35539 - DNA, 381 bp, Unknown
  Obtained from environmental sample
  misc_feature (1)..(381): n is a, c, g, or t
atgagtttaggggcaatttccaatacttccatccccagcataggatacgcgataaccgcgtccatgggcggaagaacgtctcttcccgtctccaaaagtatgttaatttacgcccatttcaaacatgtttcgggagttcccgctccggaaggcacccaaggagttaacatctccaaactgaaaatcctggacaccctgattgaacaattatcaagaatgaagagccagcccatcgcgcagatgagcatggatgaaagcgatgaaaaacgcataaacgcccttattgaacaataccaacaacaaataagaaccgcccaagccgcccctgtctacacccccgccgcccctgttacaggcgcgcttttcaatattgccgcttaa

SEQ ID NO: 35540 - protein, 126 aa, Unknown
  Obtained from environmental sample
  misc_feature (1)..(126): Xaa is any amino acid
MSLGAISNTSIPSIGYAITASMGGRTSLPVSKSMLIYAHFKHVSGVPAPEGTQGVNISKLKILDTLIEQLSRMKSQPIAQMSMDESDEKRINALIEQYQQQIRTAQAAPVYTPAAPVTGALFNIAA

SEQ ID NO: 35541 - DNA, 858 bp, Unknown
  Obtained from environmental sample
  misc_feature (1)..(858): n is a, c, g, or t
atgcagttaagcctgcgaagtcaggaacatttggccaatagccgcgccgaattctggaaaggccgggaagaaggctatcttagggcgttaaaaacgctggcaaatgtaatgggagactttgaaaccgtgaaaccggaagaacgcagggacaagtatgacgatatgctgagatcggctctggacacggaacctatgatggtagtcctgtatacagcatggaaaccgaacgccattgacgggatggacgcaaaatacataggcaggacaggctccggcccgaccggacagtacgcgatggcatgggccaaagaaacaggcgcaaccgtaaaacggcttaccacagctcttgacagcgctatggaacatcttacaggtcccgacgcgtccaaagacagcatttatgaaccggtattcaggactataagaggagaggacatgtggacaatcagatttcaggttcctattaccaataacaagaatcatgaggtagtaggcgtccttgggtgtgtattgtcaatcaaaccggtacaggaaatagtggaaagcacattaacagcaaacgatgaaaccgacatagtaatactttattcaaacaaaggatcaattctcgcgcattatatgcctgatagggtcggcaaaaatatgtttgatgttgacgaggaattgggcgacgccagaaaagacatatacaacgccatgaacaacggagaaacttacttcgggaaagaatacaatcctacccttcatgacaatataatgtatgtggtaaagccggttaaaaataggcattcggatttttcctggacagtgctgacgggtgtctctgaatcttatgtattaaaagaatcagggctataa

SEQ ID NO: 35542 - protein, 285 aa, Unknown
  Obtained from environmental sample
  misc_feature (1)..(285): Xaa is any amino acid
MQLSLRSQEHLANSRAEFWKGREEGYLRALKTLANVMGDFETVKPEERRDKYDDMLRSALDTEPMMVVLYTAWKPNAIDGMDAKYIGRTGSGPTGQYAMAWAKETGATVKRLTTALDSAMEHLTGPDASKDSIYEPVFRTIRGEDMWTIRFQVPITNNKNHEVVGVLGCVLSIKPVQEIVESTLTANDETDIVILYSNKGSILAHYMPDRVGKNMFDVDEELGDARKDIYNAMNNGETYFGKEYNPTLHDNIMYVVKPVKNRHSDFSWTVLTGVSESYVLKESGL

SEQ ID NO: 35543 - DNA, 654 bp, Unknown
  Obtained from environmental sample
  misc_feature (1)..(654): n is a, c, g, or t
ttgtttggcggcagaagagcgacaacaatcccgttggtaaaccagagcaaagactggattcacggcgttttcatgggttcgataacaggctcggaaattacagccgccgcccttgaccttaaagcgggcgatgtccgcagagacccattcgccatgttacccttctgcggttaccacatgggcgattatttttcccactggctcaaacttggcaagaatgcaaaagacaaaggcgacggcgacaaactgccgaaaatcttctttgtcaactggttccgcaaaaacgccgaaggcaaattcatgtggcccggttacggtgaaaacagccgcgtcctcgcgtggatttttgaccgttgcgacggtatagacaactacattgaaacgcccatcggcaacctgccaaaaccgggaagcattgaaccgcccgccggcgtaagccccgaagcgatggcggagcttattaaaattgacgttgaaggttggaagaaagaaatctccgatgttaggggaaaacactacgccaagtttggcgacaaactccccaaagacctgcttacacagctagacatcatggagaaaggggtaaacgggttattttataccacgaaccacacgaactgcgtaccttcggtacgcgcacgaacttgttgttag

SEQ ID NO: 35544 - protein, 217 aa, Unknown
  Obtained from environmental sample
  DOMAIN (1)...(198): Phosphoenolpyruvate carboxykinase
  misc_feature (1)..(217): Xaa is any amino acid
MFGGRRATTIPLVNQSKDWIHGVFMGSITGSEITAAALDLKAGDVRRDPFAMLPFCGYHMGDYFSHWLKLGKNAKDKGDGDKLPKIFFVNWFRKNAEGKFMWPGYGENSRVLAWIFDRCDGIDNYIETPIGNLPKPGSIEPPAGVSPEAMAELIKIDVEGWKKEISDVRGKHYAKFGDKLPKDLLTQLDIMEKGVNGLFYTTNHTNCVPSVRARTCC

SEQ ID NO: 35545 - DNA, 450 bp, Unknown
  Obtained from environmental sample
  misc_feature (1)..(450): n is a, c, g, or t
ttgggccttattgatgagcagcgctgggaacggtttcagcaaaaagcccgaggccttgaggtaatccgggaactcctggcccggcagaaactcccgggcggcgaaaccctggaaaagcgccttgtccaggaaaccctcgatttacgggaactactcccggatgttccggccctggaagcataccctttggaatggatcgaacggacagccctggacatcaggtacgcggggtacatagaaaaagaaaaccgcactatcgaaaaactcaaaaaaatggactttattaagatccccccggacctggactacacccttatccagggactttcctcggaatccagagaaaaactaaaagccgtgcggcccctgaccataggccaggccgcccgcatccccggagtccgccagggagacattgccctgcttctcctgcggacaagaagaaattaa

SEQ ID NO: 35546 - protein, 149 aa, Unknown
  Obtained from environmental sample
  misc_feature (1)..(149): Xaa is any amino acid
MGLIDEQRWERFQQKARGLEVIRELLARQKLPGGETLEKRLVQETLDLRELLPDVPALEAYPLEWIERTALDIRYAGYIEKENRTIEKLKKMDFIKIPPDLDYTLIQGLSSESREKLKAVRPLTIGQAARIPGVRQGDIALLLLRTRRN

SEQ ID NO: 35547 - DNA, 576 bp, Unknown
  Obtained from environmental sample
  misc_feature (1)..(576): n is a, c, g, or t
ttgaaggggcttcttgatggcgccgaatttctggaaacggacgagcaggaaattctgcgggacaggataagccactgggccattttcagcgaaagccgcagtaaaaaccaaacgcttgtttcttttctcgcggccgcaaagccgaagaagacccttgttttcacgggccgctcgaacgaggctgaaaaagttacctcgattttacagcgcaaaaaaatagccgccgccgccctgttcagcggcatggacaagaaagaccgcaaggatgcgatggaacgcttccgttcagggaaggccgcggtgctggtttcatccgatcttgccgcccgaggccttgatattccgggtatcagccacgtcattgccctcgatgtcagcgaggacagggacgtttacatacaccgggccggccgtaccgggcgcgcagggaagaaaggcattatggtcagcataggcgacgaggcggaaatgcgccgtctcgccgccttggaaaaaaagctcggcatcgcggtataccccaaagagttgtacggcggcaaggtgcgcgaaccaattcagataacagataacaagtaa

SEQ ID NO: 35548 - protein, 191 aa, Unknown
  Obtained from environmental sample
  DOMAIN (67)...(143): Helicase conserved C-terminal domain
  misc_feature (1)..(191): Xaa is any amino acid
MKGLLDGAEFLETDEQEILRDRISHWAIFSESRSKNQTLVSFLAAAKPKKTLVFTGRSNEAEKVTSILQRKKIAAAALFSGMDKKDRKDAMERFRSGKAAVLVSSDLAARGLDIPGISHVIALDVSEDRDVYIHRAGRTGRAGKKGIMVSIGDEAEMRRLAALEKKLGIAVYPKELYGGKVREPIQITDNK

SEQ ID NO: 35549 - DNA, 810 bp, Unknown
  Obtained from environmental sample
  misc_feature (1)..(810): n is a, c, g, or t
atgagccatgaaatacgctccccgttgaacgccgttataggcatgataaacatcgcgaccgaagaaaacgacatggacgcgataaagctttacctgggaaaagccgacaacgcggcaaagcacgtgctgggcgtcatcaatgacattcttgacatgaccaaaatagagacggacaagcttgatctttccaacggcgaatttgactttggaaaaatgatgtccaacattgtggacgtgaccggcatccgcgcccaggagaaacaccagcaaattgccgttaacatgaaccccaatattccgtcattcgtaatcagcgacgaattgcggctgtcgcaggttattaccaatcttatgaccaacgcgataaaattcacgccggaaaacggcaaggtggccttgagcgcggaaaagctggaggaaaaagacggcgagattaccataaaaatcgaagtcgcggactcaggcatcgggatctcgccggagcagcagcaaaaacttttccaggcttacaatcaggccgactcaagcatctccggcaaattcggcggcacggggctggggctggtcattaccaaacggattatagagctgatgcagggaacgatatggattgagtcggaacttggcaaaggcgcgaaatttatttttacaataaaagtgaaacaggggacccccgcctcccaggccgccgggggaacagcgcccccggggggatcgcccgcctcaataaaggcctccgatttgcatttgcagggttataccatactggccgcggaagacatggattctcgtgccgctctgccaatctga

SEQ ID NO: 35550 - protein, 269 aa, Unknown
  Obtained from environmental sample
  DOMAIN (1)...(58): His Kinase A (phosphoacceptor) domain
  misc_feature (1)..(269): Xaa is any amino acid
MSHEIRSPLNAVIGMINIATEENDMDAIKLYLGKADNAAKHVLGVINDILDMTKIETDKLDLSNGEFDFGKMMSNIVDVTGIRAQEKHQQIAVNMNPNIPSFVISDELRLSQVITNLMTNAIKFTPENGKVALSAEKLEEKDGEITIKIEVADSGIGISPEQQQKLFQAYNQADSSISGKFGGTGLGLVITKRIIELMQGTIWIESELGKGAKFIFTIKVKQGTPASQAAGGTAPPGGSPASIKASDLHLQGYTILAAEDMDSRAALPI

SEQ ID NO: 35551 - DNA, 828 bp, Unknown
  Obtained from environmental sample
  misc_feature (1)..(828): n is a, c, g, or t
ttgatcgcccacgtccgtaggaaggaggacgggtcatgggatgccccccacgacctcgtagagcacctcgtcgaggtcgcggagctcgccgccgggtttgcggaggcgtttggggcgtcggaggcggcttacgtcatgggccttgcccacgatgcggggaaatcgaccgcgaactggcaggagtacctccaaactgagagcggttatcatgaggaaggggggatgatcatctcagataatggcaaaaaaggtaaaatcggccactctgccccgtcggcgaaggcggtgtgctctttgttcggcgagaagtggggaaagctgctcgcctactccattgccggtcaccatgccgggcttcccgattggggttccggcggcaatagagaccttgagtatcggctgaagcaggcgcagaccgtcgccgacgcggaacttatcgcgcgggaggttctaaatctgatagcttcccgcaagccgaacaatttgccttggcggttcgaaaacaacagtttagacgtatcgttgtacatcaggatgctgttttcttgcttagttgacgccgacttcctaagtacggagcggtatatgtgcccggaaaacgcggaaatgcgcgggcgttacggttccatgaaagagatactggggcgctacaatcggttcatggttgaaaagtcgtttgaatctgaaaacaataatgccgatgggcaaaggagcgatattaatgagtcgtccggttcggaaaagggtaagatncacgcgctgagggcgagcgttttggccgattgccgtaaggcggggaggaacgggggtgtcggcgtttttcgctga

SEQ ID NO: 35552 - protein, 275 aa, Unknown
  Obtained from environmental sample
  DOMAIN (19)...(149): HD domain
  misc_feature (1)..(275): Xaa is any amino acid
MIAHVRRKEDGSWDAPHDLVEHLVEVAELAAGFAEAFGASEAAYVMGLAHDAGKSTANWQEYLQTESGYHEEGGMIISDNGKKGKIGHSAPSAKAVCSLFGEKWGKLLAYSIAGHHAGLPDWGSGGNRDLEYRLKQAQTVADAELIAREVLNLIASRKPNNLPWRFENNSLDVSLYIRMLFSCLVDADFLSTERYMCPENAEMRGRYGSMKEILGRYNRFMVEKSFESENNNADGQRSDINESSGSEKGKXHALRASVLADCRKAGRNGGVGVFR

SEQ ID NO: 35553 - DNA, 861 bp, Unknown
  Obtained from environmental sample
  misc_feature (1)..(861): n is a, c, g, or t
atggttattctggaagcgtgtaagatcgcgaaacgatttggttcaacccaggtgttaaacgacatcaatttcacgctggaggagggtgaagtccttgccataatcggctcttcgggcagcggaaaaaccacgcttctgcgctgtctgaattttctggagaggctggattcggggcgtattattctgcgcggcgagaccttgtatgacgcgtctgaaaaagtacattatgacgaaaaaaacatccggcaaaagcggctgcatttcggacttgtgttccagtctttcaacctgttcccccaatacactgcgtttgataacgtggtgcttgcgcgcaggctggcggcaaaaaaacaaccggatttcaaaaaaaataaaaaagtgatttttgaggaaattgaccgggaaggaatgcagcttctggatcaaatcgggcttgccgccaaaagggatttctacccctatcagttatccggcggtcagcagcagcgggtcgccattgccagggctttggcgcttaaaccggatattctgtgttttgacgagccgacatccgcgcttgatcccgagctgacgggtgaagtgttaaaagttattaagggactggctgaaaaaaacatgacgatgatcattgtgacgcacgagatgcagttcgcccgtcaggttgccgatacagttctgttcatggatgagggcctggtggttgaatacggatccccccaggatgtgtttgataatccttcaagcgagcgtattaaacgttttcttgagcattatgcgtcagttaagaaagtatacgtgagtttttttaccgtaaatgtaatcgccgccatgggtcaaaagcccgagtacttcggcggctga

SEQ ID NO: 35554 - protein, 286 aa, Unknown
  Obtained from environmental sample
  DOMAIN (18)...(234): RecF/RecN/SMC N terminal domain
  misc_feature (1)..(286): Xaa is any amino acid
MVILEACKIAKRFGSTQVLNDINFTLEEGEVLAIIGSSGSGKTTLLRCLNFLERLDSGRIILRGETLYDASEKVHYDEKNIRQKRLHFGLVFQSFNLFPQYTAFDNVVLARRLAAKKQPDFKKNKKVIFEEIDREGMQLLDQIGLAAKRDFYPYQLSGGQQQRVAIARALALKPDILCFDEPTSALDPELTGEVLKVIKGLAEKNMTMIIVTHEMQFARQVADTVLFMDEGLVVEYGSPQDVFDNPSSERIKRFLEHYASVKKVYVSFFTVNVIAAMGQKPEYFGG

SEQ ID NO: 35555 - DNA, 774 bp, Unknown
  Obtained from environmental sample
  misc_feature (1)..(774): n is a, c, g, or t
atgggacagtattcggcacgagntacctacaaagaagcagataagtttttaaataatacacataatgatacacatagagatacacattcggctttacaatcgcttaacgagttggctgaacgcaacctcaggcggcgccttgcgttaggcgcaatcaatattgacatgccggaaacccatatcagcctggacgggggacaggtggaaattgagcctataatccggtacaaatcggcggatctggtacgggaatgtatgctcctcgccggcgagggcgcgggtttatggtgtttgcaccgcaatctgcctgttccctacattatgcaggaaaccggggatttgcccgatgaaacacttgagggcatcgcgggttattaccagcttcgccgctgtatgagaccccgcgctctttcaacaaggcccggacaacattcaggccttggccttgatacttatattcaggtaaccagccccctgcgccgctataccgaccttcttgcccatttacaaatacgcgcggttttacgaagcgaaacccctctaagcgccgatgaaatctccgccagaatgaacgccggggaagcggcaatctctgctgttaatcaggcggaacgcgcctcccgcagccattggacaatggtgtaccttgcagacaagaaggactctgtttgggacgcaaccgctcttgaaaaaaaaggcagccgctgggcggtaataatcccctccctcgccctggaaacacaggtttcccctgcggaaagagctgtcgcctaa

SEQ ID NO: 35556 - protein, 257 aa, Unknown
  Obtained from environmental sample
  misc_feature (1)..(257): Xaa is any amino acid
MGQYSARXTYKEADKFLNNTHNDTHRDTHSALQSLNELAERNLRRRLALGAINIDMPETHISLDGGQVEIEPIIRYKSADLVRECMLLAGEGAGLWCLHRNLPVPYIMQETGDLPDETLEGIAGYYQLRRCMRPRALSTRPGQHSGLGLDTYIQVTSPLRRYTDLLAHLQIRAVLRSETPLSADEISARMNAGEAAISAVNQAERASRSHWTMVYLADKKDSVWDATALEKKGSRWAVIIPSLALETQVSPAERAVA

SEQ ID NO: 35557 - DNA, 756 bp, Unknown
  Obtained from environmental sample
  misc_feature (1)..(756): n is a, c, g, or t
atgcggtttcatggccacaatgatattcctttttcttccttggttattctgattatttattcatttaatgattctacaagcatgaggtgggtgggcttttcattaaggtggtacaaacggctgtttggtgagcgggagctgtggcgtagtttttggaacagcataataatcgcctttagctccgccgtaaccgccaccgtgatcggcaccttcggggctattgggataaactggtaccgcttcaaactgcgcaactatgtgcagacggtttcttttctgccaatgatactgcctgaaataatcatcggcgtatcgctttcaattttctttgcgggcattggcatacctttaggcttatttacaattttcgcggcccacacaacctttaacctgccttttgtttttctcatggtaatggcgcggctggacgagtttgatttttccataattgaagccgcacaggatttgggcgctaatgagaaagagaccctcttaaaagttacgcttcctatctgcatgcccggaattatttccgggcttttaacggcagttaccctctcccttgaagatttcgtcataaccttctttgtggcagggcccggttcatccacactgccgatttttattttttccgctattacacgcaagggaggagtaaccccggtaataagcgcgctctcggtgataatgattttgggtactgtattcttaacatatctactcagaaactttttgaaatatatcgcggcaaaataa

SEQ ID NO: 35558 - protein, 251 aa, Unknown
  Obtained from environmental sample
  DOMAIN (47)...(246): Binding-protein-dependent transport system inner membrane component
  misc_feature (1)..(251): Xaa is any amino acid
MRFHGHNDIPFSSLVILIIYSFNDSTSMRWVGFSLRWYKRLFGERELWRSFWNSIIIAFSSAVTATVIGTFGAIGINWYRFKLRNYVQTVSFLPMILPEIIIGVSLSIFFAGIGIPLGLFTIFAAHTTFNLPFVFLMVMARLDEFDFSIIEAAQDLGANEKETLLKVTLPICMPGIISGLLTAVTLSLEDFVITFFVAGPGSSTLPIFIFSAITRKGGVTPVISALSVIMILGTVFLTYLLRNFLKYIAAK

SEQ ID NO: 35559 - DNA, 1239 bp, Unknown
  Obtained from environmental sample
  misc_feature (1)..(1239): n is a, c, g, or t
gtgacagattcggccgagctgtcaggcgcatttaggcagccagacatgcggacaccgcacgccgattttttcagcctggtaattgccgaaaaaaatatctcgacattttttattgaaataatttgcccccattgcgggacaacatttcatgctgagttaggtgaaacacgcatggctccgggtgtagaacgaatcgtttctaaagatgaaaagccatttacggaaatgtcccggcattttgcccggcttataaaaaactatgaacagggaacaaaggatgcaagagcggacagaatagctgaattgcttaatatggtagataatgaagacggcttgaagtgtccaaactgcgcatcttttgccgggaaacgcgtaaaaaatttattaaccaaccatagctacatagaatccaaaaagaaaaaatcagattttggcatcgcatccaaaaaggtacagatgtaccttttgatacatccaacatggcttaaaggagaatccggtgttgatgaacaagataacgaactgggcggttatgccggcgcgtcccctgaatcatcaatgaaatggtataaaaagcggctaaataatttaaatctggtagaatatcggggcagtgaattaatgatttccataacgctgaaagacggaacagttcttgatacgcaaaagggcacttcaccaagaaaagcccattttacatgcagcgagtgcgggcgtgaaaataatatgcttgcttcggtcagaccgaccaaacataccgcgccggtcgctccgtatgctctgcaatgccactgtccccaatgtgaggcggaagggtataattacggaggacgttattttaaagttcctgatgcatatgatgtagaacgattgcaaaaatcagaggaggaatgggcaaatagagccgaacgggatttgaaggattattggccccgtcaacggtgctgggatgctcatatgatgagggctaacggcggtgtgaatgaagggtgggggtatacccattggtggaaaatgtttaattcccgtcaattgttggtgcacacccagttgctgcgggcgattgtagagcctgaaaatgatatatggcctcttgatatacaggaacaggcattaggggcatttcaacaatatttaagaaatcaaaatatgttttcattttttcatgttactcgtgattgtcttgcaccggcgttgagtaattctaattaccatcccaaaaattcaaccatgaagtaa

SEQ ID NO: 35560 - protein, 412 aa, Unknown
  Obtained from environmental sample
  misc_feature (1)..(412): Xaa is any amino acid
MTDSAELSGAFRQPDMRTPHADFFSLVIAEKNISTFFIEIICPHCGTTFHAELGETRMAPGVERIVSKDEKPFTEMSRHFARLIKNYEQGTKDARADRIAELLNMVDNEDGLKCPNCASFAGKRVKNLLTNHSYIESKKKKSDFGIASKKVQMYLLIHPTWLKGESGVDEQDNELGGYAGASPESSMKWYKKRLNNLNLVEYRGSELMISITLKDGTVLDTQKGTSPRKAHFTCSECGRENNMLASVRPTKHTAPVAPYALQCHCPQCEAEGYNYGGRYFKVPDAYDVERLQKSEEEWANRAERDLKDYWPRQRCWDAHMMRANGGVNEGWGYTHWWKMFNSRQLLVHTQLLRAIVEPENDIWPLDIQEQALGAFQQYLRNQNMFSFFHVTRDCLAPALSNSNYHPKNSTMK

SEQ ID NO: 35561 - DNA, 327 bp, Unknown
  Obtained from environmental sample
  misc_feature (1)..(327): n is a, c, g, or t
atgacagattcggccgagattgcggcgggcgcggatattgtcggcgcaaactgcggcaacggtattgagagaatgatcgaaatcgtaactcagatgagatcggtgaataaaactattcccattcttgttcacgcaaacgcggggcttcctaaaaatgtaaacggacagactgtattccccgaatctcccgaagatatggcggctattgcgcctaaacttgccgccgcaggagcgaatataatcggcggttgttgtgggactacgccggctcacattaaagcgattaaggaatcgttgaataatggaatctctaaaaacctcggttag

SEQ ID NO: 35562 - protein, 108 aa, Unknown
  Obtained from environmental sample
  misc_feature (1)..(108): Xaa is any amino acid
MTDSAEIAAGADIVGANCGNGIERMIEIVTQMRSVNKTIPILVHANAGLPKNVNGQTVFPESPEDMAAIAPKLAAAGANIIGGCCGTTPAHIKAIKESLNNGISKNLG

SEQ ID NO: 35563 - DNA, 837 bp, Unknown
  Obtained from environmental sample
  misc_feature (1)..(837): n is a, c, g, or t
atgtacattgaagcaatcaatgttgagtatacgggagacgcaggcgtcttccttgacgcggtacggaaagtccttgcggcgaagcggacgctgatacttgatgtcaaggacgcgggcgcggcgcaaggagcgctggaaatcgcaaaagattcaaaacccctcctcaacgccgctaacgaatcgaattacagggaaatgaacgagcttgccgtaaaatacggcgttacgctgggagtaagcggcgggactttggacagcctgcacgatactgtcgcggcattggaggcggccgggaacaagaaccttgtaattgacatcggctccaccggagccgccggcgccgtttccgtaaaggacgcctttgcccgcgcggtacagatacgccgcgccgcgctgaaagacggagaccggacgttcggatacccatcgctggtaaacatcgctaaaattgcgcctaacaaccatgaaatgcagaccgccctcgcctctctgtttacggtaaagtacggctcaataatcatcatggacgggatcaattacgcgcaggccctgccccttttcgggctaaggcagaatatctataccgacccgcanaggcccatgaggatagagccgggcgtttaccctctgaacaaagccgatgaaaattccgtctgcgcgaccacggttgatttcgcccttacctattttatcgtttcaggcgaactggaacggtcgggcgtgccggtaaacctccctgatagcgacgccggcgggtattcggtgctgaccgcctgggccgccggaanaattttccgcttcttccatcgcgaaagtcataaaagaaaacagtattga

SEQ ID NO: 35564 - protein, 278 aa, Unknown
  Obtained from environmental sample
  DOMAIN (1)...(276): CO dehydrogenase/acetyl-CoA synthase delta subunit
  misc_feature (1)..(278): Xaa is any amino acid
MYIEAINVEYTGDAGVFLDAVRKVLAAKRTLILDVKDAGAAQGALEIAKDSKPLLNAANESNYREMNELAVKYGVTLGVSGGTLDSLHDTVAALEAAGNKNLVIDIGSTGAAGAVSVKDAFARAVQIRRAALKDGDRTFGYPSLVNIAKIAPNNHEMQTALASLFTVKYGSIIIMDGINYAQALPLFGLRQNIYTDPXRPMRIEPGVYPLNKADENSVCATTVDFALTYFIVSGELERSGVPVNLPDSDAGGYSVLTAWAAGXIFRFFHRESHKRKQY

SEQ ID NO: 35565 - DNA, 615 bp, Unknown
  Obtained from environmental sample
  misc_feature (1)..(615): n is a, c, g, or t
ttgacagattccgccgagagagaattatggatttttggagatacatacaaattcggaacatcagatcgaagtttgaaaaatgtgcttgtggagcacttaaaggatttagggcgtaacgaattgcaacctattattcccgatggggctatggatgacatggacttaattccggatttatgcttgtggagtacacaacggagaacggagacgttatatgaaaatttggtagtagaactaaaaaaaccaaataagactttggggcgaaaagaattcaatcaaataagagattatgctaatgctgtttctggaaatccaagtttcgacaaaacaaaatataagtggcgttttatattaattggaaaagattttgacgctacactaacacaagaccttaaacggcataaagatgatgacattgaaaattgccggatttctattcgtaaatggtcggaactaataacagataatagattgaggtatcaattttataaagatcatgcaaactttgattccacgaatgaaatggtttctaagcaaattgaaaccgtatatggttacttatttccgcgtaatgccgggataggtacagtggatggggaaaaagctaacacatga

SEQ ID NO: 35566 - protein, 204 aa, Unknown
  Obtained from environmental sample
  misc_feature (1)..(204): Xaa is any amino acid
MTDSAERELWIFGDTYKFGTSDRSLKNVLVEHLKDLGRNELQPIIPDGAMDDMDLIPDLCLWSTQRRTETLYENLVVELKKPNKTLGRKEFNQIRDYANAVSGNPSFDKTKYKWRFILIGKDFDATLTQDLKRHKDDDIENCRISIRKWSELITDNRLRYQFYKDHANFDSTNEMVSKQIETVYGYLFPRNAGIGTVDGEKANT

SEQ ID NO: 35567 - DNA, 969 bp, Unknown
  Obtained from environmental sample
  misc_feature (1)..(969): n is a, c, g, or t
atgggtgaaaagggcaacgaggncgggcagttcttcaccccgcgcgaaataatccgcgctatggtcagagccatcgaccccaaacccgacgagaccgttaccgattgtggctgcgtacggggcggattcctcgtgcaagcctatctgtatatgttgaaaacggcgtcggcgcagggggcgaacgcgctcgacaaattaaaacgtaatacctttttcggacgagagaaagaaaacctgatttacccgattacccttgcaaatatggttctgcacggaattgagcaaccgtccgtttggcacggcaacacgctcaccggcaacgaagtcttcggcggattgttcagcggcacatcgggacgctttgacgtggtacttaccaatcccccattcggcggcaaagaaggaaaagaggcgcagaccgcctttgcctataagaccggatcgacgcaggttttattcctacagcacgtcatagacagcctaaaaaagggagggcgttgcggcatcgttttagacgagggtgtcctattccgcacaaacgaaattgctttcgtgcaaaccaagcgaaaactgctcgacgattgcaacgtctacgcaattatcagcctacccggcggagtattctccgcagccggcgcgggcgttaagacaaacatactgctgttcgaaaaaggcacgcggacggaacgtatctggtactacgacctatcagacataaaagtaggcaaacgcaccccgttcaccatagacaaattcgacgagttcttccgcctgctacccgaccgcgccgacagcgagcgcagctggtcggtggacaggcaaactatagaaaaaaacggcttcgacatcaaggcggtaaaccccaaccgcaaagtcgaacacgacacccggactccgcaggaacttatcgcattgattgaggaaaaacagggtgaaattatggcggcgttggcggagttgaagcggtag

SEQ ID NO: 35568 - protein, 322 aa, Unknown
  Obtained from environmental sample
  DOMAIN (3)...(295): N-6 DNA Methylase
  misc_feature (1)..(322): Xaa is any amino acid
MGEKGNEXGQFFTPREIIRAMVRAIDPKPDETVTDCGCVRGGFLVQAYLYMLKTASAQGANALDKLKRNTFFGREKENLIYPITLANMVLHGIEQPSVWHGNTLTGNEVFGGLFSGTSGRFDVVLTNPPFGGKEGKEAQTAFAYKTGSTQVLFLQHVIDSLKKGGRCGIVLDEGVLFRTNEIAFVQTKRKLLDDCNVYAIISLPGGVFSAAGAGVKTNILLFEKGTRTERIWYYDLSDIKVGKRTPFTIDKFDEFFRLLPDRADSERSWSVDRQTIEKNGFDIKAVNPNRKVEHDTRTPQELIALIEEKQGEIMAALAELKR

SEQ ID NO: 35569 - DNA, 585 bp, Unknown
  Obtained from environmental sample
  misc_feature (1)..(585): n is a, c, g, or t
atggacgacgaatcgaataacagcgtattgccgcccgccccgccgcccggcgcaggcgcgagcgccgccgcgcctccacccggcgatggcgccgagcgcgccgtccgcgagattcgtaccgagaatttggtaaaaatctacagcaagcgttatgtggtgaacggcacgtccctaaacgtccggcagggcgagatcgttggtttgctgggtcccaacggcgccggcaagaccaccacgttttacatgatagtcggtcttgtgcgcgccaacaagggtcggatatttttggacgacaagaacatatcgcgcaagccgatgtacaagcgcgcccggatggggataggctacctgccgcaagagccgtcgattttccgtaagctctctgtggccgacaacctgatggcggtgcttgagtaccagcgcatgagctcaaagcagcgcaaggcccgtatgcgcgaaatgttagaggagttgaacgtggcgcacctgggagaagagcttaggctatatgctctccggcggcgagcggcggcgggtggagattgcgcggacgcttgccataaagccggattttatactgcttga

SEQ ID NO: 35570 - protein, 194 aa, Unknown
  Obtained from environmental sample
  DOMAIN (63)...(191): ABC transporter
  misc_feature (1)..(194): Xaa is any amino acid
MDDESNNSVLPPAPPPGAGASAAAPPPGDGAERAVREIRTENLVKIYSKRYVVNGTSLNVRQGEIVGLLGPNGAGKTTTFYMIVGLVRANKGRIFLDDKNISRKPMYKRARMGIGYLPQEPSIFRKLSVADNLMAVLEYQRMSSKQRKARMREMLEELNVAHLGEELRLYALRRRAAAGGDCADACHKAGFYTA

SEQ ID NO: 35571 - DNA, 318 bp, Unknown
  Obtained from environmental sample
  misc_feature (1)..(318): n is a, c, g, or t
atgctctccggcggcgagcggcggcgggtggagattgcgcggacgcttgccataaagccggattttatactgcttgacgaaccgttcgccggggttgatccgatagcggtggaggacattcagggaatcgtccaccagctgaagggcaagggttacggcgtgctgataaccgaccacaatgtgcgcgagacgttgcgcattacagatcgggcgtacatcatgtcggagggcaagatactgatatcgggaacggcgttggagctggctaacagcccggaggccagaagaatctatctgggacagaatttcagattatga

SEQ ID NO: 35572 - protein, 105 aa, Unknown
  Obtained from environmental sample
  DOMAIN (1)...(77): ABC transporter
  misc_feature (1)..(105): Xaa is any amino acid
MLSGGERRRVEIARTLAIKPDFILLDEPFAGVDPIAVEDIQGIVHQLKGKGYGVLITDHNVRETLRITDRAYIMSEGKILISGTALELANSPEARRIYLGQNFRL

SEQ ID NO: 35573 - DNA, 453 bp, Unknown
  Obtained from environmental sample
  misc_feature (1)..(453): n is a, c, g, or t
gtgaacctcggtttagacatatcgctgcggcttcagcaaaagatgtcattcaacatgatacagtcgttgaagctcttgcaggttaacacgttgcaattggagcagatgcttcaaaccgagcttgagcagaacccgctccttgaggtagacgaagagatggcggcggacgcggagattgacgtcgatgagcgtacggctgaggcggacggcaccggtgaagggggggataacggcacggacgacgtggcggacgattatttggaggagttgaccggcagcggggacgacgacggcggcattgattgggaggagtaccttgaggacggttttgacccggtcggttcctaccgtgaggaggccgaccctaacgaggagcgttatgagccgactgcggtctacgaggagacgctggaggagcgtttgaatcgagcaactgtcggacaaaaaagatag

SEQ ID NO: 35574 - protein, 150 aa, Unknown
  Obtained from environmental sample
  DOMAIN (3)...(51): Sigma-54 factor, Activator interacting domain (AID)
  misc_feature (1)..(150): Xaa is any amino acid
MNLGLDISLRLQQKMSFNMIQSLKLLQVNTLQLEQMLQTELEQNPLLEVDEEMAADAEIDVDERTAEADGTGEGGDNGTDDVADDYLEELTGSGDDDGGIDWEEYLEDGFDPVGSYREEADPNEERYEPTAVYEETLEERLNRATVGQKR

SEQ ID NO: 35575 - DNA, 327 bp, Unknown
  Obtained from environmental sample
  misc_feature (1)..(327): n is a, c, g, or t
ttgggctacatgctgtcggggggagagcggcgtcgggtggagattgcgcggacgcttgccataaagccggattttatattgcttgacgagccgtttgccggggtggatccgatagcggtggaggatattcagggcatcgtgcaccagctgaaaggcaagggttacggggtgctgataaccgaccacaatgtgcgcgagacgttgcgcataaccgatagggcgtacattatgtcggaggggcagattctgatttccggaacggcgcaggaattggcggacagtccggaagctagaaggatttatctggggcagaatttcaagttgtga

SEQ ID NO: 35576 - protein, 108 aa, Unknown
  Obtained from environmental sample
  DOMAIN (1)...(80): ABC transporter
  misc_feature (1)..(108): Xaa is any amino acid
MGYMLSGGERRRVEIARTLAIKPDFILLDEPFAGVDPIAVEDIQGIVHQLKGKGYGVLITDHNVRETLRITDRAYIMSEGQILISGTAQELADSPEARRIYLGQNFKL

SEQ ID NO: 35577 - DNA, 333 bp, Unknown
  Obtained from environmental sample
  misc_feature (1)..(333): n is a, c, g, or t
atgtatagcgatataagaacaccagtatcaaattcacagccgctgagcgacaccgttcagccgcttaaccccggcattgacccaaagcgcatgggtccccaaaaggcagatgcgcccaaatttgacgaaatgctaaagggattcctaacagacgtgaaccacatgcaaaactacgccgacgagtccattcaaaaaatggtagccggagaaatcaaggacgttcaccaagttatgcttgccgttggcgaagcaaaggttgcttttaacctaatgttagaaattcgcaacaaaaccctcgaagcatataacgaattgatgcggatgagaggttaa

SEQ ID NO: 35578 - protein, 110 aa, Unknown
  Obtained from environmental sample
  DOMAIN (7)...(110): Flagellar hook-basal body complex protein FliE
  misc_feature (1)..(110): Xaa is any amino acid
MYSDIRTPVSNSQPLSDTVQPLNPGIDPKRMGPQKADAPKFDEMLKGFLTDVNHMQNYADESIQKMVAGEIKDVHQVMLAVGEAKVAFNLMLEIRNKTLEAYNELMRMRG

SEQ ID NO: 35579 - DNA, 642 bp, Unknown
  Obtained from environmental sample
  misc_feature (1)..(642): n is a, c, g, or t
atgggaggaggaacggaggttgcaaaagaggcgagcgatattgtgattttggatgataattttaaatccatagacaaggcggttttatacggcagaacaattttcaacaacataagaaaattcatagtctttcaattaaccataaatgtctccgctgttttgatcaactttgtagcaccgctttttgggcaagaaaacccgctaacgataatgcagatcctgtggataaatctgattatggacacgctcgctgcgctcgcctttggcggcgaagccgcccttaaacgctatatgaaagaagcacctaaaaaacgcgatgaagcgatagtcagcggtaatatgtggaaagcgatatttgtggattccgcttggatatcctttttaagtttgctctttttgttctcgtcattcaaggataagttttttgaggatactcaggttatgcacaccgcttacttcaccttctttgtgatgatagctatgttcaacgcattcaacgcccgtaccgaccgcgtaaacatctttgacaacataagcggcaataaaaatttcctaagaattttggggttaatagtagttgttcaagttatattggtctatataggcggcgaaatattcagatgccacggggctggattttaa

SEQ ID NO: 35580 - protein, 213 aa, Unknown
  Obtained from environmental sample
  DOMAIN (100)...(213): Cation transporting ATPase, C-terminus
  misc_feature (1)..(213): Xaa is any amino acid
MGGGTEVAKEASDIVILDDNFKSIDKAVLYGRTIFNNIRKFIVFQLTINVSAVLINFVAPLFGQENPLTIMQILWINLIMDTLAALAFGGEAALKRYMKEAPKKRDEAIVSGNMWKAIFVDSAWISFLSLLFLFSSFKDKFFEDTQVMHTAYFTFFVMIAMFNAFNARTDRVNIFDNISGNKNFLRILGLIVVVQVILVYIGGEIFRCHGAGF

SEQ ID NO: 35581 - DNA, 753 bp, Unknown
  Obtained from environmental sample
  misc_feature (1)..(753): n is a, c, g, or t
ttggctgcccttaagggtgtcaaaacaaagcgggccgccttctactccggaggcgggcggcggcggagaataaagttctcgctccgcgaaacccgtttacaaaccttccttttggcgggtttattttttacattgagatgcgtagcgtctaaaaacgcgcagcgatctcagaggagcttgggtatgaaagttattttaaacaaggatctttcccccctgggagaagaaggggacgtcaaagatgtcgcgaaaggctatgccaggaattatctttttcctcggggcatcgcccttccgtacaacgaaaagacaataaagctttttgaaagccgcaaggaagaaattgaggcgcgaaaagtacaaaaacgtagcgatgcgtcggggctcaaggaaaaactggaaagcctttccatcgaaataaccatgtccgcgggccccaacggaaaactttacggcgctgttaccaaccagactgtagcggacgaactggcaaaacagggataccagattgaacgtaaaagaattgagattccggggacgcatataaagaacgtcggcaagtacaaggctgccgtgaggctttacgaaagcgcttccgcggaaatcagcttaaatgtgattgggcaggagataaaaaccgaaacggcaaaagctcctccttcaaagccgtttagaaaacgccgtgaagagcgaacgcaagaaagtcacgaagaacagccggagccgcagcagncagcaaaaagccaggagtaa

SEQ ID NO: 35582 - protein, 250 aa, Unknown
  Obtained from environmental sample
  DOMAIN (123)...(209): Ribosomal protein L9, C-terminal domain
  misc_feature (1)..(250): Xaa is any amino acid
MAALKGVKTKRAAFYSGGGRRRRIKFSLRETRLQTFLLAGLFFTLRCVASKNAQRSQRSLGMKVILNKDLSPLGEEGDVKDVAKGYARNYLFPRGIALPYNEKTIKLFESRKEEIEARKVQKRSDASGLKEKLESLSIEITMSAGPNGKLYGAVTNQTVADELAKQGYQIERKRIEIPGTHIKNVGKYKAAVRLYESASAEISLNVIGQEIKTETAKAPPSKPFRKRREERTQESHEEQPEPQQXAKSQE

SEQ ID NO: 35583 - DNA, 573 bp, Unknown
  Obtained from environmental sample
  misc_feature (1)..(573): n is a, c, g, or t
atgaaagttattttgaacaaggatcttgcacccctgggagaagaaggggatgtcaaggatgttgccaagggttacgccaggaactatctttttccgcgtggtattgcccttccgtacaacgaaaggacaataaagctttttgaaagccgcaaggaagaaattgaggcgcgaaaggtacaaaaacgaagcgacgcctcggggctaaaggaaagactggaaagcctttccatagaaattacaatgtcagccgggcccaacggaaaactttacggcgcagttaccaatcagactattgttgacgagcttgcaaaacacggcttccagattgaacggaagagggtcgaaattcccggaacccatataaaaaatgtcggcaaatataaagcgactgtcaggctttacgaaagcgcttccgctgaaatcagcataaacgtgattgggcaggaaataaaaaccgaaactgcaaaagccgctccttcaaagccgttcagaaaacgccgtgaagaacaacgaacgcaagaagttcccgaagaacagccggagcagccgcagcaaccaaaaaaccaggaataa

SEQ ID NO: 35584 - protein, 190 aa, Unknown
  Obtained from environmental sample
  DOMAIN (62)...(148): Ribosomal protein L9, C-terminal domain
  misc_feature (1)..(190): Xaa is any amino acid
MKVILNKDLAPLGEEGDVKDVAKGYARNYLFPRGIALPYNERTIKLFESRKEEIEARKVQKRSDASGLKERLESLSIEITMSAGPNGKLYGAVTNQTIVDELAKHGFQIERKRVEIPGTHIKNVGKYKATVRLYESASAEISINVIGQEIKTETAKAAPSKPFRKRREEQRTQEVPEEQPEQPQQPKNQE

SEQ ID NO: 35585 - DNA, 747 bp, Unknown
  Obtained from environmental sample
  misc_feature (1)..(747): n is a, c, g, or t
atgcctaagatagatgtaaatgaaaaagtcttctttgaactgtcgggaaagcgctggacatcaaaagacgaattggaagaagccctcatctgcgccaaagcggaactggacggaggctttgaagacgacaacaacgtcagcgccgatgagcgcactctaaaaatagagttgaacgataccaacaggccggatctctggggaacagccggatgcgcccgccagctccgcctgtacaacggcgggaaagcgccggtctatcctttcttttcaaccccaactgaaatgaaaagcacgggtcacaaggtgaaggccgaaaaaaccgtataccatgtacggccttttataactggctttgtcgcgcgtgggaaaaaaattaccgacccgattttaatagacatgatccaaacgcaggagaaattggccgggaatttcgggcgcaagcgcaaaaccatttccatgggtatttaccgtacatcgatagtcaagtggcctatcatctacaaaggggttgatcctgacagcgtttcatttgtgcctctgcaatgggatgttccactaaccttgactgaaattctgaaacagcaccccaaggggaaggaatacgcctttatccaacagcatgagaagattcatcctcttttgacggattccacaggggccgtcctctcttacccgccgattataaactccgccgacttgggcgcggtccaggtcgggacgacgaaatcttgtgctcggccgatctga

SEQ ID NO: 35586 - protein, 248 aa, Unknown
  Obtained from environmental sample
  misc_feature (1)..(248): Xaa is any amino acid
MPKIDVNEKVFFELSGKRWTSKDELEEALICAKAELDGGFEDDNNVSADERTLKIELNDTNRPDLWGTAGCARQLRLYNGGKAPVYPFFSTPTEMKSTGHKVKAEKTVYHVRPFITGFVARGKKITDPILIDMIQTQEKLAGNFGRKRKTISMGIYRTSIVKWPIIYKGVDPDSVSFVPLQWDVPLTLTEILKQHPKGKEYAFIQQHEKIHPLLTDSTGAVLSYPPIINSADLGAVQVGTTKSCARPI

SEQ ID NO: 35587 - DNA, 699 bp, Unknown
  Obtained from environmental sample
  misc_feature (1)..(699): n is a, c, g, or t
atgatcngcggntacgcggccagggnaatccacgacgcctactacgttgccgaccctggtaaaagcggctttgcacacgcaaaggcaatcgaggagccctggctttccaatgtggccgccgctcacgaaaacggcggcaaaaccggaagccgcggttggagttacgacttcgacgtggaatttacaaagcagctcatactccgcagtcaggggactgtgctttccgcaaagaccctcccaaaagcaaaagtcccaggtaagtacttcggcatagtccgctgcttccgctacgaccaggtagacgcgacccacctcccggatttctaccagaccgagggtatagttctgggagaggacgtgaacctccgaaccctcctcggtatgctggaaattttcgcgcgcgaagtcgcgggggccgatgaagtgaagtacgtccccggctatttccccttcaccgagccatcggtggaagtccacataaagcaccctgtgcttggctggttcgagctgggggggtcgggcatcttccgccccgaagttaccgacagtctgggggtgaacgtgcctgtagccgcctgggggctgggaattgaccggatggcccttatggctttgggccttaacgatctacgggaactttttagcggcgatattgaacatgtacggttaagacggacaaaggaaacagcaaatgcctaa

SEQ ID NO: 35588 - protein, 232 aa, Unknown
  Obtained from environmental sample
  DOMAIN (1)...(224): tRNA synthetases class II core domain (F)
  misc_feature (1)..(232): Xaa is any amino acid
MIXGYAARXIHDAYYVADPGKSGFAHAKAIEEPWLSNVAAAHENGGKTGSRGWSYDFDVEFTKQLILRSQGTVLSAKTLPKAKVPGKYFGIVRCFRYDQVDATHLPDFYQTEGIVLGEDVNLRTLLGMLEIFAREVAGADEVKYVPGYFPFTEPSVEVHIKHPVLGWFELGGSGIFRPEVTDSLGVNVPVAAWGLGIDRMALMALGLNDLRELFSGDIEHVRLRRTKETANA

SEQ ID NO: 35589 - DNA, 747 bp, Unknown
  Obtained from environmental sample
  misc_feature (1)..(747): n is a, c, g, or t
atggataagaaaaaaaggattgctattttttcatttattacttttatactcattctaatatcatttttattttttaagatacatttaattataagtatactatccggatgcatggtcatcccatttgcatatattgtgtttattttattatatacttattaccaattttctgaaaatggtaataattttcaatcaaaaatacatgacttaataattggaaatataaaaagccaggaaggttgtcttttggaaattggaaccggaagcgcatcacttataataaaagcagcaaaaatattgcccaatgtaattatgaccggaattgattattggggtaatgagtgggaatattctcaaaaactttgtgagaataatgctcaaatcgaaggagtcggtcatcgaattaattttatccaggcaagcgcctcaaagttaccatttgaaaataacagttttgatatgctaattagctgtcttacgtttcatgaagcaaaggacacaaagaataaaatactggtagtaaaagaagcgttcagaaccctaaaaaaaggaggtgaatttgtttttcttgatttgtttttggacaaaaaaatttttggtgagtattcagacttgataaacgccataaagacatttgggatttcagaattcgtaacaataaaattaagcgaaataatatcgcttcccaaattattgttaattaaaaacattttagggaatgcagctattttaaagggcgtaaaataa

SEQ ID NO: 35590 - protein, 248 aa, Unknown
  Obtained from environmental sample
  DOMAIN (83)...(187): Methyltransferase domain
  misc_feature (1)..(248): Xaa is any amino acid
MDKKKRIAIFSFITFILILISFLFFKIHLIISILSGCMVIPFAYIVFILLYTYYQFSENGNNFQSKIHDLIIGNIKSQEGCLLEIGTGSASLIIKAAKILPNVIMTGIDYWGNEWEYSQKLCENNAQIEGVGHRINFIQASASKLPFENNSFDMLISCLTFHEAKDTKNKILVVKEAFRTLKKGGEFVFLDLFLDKKIFGEYSDLINAIKTFGISEFVTIKLSEIISLPKLLLIKNILGNAAILKGVK

SEQ ID NO: 35591 - DNA, 756 bp, Unknown
  Obtained from environmental sample
  misc_feature (1)..(756): n is a, c, g, or t
atgagcagaaaagagggtggtaaaatattcggttcaggttcacgaactccaatagcaataacattattggtaaaaaaccctaacnagaaaatagaaaaagcaataattaaatattacgatattggcgactatcatagccgagagaaaaaacttgaaataattagggaattttcaacaatcagcaatataaattggagtattttaacaccaaacgaccatagtgattggataaattttagaaatgatgtttttaatacttatatttcgataggcgataaagaagctaattctaacaatacttattttaattcaaaatacagtaatggacttaaaacagcacgagatcatttttgttggaattactcaaaaagcttcttggaaaaaaatataaaaaaaataattaatttctataatgaacaatgcaaagaatatcatatcgccaaagaaaagaataaaaaaattaatcttgataattttttaaattatgactcaacaaaaattacttggaatagaggctttaagcaagaccttgaaaaaggcgttaaattcaaatacaatgatgaaaatatttatcaaggtatgtaccgtccgttttgtaaacaatatgtgtattttgcgaaagaattgaacgatatgacgtatcagatgcctaaattatttccgtcaaatgaacatcaaaacattgttatttgtatttcttgtgttggctcaaataatggactttcagtcttaattactcatgttacgcaaaaatga

SEQ ID NO: 35592 - protein, 251 aa, Unknown
  Obtained from environmental sample
  misc_feature (1)..(251): Xaa is any amino acid
MSRKEGGKIFGSGSRTPIAITLLVKNPNXKIEKAIIKYYDIGDYHSREKKLEIIREFSTISNINWSILTPNDHSDWINFRNDVFNTYISIGDKEANSNNTYFNSKYSNGLKTARDHFCWNYSKSFLEKNIKKIINFYNEQCKEYHIAKEKNKKINLDNFLNYDSTKITWNRGFKQDLEKGVKFKYNDENIYQGMYRPFCKQYVYFAKELNDMTYQMPKLFPSNEHQNIVICISCVGSNNGLSVLITHVTQK

SEQ ID NO: 35593 - DNA, 441 bp, Unknown
  Obtained from environmental sample
  misc_feature (1)..(441): n is a, c, g, or t
atggatccaaaagttttaggaatgataggcgcgggtgttgtgatgggaattgcagcccttggttccggggtaggaataggtattgcgggatccgccacaatcggtgcctggaagcgctgttataaggccaataaacctgcgcccatgacccttcttacctttgcgggcgctcccctgacccagaccttttacgggtttatcctaatgcaacagatgctgaatgcgtcttcaacggtgaatccaggtcaactcctgggcatgggatttggctcgggttttgccatagctttttccgccattgcacagggccaggcaggagccgccggcgcggacgcgttgagtgaaaccggcaaaggttttgcaaactacattgctgtagttggtatctgcgaaacagttgccctttttgctatggttctttccatgacaacccttggctaa

SEQ ID NO: 35594 - protein, 146 aa, Unknown
  Obtained from environmental sample
  SIGNAL (1)...(29)
  DOMAIN (6)...(75): ATP synthase subunit C
  misc_feature (1)..(146): Xaa is any amino acid
MDPKVLGMIGAGVVMGIAALGSGVGIGIAGSATIGAWKRCYKANKPAPMTLLTFAGAPLTQTFYGFILMQQMLNASSTVNPGQLLGMGFGSGFAIAFSAIAQGQAGAAGADALSETGKGFANYIAVVGICETVALFAMVLSMTTLG

SEQ ID NO: 35595 - DNA, 708 bp, Unknown
  Obtained from environmental sample
  misc_feature (1)..(708): n is a, c, g, or t
gtgcaagttcttatgaactccgcacttgatggcaatgcgcttgaccccaaaaaacttgtcagtgcggttgccaatatgaatataggtgagcttttgggcgaagtgaaaaagttggctgacgatgaatgtgtgattgatgaaccttatatgattcccactttgctcgataaagggagagaagctctgaattccgaggaaagcaatttagttgaagaaaataataaaaatgcggtggctcttggcataagggctggtatcaacttatcgcactcctatgcgaaatatcataatataagtgtttatggtagcggaagcggtgattatggcgatattttgggaatgcagcttggctttatacttgatattgctatgaacgactggttctacattcagcctggtcttatgtatgttcaaaagggaaggcgtgatgacaataaaagtagcataacctctcattaccttgaagttcccttgctgctctcgttcaaattatctgcgttcaggcttggcgctggtccatatattggcttgtgcctggttagcgattacgatgtttttgacggttttgacataggctggaatgctggcattggctntgatataggcaggtactacataggtgtgttttacgacttgggtcttaccaatgccgataacgactacttgggcaataaaacacttggcttcaattttgggataaatctatga

SEQ ID NO: 35596 - protein, 235 aa, Unknown
  Obtained from environmental sample
  misc_feature (1)..(235): Xaa is any amino acid
MQVLMNSALDGNALDPKKLVSAVANMNIGELLGEVKKLADDECVIDEPYMIPTLLDKGREALNSEESNLVEENNKNAVALGIRAGINLSHSYAKYHNISVYGSGSGDYGDILGMQLGFILDIAMNDWFYIQPGLMYVQKGRRDDNKSSITSHYLEVPLLLSFKLSAFRLGAGPYIGLCLVSDYDVFDGFDIGWNAGIGXDIGRYYIGVFYDLGLTNADNDYLGNKTLGFNFGINL

SEQ ID NO: 35597 - DNA, 516 bp, Unknown
  Obtained from environmental sample
  misc_feature (1)..(516): n is a, c, g, or t
ttgatggccgagaataggcgacgcgctgatcgacctcggcatcatcaccgaagaccaaaaactcaagtgcctagccgaacagctcaagaccaccgtggccgcgccgcgccaatacgcctcaatcgacctcaacgtagcggcgctcataccggagcagatggcgcggcgcttcaactgcatagctatagagaaacgcggcagcaacgaactggtcgtggccaccaccgacgtgctcaacctcaatatgctagacacactgcgcgacacgaccgatatgcgcatcaccgcgatcctcggcaaaaaagaggacatcgcgacctccgtggagcggtgctaccgcgacatagcctcgcacaaagacgcctcccgcctcaccgagaacatggacgatcatgtggagtacgtcaaacgcaaagagaaggataccgacaacgaagaggaatcggccgtagccggagccgaactcggcataataaaactggtcaacatactgatcaccaacgccatccgcgatag

SEQ ID NO: 35598 - protein, 171 aa, Unknown
  Obtained from environmental sample
  misc_feature (1)..(171): Xaa is any amino acid
MMAENRRRADRPRHHHRRPKTQVPSRTAQDHRGRAAPIRLNRPQRSGAHTGADGAALQLHSYRETRQQRTGRGHHRRAQPQYARHTARHDRYAHHRDPRQKRGHRDLRGAVLPRHSLAQRRLPPHREHGRSCGVRQTQREGYRQRRGIGRSRSRTRHNKTGQHTDHQRHPR

SEQ ID NO: 35599 - DNA, 828 bp, Unknown
  Obtained from environmental sample
  misc_feature (1)..(828): n is a, c, g, or t
atgtaccatctacgctatccttttgccgacggcagcggttttgtggagcttgccaccacgcggcctgagacgcttttgggagacaccgctgtagcctttcacccgaaagacgaacgctacacaggtctggaaggcaagatgctccgccttccccttgcaaaccgcgagattccccttgttgcggattcttacgttgatcgcgagttcggtaccggtatggtgaagatcactccggcgcacgatcacaacgactgggaacttgcccgccgccacggcctgagcgagctaaacattttaaccagtgacgggcggctgaacgacgcggtaccggaaaagtaccgttcgctaaaagtgatggaagccagggaaaaggttctggaagacctcaaggccggaggtttttatatccgggaagaagcaattacccacgcgattggctgctgttaccgctgccatacggtaattgagccgtacctttcggagcagtggtttgtcaggatgaagccgcttgcagacaaggccctggcagcctggcggcagggggaaataattttctttcccaaaaagtgggaaaacacttacgagcactggcttgaaaatatccgggactggtgcgtaagccgccagctttggtgggggcatcgtattcccgcctggtattgcggcgattgcggcaaaacctcggtttcccgcgttgaccttgcagcctgcccccactgcggctccaaaaacatcgagcaggatcccgacgtgctggacacctggttttccagctggctctggcccttcaccgttatgggttgggctcgtgccgctcggccaatctga

SEQ ID NO: 35600 - protein, 275 aa, Unknown
  Obtained from environmental sample
  DOMAIN (1)...(275): tRNA synthetases class I (I, L, M and V)
  misc_feature (1)..(275): Xaa is any amino acid
MYHLRYPFADGSGFVELATTRPETLLGDTAVAFHPKDERYTGLEGKMLRLPLANREIPLVADSYVDREFGTGMVKITPAHDHNDWELARRHGLSELNILTSDGRLNDAVPEKYRSLKVMEAREKVLEDLKAGGFYIREEAITHAIGCCYRCHTVIEPYLSEQWFVRMKPLADKALAAWRQGEIIFFPKKWENTYEHWLENIRDWCVSRQLWWGHRIPAWYCGDCGKTSVSRVDLAACPHCGSKNIEQDPDVLDTWFSSWLWPFTVMGWARAARPI

SEQ ID NO: 35601 - DNA, 474 bp, Unknown
  Obtained from environmental sample
  misc_feature (1)..(474): n is a, c, g, or t
atggagaaaattatgaaaacattggcaatgtaccgcccaaacacaattcaaaacgccctgagcgattttgatcgttactttgagtctttctttggcgactcgcttttatctcctgctgcgagaatgttcaatcatattccggcagtagacattcaggaaaccgagaacagctatgttctcgatatggaactgcccggctacgatgaaaagaacatcgaagttcatgtagacggctcaagcctgacgatctcttccaaggaagaggacgcccgcgaagagaaaaagaacaatgaaaacggaggaacctacattcttcgtgaacgaaaagccagttcatttacccgttctttcaaattgccggaaaacgccgatcccgaatcggtaaacgcatcattcaagaacggtatcctgaacctgcagattaataaacgcgccgaagcgcagaaaagaacgattcagattaaagcagcgtaa

SEQ ID NO: 35602 - protein, 157 aa, Unknown
  Obtained from environmental sample
  DOMAIN (50)...(155): Hsp20/alpha crystallin family
  misc_feature (1)..(157): Xaa is any amino acid
MEKIMKTLAMYRPNTIQNALSDFDRYFESFFGDSLLSPAARMFNHIPAVDIQETENSYVLDMELPGYDEKNIEVHVDGSSLTISSKEEDAREEKKNNENGGTYILRERKASSFTRSFKLPENADPESVNASFKNGILNLQINKRAEAQKRTIQIKAA

SEQ ID NO: 35603 - DNA, 1176 bp, Unknown
  Obtained from environmental sample
  misc_feature (1)..(1176): n is a, c, g, or t
atgaacgcaagcggccccggaagtgaaagtgagatagaaaatatattttcttccctggccgcagccgggtatacaattaaattccgtatatatagcgcccttgatctgtacttccgccttccggctctgccttttttttggatcgaaaccaacgcggatattgctgtccttgcgcgctatatcgacaatctgcgtttccctggcgtaggtgttgccgacgcggctgtggaaacttcaggcggaacctgctactttcgctgccttgaaagcaacgagcaaagcgaagcttcttatccccttctttcattaacttacgattggcagaccaaacgtttccaggatccccttggggtttatcctctactgcgaaaacttcgcaatcataaatctgaaaccgaccttgacttaaacattgcgcaacctcataccggaaacagccataccgttatggaagcggctttgctgcttgcccgctacggctttcccgccgggatgtttgccgcagccaaagagcaaaacctgtcgccagggccggaaatgcagagggtgtttctttgctgccttttgctttcagccaggccggagctggngctggaattgctcaagaagtccggctttctgaaagagttctggcctgaactcgcttccttaaacgaggtagatcactcaaaggaattccacccggagggcaatgtgtggaaccacaccctggaaacattccgctacagaaaaccgggcgcatccggggcttttgatctgcgcctttctttagcccttttgctgcacgacacaggcaagccaatttccgcttctttcgccaaccatcgttttgaaggccacgcggagctgggcgcgcaggcggcggcgcgctttcttgaacgccttgaatttgagccttcgctaatacaggacatcttctaccttgtaaaaaaccatatgctccccgccgccttaaaacggcttccccttactaaaaccgccgagatcatggcctccccgcttttccccacactgatggagctttaccgctgcgacgaatcctcctcattcaagggccttgacggatactatgaaaacagcgccgcctatcaagcctatcttaaaaacgtgaagaacccttatcgatccagggacgggaagaaaattaaatccctagcacaaaaacagaaaatctga

SEQ ID NO: 35604 - protein, 391 aa, Unknown
  Obtained from environmental sample
  DOMAIN (232)...(333): HD domain
  misc_feature (1)..(391): Xaa is any amino acid
MNASGPGSESEIENIFSSLAAAGYTIKFRIYSALDLYFRLPALPFFWIETNADIAVLARYIDNLRFPGVGVADAAVETSGGTCYFRCLESNEQSEASYPLLSLTYDWQTKRFQDPLGVYPLLRKLRNHKSETDLDLNIAQPHTGNSHTVMEAALLLARYGFPAGMFAAAKEQNLSPGPEMQRVFLCCLLLSARPELXLELLKKSGFLKEFWPELASLNEVDHSKEFHPEGNVWNHTLETFRYRKPGASGAFDLRLSLALLLHDTGKPISASFANHRFEGHAELGAQAAARFLERLEFEPSLIQDIFYLVKNHMLPAALKRLPLTKTAEIMASPLFPTLMELYRCDESSSFKGLDGYYENSAAYQAYLKNVKNPYRSRDGKKIKSLAQKQKI

SEQ ID NO: 35605 - DNA, 636 bp, Unknown
  Obtained from environmental sample
  misc_feature (1)..(636): n is a, c, g, or t
ttgtcattgaggagacaggaggatacaatggttaaaaaaacacaaaaagtaaatgaaaatttacttgagtcatattataagcagataaaggcatttccacttttatcttttgaagaagaattggaattgtcaaaacagatagaggaaggaaataccgcggctcttcacactcttgtcaattcaaatctgcgtttagtggtaaagatagccggaatgtataatattcccggcatttcaaaaatggatatgattcaagaggggaatattgggcttttaaacgccgcgaagaaatatgatttccgcaagaacgtgcgtttttccacgtattcaagctggtggataaaacagtttatcagccgttacatttccagcaggcggtattttgtccgtttgccccaacgtaaagaagaaacattacggaggattcaaaccacatacagcgttctttgtcaaagtttgatgcatcagccgaaaaattccgacatcgcgaaagagcttggcatttcagttagggttgttgattcttttgcgggtttcacggccgaatcgatgtcttttgatcagagtataagcgacgatgacgccattagcgcggtagatattcacgaagattatacttacaacccccgagcgtga

SEQ ID NO: 35606 - protein, 211 aa, Unknown
  Obtained from environmental sample
  DOMAIN (19)...(55): Sigma-70 factor, region 1.2
  misc_feature (1)..(211): Xaa is any amino acid
MSLRRQEDTMVKKTQKVNENLLESYYKQIKAFPLLSFEEELELSKQIEEGNTAALHTLVNSNLRLVVKIAGMYNIPGISKMDMIQEGNIGLLNAAKKYDFRKNVRFSTYSSWWIKQFISRYISSRRYFVRLPQRKEETLRRIQTTYSVLCQSLMHQPKNSDIAKELGISVRVVDSFAGFTAESMSFDQSISDDDAISAVDIHEDYTYNPRA

SEQ ID NO: 35607 - DNA, 756 bp, Unknown
  Obtained from environmental sample
  misc_feature (1)..(756): n is a, c, g, or t
atgggtgacccgcgctttgtgccggttccttacggaatgatcaccaaggaatatgccagggttcgcaagaatgatataaagctcaggcaggcgatgcccgataccattaaggttggcaacccgactcaatatgagaaatacttcactggcgaaaagggtggcgacacgacgtttatggtggtagcggacgcgatgggtaatatcgtggcctgtacaaccagtatatgccagggctggggctctaaactgatgattcccggatatggagttatgctgaacgatcgtatgacttatttcctccttgatgaaagttctcccaaccaccttttgccgcgcaaacgcaccatgcagacgattaccccatccatcgcgcttaaaaacggcgctccttatcttgcctgggggacaccgggggcggaccttcaggaacaaatgaaattgcaggtgtttcttaacgtcttcgagtggggaatgaatgcacagaaggctgtggaagccccccgtatccagaccttgcaccctacacccttgatggatacacccgggtttggcgcgcctccccgccatcttagcgttgaattgcgtgttcctatcgaagaacgtaacaagctggaaaaaatgggatatatcctcagaggcggcgactggtcgatgggcggagcaggcactatggggcttatcaagataaaccctgctacaggctggaaagaaaccggagcggacccccgtggaaataattcgtctttagcctggtaa

SEQ ID NO: 35608 - protein, 251 aa, Unknown
  Obtained from environmental sample
  DOMAIN (2)...(246): Gamma-glutamyltranspeptidase
  misc_feature (1)..(251): Xaa is any amino acid
MGDPRFVPVPYGMITKEYARVRKNDIKLRQAMPDTIKVGNPTQYEKYFTGEKGGDTTFMVVADAMGNIVACTTSICQGWGSKLMIPGYGVMLNDRMTYFLLDESSPNHLLPRKRTMQTITPSIALKNGAPYLAWGTPGADLQEQMKLQVFLNVFEWGMNAQKAVEAPRIQTLHPTPLMDTPGFGAPPRHLSVELRVPIEERNKLEKMGYILRGGDWSMGGAGTMGLIKINPATGWKETGADPRGNNSSLAW

SEQ ID NO: 35609 - DNA, 777 bp, Unknown
  Obtained from environmental sample
  misc_feature (1)..(777): n is a, c, g, or t
atgatcaacaccctgttgatcggggacaggatttttgtcaacaagctgatttacggccccgaattgctgcccggctttctcaaactgccaagcccgataaaaccggcgcgaaacgatataattatttttgaaaacccttcctacatttcaagagggctggccttcgacatagcccagcggattatttttatgcttaccatttcgcttgtggacatcgacagggatgagttggggatgccccgcgcccatttcctgatcaaacgggcggtcgggatggcgggcgaccggtttataatggaaaaaggcgagatgaagctccgtttcgccggagacgaccgctggacggacgagaggaaatacgcggcggggcgcggatggaagcataatatcagccgcctgatggatacggagaaataccaggcgctggaagcggcgggaagggccgccgcatggcaggatctcggcttgccggttccggaacgcctgcaaaaagcgcaggattctgcgaatagcatccgttatcccgattacctcgcccatgaaaaggccaggctggaaaccctgcggtgcgccatgccccatgaccgccgttacgcgacactactggcgagacattcgctcggctggtatgtgccggagggcaggctgcttcccctcggcgacaaccgcgacaattcgcgggatgggcggtacttcggcccggtgcggctttcaaaggtgctgggcaaaggctccgccattttctggcccctaaggcggatggggtttatccgctag

SEQ ID NO: 35610 - protein, 258 aa, Unknown
  Obtained from environmental sample
  misc_feature (1)..(258): Xaa is any amino acid
MINTLLIGDRIFVNKLIYGPELLPGFLKLPSPIKPARNDIIIFENPSYISRGLAFDIAQRIIFMLTISLVDIDRDELGMPRAHFLIKRAVGMAGDRFIMEKGEMKLRFAGDDRWTDERKYAAGRGWKHNISRLMDTEKYQALEAAGRAAAWQDLGLPVPERLQKAQDSANSIRYPDYLAHEKARLETLRCAMPHDRRYATLLARHSLGWYVPEGRLLPLGDNRDNSRDGRYFGPVRLSKVLGKGSAIFWPLRRMGFIR

SEQ ID NO: 35611 - DNA, 558 bp, Unknown
  Obtained from environmental sample
  misc_feature (1)..(558): n is a, c, g, or t
ttgctggcctcaagccgcgccgcatctttgctcgggccgatgatcgcaagccccgcgcctcggaatgtgtcaacgatgccgttggcaagcggcagttccgggccaatgacgcttatattaattttttccctcagacaaaattgtttaagctcttcctgccctttggcggatgcgggatcggcctttattgcgacattttcacatttggcttcggccgtcgtcccgccgttcccgggcgcgacaaagactttttcaacttttggcgattgggcgaatttccaggcaagggcatgttccctgccgcccgaacctattaccatgattttcatattattacacgacataagtggagccgcttgtcgtgccgccgtggccgttccagttggtgtgggagatttccccgcgcgctttgtcgacgcgctcataggtgtgcgccccgaagtagtcgcgctgagcctgcaggaggttcgccggcagccgctcgctgcggtagccgtcaaagtaggcgagggcgctgctgaacgccggcgtcgttatcccgctctgtatcgccgttga

SEQ ID NO: 35612 - protein, 185 aa, Unknown
  Obtained from environmental sample
  SIGNAL (1)...(23)
  misc_feature (1)..(185): Xaa is any amino acid
MLASSRAASLLGPMIASPAPRNVSTMPLASGSSGPMTLILIFSLRQNCLSSSCPLADAGSAFIATFSHLASAVVPPFPGATKTFSTFGDWANFQARACSLPPEPITMIFILLHDISGAACRAAVAVPVGVGDFPARFVDALIGVRPEVVALSLQEVRRQPLAAVAVKVGEGAAERRRRYPALYRR

SEQ ID NO: 35613 - DNA, 870 bp, Unknown
  Obtained from environmental sample
  misc_feature (1)..(870): n is a, c, g, or t
atgcagcttatctgcgaaacctatgacattatgaaaaatattctgagcctctcctgcgatgaaatgggaaatatctttgacgaatggaacaggggaagcctgagcagctaccttatcgaaattaccagggacatacttaggtttaaagacacggacggccagccccttgtcgagaagatccttgacacggcggggcagaaaggaaccggcaaatggacgggcgtcgcggccatggattttggcgtgccgcttacgttgattggcgaggcggttttcagccgttgcctttcagcggtcaaagacgaaaggacgcgggcttcaaaagttttttcaaagccaaaggcggcggcggtcgcggacaaggccgtttttgttaaagacctggaaaaagcgttatacgcctcaaaggtggtttcctacgcgcagggttatttattgatgagggaagcggcaaaagagcacaagtggaacctgaactacggcggcatcgcgctgatgtggcgcggcggctgcataatccgctcggtcttcctcggcaaaattaaagaggcgtttgacaggaaccccggccttgacaacctcctcatggatcccttctttacaaaaatactggaggatgcccaggattcctggcgcagggtcgtgtcaacggcgatacagagcgggataacgacgccggcgttcagcagcgccctcgcctactttgacggctaccgcagcgagcggctgccggcgaacctcctgcaggctcagcgcgactacttcggggcgcacacctatgagcgcgtcgacaaagcgcgcggggaaatctcccacaccaactggaacggccacggcggcacgacaagcggctccacttatgtcgtgtaa

SEQ ID NO: 35614 - protein, 289 aa, Unknown
  Obtained from environmental sample
  DOMAIN (1)...(276): 6-phosphogluconate dehydrogenase, C-terminal domain
  misc_feature (1)..(289): Xaa is any amino acid
MQLICETYDIMKNILSLSCDEMGNIFDEWNRGSLSSYLIEITRDILRFKDTDGQPLVEKILDTAGQKGTGKWTGVAAMDFGVPLTLIGEAVFSRCLSAVKDERTRASKVFSKPKAAAVADKAVFVKDLEKALYASKVVSYAQGYLLMREAAKEHKWNLNYGGIALMWRGGCIIRSVFLGKIKEAFDRNPGLDNLLMDPFFTKILEDAQDSWRRVVSTAIQSGITTPAFSSALAYFDGYRSERLPANLLQAQRDYFGAHTYERVDKARGEISHTNWNGHGGTTSGSTYVV

SEQ ID NO: 35615 - DNA, 954 bp, Unknown
  Obtained from environmental sample
  misc_feature (1)..(954): n is a, c, g, or t
atggatattgaaatgctgcgcgaaagggctcggattatcaggcaggtacggtctttttttgattcgaaaaattaccttgagcttgacaccccccttttgtcgcctgacttgatccccgaatcctgccttgaggtttttgaaacaaaacgtataacgccgggcggcaacagtacgccgtattggcttatcccctcgccgganatctggatgaaaaaaattatcgcaaggcaccgcgtaaatgtttatcaaatctgcaaatgtttccgcaacgggggatcttcaggttttctccactgcccggaattcaccatgctggaatattatactatggacgcggggtatatggattcgcttgcgctgaccgaggaattattccgcaatatcgccggtaacgcaggtatcggccttccctttgagcgcataacggttgccgaggctttttttcgttttgcgggttttgacctgttcgccgcggctgaaacgccgggaggaatggaaaaagaagcgctcaggctcggccttgacccggcgcattacaccggacaaagcgtaccggccttatacgatatgatttttatccacgcggttgaaccgaaactaaaacagaaccggcccattgccttactggactatccggcctttgtccccacactggcgcgaaaaagcgcggagggtaaagcagtggagcgctgggaactgtacttcaacggcatagagctggccaactgttattccgaagagacagacccccggcgcgtgcgggatttttttgaaagcgaagccgcggcaaaggaacaacaggcaatggttaagcataaagtagatcatgattactggaagatattcgagaaaggttttcctgcctgctccggcgtcgctcttggccttgatcgcctgataatgaccctttgcggacgatcaaatatagacggggtactgccatttgcgatttaa

SEQ ID NO: 35616 - protein, 317 aa, Unknown
  Obtained from environmental sample
  DOMAIN (1)...(316): tRNA synthetases class II (D, K and N)
  misc_feature (1)..(317): Xaa is any amino acid
MDIEMLRERARIIRQVRSFFDSKNYLELDTPLLSPDLIPESCLEVFETKRITPGGNSTPYWLIPSPXIWMKKIIARHRVNVYQICKCFRNGGSSGFLHCPEFTMLEYYTMDAGYMDSLALTEELFRNIAGNAGIGLPFERITVAEAFFRFAGFDLFAAAETPGGMEKEALRLGLDPAHYTGQSVPALYDMIFIHAVEPKLKQNRPIALLDYPAFVPTLARKSAEGKAVERWELYFNGIELANCYSEETDPRRVRDFFESEAAAKEQQAMVKHKVDHDYWKIFEKGFPACSGVALGLDRLIMTLCGRSNIDGVLPFAI

SEQ ID NO: 35617 - DNA, 1317 bp, Unknown
  Obtained from environmental sample
  misc_feature (1)..(1317): n is a, c, g, or t
gtgctgggcagacatgaaattgacgactttaaaaacgccgacatggtgataaaaaaccccggcgtaaggcctgattctccatacctgaaggctgccaaaaatattgaaaccgatattggacttttccttacagctatcggcggtattgccgctaatggtaaacctcctgtcagacttataacggttaccggttccaaaggcaaatccagcgtttcctcggccctgcattgggcattgaaagaggcaaacttcaggtcatacctcggcggcaatataaccgtgtcgcccctctcatttcttgacgatcttcaaaacggcgatactgtggtgctggaactttcaagctggcagttgggtgatctgcggggcaggattcgggaagacggatccgccctgttaaaaccgaaagccgccgtgcttaccgccatcatgccggatcaccttgaccgttacggcactatggaagcgtatgtcagcgacaagcggataatatatcaagggcaagaccaaagcgacataaccgtcgcgggcgatgatcaatggggcaggggattccttgccgaaagcagagcgcggtctctggtttactcaaacagcgccttgccccaaaaagtatccggcggctggattgacgcggtttccggcaagggtttcgctcgcctgcgtaattgggatttgcaaggcgtaattgaatctcagcctgttgacaacgaaattgttgagattgttcctgagaggcccatagtgccgggcagccatcaaaagcaaaacctccttgcggcgggccttgccctgtacggacttggcatgaagcctgaacatatccgaaagggcctgggttctttccccggagtcgagcaccggctggagttgtttctggaagcgggcggcatagcgttttacaatgacagcgcggcgacaattccggaagcggccgccgcggctattgaggctcttggcgctgacggccgtttaattctggtcacaggaggcacggacaagaatcttgatttttctcctcttgccgcggcggcagggaaggcaaaggccgttattctactggcgggatcgggaagcgacaaactccgcgggcttcttggcggcgcgggcattagctgtctcggccctttcgacatgttggaaaacgcggctaacgcggctctggaacttgccgcgccgggggaccggatctgtctttcgcccggctgcgcgtcctttgggatgttccttaacgagtttgatagaggacgcaagtggaaagaaacgataaagaagacctcacgcggaggcgcggaggacgcagaggaagaaaaataa

SEQ ID NO: 35618 - protein, 438 aa, Unknown
  Obtained from environmental sample
  DOMAIN (285)...(364): Mur ligase family, glutamate ligase domain
  misc_feature (1)..(438): Xaa is any amino acid
MLGRHEIDDFKNADMVIKNPGVRPDSPYLKAAKNIETDIGLFLTAIGGIAANGKPPVRLITVTGSKGKSSVSSALHWALKEANFRSYLGGNITVSPLSFLDDLQNGDTVVLELSSWQLGDLRGRIREDGSALLKPKAAVLTAIMPDHLDRYGTMEAYVSDKRIIYQGQDQSDITVAGDDQWGRGFLAESRARSLVYSNSALPQKVSGGWIDAVSGKGFARLRNWDLQGVIESQPVDNEIVEIVPERPIVPGSHQKQNLLAAGLALYGLGMKPEHIRKGLGSFPGVEHRLELFLEAGGIAFYNDSAATIPEAAAAAIEALGADGRLILVTGGTDKNLDFSPLAAAAGKAKAVILLAGSGSDKLRGLLGGAGISCLGPFDMLENAANAALELAAPGDRICLSPGCASFGMFLNEFDRGRKWKETIKKTSRGGAEDAEEEK

SEQ ID NO: 35619 - DNA, 1239 bp, Unknown
  Obtained from environmental sample
  misc_feature (1)..(1239): n is a, c, g, or t
ttgaccaaacagtcttattaccacgaaggcagaacttatcaggtttacagggtaaaaataaatacttcttcggggcaagtcagcgccggagccagattgacaacaaaaaccgcaaagatttgtcaggaatgcggacatggccactatgatgaaacttttttaagcgaaagatgtactttntgcggcgctccattagacgcaaaatgtcaggtaacgaatatatacaagatagaaaccgtagaaaccagaccaaaaatgcgtatctctgtaaacgatgaagagcgccaaagaataggttacgaactgcaaactatgttcaagataaaaaaagaagaaaccatagagagtaaaataatatacaatggtgagtgttttggatatttaatttattatcccgccgcaaccttatggcggcttaattacggctggagacggcgtaaagacaaaaacagaaaagggttcccaatagatcctctttccggacgatggggaaaaaatgaagatattgaagatgaagatgatgacgattccggcgatatcgataaaaacacagcacagccgattgtcccttatgttgaagaccataaaaacattcttctttttaaaccggctgaacaaataaccgatgaaaaagccatggtaactttgcaggccgccttaaaaaggggaatagaacagcattatgaaatcgaagaggttgaaatagcggcggaacctttgccaaataatgataatcgtaattatctgttattttacgaagcgtcagagggcggagccggagttttaagcaggattgctcttgaacccggcgaaatatcccgcattgctaaaaaggcattggaaataatgcactatgatgtttcaaaaccaattcattctgttacggatctaaaagatatacaggatactaatggtacaactgagaaatgtgtggccgcatgttataattgtttattatcatattacaaccagatggatcataaaaacattgaccgccggaatcctaaaacccaagaaattcttgtatcacttttaaattcagaaatacaaaaaatgagtgatagtaaatcgaccggcgaaagtatacaatataactatacaataaacgggaaatggacagcagacgaatattatcgaaatgaaaaaaccgttgtcttttaccgccatccgggagaagaggccgaggagtttattgtaaatcatggttttagactggttgtaaaggataaaaatgagtga

SEQ ID NO: 35620 - protein, 412 aa, Unknown
  Obtained from environmental sample
  misc_feature (1)..(412): Xaa is any amino acid
MTKQSYYHEGRTYQVYRVKINTSSGQVSAGARLTTKTAKICQECGHGHYDETFLSERCTXCGAPLDAKCQVTNIYKIETVETRPKMRISVNDEERQRIGYELQTMFKIKKEETIESKIIYNGECFGYLIYYPAATLWRLNYGWRRRKDKNRKGFPIDPLSGRWGKNEDIEDEDDDDSGDIDKNTAQPIVPYVEDHKNILLFKPAEQITDEKAMVTLQAALKRGIEQHYEIEEVEIAAEPLPNNDNRNYLLFYEASEGGAGVLSRIALEPGEISRIAKKALEIMHYDVSKPIHSVTDLKDIQDTNGTTEKCVAACYNCLLSYYNQMDHKNIDRRNPKTQEILVSLLNSEIQKMSDSKSTGESIQYNYTINGKWTADEYYRNEKTVVFYRHPGEEAEEFIVNHGFRLVVKDKNE

SEQ ID NO: 35621 - DNA, 735 bp, Unknown
  Obtained from environmental sample
  misc_feature (1)..(735): n is a, c, g, or t
atgggagtacttttaagccaaaaaatatcgacgtactatgaacgcttcaaagacatcgatgtaacatttacaaaagacatgatacaaattacagggcttttgacgcaagaaatacatttaaaatgcggaaacgatttttttccgtgtgttgtttatacaacttcattttccggagccaaagttgtagccaatgtaaaaacaggtcttcttgcaaaactgcagacaacaaataattttgtcagccttcgtctttgtttcagggagccgggggaaacaaatacggtaacattttttgtctccgcccgcgttaccgcaaacgcgccctacggtaattcgcaggacgttaatatgttcactatccagttttccaacagacctcccgacgattttatcgaaattattgggcgcatattggacgcaaatgtcaattccaagaaacgcaaagacgatcgcgttcctttaacccccgacaatcttcgcaaattaaatataacatcaaccgaaacggtagtttttatagagagcgttccgcgcagatgcatattaagagacctttctttttccggttccaaagtgataatgctncgcgttcccaaaattcctcttgacaaagaagggtcgttgcgtttggaatttaacgatcncagaatatcatatacaatcaaggggaaaatttgtccgcgccgaagcggtggaaggaaaaaaagaaatggtcgccttgggcataaattttga

SEQ ID NO: 35622 - protein, 244 aa, Unknown
  Obtained from environmental sample
  misc_feature (1)..(244): Xaa is any amino acid
MGVLLSQKISTYYERFKDIDVTFTKDMIQITGLLTQEIHLKCGNDFFPCVVYTTSFSGAKVVANVKTGLLAKLQTTNNFVSLRLCFREPGETNTVTFFVSARVTANAPYGNSQDVNMFTIQFSNRPPDDFIEIIGRILDANVNSKKRKDDRVPLTPDNLRKLNITSTETVVFIESVPRRCILRDLSFSGSKVIMLRVPKIPLDKEGSLRLEFNDXRISYTIKGKICPRRSGGRKKRNGRLGHKF

SEQ ID NO: 35623 - DNA, 828 bp, Unknown
  Obtained from environmental sample
  misc_feature (1)..(828): n is a, c, g, or t
ttgaatatagatgtactggagaattacccgggcattgctcccggcaagacaggttttgaattcagcgaggatctccgccttcaggccgagggttttggggcaaagtttttaacggagcaggcgcagaccttaaacaaagaaggcgggctttttgcaatcgcccttgcaaacggaaaaaccttaaaagcccaggctgtagttatagcgaccggaacaaaacaccgtacccttgatatatctggcgaaaaggaatttcttggccacggggtttcgtattgcgccacatgcgacggccctttttttaaaaacaaaaaaatatttgttgtaggcggcggtgactctgcctgtgacgaagcccaatacctgtcgcatctttccaatcaggtgatcctgatccaccgcagggaaaagttccgggctcaaaaagccctggcggatcgcgtacttcacaatcaaaatatcagcgtgcggttcaacacggtgatgaaggaaatccgtggaacgcagggggccaaagttgcttcggttttgctggaggaaaagggtacatcccgcgaagagagcgccgacgctgtttttatcttcactggttctgtcccgcagacttatctggtttcgggggccggtggcggccttaaagttgaattggacgaagccggctatgttatcaccgatcaaaagatggcttcttctgtgccagggctttttgccgccggagacgtcaggacgacgccgttccggcaggtcataaccgccgctgccgacggcgctgtggccgcgcattccgccgccgcttacatcgacagtttaaaaggcgagagctattga

SEQ ID NO: 35624 - protein, 275 aa, Unknown
  Obtained from environmental sample
  DOMAIN (1)...(246): Pyridine nucleotide-disulphide oxidoreductase
  misc_feature (1)..(275): Xaa is any amino acid
MNIDVLENYPGIAPGKTGFEFSEDLRLQAEGFGAKFLTEQAQTLNKEGGLFAIALANGKTLKAQAVVIATGTKHRTLDISGEKEFLGHGVSYCATCDGPFFKNKKIFVVGGGDSACDEAQYLSHLSNQVILIHRREKFRAQKALADRVLHNQNISVRFNTVMKEIRGTQGAKVASVLLEEKGTSREESADAVFIFTGSVPQTYLVSGAGGGLKVELDEAGYVITDQKMASSVPGLFAAGDVRTTPFRQVITAAADGAVAAHSAAAYIDSLKGESY

SEQ ID NO: 35625 - DNA, 405 bp, Unknown
  Obtained from environmental sample
  misc_feature (1)..(405): n is a, c, g, or t
gtggcttgggaaacccgcagattctcgtcagaatggggctctttgcaaattgacaaatctgttacaggcaaacctttaaccattgccaaaaaacgttacaaaaaaggaataggcacacacgcaagcggatttctccgctattcgctaaatggcgaatacgaaagattaaccgcagtcctaggcttagacgaagatgaattttgcagcaacggagttcaaataaaaattattggcgatggaaatttgttagcagacacaggaaaattagggcaagggcaggaatacccgcttgatatttctttgaaaggaattaatcaactcacttttgaaacagacggtcttggagatattggttgcgaccacgtggatatagcggctgcaatgctattcaaacctatcccctga

SEQ ID NO: 35626 - protein, 134 aa, Unknown
  Obtained from environmental sample
  DOMAIN (3)...(131): NPCBM domain
  misc_feature (1)..(134): Xaa is any amino acid
MAWETRRFSSEWGSLQIDKSVTGKPLTIAKKRYKKGIGTHASGFLRYSLNGEYERLTAVLGLDEDEFCSNGVQIKIIGDGNLLADTGKLGQGQEYPLDISLKGINQLTFETDGLGDIGCDHVDIAAAMLFKPIP

SEQ ID NO: 35627 - DNA, 639 bp, Unknown
  Obtained from environmental sample
  misc_feature (1)..(639): n is a, c, g, or t
ttgtctaggctaattcacgggtttagaatttgcatgagctttagccttttgctctcttngataggaacttttatgggcatagtgataggcggaattcaggggtattttggcggaaaattggatattgtttttcagagattgattgaaatttgggctgcgcttccttttttatatgtggttattttgctcggcagcatttatgggcaagggttttggcttttggctgttattatggctgcgtttagctggattggactcagctattatatgagggcggaatttttcaaaataaaaaatatgcaatttgtgaaagcagcgactgtgcttggtatggggcacgtgagaatttttttcaaagaaattttgccaaacgctttaacgcctgttataacgctttttcctttttccataataggtggaatttctgggcttacatctcttgattttttgggttttggcttgcaggctccaactccttcttggggagatttgctatctcagggtcttgcaaatctctacgctccttggattaccattttcacaatactagcactcttcataactcttatgctcgcttcttttataggagagggaataagagatgcctttgaccctaagtcaggggataggtttgaatag

SEQ ID NO: 35628 - protein, 212 aa, Unknown
  Obtained from environmental sample
  SIGNAL (1)...(26)
  DOMAIN (8)...(209): Binding-protein-dependent transport system inner membrane component
  misc_feature (1)..(212): Xaa is any amino acid
MSRLIHGFRICMSFSLLLSXIGTFMGIVIGGIQGYFGGKLDIVFQRLIEIWAALPFLYVVILLGSIYGQGFWLLAVIMAAFSWIGLSYYMRAEFFKIKNMQFVKAATVLGMGHVRIFFKEILPNALTPVITLFPFSIIGGISGLTSLDFLGFGLQAPTPSWGDLLSQGLANLYAPWITIFTILALFITLMLASFIGEGIRDAFDPKSGDRFE

SEQ ID NO: 35629 - DNA, 735 bp, Unknown
  Obtained from environmental sample
  misc_feature (1)..(735): n is a, c, g, or t
gtggacatctatcctgccttaaaccctctggggattgacagtgttacgcggggatttccgatgttcaacctggacatgaaccgcatatttcccggttcaccgtcggggtcgcttgcggaagtagcggcacatgacatcatccgcgatattgagggcgcggatatgtgcatagacatacactcaagcaacatttttttacgcgagataccgcaggcacgcgtaagtgagcagaacgagaccgcgttgctgccttacgcggtaatgctcaacgttgacctcgtgtggatacacgcatcggcgaccgtactggaatcaacgctagcgcactcgctcaatatgcgcgacgtgaagacgctggtgatcgaaatgggcgtcggtatgcgtatcacggagagtttctgcacgcagattgtagacggcatactgaatttgttgagcgaactcggaatgtggaaaggggatgccgggcggacacggcagccgctcgtttcaaaggatcgcggcgtcggctttttgaattcggacgcggcggggatatttattccacgtgccgtgcacggcagccatgtaaacgcaggcgactgtataggcattgtcatagacccgctcaacggcgcagtcgtcgaggaaacgctcgcctcctgcgacggcttgctgtttacgctgagggaataccccgttgtcttcggcggttcgctattggcgcgaatcatggaggattccanaaatggttaa

SEQ ID NO: 35630 - protein, 244 aa, Unknown
  Obtained from environmental sample
  DOMAIN (2)...(240): Succinylglutamate desuccinylase / Aspartoacylase family
  misc_feature (1)..(244): Xaa is any amino acid
MDIYPALNPLGIDSVTRGFPMFNLDMNRIFPGSPSGSLAEVAAHDIIRDIEGADMCIDIHSSNIFLREIPQARVSEQNETALLPYAVMLNVDLVWIHASATVLESTLAHSLNMRDVKTLVIEMGVGMRITESFCTQIVDGILNLLSELGMWKGDAGRTRQPLVSKDRGVGFLNSDAAGIFIPRAVHGSHVNAGDCIGIVIDPLNGAVVEETLASCDGLLFTLREYPVVFGGSLLARIMEDSXNG

SEQ ID NO: 35631 - DNA, 492 bp, Unknown
  Obtained from environmental sample
  misc_feature (1)..(492): n is a, c, g, or t
atggtttatcggatagcgcatgaactgtatttgctgtcagtgccgcttatacccagaattatgagcgaatacgcgcacagtgttaccggcattgacattcatccgggggcggttatcggaaaatatttttttatggatcatggtacgggtattgtcatcggcgagacagccgttataggagacaatgtaaaattgtatcagggagttacgcttggcgccttgtccacaaagggcggacagagtattaagggcgttaaacgccacccgaccataagtgataatgttacgatatattcaggtgccagcattttgggaggggataccattatcggcgagggtgtggtaatcggcggaaacgcttttgtgatacgctctgttcctgaaaagacaagggtaagcgtgaaaaatcccgaattgcagtttaagagcagcggtaatatttccacccatatggaattggatcaacttgatttttggcattatgagatttag

SEQ ID NO: 35632 - protein, 163 aa, Unknown
  Obtained from environmental sample
  misc_feature (1)..(163): Xaa is any amino acid
MVYRIAHELYLLSVPLIPRIMSEYAHSVTGIDIHPGAVIGKYFFMDHGTGIVIGETAVIGDNVKLYQGVTLGALSTKGGQSIKGVKRHPTISDNVTIYSGASILGGDTIIGEGVVIGGNAFVIRSVPEKTRVSVKNPELQFKSSGNISTHMELDQLDFWHYEI

SEQ ID NO: 35633 - DNA, 846 bp, Unknown
  Obtained from environmental sample
  misc_feature (1)..(846): n is a, c, g, or t
gtgccgatggtgaccattgatatggcgagcgggcagatatccatttgtatggacattcgcgggccgaattacggcgtctcgagcgcgtgcgccacgggaaataacgcgattgggattggcttccgctccataaaatttgacgaaacagacgtgatgttttgcggcggttccgaggcgggtgtcagcccccttgttttcgccgctttttcggcttcgcgcgcgctttcgacgcgcaatgacaatcccgcgcaggcgagccgcccctttgaccgcgaccgcgacggttttgtggtaggcgagggcggcgcggtggtgatccttgaggaactggggcacgcgcagaggcgcggcgcgaagatctacgccgagatgctcggttttgccgcaaccggcgacgcctaccatctgacggcaccgcatcccgagggggccggcgcggcgcgcgcgatgaagcttgcgctgcacgaggcgaatattgcgcccgatatgatcgggcacatcaacgcgcacgcgacatcgaccggcctgggggatatggcggagacaaaagcactccataccgtttttggagactacgcggcaaaaattccggtcaacgcgacaaaatcccttgttgggcatttacttggaggttccggcgcgttgggcgcggcgtgcgttgccaagacgatttcctgcggcgaggtgcatccgtcaatcaacgtgtataaccaggatccggaatgcgatctgcatatcatccgcgaggcgcaaaatctggatattcagtacgcgctcgcaaacgctttcggctttggcgggcacaatacctgtctcgttttggcaaatacaactcggccaatctga

SEQ ID NO: 35634 - protein, 281 aa, Unknown
  Obtained from environmental sample
  DOMAIN (1)...(112): Beta-ketoacyl synthase, N-terminal domain
  misc_feature (1)..(281): Xaa is any amino acid
MPMVTIDMASGQISICMDIRGPNYGVSSACATGNNAIGIGFRSIKFDETDVMFCGGSEAGVSPLVFAAFSASRALSTRNDNPAQASRPFDRDRDGFVVGEGGAVVILEELGHAQRRGAKIYAEMLGFAATGDAYHLTAPHPEGAGAARAMKLALHEANIAPDMIGHINAHATSTGLGDMAETKALHTVFGDYAAKIPVNATKSLVGHLLGGSGALGAACVAKTISCGEVHPSINVYNQDPECDLHIIREAQNLDIQYALANAFGFGGHNTCLVLANTTRPI

SEQ ID NO: 35635 - DNA, 861 bp, Unknown
  Obtained from environmental sample
  misc_feature (1)..(861): n is a, c, g, or t
gtggaaatcggcatatataacggcagggtgtatgccatgtcatggcaggcatgccccggcgctatgttctatcgcagaagtcttgccataaaatatcttggcacggatgatcccaaagtcgtacagacttattttaacagctttaacaaattccttgaaacagcgaaattgctcaaggataaatccaacggttactgcgtggtcgttccctctctgggcgatttgcgaaatcctttcctgtccgccagaaaaaatccctggatcgtgaatggcagagtggaactggatccggctatggagcagtatatggacatctgtaagacattgcgtgacaaccgcctggacggcagggtaggccagtggtcagaaggctggtttgacggtatgaggagcgagcttagagatgaaaaagggaagccgatggaagtattttcctactttctccccacatggggcctccactatgtactaaagacaaatgcccccagtacatcgggcgactgggccatgatccagggtccctctccttatcattggggcggcacctggattggcgcctataaaggcaccaggaatgttgccgcggttaaagaatttatccgttatgtaacaaccgacgacgctctccttgaggcatgggccaaagagacaggcgatatggttagcagcatcagcgtaatcaacaaaattaaagacaggtatagcgagcctttccttggcggacagaatcattacgctgattttgccgagacggccaanattgttaacggcagacttcttcaggtaagcgacgaatccattgaagcaatatttgatgaagcggttggtgactatgtaaaacggagacagcacaaaggctaa

SEQ ID NO: 35636 - protein, 286 aa, Unknown
  Obtained from environmental sample
  misc_feature (1)..(286): Xaa is any amino acid
MEIGIYNGRVYAMSWQACPGAMFYRRSLAIKYLGTDDPKVVQTYFNSFNKFLETAKLLKDKSNGYCVVVPSLGDLRNPFLSARKNPWIVNGRVELDPAMEQYMDICKTLRDNRLDGRVGQWSEGWFDGMRSELRDEKGKPMEVFSYFLPTWGLHYVLKTNAPSTSGDWAMIQGPSPYHWGGTWIGAYKGTRNVAAVKEFIRYVTTDDALLEAWAKETGDMVSSISVINKIKDRYSEPFLGGQNHYADFAETAXIVNGRLLQVSDESIEAIFDEAVGDYVKRRQHKG

SEQ ID NO: 35637 - DNA, 498 bp, Unknown
  Obtained from environmental sample
  misc_feature (1)..(498): n is a, c, g, or t
ttgggacttgaggccgttgaccttatcggaactgagctgggggagaaaagttaccgcgatacaaagctttttgcctcaggcggcgcggaggccgctcttgttgaaggggcagtccaggccagggataccacaataccgctgctgtccgtttatgacagcctggaagactggcttgcggagcgcccctgggaaaagccctcgcaaggcaaaggaggcgatacgggaagccttcatatcagaacaggcatccatcgctttccgttgcttgttgcccttgacaatgtgcgtcccgacggcgctttctctctgctttcggcgtatggaagggctatggttctggcagtgggctccgaacgcggctggtcggacaaggagcgggaagagcttgaaaaggcgagcttcgttcgcctttctatgggaagccgcgctatgcggacagaaaccgcctgtgtggctgctgccgtgctggctctggaaaaaaccggcgcgttaaggtag

SEQ ID NO: 35638 - protein, 165 aa, Unknown
  Obtained from environmental sample
  misc_feature (1)..(165): Xaa is any amino acid
MGLEAVDLIGTELGEKSYRDTKLFASGGAEAALVEGAVQARDTTIPLLSVYDSLEDWLAERPWEKPSQGKGGDTGSLHIRTGIHRFPLLVALDNVRPDGAFSLLSAYGRAMVLAVGSERGWSDKEREELEKASFVRLSMGSRAMRTETACVAAAVLALEKTGALR

SEQ ID NO: 35639 - DNA, 432 bp, Unknown
  Obtained from environmental sample
  misc_feature (1)..(432): n is a, c, g, or t
gtgaaccaggatcaagtaaaagaaaaactgctcgcccttgaagacgccccgctggatttttccgtgattttttccggcaagaaaagcaaaaaagtaaacggcctttacaagcccgacacgcgggaaataattattcacaatcgtaatttttccgacgcgaaccttttaatgtataccgccatccacgaatacgcccaccacctccacgcctgcgcaagagggcggcaaactctcgccccgcgcgcacacgtcggaattctgggctattttccacgcgcttctggaaaaagccgagtcaaaaaaaatctaccgcgacgttttcgccgacgccccggaacttaccgagcttaccgagaccatccggaaaaaatacctccaggaaaacggcagcctggtcaaggaaatgggcaaacatcttttgaaggcgcatga

SEQ ID NO: 35640 - protein, 143 aa, Unknown
  Obtained from environmental sample
  misc_feature (1)..(143): Xaa is any amino acid
MNQDQVKEKLLALEDAPLDFSVIFSGKKSKKVNGLYKPDTREIIIHNRNFSDANLLMYTAIHEYAHHLHACARGRQTLAPRAHVGILGYFPRASGKSRVKKNLPRRFRRRPGTYRAYRDHPEKIPPGKRQPGQGNGQTSFEGA

SEQ ID NO: 35641 - DNA, 384 bp, Unknown
  Obtained from environmental sample
  misc_feature (1)..(384): n is a, c, g, or t
atgggcaaacatcttttgaaggcgcatgaactctgcaccgcgataggggtgcgttttgaggactatgttgaccgcgtgctgcggataccccgcaccgccgcgaacatggcgattaaaatgttcagctacgaccttaatccgcagacgggcgccgataatatgcgttttctcgccggtatccgcgacgccggtgagcgaaaagccgccgagaccgccctgcttaaaaacaaaagccccgatacggtaaaaacggcgattcgccaaaaagccaaaaacgaagaccccacgcttatgcttgaacgggaaaaaaaccgccttgaacgcaccatagagacactctccaaacggcttgaggaagtgaagaaggagcttggacagaaataa

SEQ ID NO: 35642 - protein, 127 aa, Unknown
  Obtained from environmental sample
  misc_feature (1)..(127): Xaa is any amino acid
MGKHLLKAHELCTAIGVRFEDYVDRVLRIPRTAANMAIKMFSYDLNPQTGADNMRFLAGIRDAGERKAAETALLKNKSPDTVKTAIRQKAKNEDPTLMLEREKNRLERTIETLSKRLEEVKKELGQK

SEQ ID NO: 35643 - DNA, 936 bp, Unknown
  Obtained from environmental sample
  misc_feature (1)..(936): n is a, c, g, or t
ttgactttgactttgactttaacacaaggattctgcgtgaaatattcaacccacaagcgaataacgatagcgatattctccgccgtcgtcagtttagccatcctaatcctaaccgtctccctgagatccggctccggcatccacgaccccgccggcggtctgagtttcggcaagcgtttggccattgtgcgcctcgaaggcgagatattcgacgccgcttggcacgccgaacaattgcgcacttaccgtctcagcaacaacgtggccggcgtgcttttgcgggtagactcccccggcggggctgtcgcgccctctcaagagctctacaacgaggtggcggcgtacttggccgacagcaagccgctcgtagtcagcatgggcaacgtggcggcgtcgggcggttactatgtaagctctccggcgcacaagatattcgcctcgcccggcacgcttacaggcagcatcggcgtgatcttttctatgcccttgtaccaagagctggccaagaaggtgggggttgattttcgcactatgaaggccggggagatgaaagacgccggaagcccgttccgctctatgactgataaggaggtgaaatactntcaggcgcttctggacgacgttcacgagcagttcataaaggatgtggcggccgggcgcgatattgacacggggaaggtgagagcgttagccgacgggcgcgtgcttaccgggaggcaggcggtggagagcggtctgatagacacgctcggcggctttgcggaggcgctgcgttacttgggcgaggtatgcggcgtgccggaatcatcgaagccgatagagaagcggccgagtgtgggatggcgcgagtttttgttcgagtcggcgcagaaaagcgttccgggtcttggcgcgttttcgcggcgggcggggctttactacctgcttgatatgtaa

SEQ ID NO: 35644 - protein, 311 aa, Unknown
  Obtained from environmental sample
  DOMAIN (114)...(267): Peptidase family S49
  misc_feature (1)..(311): Xaa is any amino acid
MTLTLTLTQGFCVKYSTHKRITIAIFSAVVSLAILILTVSLRSGSGIHDPAGGLSFGKRLAIVRLEGEIFDAAWHAEQLRTYRLSNNVAGVLLRVDSPGGAVAPSQELYNEVAAYLADSKPLVVSMGNVAASGGYYVSSPAHKIFASPGTLTGSIGVIFSMPLYQELAKKVGVDFRTMKAGEMKDAGSPFRSMTDKEVKYXQALLDDVHEQFIKDVAAGRDIDTGKVRALADGRVLTGRQAVESGLIDTLGGFAEALRYLGEVCGVPESSKPIEKRPSVGWREFLFESAQKSVPGLGAFSRRAGLYYLLDM

SEQ ID NO: 35645 - DNA, 768 bp, Unknown
  Obtained from environmental sample
  misc_feature (1)..(768): n is a, c, g, or t
atgactcatgaaaccgacatacagcttgacgaaatggcaatgtccgtaatcggcgaagttgtttctcagattgcgggaactcaaataacggttcttacggataaaacaggaaataaatctatagcggcgtcgtctccgacggcggcgaatatcgctaaagccgcggcggcgcttcccgccggcgattttgccgttatgacttacggtcttgatatgggagacggactttcacaccagatatgggaagttttaggttcggctccggcagctgatatttccaacagtttaagcggcggcgctcctgcgccggcggcaggcggaatggcaatgcccggtatgcaaaatgccggaatgatgaatatggggggcatggatatgagcggaatgggtatgggaggaatgggtatgggaggaatgggtatgtctcctaatgtcgggtctgcaaatgtacagcctgttcaatttccaaatttgaaccagccgcgtctcggccctcacgaagcgggcaatatcggtcttatcatggacgtatccatggaaatgaccgtagaactcggacgcacgcgcaaattgatcaaagaaatattgggaatgggcgaaggcacaattatcgagcttgataaactcgcgggcgaacctgtagacattcttgtaaaccataaactgatagccaaaggcgaagtagtagttattgatgaaaacttcggcgtgcgtgtaactgaaattgtgtcgccgatggaacgcattaacgacatggggtataactag

SEQ ID NO: 35646 - protein, 255 aa, Unknown
  Obtained from environmental sample
  DOMAIN (170)...(246): Surface presentation of antigens (SPOA) protein
  misc_feature (1)..(255): Xaa is any amino acid
MTHETDIQLDEMAMSVIGEVVSQIAGTQITVLTDKTGNKSIAASSPTAANIAKAAAALPAGDFAVMTYGLDMGDGLSHQIWEVLGSAPAADISNSLSGGAPAPAAGGMAMPGMQNAGMMNMGGMDMSGMGMGGMGMGGMGMSPNVGSANVQPVQFPNLNQPRLGPHEAGNIGLIMDVSMEMTVELGRTRKLIKEILGMGEGTIIELDKLAGEPVDILVNHKLIAKGEVVVIDENFGVRVTEIVSPMERINDMGYN

SEQ ID NO: 35647 - DNA, 543 bp, Unknown
  Obtained from environmental sample
  misc_feature (1)..(543): n is a, c, g, or t
ttgtacatgaatgattttaccgagcttggcgtgctgcccgaatttaccgacaggcttacaaaaaagtccgttataatgcctacggccgtccagcgtcttgttattcccaaattactggaagaacaaagcgtggttttccggtcggcaaccggcacgggaaagactctcgcgtacctgctgcccggcctgcaactgttgttaggcgacaccgaagccccgtatcagggtccgcggcttcttgtctgcgcccccacccttgaactctgctcgcaaataaaagatgaaattgactttttacttgagagcaaaagcggcgtcaatgtttcgcttcttatcggttccataaatttaagccgccagatcgacagcttaaaaaaaagcaagcctcaagttgttgtcggtaatcccggcaggctgcttttattggcaaagatgggcaagttaaaactcagcagcctgcgcttcatggttcttgacgaagccgaccgccttaccgcgaccgagtgccggaagaaacgtccgcccggctcgtgccgattctga

SEQ ID NO: 35648 - protein, 180 aa, Unknown
  Obtained from environmental sample
  DOMAIN (24)...(176): Type III restriction enzyme, res subunit
  misc_feature (1)..(180): Xaa is any amino acid
MYMNDFTELGVLPEFTDRLTKKSVIMPTAVQRLVIPKLLEEQSVVFRSATGTGKTLAYLLPGLQLLLGDTEAPYQGPRLLVCAPTLELCSQIKDEIDFLLESKSGVNVSLLIGSINLSRQIDSLKKSKPQVVVGNPGRLLLLAKMGKLKLSSLRFMVLDEADRLTATECRKKRPPGSCRF

SEQ ID NO: 35649 - DNA, 741 bp, Unknown
  Obtained from environmental sample
  misc_feature (1)..(741): n is a, c, g, or t
atgcggacgataaagctgataatcgcctatgacggaacggacttcctcggctggcagaggcaagccggggaatcgcgtaccgtacaagctgtgattgaagcggctctggaaaaaatgcacggtcatcctgtcgcgctggccggggccggcagaactgattcaggcgtccatgccagggcccaggccgccagtttccaaaccgacattgaaagcatcaaggcggaccgctttgttccggccctgaacagtctcttgcccgccgacgtcaggattacggactcaggcgaagccgcgccgggtttccacgcccgttttgacgcgcgctccagaacctacaggttttttttcataaccgggcgccaggccctgccccacgagagccgttacgcgctgcagctttggcgtatccccgacgtcaacacgctcaactcctactgccgccttctgcccggcgagcgtgactgcgcgatcttcgccggctcgggcgatacaagcaaatccacctggaggaacatcacccatgccgcttttttagcggaaggcgatcgtttaatctttgagatcagcgcgaacgccttcctgttgaaaatggtgcgctccgtcgccggtactttcctccattacgaggaacgcgatacgcagcccgcccggcttggtgacattatcgcctcccgcgaccgaagcctcgccggccccacattgcccccgcaagggttgttcttgtggaaagtggagtactaa

SEQ ID NO: 35650 - protein, 246 aa, Unknown
  Obtained from environmental sample
  DOMAIN (145)...(246): tRNA pseudouridine synthase
  misc_feature (1)..(246): Xaa is any amino acid
MRTIKLIIAYDGTDFLGWQRQAGESRTVQAVIEAALEKMHGHPVALAGAGRTDSGVHARAQAASFQTDIESIKADRFVPALNSLLPADVRITDSGEAAPGFHARFDARSRTYRFFFITGRQALPHESRYALQLWRIPDVNTLNSYCRLLPGERDCAIFAGSGDTSKSTWRNITHAAFLAEGDRLIFEISANAFLLKMVRSVAGTFLHYEERDTQPARLGDIIASRDRSLAGPTLPPQGLFLWKVEY

SEQ ID NO: 35651 - DNA, 1140 bp, Unknown
  Obtained from environmental sample
  misc_feature (1)..(1140): n is a, c, g, or t
atgagccacggggactcggtggcgcggctgccagatggcttccgcgcaacatcgtccacatccatgtgcatcgcttcttgcgaaaacgcggcaagaaagctgtacggagtgcagttccacccagagacgaaacacacgaagtgcggacacgagatcattcaaaggttcctgttcggcgtgtgcggagcgtcaggcgactacaaactggacgattacatagacaagcagacacagctcatacgccaaaaggtgggcactgaaaaagtgctgctgggcctttcgggcggcgtggattccgccgtgtgcgccagtttactaagcagggccataccagagcaactggtatgcatcttcgttgaccacgggctgatgaggcaaaacgagggagacgaaatagagcgcgtcttttcaaaacggaaactccgcttcatacgagcggacgcggaaaagcgtttcctcaaggccctcaagggcgtgaccgacccagaaaccaagaggaagataatcggcaccgaatttatccgcgtgttcgaggaagaagccgccaagataggccacatcccctatcttgcccagggcaccatataccccgacatcgtggagtccggcggcaagcacggcgccaccatcaagagccaccacaacgtcggcggttttcccaaaaacctgaaatttatagatgtgatcgaacccctgtctgggcttttcaaggacgaagtgcgcgtccttggcaaaaaactggggctgcctgcatcgctggtcaaccgccagccattccctggccccggcctggccgtgcgcgtcatcggagaggtcacaaaagaaaagctggacgttttgcgaagggccgatgccatcctgcgggaagaacttgacggctccaagcagaggccagaccaatattttacagtcctgaccggcacatattcagtgggcgtaaagggcgacgcaaggacgtacagccccgtgatagccattagggcagtcaccactggggattttatgacagccgactacacgccgctttcgcacaagacactggcgcgcatctcatcgcggatcacgggcgagatacagtctgtcagtcgcgtggtctatgacattacttcaaagccgcccgccaccgtggaatgggagtga

SEQ ID NO: 35652 - protein, 379 aa, Unknown
  Obtained from environmental sample
  DOMAIN (288)...(378): GMP synthase C terminal domain
  misc_feature (1)..(379): Xaa is any amino acid
MSHGDSVARLPDGFRATSSTSMCIASCENAARKLYGVQFHPETKHTKCGHEIIQRFLFGVCGASGDYKLDDYIDKQTQLIRQKVGTEKVLLGLSGGVDSAVCASLLSRAIPEQLVCIFVDHGLMRQNEGDEIERVFSKRKLRFIRADAEKRFLKALKGVTDPETKRKIIGTEFIRVFEEEAAKIGHIPYLAQGTIYPDIVESGGKHGATIKSHHNVGGFPKNLKFIDVIEPLSGLFKDEVRVLGKKLGLPASLVNRQPFPGPGLAVRVIGEVTKEKLDVLRRADAILREELDGSKQRPDQYFTVLTGTYSVGVKGDARTYSPVIAIRAVTTGDFMTADYTPLSHKTLARISSRITGEIQSVSRVVYDITSKPPATVEWE

SEQ ID NO: 35653 - DNA, 303 bp, Unknown
  Obtained from environmental sample
  misc_feature (1)..(303): n is a, c, g, or t
atgggagtgagcaaaatggcaaaattcatttttgtgacgggcggcgtagtttctgggttgggcaagggaatcaccgccgcctcactgggaaggctgcttaaacaaagtggcctaaaggtagcggcgcaaaaacttgacccatacatgaacattgacccaggcacaatgaacccattgcagcacggcgaagtgtttgtaacagacgatggggccgagaccgacttggacttgggccactacgagcggttcattgacgaaagcctgacggtgctaagcaacataacagccggcaaggtgttttga

SEQ ID NO: 35654 - protein, 100 aa, Unknown
  Obtained from environmental sample
  DOMAIN (7)...(100): CTP synthase N-terminus
  misc_feature (1)..(100): Xaa is any amino acid
MGVSKMAKFIFVTGGVVSGLGKGITAASLGRLLKQSGLKVAAQKLDPYMNIDPGTMNPLQHGEVFVTDDGAETDLDLGHYERFIDESLTVLSNITAGKVF

SEQ ID NO: 35655 - DNA, 1026 bp, Unknown
  Obtained from environmental sample
  misc_feature (1)..(1026): n is a, c, g, or t
ttgagcttacgcctaacgggggtgtcggagcataatctaaaaaacattaatgtggaaattcctttgggtgtctttacctgcatcaccggggtttcaggatcgggcaaatcaactctgctttcggacgtgctgtttcccgccctttacaacaggatgttaggctctaactatttggaagggcagtacaaaaagctggaaggggatgagcatatcgacaaggtaattgatatagatcaaagccctatcggccgtaccccacgctcaaatccgataacctacgtcggaggctttacggccataagggatctttttgcgaatcttcccgattcaaaaatgcgcggttacaagccggggcgtttttcctttaatgtccgcgggggcagatgcgaaaactgcgagggcgacgggactatcaaaattgaaatgaatttcctgcctgacgtgtacattacctgcgacgtttgtcacggcaggcgctttaacagggaaactctggacatacactacaagggcaaaagcatagccgacgttttggatatgaccatagaggaagcggcggaatttttcgcgccaattccccagattgcccgcaaaatggataccctgctttcggtgggcctgggttacgtgaaattgggacagtccgcccttacgctctcagggggcgaggcccagcgtgttaagctcgcccttgaattatccaagcgctccacgggaaaaaccttttacatccttgacgagcctaccaccggcctccactttgccgatgtaaagcagcttatggaagtgatccagcgccttgtggatcagggcaacactgtggcgatgatagagcataacctggacgtgcttttgcaggccgataacataatagacctggggcccgaaggcggcgacaggggcggtcagcttataactaccgggccgcctgaacaggtggccgaatgtccacattcgtatacaggcgcttacatcaaagagcatttggccaggcatggcaggaagggcgcaaaaaaaaataaatga

SEQ ID NO: 35656 - protein, 341 aa, Unknown
  Obtained from environmental sample
  DOMAIN (23)...(297): ABC transporter
  misc_feature (1)..(341): Xaa is any amino acid
MSLRLTGVSEHNLKNINVEIPLGVFTCITGVSGSGKSTLLSDVLFPALYNRMLGSNYLEGQYKKLEGDEHIDKVIDIDQSPIGRTPRSNPITYVGGFTAIRDLFANLPDSKMRGYKPGRFSFNVRGGRCENCEGDGTIKIEMNFLPDVYITCDVCHGRRFNRETLDIHYKGKSIADVLDMTIEEAAEFFAPIPQIARKMDTLLSVGLGYVKLGQSALTLSGGEAQRVKLALELSKRSTGKTFYILDEPTTGLHFADVKQLMEVIQRLVDQGNTVAMIEHNLDVLLQADNIIDLGPEGGDRGGQLITTGPPEQVAECPHSYTGAYIKEHLARHGRKGAKKNK

SEQ ID NO: 35657 - DNA, 300 bp, Unknown
  Obtained from environmental sample
  misc_feature (1)..(300): n is a, c, g, or t
atgcctggccaaatgctctttgatgtaagcgcctgtatacgaatgtggacattcggccacctgttcaggcggcccggtagttataagctgaccgcccctgtcgccgccttcgggccccaggtctattatgttatcggcctgcaaaagcacgtccaggttatgctctatcatcgccacagtgttgccctgatccacaaggcgctggatcacttccataagctgctttacatcggcaaagtggaggccggtggtaggctcgtcaaggatgtaaaaggtttttcccgtggagcgcttggataa

SEQ ID NO: 35658 - protein, 99 aa, Unknown
  Obtained from environmental sample
  misc_feature (1)..(99): Xaa is any amino acid
MPGQMLFDVSACIRMWTFGHLFRRPGSYKLTAPVAAFGPQVYYVIGLQKHVQVMLYHRHSVALIHKALDHFHKLLYIGKVEAGGRLVKDVKGFSRGALG

SEQ ID NO: 35659 - DNA, 1227 bp, Unknown
  Obtained from environmental sample
  misc_feature (1)..(1227): n is a, c, g, or t
gtgttagtcgtcatgtcggcgctgctcgcctttacggccttccagataggccgcaaaaagaagaaggcggccagctttaacgagatgatggcgaagaccaaagatccgaaaaaaagcaaggaagacggctccgagacgtccccgatcgtcccccttgacgccctctcgctggaaatcggctacggccttataccgctggttgacaaggaaaaaggcgcggaactgctggaacgggtgcagggggtcaggcgtcagtccgcgctggaactcggccttgtcatccccaaagtgcggataattgacaatatgatgcttgacccttcggagtactgctttaagatcaagggagtcgacgtaggcaggagcaagatacgcatgggatttttcctctgcatcaatcccggtacggttaccgaggagcttcccggcgacaaaacagttgatcccgcttatgggattccggccaaatggataagcgaggacaggcgggacgaggctgaacgggcgggctatacggtggttgatccgcctacgatcatcgccacccacctgaccgagattatcaagcggcacgcggcggaactcctcgggctgcaggacacccaggcgattctggatacgctccgcaaggaatacccggcggtggtggatgaggttcaacggcccgatctgaaagtgccggtcgttaaaattcagagaatactccacggccttttgaaggaaagagtttcgatcagaaacatggtgacaatactggaagcgattgccgaatacgcgccgcttacgggcaatgtccagttccttacggagaaagttcgtcaggcgctgggcagccagatatgccatcagtatactgatgataaccaccggctgcgcgttcttaccatcgcgccggaactggaacagaaaatcattgaaagcaagtacgagacaacttccggcgtggtttgcgcctgggagccgcaggcgcaggcggcgtggatcagggctgttaaaaaatccgctcaggcggtaaggagcaggggataccagcccgttatactctgttccgagcaggcgcgtttcctggttaagaattcaacggaaagggaacttccggaactggctgtaatctccgtgcaggaaattacgccggatattcttcctgaagctgttggcattataagactggaagcgccgccgtcaccttccaaagaaggcgcgccttcaagagaaggcggggagtaa

SEQ ID NO: 35660 - protein, 408 aa, Unknown
  Obtained from environmental sample
  DOMAIN (2)...(382): FHIPEP family
  misc_feature (1)..(408): Xaa is any amino acid
MLVVMSALLAFTAFQIGRKKKKAASFNEMMAKTKDPKKSKEDGSETSPIVPLDALSLEIGYGLIPLVDKEKGAELLERVQGVRRQSALELGLVIPKVRIIDNMMLDPSEYCFKIKGVDVGRSKIRMGFFLCINPGTVTEELPGDKTVDPAYGIPAKWISEDRRDEAERAGYTVVDPPTIIATHLTEIIKRHAAELLGLQDTQAILDTLRKEYPAVVDEVQRPDLKVPVVKIQRILHGLLKERVSIRNMVTILEAIAEYAPLTGNVQFLTEKVRQALGSQICHQYTDDNHRLRVLTIAPELEQKIIESKYETTSGVVCAWEPQAQAAWIRAVKKSAQAVRSRGYQPVILCSEQARFLVKNSTERELPELAVISVQEITPDILPEAVGIIRLEAPPSPSKEGAPSREGGE

SEQ ID NO: 35661 - DNA, 903 bp, Unknown
  Obtained from environmental sample
  misc_feature (1)..(903): n is a, c, g, or t
ttgcaggaaaaagaaagctctttttttaaagcgtttggagtaaaatcaattgttattatccctatgtttttagaaaataatttctgggggttattcagtattgacgactgcaaaaaggagcatatttttacagatgatgaaatccatatattaacgtccatgggtttgatgatgaccaatgccatagataaaaatttgcagtcagctaaaacacgcgaaactaacgagcgcatacaggttatatttaacgccatgccgttaggcgcaagctatattgacgttaattataatattttagactgcaatgatgaaatggttaaaatattcggcttatcaagcaaacaggaatatctggaaagattcctcgatctttcacctgagtaccagcctgacggcaacttatcgaaaaataagatatatgaaagccttgataaagcttttaaagacggttatctccatgaggaatgtatgcaccggaatctgaaaggcgagccgataccatgcgaaattacgctcgtgcgcgttaaacataataacgaatttgttttagcggcttatatgcgtgatttacgcgaattaaaagccgcaatcactcaaaagaacgaatcagagcaaacgctaaatattctgaaaaatatgttgaacgggattaattcgatgatctatgttgtcgttccccataccggtgaaatcctatttataaacaatttcatgaaagaacatttcaaaattgaagaagattgtgtcggaaagctttgttataaaatttttaataaggacacggataatatatgcgatttttgtccacctatcagcttgacaaggaaccgaacagtactgtcgtatgggaaatgcacaaccccgttacgaaccgtatgtatcgtaataccacccggtatatag

SEQ ID NO: 35662 - protein, 300 aa, Unknown
  Obtained from environmental sample
  misc_feature (1)..(300): Xaa is any amino acid
MQEKESSFFKAFGVKSIVIIPMFLENNFWGLFSIDDCKKEHIFTDDEIHILTSMGLMMTNAIDKNLQSAKTRETNERIQVIFNAMPLGASYIDVNYNILDCNDEMVKIFGLSSKQEYLERFLDLSPEYQPDGNLSKNKIYESLDKAFKDGYLHEECMHRNLKGEPIPCEITLVRVKHNNEFVLAAYMRDLRELKAAITQKNESEQTLNILKNMLNGINSMIYVVVPHTGEILFINNFMKEHFKIEEDCVGKLCYKIFNKDTDNICDFCPPISLTRNRTVLSYGKCTTPLRTVCIVIPPGI

SEQ ID NO: 35663 - DNA, 756 bp, Unknown
  Obtained from environmental sample
  misc_feature (1)..(756): n is a, c, g, or t
atgcgatttttgtccacctatcagcttgacaaggaaccgaacagtactgtcgtatgggaaatgcacaaccccgttacgaaccgtatgtatcgtaataccacccggtatatagaatggtctgacggaagaaatgtcttaatcgaacattcagtcgatgtaaccgaattgattaccgctaaagagcaggcaattcaggccaataaagacaaaagcagcttcctggctaaaatgagccacgagatacgcacgcctatgaacgcgattctgggcattaccgaaattcagctggaaaactctactctttcgtcggatatgcaggaagcttttggcgagatttacaattcaggttatttgctgatgggcatcatcaacgacatacttgacctgtctaaaattgaggccggcaagcttgagctgtcaccggctgcctacgatgtcccaagcctgattaacgacaccgtgcatctaaatgtcatgaaatacgacagcaagcctattgaattcagccttcaggtagacgagaacatcccgacagcgctgtacggtgacgaacttcgcatcaaacagattttgaataacctgctttccaacgcctttaaatatacggatgaaggcggaatttcgttttttgtcgccgcggaatacgagccgcagggaaaggaagcgcaggtaacacttgtgttccgtgtgagcgacacgggacagggcatgtcggcggaacagcggataagctctacgatgaatatacgcgtttaa

SEQ ID NO: 35664 - protein, 251 aa, Unknown
  Obtained from environmental sample
  DOMAIN (182)...(250): Histidine kinase-, DNA gyrase B-, and HSP90-like ATPase
  misc_feature (1)..(251): Xaa is any amino acid
MRFLSTYQLDKEPNSTVVWEMHNPVTNRMYRNTTRYIEWSDGRNVLIEHSVDVTELITAKEQAIQANKDKSSFLAKMSHEIRTPMNAILGITEIQLENSTLSSDMQEAFGEIYNSGYLLMGIINDILDLSKIEAGKLELSPAAYDVPSLINDTVHLNVMKYDSKPIEFSLQVDENIPTALYGDELRIKQILNNLLSNAFKYTDEGGISFFVAAEYEPQGKEAQVTLVFRVSDTGQGMSAEQRISSTMNIRV

SEQ ID NO: 35665 - DNA, 411 bp, Unknown
  Obtained from environmental sample
  misc_feature (1)..(411): n is a, c, g, or t
atggagaaaaatacgatgcctgcagcaggaaaaaagaagaaaaaaattccgccgattgatcaagaatttcttgataaaatggaaacgtctcttttagccttaaaagccgagattgttaacgctcttgtcgccagcagtgaagagtttaaagaaataatggaagtggaagaaccgaaagaccttgtagacgtagcttctgacgacatggatagaaaaatgatcgaggcaataggcgctcaggagttaaagaggcttaaactgattgaatcggctattacaagaataaagcaaggcaagtacggtcactgcataaaatgcggtaagcgtattccgcaagaccgtcttatcgcaattccctatgccctaatgtgcatagaatgtaaatccgaagaagaacggcgcaaccgttga

SEQ ID NO: 35666 - protein, 136 aa, Unknown
  Obtained from environmental sample
  DOMAIN (65)...(135): Prokaryotic dksA/traR C4-type zinc finger
  misc_feature (1)..(136): Xaa is any amino acid
MEKNTMPAAGKKKKKIPPIDQEFLDKMETSLLALKAEIVNALVASSEEFKEIMEVEEPKDLVDVASDDMDRKMIEAIGAQELKRLKLIESAITRIKQGKYGHCIKCGKRIPQDRLIAIPYALMCIECKSEEERRNR

SEQ ID NO: 35667 - DNA, 576 bp, Unknown
  Obtained from environmental sample
  misc_feature (1)..(576): n is a, c, g, or t
ttgacaaatatcatggcaaaaaaagcaattgttttattggctgacggttttgaagatgtcgaggcggtaacgccgattgactatctgcgccgcgccggaatagaagttactaccgcgtcaatttccgacagtctgaccgtaacaagcaaatggggcggcattaaaatgaccgcaacatctacgcttgccgaagttacaaaacaggaaataaacagctatgacgcgataattcttcccggcggaatgcccggcacggcgtctttagcggcttcaaaagagacaggttcgctcgttaaagacatggcggcaaacggaaaattagtctgtgcaatttgcgccgctcccgctcttgtactcgctccgcttggtctgcttaaagggaaaaattttacctgctacccaagcatggaagaaaaagtgacagatggcaaatggtcggacgaccgcgttgtaacggacggcaatgtcataaccagccgaggcgcgggaacagcgggtgaatttgcggtcgcgataattgaaaaattactggataaagcctccgctcaaaagttggcggagacagttttactgtaa

SEQ ID NO: 35668 - protein, 191 aa, Unknown
  Obtained from environmental sample
  DOMAIN (35)...(177): DJ-1/PfpI family
  misc_feature (1)..(191): Xaa is any amino acid
MTNIMAKKAIVLLADGFEDVEAVTPIDYLRRAGIEVTTASISDSLTVTSKWGGIKMTATSTLAEVTKQEINSYDAIILPGGMPGTASLAASKETGSLVKDMAANGKLVCAICAAPALVLAPLGLLKGKNFTCYPSMEEKVTDGKWSDDRVVTDGNVITSRGAGTAGEFAVAIIEKLLDKASAQKLAETVLL

SEQ ID NO: 35669 - DNA, 402 bp, Unknown
  Obtained from environmental sample
  misc_feature (1)..(402): n is a, c, g, or t
atgggaataaaagttttgagaatatatatagaaaattccgttattggtggttattttgacgacgaatttagggaatatactcataaactttttgaagaatttaaaaaaggaatatttaaaccagtaatttcatcacatgtaatagctgaattggaaaatggagcaccaagtcatgtaaaagaaattttgacgacaataaattatgaagaatatgcaattaatgatgagatgttgaaacttgccgaaaaatatattgagcaaaaagttgtgtcagaaaattattatagcgatgcattgcatattgcagtagcaactgtgataacagcaattttacatttaagccagataccgaaaataaggtatgggaataggattactcaaggcgcatttggaagcatttga

SEQ ID NO: 35670 - protein, 133 aa, Unknown
  Obtained from environmental sample
  misc_feature (1)..(133): Xaa is any amino acid
MGIKVLRIYIENSVIGGYFDDEFREYTHKLFEEFKKGIFKPVISSHVIAELENGAPSHVKEILTTINYEEYAINDEMLKLAEKYIEQKVVSENYYSDALHIAVATVITAILHLSQIPKIRYGNRITQGAFGSI

SEQ ID NO: 35671 - DNA, 375 bp, Unknown
  Obtained from environmental sample
  misc_feature (1)..(375): n is a, c, g, or t
atgggaataggattactcaaggcgcatttggaagcatttgacaccataggtgctggtataaaggatcagcggcgggaagggtacgacaagcagtacgagtatgctgacgcgataaaaggcgcgtatggggtatttttctttcaacacccgtcaatgctggaataccaggaacggcttaaaaagaagaacgagcggagcaataccgaaaccattctgcgggtgaacaagataccgagcaacaaccagataacgcggcttttggatgatataaacagcgaaacgtttgcaccggtcttcggacaagggcttaaacggcacagagacataaagggctggatcagtacttggtactgggtggaagataccggcttataa

SEQ ID NO: 35672 - protein, 124 aa, Unknown
  Obtained from environmental sample
  misc_feature (1)..(124): Xaa is any amino acid
MGIGLLKAHLEAFDTIGAGIKDQRREGYDKQYEYADAIKGAYGVFFFQHPSMLEYQERLKKKNERSNTETILRVNKIPSNNQITRLLDDINSETFAPVFGQGLKRHRDIKGWISTWYWVEDTGL

SEQ ID NO: 35673 - DNA, 1089 bp, Unknown
  Obtained from environmental sample
  misc_feature (1)..(1089): n is a, c, g, or t
atgataatatgctactatggaggcatgaaagcactgcaaccacaaataaatgaggaagacaaagcgttaatggaaaggctgttatcagcaggccacattaaacacaaatatgcagtacggctgcgaacagtgttattacgggtacaaggtgagggaaccggagatattgccagatttttggggatacatcaatcctcggtaagtgagtatataaaccgatataatgagcacggaattgattcacttttacgggacaagacccgcaaaccgggaaaagaaccaataagccaggatataaaaaacaagatctaccgcctggcatgcaatgaaaaaccaaaagatgaaacccattggagttgccggactttagcccagcgcgtagggatctcgcatactaaagtaaatcagatattgcaagaacatggattacaaccgcacagggtggagaaacggaattacagtaatgacatcaattttgaaacgaaactcattgacgtggtgggattatacctaaaaccgcctaaaaacgcgataatactgtgtatagacgagaaaagccagatacaagcgctggaacgaagccagccagtactgccgattatccggaatgttcccgagcggcaaagcgtagactatctgcggcacgggacgaccacgctgtttgcggcattggacgtgttaagcgggaatgtcatcggcgaatgcagcgagcggcatactgctgaagattacatccgttttttgaagaaggtggacagggcttgcgcgaaaaaaaaggtgctgcacattattacggataacctgtcggcgcataaaacgcccgcggtgtacgaatatcttgaaactgtgccggggagatttgtactgcattttatcccgacccattcatcctggctcaatttggtggaacggtggtttgcggagataacgaacaaacggatacggcggggaagctttgaatcggttccgcaattgatacgggcaataaaagattacatcaagacatggaacaagtcagggcgttcatttacctggacaaaaacacctgaagaaattcttgcaaaaataaataaagcaaaatcattttga

SEQ ID NO: 35674 - protein, 362 aa, Unknown
  Obtained from environmental sample
  DOMAIN (200)...(354): Integrase core domain
  misc_feature (1)..(362): Xaa is any amino acid
MIICYYGGMKALQPQINEEDKALMERLLSAGHIKHKYAVRLRTVLLRVQGEGTGDIARFLGIHQSSVSEYINRYNEHGIDSLLRDKTRKPGKEPISQDIKNKIYRLACNEKPKDETHWSCRTLAQRVGISHTKVNQILQEHGLQPHRVEKRNYSNDINFETKLIDVVGLYLKPPKNAIILCIDEKSQIQALERSQPVLPIIRNVPERQSVDYLRHGTTTLFAALDVLSGNVIGECSERHTAEDYIRFLKKVDRACAKKKVLHIITDNLSAHKTPAVYEYLETVPGRFVLHFIPTHSSWLNLVERWFAEITNKRIRRGSFESVPQLIRAIKDYIKTWNKSGRSFTWTKTPEEILAKINKAKSF

SEQ ID NO: 35675 - DNA, 570 bp, Unknown
  Obtained from environmental sample
  misc_feature (1)..(570): n is a, c, g, or t
atgacagatcgccagcgggctcataaaaatggacagctctttcaggttgaggcactgtggcctgccgtttaccagggcaaggttgattatgctgaaggatgtttgcagcggcgtcctggagaaaagctggttaagcacaaccttgacgatagcgccctttttcagttctataacaatgcggatgccctcgcggtcagattcgtcattggcgttagctatgccgtcgatcagtttgtcgcgcataagctggccgattttttccagcagttcggccttgttcacgttatagggaatctcggtaaagacgattttttcttttccggacttggttgtctcgacgttgaactttccccggaccagcagtttcccccgtccggttttatacgcctcgcggattcccctgcggccaaaaataaccccgcccgtggggaagtccgggccctgcacataacgcatcagatcgtcaatagagatttcaatgttgtctatatgggcgcagatagcgtcgcatatttcaacaaggttatggggggccatattggtggccatgccgacggcaattccgcttga

SEQ ID NO: 35676 - protein, 189 aa, Unknown
  Obtained from environmental sample
  misc_feature (1)..(189): Xaa is any amino acid
MTDRQRAHKNGQLFQVEALWPAVYQGKVDYAEGCLQRRPGEKLVKHNLDDSALFQFYNNADALAVRFVIGVSYAVDQFVAHKLADFFQQFGLVHVIGNLGKDDFFFSGLGCLDVELSPDQQFPPSGFIRLADSPAAKNNPARGEVRALHITHQIVNRDFNVVYMGADSVAYFNKVMGGHIGGHADGNSA

SEQ ID NO: 35677 - DNA, 660 bp, Unknown
  Obtained from environmental sample
  misc_feature (1)..(660): n is a, c, g, or t
ttgggcgggaaaggaaaaatggaagacctactaaataagctgcttggttttggaattgttccggtggtggcgctggacgatccccaaaaagctgttcagtcggccagcgcacttatagagggcgacctgccatgtgcggaaatagtgtttaggacgcaggccgccgaagagtcaataaagcgggtttcgcaagaatttccacagatgctgttaggggctggaacggtgctgacgacgcggcaagcagaccaagccattgacgcgggcgcaaattttattgtgtctccaggcctcaatccaaaagtcgtcgaacactgcctgtcgaaaaaaatcccaattataccaggttgcgtgacaccaagcgaaattgaagaagccatggagcttgggctggacttcgtcaaattttttccggctgaagccgctggcggaatcaaaatgataaaagcgctcagcgcccctttccccgatgtaaaattcatgcctacggggggaattgatataaataatctatgcacatatctctgtttcgataaggtggtatcctgtggcgggagctggatgatagcgaaggagtacataaataaaggtgactttgaaaaaattacaaaactaacgaaggaagctgtgatggcggttagaaagctaagaggggcatga

SEQ ID NO: 35678 - protein, 219 aa, Unknown
  Obtained from environmental sample
  DOMAIN (10)...(205): KDPG and KHG aldolase
  misc_feature (1)..(219): Xaa is any amino acid
MGGKGKMEDLLNKLLGFGIVPVVALDDPQKAVQSASALIEGDLPCAEIVFRTQAAEESIKRVSQEFPQMLLGAGTVLTTRQADQAIDAGANFIVSPGLNPKVVEHCLSKKIPIIPGCVTPSEIEEAMELGLDFVKFFPAEAAGGIKMIKALSAPFPDVKFMPTGGIDINNLCTYLCFDKVVSCGGSWMIAKEYINKGDFEKITKLTKEAVMAVRKLRGA

SEQ ID NO: 35679 - DNA, 522 bp, Unknown
  Obtained from environmental sample
  misc_feature (1)..(522): n is a, c, g, or t
atggtatcctcaacagacggctccgcggtatacacctgctggaagcggcgttccagcgcggcgtctttttcaatgtgcttgcggtattcgtccagggtggtggcgcctatgcagcgcagttcgccgcgagccagcgcgggcttcagcaaattggaggcgtcggtcgcgccttccgccgcgcccgccccgaccagcgtatgcaactcgtcaataaatagaattatcttcccttcggaggcttgcacctcgtgtatcagcgccttcaggcgttcttcaaattcgccgcggaattttgtccccgcgacaagcagacccaaatccagggcgagcagttttttcccttntaagccttccggtacgtcgccttcgacaatccggcgcgcaagcccctcgacaatggctgtcttgcccacacccggctcgccgataagcacggggttgttcttggtgcgccgcgacagtacctgcatacatctgcggatttcctcgtcgcgacctatcaccgggtcgagtttttcctga

SEQ ID NO: 35680 - protein, 173 aa, Unknown
  Obtained from environmental sample
  misc_feature (1)..(173): Xaa is any amino acid
MVSSTDGSAVYTCWKRRSSAASFSMCLRYSSRVVAPMQRSSPRASAGFSKLEASVAPSAAPAPTSVCNSSINRIIFPSEACTSCISAFRRSSNSPRNFVPATSRPKSRASSFFPXKPSGTSPSTIRRASPSTMAVLPTPGSPISTGLFLVRRDSTCIHLRISSSRPITGSSFS

SEQ ID NO: 35681 - DNA, 459 bp, Unknown
  Obtained from environmental sample
  misc_feature (1)..(459): n is a, c, g, or t
ttgtttttcaatggagaactgcagcagtttgcgttcaagtttgtccaactcagtggggcggctgtccagttccattttaaggcggctcgccgcttcatccacaaggtctatggccttgtccggcataaagcggctggttatataacggctggaaagcgtcgctgcggcgaccagcgcctcgtctttaatccgcacgccgtggtgtacctcatagcgttccttcaggccgcgcagtatcgcgatggtatcctcaacagacggctccgcggtatacacctgctggaagcggcgttccagcgcggcgtctttttcaatgtgcttgcggtattcgtccagggtggtggcgcctatgcagcgcagttcgccgcgagccagcgcgggcttcagcaaattggaggcgtcggtcgcgccttccgccgcgcccgccccgaccagcgtatgcaactcgtcaataaatag

SEQ ID NO: 35682 - protein, 152 aa, Unknown
  Obtained from environmental sample
  misc_feature (1)..(152): Xaa is any amino acid
MFFNGELQQFAFKFVQLSGAAVQFHFKAARRFIHKVYGLVRHKAAGYITAGKRRCGDQRLVFNPHAVVYLIAFLQAAQYRDGILNRRLRGIHLLEAAFQRGVFFNVLAVFVQGGGAYAAQFAASQRGLQQIGGVGRAFRRARPDQRMQLVNK

SEQ ID NO: 35683 - DNA, 444 bp, Unknown
  Obtained from environmental sample
  misc_feature (1)..(444): n is a, c, g, or t
atggcaaagtggaaaaagtcagcgcatgtcgtatatcaatgcagttatcatctggtatggacaccgaaatatagatacaggatattacaaggagaaataaaagaattcgtagaaagaaaaatcagagcagtctgtgagtggaagagagtagagatattagaaataacgataatgcccgatcatattcacattgtagtgataataccacagaagttagctatatcggagttggtagggatattgaaaggaaaaacggcgatagccgtttttaaacaacacaacaaattacggacaaaaacatactgggggaatcacttctggagccgcggttattgtgtaacgacggtcgggatagatgaagaaaaaatacgaagatatgtaaaatatcaggaagacgccgagcggctcagcgaagatcacgaactacagccaggccttttttag

SEQ ID NO: 35684 - protein, 147 aa, Unknown
  Obtained from environmental sample
  DOMAIN (19)...(123): Transposase IS200 like
  misc_feature (1)..(147): Xaa is any amino acid
MAKWKKSAHVVYQCSYHLVWTPKYRYRILQGEIKEFVERKIRAVCEWKRVEILEITIMPDHIHIVVIIPQKLAISELVGILKGKTAIAVFKQHNKLRTKTYWGNHFWSRGYCVTTVGIDEEKIRRYVKYQEDAERLSEDHELQPGLF

SEQ ID NO: 35685 - DNA, 699 bp, Unknown
  Obtained from environmental sample
  misc_feature (1)..(699): n is a, c, g, or t
gtgatttactgttatccaacaggaccgaaaaaggcttatgagaatcttctggaaggcagagcagatattatattttgtttagagccctcagatttacaaattaaacagtttattgacaaaggtgtaaaattaaagttaatccctatcggcaaagaggcttttgtgttctttgtcaataaagaaaaccctataaataatgtaacaatagaaaatattcggggtatatattccggtaaaatcagaaactggaaaaaattgaatggaattaatcaaaatatattagcgtatcaaaggccaaaaaattcaggaagccaaacaatactggaaaaaataatgggcgatatgtctattctaaaacctcgcaaagaatatgtacaacctgaaatgggcggaataattaagatgatcgcagaatacagaaatttcccagacgcgataggttattcttttttacattattcaacagaaatggtaaaaaatgatcaaattaaactattgtccattgacggcatttatccttctgttgaaacaatacaagatggaagttacccttttatagaaaatttttatgcaatatatattgaatctgataataaaaatgaaaatattgacgcgtttatagagtggattttatccgatcaaggccaaacaataatttcaaagacagggtatataccaaatacccttaccaagctgtag

SEQ ID NO: 35686 - protein, 232 aa, Unknown
  Obtained from environmental sample
  misc_feature (1)..(232): Xaa is any amino acid
MIYCYPTGPKKAYENLLEGRADIIFCLEPSDLQIKQFIDKGVKLKLIPIGKEAFVFFVNKENPINNVTIENIRGIYSGKIRNWKKLNGINQNILAYQRPKNSGSQTILEKIMGDMSILKPRKEYVQPEMGGIIKMIAEYRNFPDAIGYSFLHYSTEMVKNDQIKLLSIDGIYPSVETIQDGSYPFIENFYAIYIESDNKNENIDAFIEWILSDQGQTIISKTGYIPNTLTKL

SEQ ID NO: 35687 - DNA, 465 bp, Unknown
  Obtained from environmental sample
  misc_feature (1)..(465): n is a, c, g, or t
atggcgcacaacattctcgaccgcctgaaagcctccagcgccttacaggcaaaagtatcggctctcataaggcaccacggcgcaaggccagaccaggcttggagcgacgccgcctgccgccgccttctgcaccgcctagagaaagacggcctagactggcgggattgggcggccctccagttggcagaccaaatggggaaaggagtggacacagaaaacgcaccccaaagccactcagaactgctgcgccgaatagagggcatcgcagccgaggcccctcccttgaacgtgcgagcgctggccatggacggcaatgaaatgattaagctggcgggccaaccgcctggcccgtgggttggcaaattgcaaaagcaccttctggagatggtgatggacaacccaaaactcaacaacgccaatgatttggaaatactggctaaagaatgggtggaaagtcagcgatga

SEQ ID NO: 35688 - protein, 154 aa, Unknown
  Obtained from environmental sample
  misc_feature (1)..(154): Xaa is any amino acid
MAHNILDRLKASSALQAKVSALIRHHGARPDQAWSDAACRRLLHRLEKDGLDWRDWAALQLADQMGKGVDTENAPQSHSELLRRIEGIAAEAPPLNVRALAMDGNEMIKLAGQPPGPWVGKLQKHLLEMVMDNPKLNNANDLEILAKEWVESQR

SEQ ID NO: 35689 - DNA, 1344 bp, Unknown
  Obtained from environmental sample
  misc_feature (1)..(1344): n is a, c, g, or t
atggaattaagcttgtttcttacatttttaattttactcgtattaattatccagtttattgtgataattatactttttgggaaaaatcggcaaggttctcaggatgaagttttgaagaagtttattgaatttaatacacggcttagtgaaaatgaaataaaaattcgcaatgaactgggtaatcaatttgggcaaaatcgcggagatttaacattatcgctaaaatctgtttcagaacaattgtctgctacaattacaaattttaccggcttggttgataataaaataaaatcaattctggattcattatctgtatcatcaaaaacaaacagggacgaactggctaagagtattattgattttgagaaacaagtaacaaacggactggaaaagaaccgtgaaattattgaaaggaaacttgcggaaattcaggccgggaacgaaatcaaattggaaaaaatgagagaaactgtcgatgaaaaattacataaaactcttgagacaaggcttggtgaatcttttaaattggtgagtgaacgtcttgaacaagtacaaaaaggtcttggcgaaatgcaaaatttagccaatggtgtcggagatttaaaaaaagttctgtcaaatgtaaaaacaaagggagttcttggagaatatcagcttggagcaattcttgaacaacttcttgcgcctcatcaatactccaaaaatgtcgcgacaaaagaaggaagcagggaaaatgttgaatttgcaataaaaatacccagtaaaaatgattctgataaaactgtttggcttccaatagattctaaatttccaacagtagactatgaatctgttatggatgcttatgacagcggagatataaatattcttgaacgttcaaagaaagaattagaaacaaaaattaaaaattttgcgaaagatattcatactaaatatgtagatcctccaaatactactgaatttgcaattatgttcttgccgtttgaagggttatatgccgaagtattaaggatacccagtttatttgaaactattcaaaatacatataaagttacaatagcaggtccaaccacaatttcggcgtttttaaatagtttacaaatgggttttcgcagtttggctgttgaaaaaagaacaaatgaaatatggaatgttctcgcagctgtacgaaccgaattcggtaaattcggtgatatattggacgctacaaagaaaaaattggatcaagcaagcgccgaacttgaaaaaccgggacaagaacacggcagattgaaaagaaattacaggggtttgatgctctgccggaaacagaaactcaaaaatattggatgtataaaacattaa

SEQ ID NO: 35690 - protein, 447 aa, Unknown
  Obtained from environmental sample
  DOMAIN (148)...(445): RmuC family
  misc_feature (1)..(447): Xaa is any amino acid
MELSLFLTFLILLVLIIQFIVIIILFGKNRQGSQDEVLKKFIEFNTRLSENEIKIRNELGNQFGQNRGDLTLSLKSVSEQLSATITNFTGLVDNKIKSILDSLSVSSKTNRDELAKSIIDFEKQVTNGLEKNREIIERKLAEIQAGNEIKLEKMRETVDEKLHKTLETRLGESFKLVSERLEQVQKGLGEMQNLANGVGDLKKVLSNVKTKGVLGEYQLGAILEQLLAPHQYSKNVATKEGSRENVEFAIKIPSKNDSDKTVWLPIDSKFPTVDYESVMDAYDSGDINILERSKKELETKIKNFAKDIHTKYVDPPNTTEFAIMFLPFEGLYAEVLRIPSLFETIQNTYKVTIAGPTTISAFLNSLQMGFRSLAVEKRTNEIWNVLAAVRTEFGKFGDILDATKKKLDQASAELEKPGQEHGRLKRNYRGLMLCRKQKLKNIGCIKH

SEQ ID NO: 35691 - DNA, 354 bp, Unknown
  Obtained from environmental sample
  misc_feature (1)..(354): n is a, c, g, or t
atggaaatgatgaaggtatttgtctataacatgaaaaaataccggaaaaaaaagcggatttcacagatgaaactagcggaaatgcttgatacatcgaccagctatataggggaaattgagataaacagccgtgtgccatcactggctatggtagaaaggattgcaaatgccctcaatatcgaaccatttaggctttttttagacactaaggggagtttaagcggagatatgcaaaaagttgaccattacctagaaggcttatcgaccaaagaaagacaagcacttgcacagcacattaaaaatcaaatttcgagcgaagtagataaaatcctgcaacccgaaaatattgaatga

SEQ ID NO: 35692 - protein, 117 aa, Unknown
  Obtained from environmental sample
  DOMAIN (11)...(65): Helix-turn-helix
  misc_feature (1)..(117): Xaa is any amino acid
MEMMKVFVYNMKKYRKKKRISQMKLAEMLDTSTSYIGEIEINSRVPSLAMVERIANALNIEPFRLFLDTKGSLSGDMQKVDHYLEGLSTKERQALAQHIKNQISSEVDKILQPENIE

SEQ ID NO: 35693 - DNA, 717 bp, Unknown
  Obtained from environmental sample
  misc_feature (1)..(717): n is a, c, g, or t
atggccatacactatcccaacaaagcgtacgcggccaaatgcagtacggcggcggtcaacatccacaagtttgcgcgaagatatccggacaacatcaacattcccgagttctactcgagccccaattccgaagtgtccgacgaacacgcgcttatgtgcatactgctctatcggctcaccggcgtggaatcgtacaaaaccgaagcgttccaaatcatgcagagtaagtgggagtccaactccgcgcttgcgtgggacaccgtagccgatatactttactactacttagcgaaaaccgacccgaccgccgacaacggcagccacgggttttacagcgatttcctccgcaaaaacgtgcaaagcggaattaaaggcgcaaatagctacggtattccgtggggatggctgaagagcaattggggcacgaacaagctcgcgtcgggaagcgcgttcgccgccgcactgtatgttgaccttgtagatagcggcaaaattaccgaaggcgagacgaaagcggcggcggctagcgcatacaataagaaaattgttgattatatgctcggcgccaacgagtggaaacacccgttcatccacgggttcaaagacgatatgcactttcgcgtgcaccaccgcaacgctatgggccgcgacgaccacccgcccacggatgtcaaaaacgtcgcgcccgtttttgttcaaatccggccgcgcttatag

SEQ ID NO: 35694 - protein, 238 aa, Unknown
  Obtained from environmental sample
  misc_feature (1)..(238): Xaa is any amino acid
MAIHYPNKAYAAKCSTAAVNIHKFARRYPDNINIPEFYSSPNSEVSDEHALMCILLYRLTGVESYKTEAFQIMQSKWESNSALAWDTVADILYYYLAKTDPTADNGSHGFYSDFLRKNVQSGIKGANSYGIPWGWLKSNWGTNKLASGSAFAAALYVDLVDSGKITEGETKAAAASAYNKKIVDYMLGANEWKHPFIHGFKDDMHFRVHHRNAMGRDDHPPTDVKNVAPVFVQIRPRL

SEQ ID NO: 35695 - DNA, 774 bp, Unknown
  Obtained from environmental sample
  misc_feature (1)..(774): n is a, c, g, or t
atggtaacattcgagattgacacaagggataccccggtctttattacgactgaccttcgctcattttcgcctaacggcgacgggataaaggacacaataaaccttattccccagattcaggagacaagcggcatcctgaactggaagatagaaatacttaacctgggaaccgccggcagcacctctggcggcgcttccggagtacgcagttttgagggcagggatcaggccccctcaacgacggcctggaacggcaggacaaacgcgggaacaatcgcgcctgaaggaagttatgtcgcaaggctggatctggagtaccgctcgggcaacaggcctacttcaatttcaatggcttttaaccttagaacgacgcctccccagggagatatttccgtgccatacaatgtttttgcacctaacgggaacggaaaccgcgatacactgccaatacgcgtcacaacagagggcaatgacgagtggaacatggttatctcttcaaacgggaatacggcggtcagatcgtggaactggacaggaagagcccccgctgtatcgataatctgggacggaaaggacgaggctggaaatatcgtagatgatggaacctacaatataacactcagctccactgatgatgctggaaacagtacccgcaaaaatgtcaacaacattgttgttgacgccagggtgccaaagattttccttaccgcctccgcgcaggccatcgctccaaaaccgggtcagaccgaagccgtacgctctcggccgatctga

SEQ ID NO: 35696 - protein, 257 aa, Unknown
  Obtained from environmental sample
  misc_feature (1)..(257): Xaa is any amino acid
MVTFEIDTRDTPVFITTDLRSFSPNGDGIKDTINLIPQIQETSGILNWKIEILNLGTAGSTSGGASGVRSFEGRDQAPSTTAWNGRTNAGTIAPEGSYVARLDLEYRSGNRPTSISMAFNLRTTPPQGDISVPYNVFAPNGNGNRDTLPIRVTTEGNDEWNMVISSNGNTAVRSWNWTGRAPAVSIIWDGKDEAGNIVDDGTYNITLSSTDDAGNSTRKNVNNIVVDARVPKIFLTASAQAIAPKPGQTEAVRSRPI

SEQ ID NO: 35697 - DNA, 1158 bp, Unknown
  Obtained from environmental sample
  misc_feature (1)..(1158): n is a, c, g, or t
atgcacaagggtacgcaaaacaaaatagcagtaccggcaaagctgatcaaggcgctgccgaaggtagaattgcaccggcatctcgagggcgcttttcggttacaaaccctgctggagtttgcgcgcaagcggaacctctcggaatttccgctggacgacgaggaggcgttccgccggatcgtgcagatgacgaagtatgacgagcccgacttcctgacttttctctccaaattcaaagccgattggtattccacgctggccgacccgaagcgcgtcgcatacgaggcggtgctggacgcatccaaagagaatgtcgtgtatatggagatgcgcttttcgccggagcattacgcgcgcaagagcggcttcgcgctggaagcggtcattgaggccatcatggagggcgcggcgcgnggcgccaaagagggcggcgtggaactcgcttttctggtcacgctcgggcgcgagaaactggacgccgatgagatgcagcgctacatccaaatttgccaaaaatataaggatcacggcatagtcgggattgacctcgcgggcgatgaactgaattttccgccggaacttttcaccaaggtatttaagggactctacgagcgcaccggattttacgccacgatccacgccggcgaagcgcgcggctttgagagcgtcgcgaccgccgtccgcgatctcgacgcgcggcgcatcgggcacggactgcgcgccatcgaggatcaggcgacggtggatctggtgcgggaacgcaagatcgtgctggagcaatgcctcacgagcaaccggctgacgggtaccgtcaaatccatcgccaaacaccccttccccgagtattacaagcaggacgtgcgcgttaccctgaacaccgacgatccgcagatccagcagagtaccctcaacgacgactacacgctggcggcaaagcatttcctgtttgggctggaagacttccgccgcgtcaacatcttcggtctggagggttccttccagccgccggagttacanaaaacgcttatcaaaagatacaacgcgaattttgaggtggctctcgccgggcgcatcccgacagataaatacgggcagccccgcaaaaacacgctgcacgagaagacggcccagcacataaagcacgcgcaagcgcattga

SEQ ID NO: 35698 - protein, 385 aa, Unknown
  Obtained from environmental sample
  DOMAIN (18)...(345): Adenosine/AMP deaminase
  misc_feature (1)..(385): Xaa is any amino acid
MHKGTQNKIAVPAKLIKALPKVELHRHLEGAFRLQTLLEFARKRNLSEFPLDDEEAFRRIVQMTKYDEPDFLTFLSKFKADWYSTLADPKRVAYEAVLDASKENVVYMEMRFSPEHYARKSGFALEAVIEAIMEGAARGAKEGGVELAFLVTLGREKLDADEMQRYIQICQKYKDHGIVGIDLAGDELNFPPELFTKVFKGLYERTGFYATIHAGEARGFESVATAVRDLDARRIGHGLRAIEDQATVDLVRERKIVLEQCLTSNRLTGTVKSIAKHPFPEYYKQDVRVTLNTDDPQIQQSTLNDDYTLAAKHFLFGLEDFRRVNIFGLEGSFQPPELXKTLIKRYNANFEVALAGRIPTDKYGQPRKNTLHEKTAQHIKHAQAH

SEQ ID NO: 35699 - DNA, 564 bp, Unknown
  Obtained from environmental sample
  misc_feature (1)..(564): n is a, c, g, or t
atgctggcttttgtgtataccggcacggccagtattatcagccggcggcagcaggccgatctggaagccgcgttaaaagacatttttcccgatgcggacagttttgaaacggcggaaggagtcaaaagccccgattccgccgtgactattgaagatgcgtatatggcaatccgcggggggaaaccggtcggcgcggcgctgcggctgacgcgggccagctatggcgggccgattaaaataatggcgggagtcagtattaacgggacgataaccggcgtaaaaataatggaacacagcgatacgccgggactgggggccaatgccgtttcatccaaatattttgtggataaggcgcacgaaataaccttttacgggcagtttaccggaaaaagcgtcaatgatccgtttgaggttaagagtgatgtcattgcgattaccgcttccaccattaccagcagggccgtcgcttcgacggtgaaagcggcggctgtcgccgttacttcctggtttgccggccacgatattgacgcggtatccgccgcaaccgaaggagacgttgaatga

SEQ ID NO: 35700 - protein, 187 aa, Unknown
  Obtained from environmental sample
  DOMAIN (73)...(166): FMN-binding domain
  misc_feature (1)..(187): Xaa is any amino acid
MLAFVYTGTASIISRRQQADLEAALKDIFPDADSFETAEGVKSPDSAVTIEDAYMAIRGGKPVGAALRLTRASYGGPIKIMAGVSINGTITGVKIMEHSDTPGLGANAVSSKYFVDKAHEITFYGQFTGKSVNDPFEVKSDVIAITASTITSRAVASTVKAAAVAVTSWFAGHDIDAVSAATEGDVE

SEQ ID NO: 35701 - DNA, 1515 bp, Unknown
  Obtained from environmental sample
  misc_feature (1)..(1515): n is a, c, g, or t
ttggaactttccaatttattccttggcgaattttcagaacaggaaggttttttaaaaactttaaaattagcgcctaaaaaaagacaaggcgtttgggaagcctcaggcatcaaaccaaacggcgtagatcgaatgatcgtagaggcgatgcacagaacaacgatgggcgttgatcacgattatcttcatttattacatcacgcccttcaagtgtcacttgcggacggctggggcggctcaaggatagcatcaatttgttccgatatactttttggaactccctcccccgtaaaaagcgccgcaaactttggcgtgttaaaaaaagaaacggtaaatattttaattcacggccacgaacccgccctttctgaaatactgactaccgttgtgtctgatccgcagattgttgaatacgcaaagactgcgggagcgcaggggattactttggccggtatctgttgtaccgccaatgaaattttaatccgccacggcgttccgcttgccggaaattttcttcaacaggaattggctattgtaaccggcgccgtcgagatgatgataattgacgtacagtgctgtatgccgagtcttcccgacgttgcgaaaaattatcacacggaaattatttctacatccgacattgccaagactatcggcgcaagccatgtcagcgtggagcatggcggcgatcctgtaaagaacgcaaaggaacttgttaaacgcgccattgataattttaagaacagggattcatctaaagtgaatatcccggcgaacaacgagaaacttatcgccggtttttcagtggacgctataaaatatatgctcggcggacgcttccgcgcttctttccgtccgttgaatgacgcaatcatagcgaacagaattcttggcatagccggaattgtcggctgtaataatactaaacagaagacggatgattatacaaatacgctcacactcgaactaattaaacgaaatatactagtgcttcaaaccggctgttcggcaatcggaagcgcaaaggcggggctgttgaaaccggaagtagcgttggagcaggcgggcgcagggcttagggaagtttgcgaagccgtgggcatcccgcctattctgcacatgggaagctgtgttgacaactcaagaattctggaagcggcgacggaaattgtttttgagggcggtcttggtgatgatattgcgagccttcccgccgtaggcgtagcgcctgagtggatgagcgagaaggctgtagcaatcggctgctactttgtggcaagcggggttgacgtaatactgggaaatccattttatgtttcaggctcgcaggccgtcagcgattacctccacaacaaggtgagggatgaatacggcgcgagttttcatcttattgaagacccgataaaggcggcggatcgcattgtagaactgataaatcaggcgagggacgctcttggaattaacaaaaaggctgagcgcaaactcttcgatatgaaagacaggagggcgttgtaa

SEQ ID NO: 35702 - protein, 504 aa, Unknown
  Obtained from environmental sample
  DOMAIN (1)...(471): Prismane/CO dehydrogenase family
  misc_feature (1)..(504): Xaa is any amino acid
MELSNLFLGEFSEQEGFLKTLKLAPKKRQGVWEASGIKPNGVDRMIVEAMHRTTMGVDHDYLHLLHHALQVSLADGWGGSRIASICSDILFGTPSPVKSAANFGVLKKETVNILIHGHEPALSEILTTVVSDPQIVEYAKTAGAQGITLAGICCTANEILIRHGVPLAGNFLQQELAIVTGAVEMMIIDVQCCMPSLPDVAKNYHTEIISTSDIAKTIGASHVSVEHGGDPVKNAKELVKRAIDNFKNRDSSKVNIPANNEKLIAGFSVDAIKYMLGGRFRASFRPLNDAIIANRILGIAGIVGCNNTKQKTDDYTNTLTLELIKRNILVLQTGCSAIGSAKAGLLKPEVALEQAGAGLREVCEAVGIPPILHMGSCVDNSRILEAATEIVFEGGLGDDIASLPAVGVAPEWMSEKAVAIGCYFVASGVDVILGNPFYVSGSQAVSDYLHNKVRDEYGASFHLIEDPIKAADRIVELINQARDALGINKKAERKLFDMKDRRAL

SEQ ID NO: 35703 - DNA, 825 bp, Unknown
  Obtained from environmental sample
  misc_feature (1)..(825): n is a, c, g, or t
ttgcttgcggcgctttcaattcccgtttcagccgcagcgggcatttgcgttctctccgttatgggaaaatctttaaacggcatgagccttggcggactcgcgatggggatagggttggtttccgacatcagcgtaataattattgatctgcttcatcaggcttttggggaaagggaaaccgctcccataccggaagaaataggaaacaaagcggcgtctatatcgggatcaaatatcgcctctaccattacaactgcgcttgtgtttattccgattatcatgctgccgggaccgttaggcggtcttttcggcgacatagctatcgctcttgttacctctgtttcggcgggctggctttacgctcaattttttcttccttctctttattctatgttcttcggcgatccattaaaaacagccaaaaaaaataaatcgataaaaactaattcagtttttacaaatggcagtcttgaaaaaaaatattacttttttctttcaaatgttcttcgtaattcgggtaagtttttagccgttacggtatttttaagcgttttagggtgttttacgcttttaacccgtccggctgtattcattaaccccgatgaagctgaggaagtgcgagtttccatagcatttcctcaaggaactttattggattccatgaccaataataatgtcccctccaaaatagattcaagactgccgtttgtaaaaactgtttatggaattgcgggcgcggaagaaacggacgttatcagaagggcggatattgattataaaaaagaagaattaattttgcactgtattttagaaaaggggatataa

SEQ ID NO: 35704 - protein, 274 aa, Unknown
  Obtained from environmental sample
  SIGNAL (1)...(22)
  misc_feature (1)..(274): Xaa is any amino acid
MLAALSIPVSAAAGICVLSVMGKSLNGMSLGGLAMGIGLVSDISVIIIDLLHQAFGERETAPIPEEIGNKAASISGSNIASTITTALVFIPIIMLPGPLGGLFGDIAIALVTSVSAGWLYAQFFLPSLYSMFFGDPLKTAKKNKSIKTNSVFTNGSLEKKYYFFLSNVLRNSGKFLAVTVFLSVLGCFTLLTRPAVFINPDEAEEVRVSIAFPQGTLLDSMTNNNVPSKIDSRLPFVKTVYGIAGAEETDVIRRADIDYKKEELILHCILEKGI

SEQ ID NO: 35705 - DNA, 1224 bp, Unknown
  Obtained from environmental sample
  misc_feature (1)..(1224): n is a, c, g, or t
atgctctccgcgttagctgtagatttacaaaacggaaataacattatagcgcaatttaaaaatgaaccgcagactgtttccgctgatccggaaatttccgatataagcgtaaaatatcaggaagccgtaaatgagttagtcgctatccgcgcgcaggctcttccggtagcagacactgcccgcagcagatcaactcaggctgaagcgttcaggcaggaaggagagcggcttttcagggaagcgcagaccgcttttcaaaggcagaactacgataccgcgcgagagcgaattcaaagggcttccgacagactcagcaattcgcttgaaatacaggagtcggcgtctctgcggcaaatgcgggatactcaactggtcaatcttggtcaccagattgcggcttctgaaaacgaagcgataatcgcggaagtgcgtaatatgttaaacaacgcgcgtaccttgtactttaacggcaatttccagcaggcggaagacacgctgacaagggcaagaaaccgctggcgtactacaaacccagacgacaacgaagaaataatttactggctgggcttaatccgcaccgcgatgtctgcaagctccgcgcgcgtaattccgcctaccgctcctctttacgcggaaatgagccagcttttaagtcaggcgcaaaagaaatttgacgaaggcgcgcgttatatcaatcaaggtcagcgcgcggcgggaatcgcgaaatttgacgaagcgcgccaacttacaaggcaagtcagattgatatttccggttaatcaggaagccggtattctggagcttaggatagaacaatttatggatccggcggcatttaacgcttcgtttgaacagcgtttaagaacatctgtcgccggaacaaaacagcgttccatagaggcgtttgccgatcttcagaacttggctgaaataaaccccagatacccgaatataaaggctattctaactcaggcggaaattgacatgggataccgccctcagccgccgaatcccgcgaatatcgcgcgctcaagagacctgacagcttcagccagacgcattttagaaagcaacacaacgactcaatacgaagtcgcccttgcgcagttaaacgaagccattacattgaaccccaataacacggaagctccgcaggtaagagacagactgctcagcagaatgagcgttccgggaagcatcgtcttcaagcctcggccgatctga

SEQ ID NO: 35706 - protein, 407 aa, Unknown
  Obtained from environmental sample
  misc_feature (1)..(407): Xaa is any amino acid
MLSALAVDLQNGNNIIAQFKNEPQTVSADPEISDISVKYQEAVNELVAIRAQALPVADTARSRSTQAEAFRQEGERLFREAQTAFQRQNYDTARERIQRASDRLSNSLEIQESASLRQMRDTQLVNLGHQIAASENEAIIAEVRNMLNNARTLYFNGNFQQAEDTLTRARNRWRTTNPDDNEEIIYWLGLIRTAMSASSARVIPPTAPLYAEMSQLLSQAQKKFDEGARYINQGQRAAGIAKFDEARQLTRQVRLIFPVNQEAGILELRIEQFMDPAAFNASFEQRLRTSVAGTKQRSIEAFADLQNLAEINPRYPNIKAILTQAEIDMGYRPQPPNPANIARSRDLTASARRILESNTTTQYEVALAQLNEAITLNPNNTEAPQVRDRLLSRMSVPGSIVFKPRPI

SEQ ID NO: 35707 - DNA, 870 bp, Unknown
  Obtained from environmental sample
  misc_feature (1)..(870): n is a, c, g, or t
ttgaagacgaccgtatcggagcctgagtgctggaagcgcgttgtggagattgaggtacccgaatcggaggttgacgccgccgtcgacgccaagttcgcggagattaagcgcggcgtccgtatgccggggttcaggccgggcaaggtgcctctcgcggtcataaagcagcgttacggcaaggccgccagggcggaggcggttgaggcggttatgcaggaggcgttcaaatccgcttgcgaggagcacaagatatctccggtcagcgaggccaagctcacggacatgaagggcggcgagggcggcgaggcgctccggttcaccatcgagaccgaggtcgacccgccgatcgctgaggtaaagggctacgacaaactgaaggtcaaggcgaagccggtcaaggtgaccgacgccatggttgacgacgcgttcaacgggtatatagaccggtacgccaattttgaggatgtgagccgtcccgccaagaagggcgactttttgcgcatacggtacaagagcgtggcgatagacggcgcggagcgtcccgacctcaaggatcattgtccggagtatccgatagagctgggcggcgacggggtttttaaggagttcgataaggggctttcgggtaagtcggcgggcgacgaggtgaagatagacgtcaagttccccaaggactacgcagacacgggcgtggccggcaaggcgggggagttctccgtggaggtgctatccgtgcaggagaagcatccgccccgagtcaacgaggagttcatggagaagctcggcggtattacggccgataaattgaaggagagatacgcgccagcattgattgaagcagcagcgcgaggcctagcaggcggcttatga

SEQ ID NO: 35708 - protein, 289 aa, Unknown
  Obtained from environmental sample
  DOMAIN (154)...(243): FKBP-type peptidyl-prolyl cis-trans isomerase
  misc_feature (1)..(289): Xaa is any amino acid
MKTTVSEPECWKRVVEIEVPESEVDAAVDAKFAEIKRGVRMPGFRPGKVPLAVIKQRYGKAARAEAVEAVMQEAFKSACEEHKISPVSEAKLTDMKGGEGGEALRFTIETEVDPPIAEVKGYDKLKVKAKPVKVTDAMVDDAFNGYIDRYANFEDVSRPAKKGDFLRIRYKSVAIDGAERPDLKDHCPEYPIELGGDGVFKEFDKGLSGKSAGDEVKIDVKFPKDYADTGVAGKAGEFSVEVLSVQEKHPPRVNEEFMEKLGGITADKLKERYAPALIEAAARGLAGGL

SEQ ID NO: 35709 - DNA, 1578 bp, Unknown
  Obtained from environmental sample
  misc_feature (1)..(1578): n is a, c, g, or t
atggatctgctgcttgccacagcccttaaaggcgcagttgaggatcgtgacatcgaagaaatacgccccattgaaaatcccctggatattcttgcccagatgatccttgccctctgcatcgaaaaaaaacggaacattgacgaactgtacagtctgctaaaaggattctacatattcagaaacctcaactacgaggcgtatgtacggacagcgcgtatgcttgccgggttgtcgactaacggtgaaggtaaaaccaggctgagggatgtaaagccccgtatatggctggataacatagccggtgaaatcggcgctcttgacggcagcctgctcctgctgtattcatccggcggggttattgccaacagggggctgtattcactgcggcttgccgacggaacaaaaatcggggaactggacgaagaatttgtctgggaacgccgtcttggggatcgtttccattttggcgggcggggctggaggatcaccgctatagaggcggagtccgtgcaggctgtgccgctggaaacttcgtcggactttatgccgttctggaaagcggacacggttttccgcagccccaggcttacggaacgggtgctggcgattcttgacggttataacggggattcatccaacgttccgccggaggctcttgccgcttttctcgattcccagcgaaacgcgcagcacggcattcccttaagcggcagtaatcgcataacaatagaaatcatcgacagccctgaaaatcgcggggatttatacgcggtagtgatgcacagcttcaggggcggtgcaataaactatccgcttgtgctggctctagcccaggaactggaagaaacgctgaagctcagggtagaatcgttttccaatgacgattcgattctcctgttaataccccgcctgggcttcgagggaaatgtaaagcaggttgaaaacatcattcgcaatgccgttacagatcttaacaaaagcggcgggagcggcctttgccggggggagaggctgttcagaaaccggctggaggcgtccggagttttcggcgcgagcttccgcgaggccgcggaaaggagcctccttttgcctaaagcgggttttgggaaacgcaccccgctgtggatcacaaggcagcgttccaggcggctttttgacgcggtgcgcggcgaggaaggtttcccggttaccgccgaagcgtggcggagctgcctggtcgatttattcgacatggaagggttccgcgagttgttaggtgcaattaacgacgacaccattgccctgtttttcttctacagcagtatccccagccccttttcgcgtgacatggtacgccaggaaaccaataccctgatgtatgaatacgatgagcgaaaagatatacagggatcaggcgcgacgctttctgacaaggttattcaggaagccctgggcgacgcttcccttcgtcctgttataaaatctgaacttgccgacagcttcagcgcccggcttcgcagggaagagcctggttgggcgcctgatgaccagttgtccctgtacgaatgggtcaaagagacggatcgccataccctttga

SEQ ID NO: 35710 - protein, 525 aa, Unknown
  Obtained from environmental sample
  DOMAIN (235)...(440): DEAD/H associated
  misc_feature (1)..(525): Xaa is any amino acid
MDLLLATALKGAVEDRDIEEIRPIENPLDILAQMILALCIEKKRNIDELYSLLKGFYIFRNLNYEAYVRTARMLAGLSTNGEGKTRLRDVKPRIWLDNIAGEIGALDGSLLLLYSSGGVIANRGLYSLRLADGTKIGELDEEFVWERRLGDRFHFGGRGWRITAIEAESVQAVPLETSSDFMPFWKADTVFRSPRLTERVLAILDGYNGDSSNVPPEALAAFLDSQRNAQHGIPLSGSNRITIEIIDSPENRGDLYAVVMHSFRGGAINYPLVLALAQELEETLKLRVESFSNDDSILLLIPRLGFEGNVKQVENIIRNAVTDLNKSGGSGLCRGERLFRNRLEASGVFGASFREAAERSLLLPKAGFGKRTPLWITRQRSRRLFDAVRGEEGFPVTAEAWRSCLVDLFDMEGFRELLGAINDDTIALFFFYSSIPSPFSRDMVRQETNTLMYEYDERKDIQGSGATLSDKVIQEALGDASLRPVIKSELADSFSARLRREEPGWAPDDQLSLYEWVKETDRHTL

SEQ ID NO: 35711 - DNA, 654 bp, Unknown
  Obtained from environmental sample
  misc_feature (1)..(654): n is a, c, g, or t
atgaaacgtaaacttatttcttcggcgctcccttatgtaaacaatgttccccatttgggaaatctaatccaggtgctttccgccgacgtgtttgcccggttttgcagacttcgcggctacgaaaccctgtatgtgtgcggtaccgacgaatatggcaccgcaaccgaaacaaaggccgctgaggaaggcataagtcccagggagctttgtgacagatacttcaagattcacgatgatatttaccgctggttttatatcgcctttgatatatttggcaggacttccacgcccgttcacaccgaagttacgcagggtattttcaataagcttgacgcggccggctttattgttgaacgcgaaattgagcagctctactgcctgagctgcggccgttttctcgccgaccgttatgtgcggggtatctgcccaggctgcggttcccccaatgcccgcggagatcagtgtgaggactgcggcaaactccttgacccgacggaactaaaagaccccaaatgttccagttgcggcaatgcgcccaaagttgaaaaaacaaagcacctttatatcgaccttccaaagattaaggggctccttgaagagtggctaaaacagcgtcggttaaaggcttttgggcgcataacgcgatacagatga

SEQ ID NO: 35712 - protein, 217 aa, Unknown
  Obtained from environmental sample
  misc_feature (1)..(217): Xaa is any amino acid
MKRKLISSALPYVNNVPHLGNLIQVLSADVFARFCRLRGYETLYVCGTDEYGTATETKAAEEGISPRELCDRYFKIHDDIYRWFYIAFDIFGRTSTPVHTEVTQGIFNKLDAAGFIVEREIEQLYCLSCGRFLADRYVRGICPGCGSPNARGDQCEDCGKLLDPTELKDPKCSSCGNAPKVEKTKHLYIDLPKIKGLLEEWLKQRRLKAFGRITRYR

SEQ ID NO: 35713 - DNA, 834 bp, Unknown
  Obtained from environmental sample
  misc_feature (1)..(834): n is a, c, g, or t
gtgcttatccgcgaaggtataaggcagagcgccaaacaacttgatccgaatgtgaagcccgccgtccaagcagccgccgaacaaaattccaatgcgcaaaattcttcagagcatgaaacagacagcgtaaatcaaataggatcattatctttttccgcggcggagcaggatcttcttggagacggagtatacaaaacaattcttgatattgatgaaataaaatctattttggaacaagcaaaaaaacaaaaacttttggcgctcgattttgaaacggattcccttgacgcgtggcgttctcgtcccatcggcatttcgcttgctgtaaaaccaaaagaggggttttatatccccgtcgctccccatgacgttaacggtacgccttcaaaatttaatgatcccgataaagtacgcgctctgctttcacctatgtttgcggataaagaaatgacaatagccgcgcataacgccaagtttgattacaaggtgagccgcggctgggggattaatcgctggcaatgcaaaatttgggacacaatgacggcggcgtgggtagttgagcctgagcgcaacaattattctttggactctcttgtcgcctacacctttgactgctctcccacaaaatatatggaaatagtgccgaagggcgcaacatttgacattgtttctctggaaaccgctacgcgctattcgggggaagatgcggatttttgcatcaggctgaaacatcaccttgaaccaatgctgaggaagacggaatccatttctctttttgaaatcttngaatgcccctgcttncccttcttgcggaaatggaaggagagggaataa

SEQ ID NO: 35714 - protein, 277 aa, Unknown
  Obtained from environmental sample
  DOMAIN (64)...(251): 3'-5' exonuclease
  misc_feature (1)..(277): Xaa is any amino acid
MLIREGIRQSAKQLDPNVKPAVQAAAEQNSNAQNSSEHETDSVNQIGSLSFSAAEQDLLGDGVYKTILDIDEIKSILEQAKKQKLLALDFETDSLDAWRSRPIGISLAVKPKEGFYIPVAPHDVNGTPSKFNDPDKVRALLSPMFADKEMTIAAHNAKFDYKVSRGWGINRWQCKIWDTMTAAWVVEPERNNYSLDSLVAYTFDCSPTKYMEIVPKGATFDIVSLETATRYSGEDADFCIRLKHHLEPMLRKTESISLFEIXECPCXPFLRKWKERE

SEQ ID NO: 35715 - DNA, 663 bp, Unknown
  Obtained from environmental sample
  misc_feature (1)..(663): n is a, c, g, or t
gtggcaagcattatattttccgctatttccccgctttactggaacctgcttataataagcgtgttttttgtttccataaaattcaaatttccgctgtggataataatttttgtgatggcattagacataggctcaggctatgcaagccaaatggcttggaattccatgaaagaccatcagcgaagccgcatacttacatttgtggaccctatgcgagaccctaaaggcgaaggctatcaggttatacagtcgcaagtggcaataggcagcggcggtatgttcggcaagggttttggggaaggttcccaagtaaatctctcgttcttgccagaagaacacacggattttattttcagtgttttgggcgagcaatttggttttgcaggtacctttgtggttttggtcttgttttttatcttgctgtggcgaggtataatgatatgcaggctgcacgaaaataggtttgtgaatttggtggttgcaggcgcttgcacaattttatttttccacacttttgtaaatgtggctatgactataggctttatgccagttacggggcttccattgccatttttgtcttatggaggttcctttgttttaacctgcatgattttgataggtttaatgctgaatatgcgacttaaaggaaaagatataatataa

SEQ ID NO: 35716 - protein, 220 aa, Unknown
  Obtained from environmental sample
  DOMAIN (1)...(218): Cell cycle protein
  misc_feature (1)..(220): Xaa is any amino acid
MASIIFSAISPLYWNLLIISVFFVSIKFKFPLWIIIFVMALDIGSGYASQMAWNSMKDHQRSRILTFVDPMRDPKGEGYQVIQSQVAIGSGGMFGKGFGEGSQVNLSFLPEEHTDFIFSVLGEQFGFAGTFVVLVLFFILLWRGIMICRLHENRFVNLVVAGACTILFFHTFVNVAMTIGFMPVTGLPLPFLSYGGSFVLTCMILIGLMLNMRLKGKDII

SEQ ID NO: 35717 - DNA, 468 bp, Unknown
  Obtained from environmental sample
  misc_feature (1)..(468): n is a, c, g, or t
gtgcacaacaccctcacggcggcgcttagcacggcgaagcggaaaatctcaatccgccacctgtcggctatggaacagcggaaagacgaggcgataaagacaatgggggcggcatcgaaatacttccacgaccttgaggcattcgcgtcggagcttgccggaaagaaagtcaatatcggcaaggtgctggacaggcttttcccggcatcgagggagatgtcgctgcgccagcttaaaacaaaccgggaggtgaaagagctcatcaaaagcattttgaagcagaaagacgacttgcagaacttcaaaggcacggcatggggcgcttacaacgccatcgcggactaccgctcaaacgcgcagcccaagcggagaacggatacctatgcggacagcaagatggctatgttccttgacggggattcggtgatgaacgaagcccaggaaatcattatggagcttgcggcatag

SEQ ID NO: 35718 - protein, 155 aa, Unknown
  Obtained from environmental sample
  misc_feature (1)..(155): Xaa is any amino acid
MHNTLTAALSTAKRKISIRHLSAMEQRKDEAIKTMGAASKYFHDLEAFASELAGKKVNIGKVLDRLFPASREMSLRQLKTNREVKELIKSILKQKDDLQNFKGTAWGAYNAIADYRSNAQPKRRTDTYADSKMAMFLDGDSVMNEAQEIIMELAA

SEQ ID NO: 35719 - DNA, 831 bp, Unknown
  Obtained from environmental sample
  misc_feature (1)..(831): n is a, c, g, or t
gtgggatatattcccaaacggaaaatacccggaggtgcacccgccaattttgcatacaacgcttcacagttcggttttgaaagctatgttgtaagtgcagttggaaaagatntgctaggcgaagagattttgaaaatttttgcagaaaaagagcttggacttttggttgaaactgttaattatcccaccggaactgttaaggttgagttaaacgataaaggcattcccaaatatgagatatgcgaaaatgtcgcttgggacaatatccctttcacggagcgaacaaaagagctagcacagaactcttccgctgtttgctttggcacactcgcgcaacgaaatgaaacatcgcgcagaactattcgcagttttttggagcttgttccaaaaaatgcgctcaaaatttttgatataaatttaaggcagaatttttacagcaaaaaaataatacacgaatcattacagaattgcaacattttgaaaataaatgaagaagaggttattgaggtagctcgtttatttgaattagagaaaaaagacgaacaggaaatatgcttgtatttattgaaagaatataacctgaatattgttattgaaacaaaaggcagcattggcagttatgtgttcacaaaagacgaaacctcgtatttagacacaccaaaagtaaatgccatagataccgttggagcaggagattcttttgccggttcgtttgcaggtgctttgcttaaagggaaaagcataagggaagcacataaactggcagttgatgtttcctcttatatttgcaccaaacgcggtgcaatgcataaattaccttttccaccttaa

SEQ ID NO: 35720 - protein, 276 aa, Unknown
  Obtained from environmental sample
  DOMAIN (13)...(275): pfkB family carbohydrate kinase
  misc_feature (1)..(276): Xaa is any amino acid
MGYIPKRKIPGGAPANFAYNASQFGFESYVVSAVGKDXLGEEILKIFAEKELGLLVETVNYPTGTVKVELNDKGIPKYEICENVAWDNIPFTERTKELAQNSSAVCFGTLAQRNETSRRTIRSFLELVPKNALKIFDINLRQNFYSKKIIHESLQNCNILKINEEEVIEVARLFELEKKDEQEICLYLLKEYNLNIVIETKGSIGSYVFTKDETSYLDTPKVNAIDTVGAGDSFAGSFAGALLKGKSIREAHKLAVDVSSYICTKRGAMHKLPFPP

SEQ ID NO: 35721 - DNA, 789 bp, Unknown
  Obtained from environmental sample
  misc_feature (1)..(789): n is a, c, g, or t
atgaaagatgttttgactaacatagggaggagaaggaaaatgaagaagattatttttatcttgttattaaccggactgtgcgcggcagcattcgcgcagaataaaaccgattttgaatttaaccccgagggagggattattacaggatacaccggtttcgcccgtgatgttgtcatccccgagagaatcgacggcattccggtaacggctatcagtaattccgtgtttaaggacaaaaatttaaccagtgtatctattccggacaatattaagaatatcggccccaatgcctttaccggcaacaaactggaaaaagttataatcggcaatgaagttgatatgatgacatcggcgttttcgcccgagtttatcaataaataccttgaggaaccgcggagggcgggcgggacatatacgttcgcgggcgatacatgggactacaatcccgcgggtataaggtatctgacggaaaccgcgccggacgcttcacagcagccgcaaaacttaagcccgatcaatattgtcatccataactacgtgggtaaaccgcagcccgggcaattggcggaaggcgcgctgcccccgatggatacatcctctccttctccatttcaggccgcggccgcgccgcctgccagacaggccgtaggcaacgcgacagtaatgcccggcctgccggatcctaacaccaataagaggtaccgcctccaggtcggcgcgtttaccgatcagaatgccgcggcgcatacattcaggacccttcaggacgccggttttagtccggtctag

SEQ ID NO: 35722 - protein, 262 aa, Unknown
  Obtained from environmental sample
  SIGNAL (1)...(29)
  misc_feature (1)..(262): Xaa is any amino acid
MKDVLTNIGRRRKMKKIIFILLLTGLCAAAFAQNKTDFEFNPEGGIITGYTGFARDVVIPERIDGIPVTAISNSVFKDKNLTSVSIPDNIKNIGPNAFTGNKLEKVIIGNEVDMMTSAFSPEFINKYLEEPRRAGGTYTFAGDTWDYNPAGIRYLTETAPDASQQPQNLSPINIVIHNYVGKPQPGQLAEGALPPMDTSSPSPFQAAAAPPARQAVGNATVMPGLPDPNTNKRYRLQVGAFTDQNAAAHTFRTLQDAGFSPV

SEQ ID NO: 35723 - DNA, 747 bp, Unknown
  Obtained from environmental sample
  misc_feature (1)..(747): n is a, c, g, or t
ttgctcaaggatgcccaggatgtcgacgtgcaactgaagcagggaacgatgcccgagcctgagtttatgaaaataaaattgtccattacaatgcttaccattgtggctaattacctggtaaagaacaagatttatacgtcaatatttggaaagttgaacgagaacctgcttaacgaagcgagaaaagcaatgcacagatgccttgtttaccttgaagaggttgtcaccaatattgttgacgcgccgttttccgattacgcggaagggctttcaaagattgcggctgtcagcccccttcagcgtttttcccttgtcgagaaaatcggccagcagttaaataacctgaaagaagcttacggaaaaaattccaaatggacaaacgctattttagagtttgaagggcgttatgccgttgtcgcgaaaaatctgatcaatctgcgcgattattttgttaacagcgatttcgaatcgccgcattacgaacctaccgtccgtcacataaaaagggtcagggagcttctggagcaggccgcggacgggtatcggaaaaaatatgagctttcctcaaaagccattgatgattttcaaaaagccataaactacctttcagccttaaaacggctggatatttttaccggggatcaggaatcggcggtgacgacaaaaaagaaaattgaaacatggaccgccaagatgacggcggacgcggaaaagcagaaaaaagagcaggcggttgccagaaagtag

SEQ ID NO: 35724 - protein, 248 aa, Unknown
  Obtained from environmental sample
  misc_feature (1)..(248): Xaa is any amino acid
MLKDAQDVDVQLKQGTMPEPEFMKIKLSITMLTIVANYLVKNKIYTSIFGKLNENLLNEARKAMHRCLVYLEEVVTNIVDAPFSDYAEGLSKIAAVSPLQRFSLVEKIGQQLNNLKEAYGKNSKWTNAILEFEGRYAVVAKNLINLRDYFVNSDFESPHYEPTVRHIKRVRELLEQAADGYRKKYELSSKAIDDFQKAINYLSALKRLDIFTGDQESAVTTKKKIETWTAKMTADAEKQKKEQAVARK

SEQ ID NO: 35725 - DNA, 738 bp, Unknown
  Obtained from environmental sample
  misc_feature (1)..(738): n is a, c, g, or t
gtgattctgggcggcgggctccaatctgctcttgacgatgccggttttgacggcctggtgatcaagctgggctccggtttcgccggcctcacgggcgaaggttccctggtccgggccggggcggcggcggcggcggccgatcttctggcctggaccgtggccagggatttgggcggcctggagggcttggccggcttgcccggaacagtgggcggggcggtggcgggcaatgccggggcgggcccggaagggctgggccgggccgtgaccgggctttcagttctggaaggggacggccaggcgcgaaacattccggccggggatctcaatttcgcctaccggcgtctggcggggctcccggagggggcggtcatcctggcggccgaattcgccttgaagccccggccggccggggaagtccgggcgcgcctggcggagatgcgggagcggcgggccggtcagcccctggggggccgttcggccggctgcgtgttcaagaacccgcccgccctttccgccgggcggctcatcgacgaatgcggctttaaggggcggcgggtcgggggggccagggtgagcgaagtccacgccaatttcatcctggcggaaaacggggccacggccgcggatatcctggctctcatcgacctcgtgcgcgagggcgttctggcgcggcgcgggctggccttggaactggaactcaaggtcgtgggcgcggctggggggggaagggcatga

SEQ ID NO: 35726 - protein, 245 aa, Unknown
  Obtained from environmental sample
  DOMAIN (137)...(238): UDP-N-acetylenolpyruvoylglucosamine reductase, C-terminal domain
  misc_feature (1)..(245): Xaa is any amino acid
MILGGGLQSALDDAGFDGLVIKLGSGFAGLTGEGSLVRAGAAAAAADLLAWTVARDLGGLEGLAGLPGTVGGAVAGNAGAGPEGLGRAVTGLSVLEGDGQARNIPAGDLNFAYRRLAGLPEGAVILAAEFALKPRPAGEVRARLAEMRERRAGQPLGGRSAGCVFKNPPALSAGRLIDECGFKGRRVGGARVSEVHANFILAENGATAADILALIDLVREGVLARRGLALELELKVVGAAGGGRA

SEQ ID NO: 35727 - DNA, 357 bp, Unknown
  Obtained from environmental sample
  misc_feature (1)..(357): n is a, c, g, or t
atgtccatgttctcgatagtcggagtcattgcccttgtgggagttgtagtcaacaacggcattattctggtggactataccaacaccctaagatcgcgcggcctcaaagtgcaggaagcctgccttgaagccggacgcacacgtctgcgccccattttgatgaccagcctaaccaccattctgggtatgttcccaatcgccttcctcaccggagccggagcggaatccatccagccaatcggcaaaacctttgtcggcggtctttcggtcagcaccctaatgaccctgtttattatcccctcggtgtactctcttgtgaacagccgtcatgataagaaaagagcacgcctggcataa

SEQ ID NO: 35728 - protein, 118 aa, Unknown
  Obtained from environmental sample
  misc_feature (1)..(118): Xaa is any amino acid
MSMFSIVGVIALVGVVVNNGIILVDYTNTLRSRGLKVQEACLEAGRTRLRPILMTSLTTILGMFPIAFLTGAGAESIQPIGKTFVGGLSVSTLMTLFIIPSVYSLVNSRHDKKRARLA

SEQ ID NO: 35729 - DNA, 318 bp, Unknown
  Obtained from environmental sample
  misc_feature (1)..(318): n is a, c, g, or t
atgggaattaccagatcgacggtcatggttggtcaaaagccacctaaagaagctataagagaagccagaaaagctgcccggcggcctataaattatacagaggaagcccccctgtccagcccggaagctttaaaagaattcgcgcgcttggcggctgaacgcaatcggcgtaaaaagaaacagacaataacgattcgcatcgctccggacgttttagaaagttacaaaacaatgggcgaaggttacaccggcattatggccgatgtacttaaatacgccgtcaacaatccggctgttcttgctaacgccacaaagtaa

SEQ ID NO: 35730 - protein, 105 aa, Unknown
  Obtained from environmental sample
  misc_feature (1)..(105): Xaa is any amino acid
MGITRSTVMVGQKPPKEAIREARKAARRPINYTEEAPLSSPEALKEFARLAAERNRRKKKQTITIRIAPDVLESYKTMGEGYTGIMADVLKYAVNNPAVLANATK

SEQ ID NO: 35731 - DNA, 336 bp, Unknown
  Obtained from environmental sample
  misc_feature (1)..(336): n is a, c, g, or t
atgtgttactttttaactatgaagatggtcggcattgaatgggacgatgataaaaacattctcaataagcagttacatgacttgagttttgaaaccgcccaatatgtatttgccgatccagagaggcttgagcgctttgacagaagtaaaagcaatatgtcgggagaagaacgatggcagacattaggaaaagtcgggcccgttcttttcgtagtttatactgagcgcggggaaaacaagcggattatcaccgcacgcccggcagataaaacagagaggagaagctatcatgggaattaccagatcgacggtcatggttggtcaaaagccacctaa

SEQ ID NO: 35732 - protein, 111 aa, Unknown
  Obtained from environmental sample
  DOMAIN (10)...(99): Protein of unknown function (DUF497)
  misc_feature (1)..(111): Xaa is any amino acid
MCYFLTMKMVGIEWDDDKNILNKQLHDLSFETAQYVFADPERLERFDRSKSNMSGEERWQTLGKVGPVLFVVYTERGENKRIITARPADKTERRSYHGNYQIDGHGWSKAT

SEQ ID NO: 35733 - DNA, 402 bp, Unknown
  Obtained from environmental sample
  misc_feature (1)..(402): n is a, c, g, or t
ttgacaccattaccnggctctacaaacacggcgcttgataattttaaggtcgttgacgaacaggtacgcgccgtttcagaacaggaaaccaatatttacaccgcaatggaagaacagggacgcggaagcaagcagatacatgaagccataagcaagctgaaagatttaactcaaatggttaaacacggttcgacggagatgctggatggcagtaaagaagtcattatggaaagcagaaatcttgaaaaagcgactgtggaaatttccaccggtatgaatgaaattgtaaacggggcggaaaagataaattcctcggtaaaccaggtggaagcaataagcaaaacaaataaagactgtattgacaccttgttcagcgaagtttcaaaatttaaggtagattga

SEQ ID NO: 35734 - protein, 133 aa, Unknown
  Obtained from environmental sample
  misc_feature (1)..(133): Xaa is any amino acid
MTPLPGSTNTALDNFKVVDEQVRAVSEQETNIYTAMEEQGRGSKQIHEAISKLKDLTQMVKHGSTEMLDGSKEVIMESRNLEKATVEISTGMNEIVNGAEKINSSVNQVEAISKTNKDCIDTLFSEVSKFKVD

SEQ ID NO: 35735 - DNA, 642 bp, Unknown
  Obtained from environmental sample
  misc_feature (1)..(642): n is a, c, g, or t
ttggcagctcaagctcccactggtcccgctcaacctcctgtcagagcgcgttatccggctaacacggaaattattgctatcggtatcagtacaggcggacctgacgcgttacgcgtagtattcgccaatatagacgccgatttaaaagtaccgattgtcgtagttcagcacatgccggcagggtttacaaatgaatttgcaaagagccttgaccgtatttgcccgttagatgtaaaagaggcggaagacggtgatgaaattagacctggtagaattcttatcgcgcagggcaacaaacatcttgaagtagaaaaaaaagggagcgacaacgcggttgcccgtctttccgactctccacaggtttcgggacacagaccttcggcggacgtgcttttcgcgtcagttgcaatggcgtttacaaatcacgtgcttggagtaatcatgacgggtatgggacgcgacggagcgcagcacttgggtacaatttacagagaaggcggcatgacgctcggtcaggatgaagccagcgcggtcgtttacggaatgccccgtgtcgcttatgagttgggtcatgttatggagcaggtttctttgaataatatggcgcggcgtatttgtgatgtggcgaaacagaagcgttaa

SEQ ID NO: 35736 - protein, 213 aa, Unknown
  Obtained from environmental sample
  DOMAIN (24)...(208): CheB methylesterase
  misc_feature (1)..(213): Xaa is any amino acid
MAAQAPTGPAQPPVRARYPANTEIIAIGISTGGPDALRVVFANIDADLKVPIVVVQHMPAGFTNEFAKSLDRICPLDVKEAEDGDEIRPGRILIAQGNKHLEVEKKGSDNAVARLSDSPQVSGHRPSADVLFASVAMAFTNHVLGVIMTGMGRDGAQHLGTIYREGGMTLGQDEASAVVYGMPRVAYELGHVMEQVSLNNMARRICDVAKQKR

SEQ ID NO: 35737 - DNA, 432 bp, Unknown
  Obtained from environmental sample
  misc_feature (1)..(432): n is a, c, g, or t
ttgtgccctatcgcgtcttgcaacggctccaccgtgagcgccacgtcggagagaatctcgcgcatcagcctgtcttgcaggtgcctcgacgtgacgaattttccctccgttccggcgaagggggaatcgttggggatgaagttcatggatatggtgggcgggtcgatctctatcggaggcaacgggttcgggttctcagggtcggtgaacgtgacgccaaccgtcacctcgtccataccggccacagccacgatgttccccaccgacgcgatgtccgtgggcactttctgtacgccctcgaaagcaaagactttggtgatacgcgccggaaccatgctgccgtcgcgcatacataccgatatctccttgtttacgttgagcgttccggcggtgattttgcctatgcccaagcgccccatgtactgggagtag

SEQ ID NO: 35738 - protein, 143 aa, Unknown
  Obtained from environmental sample
  misc_feature (1)..(143): Xaa is any amino acid
MCPIASCNGSTVSATSERISRISLSCRCLDVTNFPSVPAKGESLGMKFMDMVGGSISIGGNGFGFSGSVNVTPTVTSSIPATATMFPTDAMSVGTFCTPSKAKTLVIRAGTMLPSRIHTDISLFTLSVPAVILPMPKRPMYWE

SEQ ID NO: 35739 - DNA, 696 bp, Unknown
  Obtained from environmental sample
  misc_feature (1)..(696): n is a, c, g, or t
atgatggtagggggggtaagcgtttccctggagattaagcgtgacaaacccgccccgcgcaggaagcccctgctggaaattcacggccttggcagtctgggcgaggaaggcgagcccgtgcttgacggcgttaatttctccctgtacggcggtgaaattctcggcgtcgccggcatcgcgggcagcggccagaaagaactctgcgaaataatagcgggcctgcggaaatccgattccggggacattctttttcagggcgacagcatttgccttctttcaccccgtgagatatcggatcgcggcgtttcgatgagcttcgtcccggaagacaggctcggcatggggcttgccggcggcatgagcatttcagccaatatcctcttgcgttcttatgataaaaatccgggccttttcgttgactatgcgtcaggggatcttttggccgggaaaattgtcagggattatgacatttccaccccttcgatccgccagataataaggaaactttcaggagggaatatccagaaagtcctgcttggcagggagatacatttttcgccaaaagttcttattaccgcgtatcctgtgcgggggctggacgtaggcgcgtcttattttatttataacctgttggacgagcagaggaaaaaaggcgttgccgttttgtatattcggcgaagacctgggacgtgttaa

SEQ ID NO: 35740 - protein, 231 aa, Unknown
  Obtained from environmental sample
  DOMAIN (51)...(229): ABC transporter
  misc_feature (1)..(231): Xaa is any amino acid
MMVGGVSVSLEIKRDKPAPRRKPLLEIHGLGSLGEEGEPVLDGVNFSLYGGEILGVAGIAGSGQKELCEIIAGLRKSDSGDILFQGDSICLLSPREISDRGVSMSFVPEDRLGMGLAGGMSISANILLRSYDKNPGLFVDYASGDLLAGKIVRDYDISTPSIRQIIRKLSGGNIQKVLLGREIHFSPKVLITAYPVRGLDVGASYFIYNLLDEQRKKGVAVLYIRRRPGTC

SEQ ID NO: 35741 - DNA, 852 bp, Unknown
  Obtained from environmental sample
  misc_feature (1)..(852): n is a, c, g, or t
gtgattaaagggcggcttgtcccttccccggcttccggccaggcggtggaagtcgccgctaactccattgtcatactcggggaagctccggcggatagccgggataattatcccggctatccgttgcagaaaaaacaccactcaatggaatttctgcgtgagatcgcccatttaagacccaggacaaacaccttcggcgccgtactcagacttcgcagccgcatggcctttgccatccatgaatattttaaagaacatggatttcaatatatacacacaccgataattacagccggcgacgccgaaggcgcaggggcgatgttccaggtgacgacgcttgatcttgaagcggcggcgaaaaccggaggcgcctatggtagtaccggaaaaattgactatgacagggattttttcggcaaaaaaacttttcttaccgtttcaggccagcttgaggcggagacctgcgccacggccctttcccgcgtatatacgttcggcccgactttccgcgcggaaaactccaatactacccgtcatcttgccgaattctggatggttgagcccgaaatagccttcgccgatcttggagacgatatggcgttagccgaagattttttgaaattcatctttaagaaagcgcttgacgactgtattgaagaccttaaattttttgacgcgcacatagagaaaggcgtaattgataccttaacgcaggtggtgaattcaaaattcgcccatatcacctacacggacgccgttggagagctggaaaaagcggtaaaagccggaacggtttttgagttcaacccgagtggggctgtgatctgcaaagcgagcatgaaaaatacctga

SEQ ID NO: 35742 - protein, 283 aa, Unknown
  Obtained from environmental sample
  DOMAIN (48)...(282): tRNA synthetases class II (D, K and N)
  misc_feature (1)..(283): Xaa is any amino acid
MIKGRLVPSPASGQAVEVAANSIVILGEAPADSRDNYPGYPLQKKHHSMEFLREIAHLRPRTNTFGAVLRLRSRMAFAIHEYFKEHGFQYIHTPIITAGDAEGAGAMFQVTTLDLEAAAKTGGAYGSTGKIDYDRDFFGKKTFLTVSGQLEAETCATALSRVYTFGPTFRAENSNTTRHLAEFWMVEPEIAFADLGDDMALAEDFLKFIFKKALDDCIEDLKFFDAHIEKGVIDTLTQVVNSKFAHITYTDAVGELEKAVKAGTVFEFNPSGAVICKASMKNT

SEQ ID NO: 35743 - DNA, 300 bp, Unknown
  Obtained from environmental sample
  misc_feature (1)..(300): n is a, c, g, or t
atgaagcaaaatgacgacggcaaaaccgtgcgggcaatggatgtgctggttccccggttaggtgaaattatcggcggttcccagcgcgaggaaaatctggaaaaactgtgccgccgtatgcttgaaatggggatgaaactggaagattacgcctggtaccttgatacccgccgctacggaaccgttcctcacgcgggctttggtctgggctttgagcggcttattcaatacataaccggcatggcgaatatcagggatgttataccctatccgcgcgccgtgggacaggcagacttttga

SEQ ID NO: 35744 - protein, 99 aa, Unknown
  Obtained from environmental sample
  misc_feature (1)..(99): Xaa is any amino acid
MKQNDDGKTVRAMDVLVPRLGEIIGGSQREENLEKLCRRMLEMGMKLEDYAWYLDTRRYGTVPHAGFGLGFERLIQYITGMANIRDVIPYPRAVGQADF

SEQ ID NO: 35745 - DNA, 345 bp, Unknown
  Obtained from environmental sample
  misc_feature (1)..(345): n is a, c, g, or t
ttgagaaagatttcattttatttcctgttattaatcctctgcggcgcgcatctctttccgcagagtatcctggcgccctatctcgctaccgcgccggaaattgcgtcgcaggcggcggttcttctggatgcggaaacgggatctgttctctacgcaaaanatcccgatgaggaaatttccccggcgtccctgaccaaactgatgaccatgcatctggtactgaaagaagttgacgcangcagagtctcgcttgatgaaattattccngtcangacggaaagctgggcgctcaagcagccccccccgttccagcctgaatgttcctggcgcgggggcagattgtaa

SEQ ID NO: 35746 - protein, 114 aa, Unknown
  Obtained from environmental sample
  SIGNAL (1)...(25)
  misc_feature (1)..(114): Xaa is any amino acid
MRKISFYFLLLILCGAHLFPQSILAPYLATAPEIASQAAVLLDAETGSVLYAKXPDEEISPASLTKLMTMHLVLKEVDAXRVSLDEIIPVXTESWALKQPPPFQPECSWRGGRL

SEQ ID NO: 35747 - DNA, 918 bp, Unknown
  Obtained from environmental sample
  misc_feature (1)..(918): n is a, c, g, or t
atgaaaattctgcttgttaccagaggctcacagggagacacctttccctatctcaggctggctttggagttaaaaaaccgcggtcattctgttaccatcaacctacccagcgtctttgaaaaagagggaaaaaatataggagtccgcgttattccccaggtttccgatgatgttccgggtgtgctggaagaatctcccggtaccagaaatcttttggaatggaccacacgggtaattgacagccagttcagggaacttattcccctgttaaaagaaaatgatataatgattgcgtctaacactgaattcgccgcgggaagcattgccgaatactgcggtaaaccgctaatccgcaccgcgtacgcccctttacttcccagccgtaccataccgccgccggttttcccctggcccaagcctaatcccctgattagacccgtcattctctggtggtttattaacagcgggcttaaccttatggtaaagaagacgctcaataaaaaacggaaagccctgggcttgacgcccgtcaaggatcagggtgaacacgagccggcgacagcgtttaattatctggtatacagcaaatatcttggcactgttgacaacaagtggaaataccaatggaaagccggcggctattgttttaatgatttgctcccctacaacaaggaagaactggaaaaaattaccggtttcattaaaggcgacggtaaagacaagcgccctacgatctttttttcccttggaagcatccatgtagacaggggggacagattcgccgaaatgctgcttgatatctgtaccgcccataattacaaactgctggtagcctgcggctggtggcattgtagcgctcatctgcaaaaaaaggaaaaatctttaccgcatggattgcgttattcccccattgtttga

SEQ ID NO: 35748 - protein, 305 aa, Unknown
  Obtained from environmental sample
  DOMAIN (3)...(131): Glycosyltransferase family 28 N-terminal domain
  misc_feature (1)..(305): Xaa is any amino acid
MKILLVTRGSQGDTFPYLRLALELKNRGHSVTINLPSVFEKEGKNIGVRVIPQVSDDVPGVLEESPGTRNLLEWTTRVIDSQFRELIPLLKENDIMIASNTEFAAGSIAEYCGKPLIRTAYAPLLPSRTIPPPVFPWPKPNPLIRPVILWWFINSGLNLMVKKTLNKKRKALGLTPVKDQGEHEPATAFNYLVYSKYLGTVDNKWKYQWKAGGYCFNDLLPYNKEELEKITGFIKGDGKDKRPTIFFSLGSIHVDRGDRFAEMLLDICTAHNYKLLVACGWWHCSAHLQKKEKSLPHGLRYSPIV

SEQ ID NO: 35749 - DNA, 699 bp, Unknown
  Obtained from environmental sample
  misc_feature (1)..(699): n is a, c, g, or t
atgatccaattcatgcacgtaagcaaagagtacgaaggcggcttccgcgcgctcgacgccctctctttcttnatcgacaaagcagaattcgtcttcttgactggagcaagcggcgccggcaagaccacgctcctcaaacacatatacatggaggagcgcccgtccaccggtcaagtgctggtatgcggctacgactcccgcagcgtgacccacaacgatatcccctatctgcgccgcaaactgggcatcgtcttccaagacttcagactcctccacgaccgcaacgtcttcgaaaacgtggccttcgctctgcgggtgaccggcacgccggaacgcgaggtaaaacgcaaggtcttcaaagtgctggcgcaaaccggcctcagccacaaaagctcgaattttcccaaccaactctccggcggcgaacagcagcgcgtctccatagcgcgggcgatagtcaacgaaccgtgggtgctcttggccgacgagccgaccggcaacttagaccaagccgtatccaaagacatattcgaactattgcaacgaataaactcatggggcacaaccgtcataatggccacccacgacatgaacctaatagcgccctatcactatcgggtcatagagttgcataggggtacattgataaaaggtgcggatgcgacactgaagcctaaatttgtaagcggtatcttttga

SEQ ID NO: 35750 - protein, 232 aa, Unknown
  Obtained from environmental sample
  DOMAIN (28)...(213): ABC transporter
  misc_feature (1)..(232): Xaa is any amino acid
MIQFMHVSKEYEGGFRALDALSFXIDKAEFVFLTGASGAGKTTLLKHIYMEERPSTGQVLVCGYDSRSVTHNDIPYLRRKLGIVFQDFRLLHDRNVFENVAFALRVTGTPEREVKRKVFKVLAQTGLSHKSSNFPNQLSGGEQQRVSIARAIVNEPWVLLADEPTGNLDQAVSKDIFELLQRINSWGTTVIMATHDMNLIAPYHYRVIELHRGTLIKGADATLKPKFVSGIF

SEQ ID NO: 35751 - DNA, 699 bp, Unknown
  Obtained from environmental sample
  misc_feature (1)..(699): n is a, c, g, or t
gtgctgttcgtggttaattttgcagttgattttttaagatacatcttcacaaaagtaaaaagctatgatccaattcatgcacgtaagcaaagagtacgaaggcggcttccgcgcgctcgacgccctctctttcttnatcgacaaagcagaattcgtcttcttgactggagcaagcggcgccggcaagaccacgctcctcaaacacatatacatggaggagcgcccgtccaccggtcaagtgctggtatgcggctacgactcccgcagcgtgacccacaacgatatcccctatctgcgccgcaaactgggcatcgtcttccaagacttcagactcctccacgaccgcaacgtcttcgaaaacgtggccttcgctctgcgggtgaccggcacgccggaacgcgaggtaaaacgcaaggtcttcaaagtgctggcgcaaaccggcctcagccacaaaagctcgaattttcccaaccaactctccggcggcgaacagcagcgcgtctccatagcgcgggcgatagtcaacgaaccgtgggtgctcttggccgacgagccgaccggcaacttagaccaagccgtatccaaagacatattcgaactattgcaacgaataaactcatggggcacaaccgtcataatggccacccacgacatgaacctaatagcgccctatcactatcgggtcatagagttgcatag

SEQ ID NO: 35752 - protein, 232 aa, Unknown
  Obtained from environmental sample
  misc_feature (1)..(232): Xaa is any amino acid
MLFVVNFAVDFLRYIFTKVKSYDPIHARKQRVRRRLPRARRPLFLXRQSRIRLLDWSKRRRQDHAPQTHIHGGAPVHRSSAGMRLRLPQRDPQRYPLSAPQTGHRLPRLQTPPRPQRLRKRGLRSAGDRHAGTRGKTQGLQSAGANRPQPQKLEFSQPTLRRRTAARLHSAGDSQRTVGALGRRADRQLRPSRIQRHIRTIATNKLMGHNRHNGHPRHEPNSALSLSGHRVA

SEQ ID NO: 35753 - DNA, 366 bp, Unknown
  Obtained from environmental sample
  misc_feature (1)..(366): n is a, c, g, or t
atgtcgtgggtggccattatgacggttgtgccccatgagtttattcgttgcaatagttcgaatatgtctttggatacggcttggtctaagttgccggtcggctcgtcggccaagagcacccacggttcgttgactatcgcccgcgctatggagacgcgctgctgttcgccgccggagagttggttgggaaaattcgagcttttgtggctgaggccggtttgcgccagcactttgaagaccttgcgttttacctcgcgttccggcgtgccggtcacccgcagagcgaaggccacgttttcgaagacgttgcggtcgtggaggagtctgaagtcttggaagacgatgcccagtttgcggcgcagatag

SEQ ID NO: 35754 - protein, 121 aa, Unknown
  Obtained from environmental sample
  DOMAIN (34)...(72): Protein of unknown function (DUF1602)
  misc_feature (1)..(121): Xaa is any amino acid
MSWVAIMTVVPHEFIRCNSSNMSLDTAWSKLPVGSSAKSTHGSLTIARAMETRCCSPPESWLGKFELLWLRPVCASTLKTLRFTSRSGVPVTRRAKATFSKTLRSWRSLKSWKTMPSLRRR

SEQ ID NO: 35755 - DNA, 741 bp, Unknown
  Obtained from environmental sample
  misc_feature (1)..(741): n is a, c, g, or t
atggggatccgatgccttagccccccctttacggacccccggatttaccacggggattacgccgagtggattgagctgatagcggaagttgtcaatggttacggcgttcaaaacgaccccaaaatacttgaaataggcggggaaaccggcgtcgtcgtttcgttactaaagggaatgggatatcgctacacggcctccgatttgtcgttcgccatgtgcagggaggcgaaaaaccggcgcggagtgccggcttgcgccgccgacgcgcgccgcctgccgtttagacagtgcttngacgtcgcgctgttcctatacgacggcataaactacatgatgacgctcgacgagtaccgcaggctcttcgcttccgtatacgacgttttgctccccgacggcctattcttattcgacatcaccacgcaggaaaattcgctgaggcactttatacactacatagactttgaggactacggcgacgtcagctacgtccgccgcagctacttcgacgacataaggctgatccagcacaacgacttcaccatctaccgcttgtcggacgactgtcatccctactacgagaagtttatagagacgcacgtgcaaaagattttttccgtaccggagatagagaaagccatccccaagacgcggttcgaagtgctcggtatatgggacggattcatgttcaaaaagtattctaataaatcgctccgaatacattttttattacgccgcctttga

SEQ ID NO: 35756 - protein, 246 aa, Unknown
  Obtained from environmental sample
  DOMAIN (43)...(136): Methyltransferase domain
  misc_feature (1)..(246): Xaa is any amino acid
MGIRCLSPPFTDPRIYHGDYAEWIELIAEVVNGYGVQNDPKILEIGGETGVVVSLLKGMGYRYTASDLSFAMCREAKNRRGVPACAADARRLPFRQCXDVALFLYDGINYMMTLDEYRRLFASVYDVLLPDGLFLFDITTQENSLRHFIHYIDFEDYGDVSYVRRSYFDDIRLIQHNDFTIYRLSDDCHPYYEKFIETHVQKIFSVPEIEKAIPKTRFEVLGIWDGFMFKKYSNKSLRIHFLLRRL

SEQ ID NO: 35757 - DNA, 1524 bp, Unknown
  Obtained from environmental sample
  misc_feature (1)..(1524): n is a, c, g, or t
gtggatatttcaggcttgccgaaggagcgtcagggaaagcgcgtgacagggtgcgggctgcttttagaaattcgggaattcagttttccgctggacaggattttaattaatcttgctcccgcaggaatgaaaaaagacggagccgctcttgatctgccaatcgcgctttccgtaatgtctgcggcgggaataatcactatttcgggagacctgctcgtcatgggagagcttgaattgtccggcaggattcgccccgtgcgcggcgttcttgcggcagtgtctgcgggacttgccgaagggatacgcgaatttatcgttcccgcgcaaaattctgcggaagcggcgattctgactgataagggtatgcgttttaccgccgcggaaaatttacaaggcgcggtacacgcgctgattatgagagaaaaaaacggcgtccttcccgaatcacttgacgaagttttttcatcagccgcaccgatagcggcggatgcggtaaatttgtcagttaacgcggcggcggtaggggaagagtacggcgattttgctgatgttcgtgggcagacaatttataaacgggctttggaaattgccgccgcaggtggacacaatatgcttgtttttggtccgcccggcgcgggaaagacaatgcttgcgcggagattgccgtcaatcatgaccccgctcactcccgatgaggctgtggaagtgacgcgtcttcacagtcttgcaggaccgcgcaatggttttatcgacagactaattacaagccctccttttcgcgctccacatcataccgcaagcgcggagggtattctcggtggtggaagaattccgcgcccgggagaaatcagtcttgcccattttggcgtactgttcctcgatgaagcgcctgagttcagaatcaatgttttgcaagcccttcgcgaaccgctggaagacagggtaataagcattgtcagagcggaagggccggtgcgtcttccggcggaatttcaattactgctaaccgcaaattcctgccgttgcggacgatttggtttacgtggcacggaaaacgcgtgcctttgcacaccggaagaaatcaaccgttactggcgcaagtttgggggcgcgcttcttgaccgtgtggagataagagccgctgttctgccgccaaagattgaagagatgggcgtacacaacaattcaagcggtggggaaaacagcgccgccatttcaaaaagggtcagggcggcagttgaaatacaacgggagcgttttaaagggacgggtattcgccgtaacgccatgcttcctgtggtaaaaacagccaccctttgcccgatgagtgaaaaagccaagaatacgcttcactccgctgtttcaaagctggggctttcaggcagggcttaccacgggattttacgggtagcccgaacagttgctgaccttgaaggtaaggatgttcttgaaactgaacacatactggaggcggttcatcaccgtcgcttgggggaagatccttgggacattctttcagtttaa

SEQ ID NO: 35758 - protein, 507 aa, Unknown
  Obtained from environmental sample
  DOMAIN (184)...(341): Sigma-54 interaction domain
  misc_feature (1)..(507): Xaa is any amino acid
MDISGLPKERQGKRVTGCGLLLEIREFSFPLDRILINLAPAGMKKDGAALDLPIALSVMSAAGIITISGDLLVMGELELSGRIRPVRGVLAAVSAGLAEGIREFIVPAQNSAEAAILTDKGMRFTAAENLQGAVHALIMREKNGVLPESLDEVFSSAAPIAADAVNLSVNAAAVGEEYGDFADVRGQTIYKRALEIAAAGGHNMLVFGPPGAGKTMLARRLPSIMTPLTPDEAVEVTRLHSLAGPRNGFIDRLITSPPFRAPHHTASAEGILGGGRIPRPGEISLAHFGVLFLDEAPEFRINVLQALREPLEDRVISIVRAEGPVRLPAEFQLLLTANSCRCGRFGLRGTENACLCTPEEINRYWRKFGGALLDRVEIRAAVLPPKIEEMGVHNNSSGGENSAAISKRVRAAVEIQRERFKGTGIRRNAMLPVVKTATLCPMSEKAKNTLHSAVSKLGLSGRAYHGILRVARTVADLEGKDVLETEHILEAVHHRRLGEDPWDILSV

SEQ ID NO: 35759 - DNA, 366 bp, Unknown
  Obtained from environmental sample
  misc_feature (1)..(366): n is a, c, g, or t
gtgcagggacacgattatgtaaagatggcgacaagcgtaattgattatgttttccgcgatcttgcgattagctatcttaaacgcagtgacttggggcaggtaaaaccggaagaccttgtcgccaccgcgatgaagagcgaaacggaaacgccggatcaaaaagggcgcggcgaaaaaaacagcgcgggtttcagacccaacagcgtcacggttccggcggttaagcccgtgaagcaacagcctcaggggggagggaccccctccccactagggaaacgctcccaagggattagcgtattcatcagccgtggcccagccgcagactcaagtcgcggtaatggaaagctcttatccgcaggaaaatga

SEQ ID NO: 35760 - protein, 121 aa, Unknown
  Obtained from environmental sample
  misc_feature (1)..(121): Xaa is any amino acid
MQGHDYVKMATSVIDYVFRDLAISYLKRSDLGQVKPEDLVATAMKSETETPDQKGRGEKNSAGFRPNSVTVPAVKPVKQQPQGGGTPSPLGKRSQGISVFISRGPAADSSRGNGKLLSAGK

SEQ ID NO: 35761 - DNA, 909 bp, Unknown
  Obtained from environmental sample
  misc_feature (1)..(909): n is a, c, g, or t
atgcttaaggcaaaatctttacttccggaggccattgccgccgcagaggacgcggttaaaacagccntgaacctggaaggagtttttaccccctggactcttggcagggattttgttgaaaaaattcttcacattccggaatctacatggtcgctgccgggcttcagcctgcttaagcacattggctttagcgcggaggatattgcggacgctgaactgtacgcatgcggaaccatggggcttgaaaacgccccgggcctgaaaaaagagcattacgcggtttttgacaccgcgactccgtccggcaagaacggcaagcgctcaatctcatggacggcccatatcggaatgatggcggcggtgcagccttttatttccggggctatttcaaagaccatcaatatgcccaactcggcaaactacgaagacgtgaaaggcgcgtatatgctttcatggaagcacgccctgaaagcggtggccctgtaccgtgacgggtcaaaactttcacagccgctttcatcgtttgctcccggaaccgatcccttagctgacaccatactcaaggttgaacggggttttgatataccgatgccgcaggttgtcgaccggaaaacccctgcacgggggctgcgaaggctcctgccaagccgcagaatgggttacacacagaaagcgaaaataagcagccatacaatttacatccgcaccggcgagtacgaagacggcagtcttggcgaaatttttcttgacatgcaccgtgagggcgcggccttccgcagcctcctgaacagttttgccattactgtctcgcttggattgcagtacggcgtgccgctggaagaatacgttgacgctttaactttcagccgcttgagccgaacggcctggtgcagggacacgattatgtaa

SEQ ID NO: 35762 - protein, 302 aa, Unknown
  Obtained from environmental sample
  misc_feature (1)..(302): Xaa is any amino acid
MLKAKSLLPEAIAAAEDAVKTAXNLEGVFTPWTLGRDFVEKILHIPESTWSLPGFSLLKHIGFSAEDIADAELYACGTMGLENAPGLKKEHYAVFDTATPSGKNGKRSISWTAHIGMMAAVQPFISGAISKTINMPNSANYEDVKGAYMLSWKHALKAVALYRDGSKLSQPLSSFAPGTDPLADTILKVERGFDIPMPQVVDRKTPARGLRRLLPSRRMGYTQKAKISSHTIYIRTGEYEDGSLGEIFLDMHREGAAFRSLLNSFAITVSLGLQYGVPLEEYVDALTFSRLSRTAWCRDTIM

SEQ ID NO: 35763 - DNA, 372 bp, Unknown
  Obtained from environmental sample
  misc_feature (1)..(372): n is a, c, g, or t
atgatacaagtggaatccttcctgaatgtggcggataattcaggagccaagcgcgcccaatgcatcaaggtgcttggcggcagcaagcggcgttacgcgggcattggggatataatcgtcgtggcgataaaggaagccctgccgacctcggctattaaaaaaggatcggtcgagaaggcggtgatagtgcggacccacaaggagtacaggcggcccgacggaacctatatccggttcagcgacaacgcctgcgtaattattgacgccgcgttgaatcccaagggaaagcgcattttcgggccggtggcgcgggaactgcgcgagaagggcgagtttatgaaaatagtgtcccttgcgccggaggtattgtaa

SEQ ID NO: 35764 - protein, 123 aa, Unknown
  Obtained from environmental sample
  DOMAIN (1)...(123): Ribosomal protein L14p/L23e
  misc_feature (1)..(123): Xaa is any amino acid
MIQVESFLNVADNSGAKRAQCIKVLGGSKRRYAGIGDIIVVAIKEALPTSAIKKGSVEKAVIVRTHKEYRRPDGTYIRFSDNACVIIDAALNPKGKRIFGPVARELREKGEFMKIVSLAPEVL

SEQ ID NO: 35765 - DNA, 363 bp, Unknown
  Obtained from environmental sample
  misc_feature (1)..(363): n is a, c, g, or t
gtgtatcgccgcttctatctcgataattccgccccggtcctgctggttcttgcgcttttttgcctttttaacaatgttggcgccttccactatgacgcggtccttatcgcggagtatcttgagtatcctgcccttttttcccttgtccttaccggcgattatctcaacggtgtcttcttttttcagtttaaatttatgcgctgcttctgccataattacaatacctccggcgcaagggacactattttcataaactcgcccttctcgcgcagttcccgcgccaccggcccgaaaatgcgctttcccttgggattcaacgcggcgtcaataattacgcaggcgttgtcgctgaaccggatatag

SEQ ID NO: 35766 - protein, 120 aa, Unknown
  Obtained from environmental sample
  SIGNAL (1)...(28)
  misc_feature (1)..(120): Xaa is any amino acid
MYRRFYLDNSAPVLLVLALFCLFNNVGAFHYDAVLIAEYLEYPALFSLVLTGDYLNGVFFFQFKFMRCFCHNYNTSGARDTIFINSPFSRSSRATGPKMRFPLGFNAASIITQALSLNRI

SEQ ID NO: 35767 - DNA, 324 bp, Unknown
  Obtained from environmental sample
  misc_feature (1)..(324): n is a, c, g, or t
atggcagaagcagcgcataaatttaaactgaaaaaagaagacaccgttgagataatcgccggtaaggacaagggaaaaaagggcaggatactcaagatactccgcgataaggaccgcgtcatagtggaaggcgccaacattgttaaaaaggcaaaaaagcgcaagaaccagcaggaccggggcggaattatcgagatagaagcggcgatacacagttcgaacctgatgataatctgcaagaaatgcggaccaacgcgcataggatataaaattgacggagacgttaaaacaagagtgtgcaggaaatgcggggaggcgttgtaa

SEQ ID NO: 35768 - protein, 107 aa, Unknown
  Obtained from environmental sample
  DOMAIN (10)...(43): KOW motif
  misc_feature (1)..(107): Xaa is any amino acid
MAEAAHKFKLKKEDTVEIIAGKDKGKKGRILKILRDKDRVIVEGANIVKKAKKRKNQQDRGGIIEIEAAIHSSNLMIICKKCGPTRIGYKIDGDVKTRVCRKCGEAL

SEQ ID NO: 35769 - DNA, 534 bp, Unknown
  Obtained from environmental sample
  misc_feature (1)..(534): n is a, c, g, or t
gtgcaggaaatgcggggaggcgttgtaatggcggataaatacgtacctcggctgaaaaagatatacaaggaacagatagcccccgagctttttaaggaattcagctataagtcgccaatgcagatcccaaaactggaaaagattgtggtgagcatgggggtgggcgaggcgctggtaaacaagaaactccttgacgaggctatctctacgctgacacagataaccggccagaaggcggtcaagaccaaggcgaagaagagcatcgcgaatttcaagatcagggcggggcaggaaataggggcgaaagtgacgcttcgcggatcgatgatgtacgaatttttcgaccgcctggtgaatgtcgcgcttccccgcgtcaaagacttccggggtatcagccaaaacgcctttgacgggcacggaaattattcgatggggatagaggaacagatcatcttccctgaaattgactttgacaaaatagaaaaggtaaccgggttgaatgtttgcattgtgacaacggcngaggaccgatga

SEQ ID NO: 35770 - protein, 177 aa, Unknown
  Obtained from environmental sample
  DOMAIN (38)...(94): Ribosomal protein L5
  misc_feature (1)..(177): Xaa is any amino acid
MQEMRGGVVMADKYVPRLKKIYKEQIAPELFKEFSYKSPMQIPKLEKIVVSMGVGEALVNKKLLDEAISTLTQITGQKAVKTKAKKSIANFKIRAGQEIGAKVTLRGSMMYEFFDRLVNVALPRVKDFRGISQNAFDGHGNYSMGIEEQIIFPEIDFDKIEKVTGLNVCIVTTAEDR

SEQ ID NO: 35771 - DNA, 855 bp, Unknown
  Obtained from environmental sample
  misc_feature (1)..(855): n is a, c, g, or t
atggtggatttcatagcaaaggaagtggataactatctgcacaaaaatccagaaagcgcaaagattattcaagagaggattgcccaaaacgaaagggaaagaaaggaaattgccggagttcgcaagttggcaaacgagagggcaaaaaaggcggctgttcataaccgcaaattgagggattgcaaaattcatttgatagatttaaaaaacgaaaagaaaaatgaaactatgattttcataacagagggagatagtgcaagcggttcaataacaacggctcgtgatgtgctaacgcaagcggtgtttagcctgcggggcaagccgctcaacacctatggagtagggcgcaaagtggtttacgaaaacgaggaattcaaccttttgcaacacgccctcgatattgaaaacggtttggaaaacctgcgctacaacaaagtgattatagctaccgatgccgatgttgatggtatgcacataaggcttttgatggtgtctttctttttgcagtttttcccagagcttgtggaacaggagcatctttacattttgcaaactccgctgttcagggtgcgcaataaaaaagaaaccctctattgctacaacgagcaagagcgcgatacggcgcaggcaaaactaggcgcacaagcagaaacaacccgcttcaaagggcttggcgaaatagacccagaagaattcggtttgttcataggcgaagatatgaggcttgaaagcgttattatgccgcaagaatcaaatacaaataaaatgcttgaatattatatgggtaacaacacggctgcccgtaccgagcacgttataaacaatctgagaacagaagccgtggctgatttgtaa

SEQ ID NO: 35772 - protein, 284 aa, Unknown
  Obtained from environmental sample
  misc_feature (1)..(284): Xaa is any amino acid
MVDFIAKEVDNYLHKNPESAKIIQERIAQNERERKEIAGVRKLANERAKKAAVHNRKLRDCKIHLIDLKNEKKNETMIFITEGDSASGSITTARDVLTQAVFSLRGKPLNTYGVGRKVVYENEEFNLLQHALDIENGLENLRYNKVIIATDADVDGMHIRLLMVSFFLQFFPELVEQEHLYILQTPLFRVRNKKETLYCYNEQERDTAQAKLGAQAETTRFKGLGEIDPEEFGLFIGEDMRLESVIMPQESNTNKMLEYYMGNNTAARTEHVINNLRTEAVADL

SEQ ID NO: 35773 - DNA, 1362 bp, Unknown
  Obtained from environmental sample
  misc_feature (1)..(1362): n is a, c, g, or t
atgatggccgagacaccccacctgccccgctttgccagcagtagctctaccgtacctgttgtaccgagcagcagctctactacacctctgccaagcagcagttctaccacacctgcagttgacgaactcacttgcacaggtctgtcatcgagtgcgacagtcaacgtggctatacctaaaccaacggttaaatgcggagctaccgtagtcgctgccgccggcataacatggacaacaacactaaattgggatactcctgtagcaagcacaacaccatataccgtaacggccaccgctaattgcggtgaaagtgtcaaaatggcaagttgcggtgcaataactgtaagtgcggcaggaacatcgagtagcagttcaagttcattgttgccgagcagcagttcaagcatacctacgcttacttgcgcttctgtcacgcaaacaatagcatctggagcaaccccaaccaaaccagcagttacatgcggagctactccagttactactggcatcatttggagcccaacttctatcaatagtgccattactggaccaacgacagttactagtgtaactgcaactgcatcttgcggtggaagcagtcaaacagctaattgcgccggtacaataactgtgagtgcgccagcagcaacaacattcaccgtaacctataatgccaacggtggtacgggtgggcctaccactcaaacaaaaacccaaggtactccattaacattgactaccgacaagcccacgagaacgggttatacttttgacaagtggaatactgcggctaatggcagcggaacgccttacgcttctggagcaagctacacaacagatgccaatgttacgctttacgctcaatggatacntgataaatacactgtgacctataatgttaacggtggcactggtgtgtttgacaatcaaataaaaatccacgatgttccattaacgctgagtactaccaagcccacaagggaaggctatgcctttatgggttggaatacttcggatgacggcactggaactccttatgcctctggggcaagctacacggacaatgtgggtgttacgctttacgctcaatgggcaaaggaatacatcatagcttatgatgctaacggtggcacgggtgcgcctgacaatcaaataaaaatccacgatactgaattaacgctgagtcctaccaagcccacaagggaaggctatgcctttatgggttggaatactttggatgatggcaatggaactttctacactcctgaagcaagctacatagacaatgctaatgttaagttttacgctcaatggagcagaatagttgtgataggtatccagacttggatggctgagaattaa

SEQ ID NO: 35774 - protein, 453 aa, Unknown
  Obtained from environmental sample
  misc_feature (1)..(453): Xaa is any amino acid
MMAETPHLPRFASSSSTVPVVPSSSSTTPLPSSSSTTPAVDELTCTGLSSSATVNVAIPKPTVKCGATVVAAAGITWTTTLNWDTPVASTTPYTVTATANCGESVKMASCGAITVSAAGTSSSSSSSLLPSSSSSIPTLTCASVTQTIASGATPTKPAVTCGATPVTTGIIWSPTSINSAITGPTTVTSVTATASCGGSSQTANCAGTITVSAPAATTFTVTYNANGGTGGPTTQTKTQGTPLTLTTDKPTRTGYTFDKWNTAANGSGTPYASGASYTTDANVTLYAQWIXDKYTVTYNVNGGTGVFDNQIKIHDVPLTLSTTKPTREGYAFMGWNTSDDGTGTPYASGASYTDNVGVTLYAQWAKEYIIAYDANGGTGAPDNQIKIHDTELTLSPTKPTREGYAFMGWNTLDDGNGTFYTPEASYIDNANVKFYAQWSRIVVIGIQTWMAEN

SEQ ID NO: 35775 - DNA, 615 bp, Unknown
  Obtained from environmental sample
  misc_feature (1)..(615): n is a, c, g, or t
atggaaattgaaagggtactccgtgcaggttatgaagcggctgcggtacgacggaaaaaactatgcgtagtggacaaagccaacgtgcttgagtcgtcccgcttttggcgtgaggtagcggcggtagtttcaaaggactatcccaatatagagacaagttatctctacgttgacaacgccgccatgcagttaatccgcgcccccggacaatttgatgtaatagttacatcaaatctttttggagacatactttccgatgaagcctcagtacttaccggctcaatcggtatgctcgcctccgcaagtctgggtgaaaaagtacaggacggaaccagaccggggatgtatgagcctattcacggctcagcgccagacatcgccggaaaggacattgccaatccgcttgcgacaatcctttcggcggcgatgatgctccgctattcattcggtcttgagaaggaagcgcaatccattgaaaccgcagttaatcatgtgttggatcagggattgagaacgggagatatcgcaagtagaagtgccgcanacagcggagaaaaaattgtgggtaccaaggtgatggcagacgcggtactcanagcattggaggaattatga

SEQ ID NO: 35776 - protein, 204 aa, Unknown
  Obtained from environmental sample
  DOMAIN (1)...(197): Isocitrate/isopropylmalate dehydrogenase
  misc_feature (1)..(204): Xaa is any amino acid
MEIERVLRAGYEAAAVRRKKLCVVDKANVLESSRFWREVAAVVSKDYPNIETSYLYVDNAAMQLIRAPGQFDVIVTSNLFGDILSDEASVLTGSIGMLASASLGEKVQDGTRPGMYEPIHGSAPDIAGKDIANPLATILSAAMMLRYSFGLEKEAQSIETAVNHVLDQGLRTGDIASRSAAXSGEKIVGTKVMADAVLXALEEL

SEQ ID NO: 35777 - DNA, 888 bp, Unknown
  Obtained from environmental sample
  misc_feature (1)..(888): n is a, c, g, or t
atgaaaagcgattctgtaaacaagggtattgcccgttctccacaccgtgcgctctttaaagcgttgggatttattgaggaagagtttaaaaggccgctgattgggattgcctgcgcgaagagcgagatagtgccgggtcatctgcacttggacaacatagcgcgcgctgttgcagacggtgttcgcatggcgggaggagcgcccgttatctttccggtcatcggcgtttgcgacggaattgcgatggggcatgtgggaatgaagtactcactgccgacaagggaattgatcgccgactcggttgagtgcatggctctggctcacgccttcgacgctcttgtccttatccccaactgcgacaagatagttcccggcatgatgatggcgtcagcgcggcttaaccttccctcagtttttgtttcaggcgggccgatgcttgccgggcgcaaggacgggaaaccgctgacgcttacgacaatgttcgaggctgtgggcgcggtagccgcgggaaagctcagtgaacaggaacttgaggaacttgaaaacctttcctgcccgggctgcggttcctgcgcgggaatgtttacggcaaactcaatgaactgcgtaacagaagcgcttggtatggctcttcccggcaacggcactatacccgccgtgatggcggagcgtatccgtctggcgaagaaaacaggaatgttaattatggacgttcttaaaaaagatttgcgtccgaaacaaatacttacacagtccgcgtttatgaacgctctcgccctcgacatggcgctaggctgttcaacgaataccgcgcttcatcttcccgcggttgcgggagaagcgggtatcaaactcgatctggaacttcttaacagggtagcgcggtaa

SEQ ID NO: 35778 - protein, 295 aa, Unknown
  Obtained from environmental sample
  DOMAIN (31)...(295): Dehydratase family
  misc_feature (1)..(295): Xaa is any amino acid
MKSDSVNKGIARSPHRALFKALGFIEEEFKRPLIGIACAKSEIVPGHLHLDNIARAVADGVRMAGGAPVIFPVIGVCDGIAMGHVGMKYSLPTRELIADSVECMALAHAFDALVLIPNCDKIVPGMMMASARLNLPSVFVSGGPMLAGRKDGKPLTLTTMFEAVGAVAAGKLSEQELEELENLSCPGCGSCAGMFTANSMNCVTEALGMALPGNGTIPAVMAERIRLAKKTGMLIMDVLKKDLRPKQILTQSAFMNALALDMALGCSTNTALHLPAVAGEAGIKLDLELLNRVAR

SEQ ID NO: 35779 - DNA, 522 bp, Unknown
  Obtained from environmental sample
  misc_feature (1)..(522): n is a, c, g, or t
ttggctgacatccttgtgctgcgtgaagtccctgccaaggaaaatctcgtgctcgcccgcagagtagttgagcgggccgaccttttccgacatgccgtactccgtgaccatcgccctggccatgctggtggcctgcttgatgtcgttgctggcccctgtggaaaggtggccgaaaaagatttcttcggccaagcggccgcccatggcgaaggagatttgggcctccatgtattctttcgtggtgttgaacttgtcgcgctccggcagcagccaagtcacgcccaaggccctgccccttggaatgatcgtcactttatgcacgacgtccaggacggggaggctggcccctacaacggtgtgccccgcctcatggtaggcagtcacctttttgtcctcttccgtcattaccagggatctgcgctcgttccccatgtacactttgtccttggcggattcaaagtcggccattccgaccgcgttcttgttgagcctggcggcgccaagcgcggcctcgttgcatag

SEQ ID NO: 35780 - protein, 173 aa, Unknown
  Obtained from environmental sample
  misc_feature (1)..(173): Xaa is any amino acid
MADILVLREVPAKENLVLARRVVERADLFRHAVLRDHRPGHAGGLLDVVAGPCGKVAEKDFFGQAAAHGEGDLGLHVFFRGVELVALRQQPSHAQGPAPWNDRHFMHDVQDGEAGPYNGVPRLMVGSHLFVLFRHYQGSALVPHVHFVLGGFKVGHSDRVLVEPGGAKRGLVA

SEQ ID NO: 35781 - DNA, 927 bp, Unknown
  Obtained from environmental sample
  misc_feature (1)..(927): n is a, c, g, or t
ttgtcctcttccgtcattaccagggatctgcgctcgttccccatgtacactttgtccttggcggattcaaagtcggccattccgaccgcgttcttgttgagcctggcggcgccaagcgcggcctcgttgcataggttggcaaggtctgcgcccgaaaagccgggtgtccccttggctatggtttcaaggttcacgtcggtgtccagcggtatctttttggccgtgtggaccttcagtatttcgtgcctgccctttatgtcggggcggtcaaccaccacgcggcggtcaaacctgcctgggcgcagaagggcggggtccagcacgtctggtctgttggtggccgctatgagaatcacgccggcgttggtctcaaagccgtccatctcgaccaacagttggttcagggtctgctcgcgctcgtcgtggccgccgcccagaccagccccccggtgccttccgacggcatntatttcgtcaatgaaaaggatgcagggggcgttctttttcccttgctcaaacaagtcgcggacgcggctggcccctacacccacgaacatctccacaaagtcggaaccggatatgctgaaaaactggaccttcgcctcgcccgcaatggcgcgggccagcaaggttttcccggtgccaggcggtcccatgaggagcaggcccttggggattttcccgcccagcttcacaaacttggacgggtctctaagaaagtccacgacctccgccagttcggccttggcctcatcgcagcccgccacgtcggcaaatgtgacgcgctttgctgaggccgaaagggccctggccttcgctttcccaaagctgatggccttgtttccgcccatctgggcctgtctcatgaagacgaaccaaagcagaacgaagacgagcatcggcccccagaagagcaggaacatgtaa

SEQ ID NO: 35782 - protein, 308 aa, Unknown
  Obtained from environmental sample
  misc_feature (1)..(308): Xaa is any amino acid
MSSSVITRDLRSFPMYTLSLADSKSAIPTAFLLSLAAPSAASLHRLARSAPEKPGVPLAMVSRFTSVSSGIFLAVWTFSISCLPFMSGRSTTTRRSNLPGRRRAGSSTSGLLVAAMRITPALVSKPSISTNSWFRVCSRSSWPPPRPAPRCLPTAXISSMKRMQGAFFFPCSNKSRTRLAPTPTNISTKSEPDMLKNWTFASPAMARASKVFPVPGGPMRSRPLGIFPPSFTNLDGSLRKSTTSASSALASSQPATSANVTRFAEAERALAFAFPKLMALFPPIWACLMKTNQSRTKTSIGPQKSRNM

SEQ ID NO: 35783 - DNA, 570 bp, Unknown
  Obtained from environmental sample
  misc_feature (1)..(570): n is a, c, g, or t
gtggaccttcagtatttcgtgcctgccctttatgtcggggcggtcaaccaccacgcggcggtcaaacctgcctgggcgcagaagggcggggtccagcacgtctggtctgttggtggccgctatgagaatcacgccggcgttggtctcaaagccgtccatctcgaccaacagttggttcagggtctgctcgcgctcgtcgtggccgccgcccagaccagccccccggtgccttccgacggcatntatttcgtcaatgaaaaggatgcagggggcgttctttttcccttgctcaaacaagtcgcggacgcggctggcccctacacccacgaacatctccacaaagtcggaaccggatatgctgaaaaactggaccttcgcctcgcccgcaatggcgcgggccagcaaggttttcccggtgccaggcggtcccatgaggagcaggcccttggggattttcccgcccagcttcacaaacttggacgggtctctaagaaagtccacgacctccgccagttcggccttggcctcatcgcagcccgccacgtcggcaaatgtgacgcgctttgctga

SEQ ID NO: 35784 - protein, 189 aa, Unknown
  Obtained from environmental sample
  misc_feature (1)..(189): Xaa is any amino acid
MDLQYFVPALYVGAVNHHAAVKPAWAQKGGVQHVWSVGGRYENHAGVGLKAVHLDQQLVQGLLALVVAAAQTSPPVPSDGXYFVNEKDAGGVLFPLLKQVADAAGPYTHEHLHKVGTGYAEKLDLRLARNGAGQQGFPGARRSHEEQALGDFPAQLHKLGRVSKKVHDLRQFGLGLIAARHVGKCDALC

SEQ ID NO: 35785 - DNA, 309 bp, Unknown
  Obtained from environmental sample
  misc_feature (1)..(309): n is a, c, g, or t
atgcgaggggtacataccccgccctttagggcgcttaaaaagggtatgtaccccgagacaaataccttacctaaacaacataccccgtcccttcagggcggggttgttgattttgccgcatttacaagctcatctgccgtggaaggttttgttgaatccgcggcacaggctgatttaagtaaaattaaagcggtttgtattggagaaaaaacggcgcagacagccaaattttatggcatggatgtctatatatccgctagagccacaatagaaagtatggtagaaaaaataaaggagttaagcctgtga

SEQ ID NO: 35786 - protein, 102 aa, Unknown
  Obtained from environmental sample
  misc_feature (1)..(102): Xaa is any amino acid
MRGVHTPPFRALKKGMYPETNTLPKQHTPSLQGGVVDFAAFTSSSAVEGFVESAAQADLSKIKAVCIGEKTAQTAKFYGMDVYISARATIESMVEKIKELSL

SEQ ID NO: 35787 - DNA, 330 bp, Unknown
  Obtained from environmental sample
  misc_feature (1)..(330): n is a, c, g, or t
gtgaacaattacggcaaagaaaccgctgaccgcgaatctgcgcaaagcggcaaaagccagcatcagcttgggctgaccgtggacttctccccgattgacgacgctttcgccaaaacccccgcctgcaaatggctattggaaaacgcaagccgctttggctggtcgctttctttccccgacggctacgaggaaataacaggctaccgctgggaaagctggcattaccgttttgtgggcaaagatctgaccgtgttcatcgataattattttgacggcatacagcaatacgcccttcagtttattcatgcctggcaggaacaggcggaatga

SEQ ID NO: 35788 - protein, 109 aa, Unknown
  Obtained from environmental sample
  DOMAIN (1)...(80): D-alanyl-D-alanine carboxypeptidase
  misc_feature (1)..(109): Xaa is any amino acid
MNNYGKETADRESAQSGKSQHQLGLTVDFSPIDDAFAKTPACKWLLENASRFGWSLSFPDGYEEITGYRWESWHYRFVGKDLTVFIDNYFDGIQQYALQFIHAWQEQAE

SEQ ID NO: 35789 - DNA, 744 bp, Unknown
  Obtained from environmental sample
  misc_feature (1)..(744): n is a, c, g, or t
ttggcccgaatggaaggaaaagtaaagtacaaacttgcctaccaggagctggacagccttatccctcctgctatttttgaaaacgcgaaaaaaatcggcaggagcaaaccctggggaacagcccacgcccttttgtgcgcggcggaacaaatagattcgccttttgcggtaatcaacgccgatgatttttacggaagggaggcctttgccgtaatgggcaaattccttgcggagggcgggcataaagaaggcgcgatagtgccgtatgtgctggaacccactttaagcaaaactggagccgttgccaggggagtctgcaaaatttccggggactaccttgagtctatcgatgagctaaccgcgattgaaaaaaaagacggcgtaatttttaacaccggggccgatggcgcaaaacgggagctttcttctgacactccggtctccatgaattttttggcctaccccgacagcatactcccaaagtttaaacaatacttcgacgattttatttctacttccggtggagagctaaagagcgaatgttaccttcccaaagcgacggactggctgatcagaaacgattttctaaaaatgcgcgttcttaacgctgattcggagtggttcggcgttacttataaggaagacaaagacatggcaattaaacgccttgcggaacttacaaatcagggggtttatcctgattcgctgtggagcaatcattccgcctgttcctgccaggcatga

SEQ ID NO: 35790 - protein, 247 aa, Unknown
  Obtained from environmental sample
  misc_feature (1)..(247): Xaa is any amino acid
MARMEGKVKYKLAYQELDSLIPPAIFENAKKIGRSKPWGTAHALLCAAEQIDSPFAVINADDFYGREAFAVMGKFLAEGGHKEGAIVPYVLEPTLSKTGAVARGVCKISGDYLESIDELTAIEKKDGVIFNTGADGAKRELSSDTPVSMNFLAYPDSILPKFKQYFDDFISTSGGELKSECYLPKATDWLIRNDFLKMRVLNADSEWFGVTYKEDKDMAIKRLAELTNQGVYPDSLWSNHSACSCQA

SEQ ID NO: 35791 - DNA, 714 bp, Unknown
  Obtained from environmental sample
  misc_feature (1)..(714): n is a, c, g, or t
gtgatgtgtccggactgcccggagtttttggcgaggctattcgagaacgaggtgccggagatcttcgacaagacggtcaagatagtgaaggtggtacgcgacccgggccgccgctcgaagatagcggtgacgacgacggacaaccgggtagaccccgtaggggcgtgcgtggggatgcgcggcaaccgcgtgcagaacatagtgcgcgaactgtcgaacgagcggatagacataataaattggacagacgaactatcgctcctggtgcgccgcgtcttcgcccccgccgaggtgaagcgggtgatgcccgtaggcgagcacaaaatcgtagtcgtcatagccgaggacggcctggcgatggcgataggccacgagggccaaaacatccgcctggcctccaagatgttaggccgcgagatagacgtcttcggcgacgaggagttctccaacctgagcgaagagcaaaaggcggaggtgctgagcgagatagcggagaagaaagagcccgaacctgccgtcagcggagataatacggaggaatccatagctgacgacgatacggaatcgacggagggcgtacctgtcgtagcggaagaaaaggatgccgaagaagatgagtccattcacaacgaaataataaacaaagcggtagaatcgctatcagaaacaactgtagacgccgccgtagccattgagagtacgaataacggttga

SEQ ID NO: 35792 - protein, 237 aa, Unknown
  Obtained from environmental sample
  misc_feature (1)..(237): Xaa is any amino acid
MMCPDCPEFLARLFENEVPEIFDKTVKIVKVVRDPGRRSKIAVTTTDNRVDPVGACVGMRGNRVQNIVRELSNERIDIINWTDELSLLVRRVFAPAEVKRVMPVGEHKIVVVIAEDGLAMAIGHEGQNIRLASKMLGREIDVFGDEEFSNLSEEQKAEVLSEIAEKKEPEPAVSGDNTEESIADDDTESTEGVPVVAEEKDAEEDESIHNEIINKAVESLSETTVDAAVAIESTNNG

SEQ ID NO: 35793 - DNA, 525 bp, Unknown
  Obtained from environmental sample
  misc_feature (1)..(525): n is a, c, g, or t
gtgtccggactgcccggagtttttggcgaggctattcgagaacgaggtgccggagatcttcgacaagacggtcaagatagtgaaggtggtacgcgacccgggccgccgctcgaagatagcggtgacgacgacggacaaccgggtagaccccgtaggggcgtgcgtggggatgcgcggcaaccgcgtgcagaacatagtgcgcgaactgtcgaacgagcggatagacataataaattggacagacgaactatcgctcctggtgcgccgcgtcttcgcccccgccgaggtgaagcgggtgatgcccgtaggcgagcacaaaatcgtagtcgtcatagccgaggacggcctggcgatggcgataggccacgagggccaaaacatccgcctggcctccaagatgttaggccgcgagatagacgtcttcggcgacgaggagttctccaacctgagcgaagagcaaaaggcggaggtgctgagcgagatagcggagaagaaagagcccgaacctgccgtcagcggagataa

SEQ ID NO: 35794 - protein, 174 aa, Unknown
  Obtained from environmental sample
  misc_feature (1)..(174): Xaa is any amino acid
MSGLPGVFGEAIRERGAGDLRQDGQDSEGGTRPGPPLEDSGDDDGQPGRPRRGVRGDARQPRAEHSARTVERADRHNKLDRRTIAPGAPRLRPRRGEAGDARRRAQNRSRHSRGRPGDGDRPRGPKHPPGLQDVRPRDRRLRRRGVLQPERRAKGGGAERDSGEERARTCRQRR

SEQ ID NO: 35795 - DNA, 522 bp, Unknown
  Obtained from environmental sample
  misc_feature (1)..(522): n is a, c, g, or t
atggccaaaaagaaagtccacgatctcgccaaagagttcaacgtttccggcgcggcattggttcagatgctgcggggaatgggtattctcgtaaagagccacatgagcacggtggacgaggagttgcgcacgcagatcaaggagaagtttgagcaggagcgggcggacattaagagggagtacgagcgtaagaagcagatacttactagggcaagcgaggagttggaggaggcgccgccgccgcgtgcggttcctgtcgctcctccggttgcgccggatcctgcggtgcctgccgcggtagttccggcgtctacggcgaagcgcggttcggagcagccgcagcagaggggcagtgcggcgcaggttcagcagccgcagcagaaggatgagcagcctcagtcgcaaaagtctaagggttcaatccgcaagtaccatcagaaggagtcttgggctagggggccgggagatccgccctctcacaacagaggcggtcacggtggcgaccgattatgcgaccgctaa

SEQ ID NO: 35796 - protein, 173 aa, Unknown
  Obtained from environmental sample
  DOMAIN (1)...(53): Translation initiation factor IF-2, N-terminal region
  misc_feature (1)..(173): Xaa is any amino acid
MAKKKVHDLAKEFNVSGAALVQMLRGMGILVKSHMSTVDEELRTQIKEKFEQERADIKREYERKKQILTRASEELEEAPPPRAVPVAPPVAPDPAVPAAVVPASTAKRGSEQPQQRGSAAQVQQPQQKDEQPQSQKSKGSIRKYHQKESWARGPGDPPSHNRGGHGGDRLCDR

SEQ ID NO: 35797 - DNA, 1176 bp, Unknown
  Obtained from environmental sample
  misc_feature (1)..(1176): n is a, c, g, or t
atggtttacgttagtgttgtgtcggtagatcagctcacctacgaggaatatattcgatccataccgtgtcccactactttatcgattataactatggaccctctaaaggggaacgcaatccttgaaattgatcctcttataactttctcaattattgacagggtttgcggtggaattggtgatggaacaaaatcccagcatgaactaaccgatatcgaacagtctgttatggaaggtattattgtccgtatgataggtaatatgcgtgaagcctggactggagtattagacctgcgcccccggctggggcagattgataccaatccccagtttgcccagatcgttcccccaacagaaatggtggtattagtaacgctggaagccaaaataggcgatgtggaagggatgataaatttctgtattccctatcccgcgattaatcaaataaccggaaagttatccaactgttntgggtattataagacagaggatgctgcgccgttaacatcaaacntgaacnacagggaggacattcccgtccgcatgaccgccgagatattatgccgtgattaccctgtcagtgaaatattgaaatggaaacctgaaacgcttattctgccgcttcgcccgcttacgcccggttattgctatttaagacttggggacaggcgaatgtggcattgccggatactgccggatagcaagtggttttcaaaaagaatcactgttgtcaatttagaggaaaaaccatttggaacggagggaaacgatatgataatggaaaaagataattcaccggtagcggacgcactgtcaagcgcggcgattaaaatttccgcagaacttggaaccaccatgaaaaccgtaaaggaagtctttgcgattgaagaggggacaatactagagcttgacaaacttgccggtgaaccggtagacgtaaaagccaacggagtcctcattgcaaagggcgaagtggttgtcattgatgaaaatttcggggtaaggattaccgaaattaccggaacgtcacacgccgccaataaagaggagaatcttcgctctgcagactcaggtgaagctaaatccgaaccgcagcagcccgctaagaaaccgccggttcaggatgatggcgctttatcctatgatgaaatagacgaattattatcggggaaataa

SEQ ID NO: 35798 - protein, 391 aa, Unknown
  Obtained from environmental sample
  DOMAIN (267)...(343): Surface presentation of antigens (SPOA) protein
  misc_feature (1)..(391): Xaa is any amino acid
MVYVSVVSVDQLTYEEYIRSIPCPTTLSIITMDPLKGNAILEIDPLITFSIIDRVCGGIGDGTKSQHELTDIEQSVMEGIIVRMIGNMREAWTGVLDLRPRLGQIDTNPQFAQIVPPTEMVVLVTLEAKIGDVEGMINFCIPYPAINQITGKLSNCXGYYKTEDAAPLTSNXNXREDIPVRMTAEILCRDYPVSEILKWKPETLILPLRPLTPGYCYLRLGDRRMWHCRILPDSKWFSKRITVVNLEEKPFGTEGNDMIMEKDNSPVADALSSAAIKISAELGTTMKTVKEVFAIEEGTILELDKLAGEPVDVKANGVLIAKGEVVVIDENFGVRITEITGTSHAANKEENLRSADSGEAKSEPQQPAKKPPVQDDGALSYDEIDELLSGK

SEQ ID NO: 35799 - DNA, 1185 bp, Unknown
  Obtained from environmental sample
  misc_feature (1)..(1185): n is a, c, g, or t
ttgtatgactcaagcggcgctgcggttgaaagcgagaccaacagcagcagtaacatttcccggacagtaactaacgggcaggaatactatataagaatacgaccttacagttcttattacagcggcacataccaaattgggttcactacgtccacaacaccgcctcccgtaacattacccactaccggcgtaacaccacttaccgaaaatacctgggcggacggcaatattccaacaacaggctctacgcagtggttcaagttcaccgcgacagcaagcacgcagtacatacacgtcagtttaggcacgctgacttctctgtatattcagttgtatgactcaagcggcgctgcggttgaaagcgagaccaacagcagcagtaacatttcccggacagtaactaacgggcaggaatactatataagaatacgaccttacagttcttattacagcggcacataccaaattgggttcactacgtccacaacaccgccttcagtaacattacccactaccggcgtaacaccacttaccgaaaatacctgggcggacggcaatattccaacaacaggctctacgcagtggttcaagttcaccgcgacagcaagcacgcagtacatacacgtcagtttaggcacgctgacttctctgtatattcagttgtatgactcaagcggcgctgcggttggaagcgagaccgatttatccgactacagcagcaacaaatacatttcccggacagtaactaacgggcaggaatactatataagaatacgaccttacagttcttacagcgacccataccagattgggttcactacgtccgaaacaaagcctaacagaataacattacccactatcggagtaacacaacttactttgaatacctgggcggacggcattcttccaacatctagcgatgtgcaatggttcaagttcaccgcaaccgcagacacgcagtacatacatgtcaaattcggcacgctgacgagtttgtctgttcaggtgtatgactcaaacggctatgcggttggatacaaggaaaataacgatagcagtaacaaatacatttcccggacagtaactaacgggcaggaatactatataataatacaacctgccactagtttcggcagcggcacatacaaggttgggttcactacgtccacgacaacgcccaactga

SEQ ID NO: 35800 - protein, 394 aa, Unknown
  Obtained from environmental sample
  DOMAIN (307)...(386): Bacterial pre-peptidase C-terminal domain
  misc_feature (1)..(394): Xaa is any amino acid
MYDSSGAAVESETNSSSNISRTVTNGQEYYIRIRPYSSYYSGTYQIGFTTSTTPPPVTLPTTGVTPLTENTWADGNIPTTGSTQWFKFTATASTQYIHVSLGTLTSLYIQLYDSSGAAVESETNSSSNISRTVTNGQEYYIRIRPYSSYYSGTYQIGFTTSTTPPSVTLPTTGVTPLTENTWADGNIPTTGSTQWFKFTATASTQYIHVSLGTLTSLYIQLYDSSGAAVGSETDLSDYSSNKYISRTVTNGQEYYIRIRPYSSYSDPYQIGFTTSETKPNRITLPTIGVTQLTLNTWADGILPTSSDVQWFKFTATADTQYIHVKFGTLTSLSVQVYDSNGYAVGYKENNDSSNKYISRTVTNGQEYYIIIQPATSFGSGTYKVGFTTSTTTPN

SEQ ID NO: 35801 - DNA, 402 bp, Unknown
  Obtained from environmental sample
  misc_feature (1)..(402): n is a, c, g, or t
ttgagaattatggctatgcccgatgtaaaagaaagggaagctgtatatttcgaacaggaaaagttgtttaaagatatgcttaaaaaggttatccatacagatgaaaatgtcattgtggctgaccttaggggagtagaaacgatttacgcgggcaacaggtttttaatgtataccatgcaccctgaacagaacatctcagtctggatcgttgacggcaaaaacaagcaaaactgctcaattacagtcggctacagtattattaaccgcagcgccaaggttgatgtaggcagtatgctcttaaaacacggcggaggcggccacacccaggtcggcacctgccaggttccctacgaagaagcagacaaggtaatcgccgaagttatcggccagtgtaagacttaa

SEQ ID NO: 35802 - protein, 133 aa, Unknown
  Obtained from environmental sample
  misc_feature (1)..(133): Xaa is any amino acid
MRIMAMPDVKEREAVYFEQEKLFKDMLKKVIHTDENVIVADLRGVETIYAGNRFLMYTMHPEQNISVWIVDGKNKQNCSITVGYSIINRSAKVDVGSMLLKHGGGGHTQVGTCQVPYEEADKVIAEVIGQCKT

SEQ ID NO: 35803 - DNA, 1065 bp, Unknown
  Obtained from environmental sample
  misc_feature (1)..(1065): n is a, c, g, or t
atgaaagctttatttataggcggaaccggcactatcagtaccgcgatttcaaaacgggctctggaaaagggctgggaactctatctgctcaaccggggaaaccgtaacaaggagcttgaagcggcaggcaaggccggaaaactcatcgagattaactgtgatatcagagcggaagacgaggcggtagtatccgggaaaattaaaaaggcgctggcagacagcggggctaagtgttttgacgtagtcgccgattttattgcttttactccgactcacgtcgagaaagatttcaaaattttcaacgggctgtgtaaacagtacttctttatctcctccgcgtccgcctaccagaagcccctttcctcataccttattaccgaaagcactccgctggcaaatcctttctggcagtattccagagacaaaatagcctgcgaggatttccttatgcagaagtacagggaatgtagctttcctgtcaccctaatacgcccaagccacacttacgatgaacggagcgttcccatgggagtacacggcgcgaagggaagctggcaggtagtaaagcgtatgcttgacggcaaacccgtaatcatccacggcgacggaaccagcctctggactttgacgcataacagcgatttcgcgcgcgcttttaccggactcatgggcaatattcatgcaatcggggaagcggtgcagatcacttcggacgaaagccttagctggaatcagatttaccaggccatagccgatgcgctcaatgtagaacttaaggcggtgcatgtttccagcgatttccttgatgagtgttcaggcggacgttacaatttcaagggcggccttacgggagacaaggcaaattctgtggtctttgataacaccaagctgaagcgtctggtccccggctttcacgccaggctgcgttttgatgaaggggtaaggctgtgtgtggcgcacattcttggacacccggaattacagcgggaagatcctgaatttgacgcatggtgcgataaagttatagcagcaagagaaaaagcgtttgagtatgtgaaagggtag

SEQ ID NO: 35804 - protein, 354 aa, Unknown
  Obtained from environmental sample
  DOMAIN (3)...(236): NAD dependent epimerase/dehydratase family
  misc_feature (1)..(354): Xaa is any amino acid
MKALFIGGTGTISTAISKRALEKGWELYLLNRGNRNKELEAAGKAGKLIEINCDIRAEDEAVVSGKIKKALADSGAKCFDVVADFIAFTPTHVEKDFKIFNGLCKQYFFISSASAYQKPLSSYLITESTPLANPFWQYSRDKIACEDFLMQKYRECSFPVTLIRPSHTYDERSVPMGVHGAKGSWQVVKRMLDGKPVIIHGDGTSLWTLTHNSDFARAFTGLMGNIHAIGEAVQITSDESLSWNQIYQAIADALNVELKAVHVSSDFLDECSGGRYNFKGGLTGDKANSVVFDNTKLKRLVPGFHARLRFDEGVRLCVAHILGHPELQREDPEFDAWCDKVIAAREKAFEYVKG

SEQ ID NO: 35805 - DNA, 1518 bp, Unknown
  Obtained from environmental sample
  misc_feature (1)..(1518): n is a, c, g, or t
atggnntcggggtcgccgcgtttttccgcccgcgtattcggcgcgcttgcccggcgtggtatcagcgtcatacttatctcccaaagttccagcgagtattctatttgctttgcggtaatgccgggggaagcgcgtaacgccgagcttgcccttgaagaggaatttaagcaggagatccattcaggggcaattgaaaaacctaagacggaaacggagctttctattattgcggtagtcggctctaaaatgaagagtacctcaggcgtctcgggcaaatttttccacgcgcttggccgtaacgggattaatatcgtagccatagcccagggctcgtcggagataaacatctccgcggttatctcccggcaggatgaatccaaagccctcaacgcggtgcatgaggtgtttttccaggccacaacccgttcggtaaacctcttcctgattggaacggggaatatcggcgggactctgcttgatcagattgccagccaccggaagatactcgcggacagggataaaatctatatcaacctcgtcggggtggcaaatattgacagaatggttttctccccgggcgggcttgacccgaaaaaaacaaaggcattgctgaacgacaatgacgataaaaacgaaaccggccatgagataatgccgttcaatcttgttaaattcattgacaaaatgatctcctttaacctgcccaacgcctgtttttgcgactgcacggccaataacgatatagcctcctgttacgggaagatactcggcgcgtcgattcctgttgttacgcctaacaaaaaggcgaattccgacacgctgaagtattaccatttcctngaaagttattcacgcgagcgcgggataccgtatctttacgagacaacggtctgcgcggggctgccggtaatttcaacgctgcgtgatttgtttctcgcgggcgacagggtccgccgtatcgatgcggttctttcgggaacactctcgtatatctttaacaactttgacggcagtaaaaccttttccgcgctggttcgcgaagcaaaggccgccggctataccgagccggatccacgggatgacctgaacgcttttgacgcggcccgaaaggccctgatccttgcacgggaatgcggcatgtccatggaattcaacgccgttgaaattgagcccctgctcccagccgcctgctttgacgcgcccgacgtggaaagtttttttgccgaactggaaaaaagtgacgcgggttttgaatcccggcggaagaaggctgcgtcggaaggcaaggccctgcgttatgtggcggtcatcgaaacaggcaaggccgggcttttcctgcggagtgaggaagcggacagtccctttttgaccttgcgtgattcggacaacatggtggtaataacaagcgaccgttattcaaaacttcccatggtgatcaagggccccggagccggagcccaggttaccgccggcggagtctttgccgacatagtccggatagcccggactctggtatag

SEQ ID NO: 35806 - protein, 505 aa, Unknown
  Obtained from environmental sample
  DOMAIN (150)...(294): Homoserine dehydrogenase, NAD binding domain
  misc_feature (1)..(505): Xaa is any amino acid
MXSGSPRFSARVFGALARRGISVILISQSSSEYSICFAVMPGEARNAELALEEEFKQEIHSGAIEKPKTETELSIIAVVGSKMKSTSGVSGKFFHALGRNGINIVAIAQGSSEINISAVISRQDESKALNAVHEVFFQATTRSVNLFLIGTGNIGGTLLDQIASHRKILADRDKIYINLVGVANIDRMVFSPGGLDPKKTKALLNDNDDKNETGHEIMPFNLVKFIDKMISFNLPNACFCDCTANNDIASCYGKILGASIPVVTPNKKANSDTLKYYHFLESYSRERGIPYLYETTVCAGLPVISTLRDLFLAGDRVRRIDAVLSGTLSYIFNNFDGSKTFSALVREAKAAGYTEPDPRDDLNAFDAARKALILARECGMSMEFNAVEIEPLLPAACFDAPDVESFFAELEKSDAGFESRRKKAASEGKALRYVAVIETGKAGLFLRSEEADSPFLTLRDSDNMVVITSDRYSKLPMVIKGPGAGAQVTAGGVFADIVRIARTLV

SEQ ID NO: 35807 - DNA, 750 bp, Unknown
  Obtained from environmental sample
  misc_feature (1)..(750): n is a, c, g, or t
gtgtttgcatttcatctcaacggactcagcctggactggcacgatgtggttgacatcctgctggtgaccacgttgctttacggcatcatcgcgcgcatcagggggacgcgcgctgtcgcggtggttgtcgggctgctggtgctgacgctgctgtacctcggcgccggaagcctcggtttgtatacgaccacctggcttttacagagttttttcgcctccctgttcctggtggtcgtcattctgttccagcaggatatccggatggtgctcagcaccatcggcacccgccgtttctgggaccggcgcaagctgatcagcgaggccctgcttgacgaactcgtggatgcctgcatggaacttgcccgtaaccgggttggcgcgctgattgttcttgagcgctttgtgccgctcagggacatgatggaaagagagggcgtgcgtctggatgcgcgtctttcccgtgaacttttgcagaccatttttgccgtgaacacccccttgcacgatggcgcggtcatcatcagcaagggcatgataacggcggcggcctgcattctgccgctggcgatggtgaggcggcaggccttcgggacgcggcatcgcgcggcgctcggcatcaccgaggagagcgacgccgtggccgttgtcgtttccgaggagcggggcgaggtgtccgtggccatcaagggaaaattgaccaaaaacctggatgcggtaaaactcaaacgggtactcggcaatgtgttgtga

SEQ ID NO: 35808 - protein, 249 aa, Unknown
  Obtained from environmental sample
  DOMAIN (113)...(233): Domain of unknown function DUF147
  misc_feature (1)..(249): Xaa is any amino acid
MFAFHLNGLSLDWHDVVDILLVTTLLYGIIARIRGTRAVAVVVGLLVLTLLYLGAGSLGLYTTTWLLQSFFASLFLVVVILFQQDIRMVLSTIGTRRFWDRRKLISEALLDELVDACMELARNRVGALIVLERFVPLRDMMEREGVRLDARLSRELLQTIFAVNTPLHDGAVIISKGMITAAACILPLAMVRRQAFGTRHRAALGITEESDAVAVVVSEERGEVSVAIKGKLTKNLDAVKLKRVLGNVL

SEQ ID NO: 35809 - DNA, 813 bp, Unknown
  Obtained from environmental sample
  misc_feature (1)..(813): n is a, c, g, or t
ttgcccggcatggtgcttgatgccgggtggaagtggaactatcccgcggcggacaaggtcggcagggcggccaagattgacgatgcgcccggccggtacatcgtgttcaccaagagcagcttccccgcgcacctgaacctgaacggcatgcgtgtcgtactcgactgcgccaacggcgccaattacaaggtggcgcccctggcccttgaggagcttggagccgaggtcgtcaagatgggcgtggatccggacgggatcaacatcaacagggactgcggttcgctgtaccctgacaaggtcgccgccaaggtgcgggaactgcgcgccgatgtgggccttgccctggacggcgacgcggatcgcctgatcgtggtggacgaacagggcgcgattctggacggcgaccagcttatggcgctgtgcgttgtggagatgatggcgaacggcaagctccccggcaacaagctggtagccacggtgatgagcaacatggccctggaagtctttatgcgtgaacgcggcggcgtcctcttgcgcacgccggtcggcgaccgctacgtggtggaagaaatgctcaaagtaggcgcgatgtttggcggcgagcagtccggacatcttattttccgcgagtacagcaccacgggcgacggtctgctggccgcgctgcaaatcctgcgcgtcatgcgcgaaaaggagaagccgctttccgaactggcggggcagctcacgctgtatccgcaaaccatgctgaacatccgggtggcgaaaaagccgccctttgatcaatgtccggatatccctcggccgatctga

SEQ ID NO: 35810 - protein, 270 aa, Unknown
  Obtained from environmental sample
  DOMAIN (31)...(131): Phosphoglucomutase/phosphomannomutase, alpha/beta/alpha domain II
  misc_feature (1)..(270): Xaa is any amino acid
MPGMVLDAGWKWNYPAADKVGRAAKIDDAPGRYIVFTKSSFPAHLNLNGMRVVLDCANGANYKVAPLALEELGAEVVKMGVDPDGININRDCGSLYPDKVAAKVRELRADVGLALDGDADRLIVVDEQGAILDGDQLMALCVVEMMANGKLPGNKLVATVMSNMALEVFMRERGGVLLRTPVGDRYVVEEMLKVGAMFGGEQSGHLIFREYSTTGDGLLAALQILRVMREKEKPLSELAGQLTLYPQTMLNIRVAKKPPFDQCPDIPRPI

SEQ ID NO: 35811 - DNA, 312 bp, Unknown
  Obtained from environmental sample
  misc_feature (1)..(312): n is a, c, g, or t
atggacgtgtacctggtcggcccgttgcccacgccggccgttcttttcttacccgcagcatgcgggcggatgtgggcatcgtcatcttcggcttcgcacaatcctttttttgacaacggcatcaaattctttgacgcccaagggcttcaagctgccggacgaggtggagaacgagattgcccggcatggtgcttgatgccgggtggaagtggaactatcccgcggcggacaaggtcggcagggcggccaagattgacgatgcgcccggccggtacatcgtgttcaccaagagcagcttccccgcgcacctga

SEQ ID NO: 35812 - protein, 103 aa, Unknown
  Obtained from environmental sample
  misc_feature (1)..(103): Xaa is any amino acid
MDVYLVGPLPTPAVLFLPAACGRMWASSSSASHNPFFDNGIKFFDAQGLQAAGRGGERDCPAWCLMPGGSGTIPRRTRSAGRPRLTMRPAGTSCSPRAASPRT

SEQ ID NO: 35813 - DNA, 675 bp, Unknown
  Obtained from environmental sample
  misc_feature (1)..(675): n is a, c, g, or t
atgaggaatgaggaattaggaataggaattaccaatgagcaatgcttaccaatcaaaaccccactccccactccctactccccactccctattaaaaaacctgacccggtgatatggcggcttttgtttggtttttccaaagaaggcagcgcggtctttcatgggcatttaagccttatcgaaattttttcaatggccttatgcagggcggagctggacgtgcaatacactcaaggttttaacccccttgcaaaactggagattgtctcgccgttgtccgtgggaatcagcgcagggggggaaattgcagctgtcgaatttctccacgcaattcagcccaatgatttccttgaaaaaatgaacgccaccctgccggaaggcctgaagataacccaggcggaatgtttctgtattccttccggcggcaagaaacattccctttcttccctgctttggggttttggctacgccgcggacggggaaacgatatatgtaccggcagccgccgagaaagcccaccgggaaaaacatctgtcttccggcgggtcgcttttctctctgcgccgttcctgcgtattggcaaaaagccaaatcaacggcaaacaacccagcggtcagccctgggcttcttattttgacgtatatggacatttatataaagggagtggggagtag

SEQ ID NO: 35814 - protein, 224 aa, Unknown
  Obtained from environmental sample
  misc_feature (1)..(224): Xaa is any amino acid
MRNEELGIGITNEQCLPIKTPLPTPYSPLPIKKPDPVIWRLLFGFSKEGSAVFHGHLSLIEIFSMALCRAELDVQYTQGFNPLAKLEIVSPLSVGISAGGEIAAVEFLHAIQPNDFLEKMNATLPEGLKITQAECFCIPSGGKKHSLSSLLWGFGYAADGETIYVPAAAEKAHREKHLSSGGSLFSLRRSCVLAKSQINGKQPSGQPWASYFDVYGHLYKGSGE

SEQ ID NO: 35815 - DNA, 1230 bp, Unknown
  Obtained from environmental sample
  misc_feature (1)..(1230): n is a, c, g, or t
gtgtattccaacagtatttttcaggcccattccactttagacctcttttatgaccatcaggagccaaatggggcgattcgctccgcttatgacatcaattccagcgcgcctgtgatagaaaaagacaaccatgaagggcttggaatgccccttttcgcctgggcggagtacaatatctaccacaaatcgggcaataaaaagagggttaaagatactttacccattttatgcaagtactcaacatggatcgataccgtgtttaaaaagcaaaacggcctttacaaagcgcccctcggcgctaccgggatgacaaatgctccccgtggggacgcatactatgccatggattttaacaccatgattgcgattaatatgctctatatatccgcccttgcggacattttgaacgataaggaaacgagtttccagtacaagcgtcagtatttttccctaaaaacaaggatcaattcgttaatgtataacccgacggacggtttttactacgacataaataaaaatgaaaaacaagtccccataaaaacaattgccgggtattggccacttttggcggaaattcccaatggggaaaaagccgagcgtataatcgaaaaactttcagaccctaaatactttggcaccgcccacccgttcccctcccttgcgttgtccgaaaaagagtttgacgaaacaggacgcgggttcagaggatcggtttttccttacctgacattcatggttataaaagggcttgagcgttatcagcgctgggatttggcgcgngaatgcgcgatcaggcacatgtacttcatgctcgattcaatgagcccggacggtaatcatcacaggggaaacctgtgggaagcgtatttgcccacgaaggaagggccggcaaaatggtcaggtaaaccagctttcccgcgcccgcagtacttaacctacgacgctctttctaccatttgcctaaccatcgaaaatattgtcgggctttcaatttcgcttccgcgcaaaacagtggactgggttattcccagtctggaaattatgggagtggaaaatctttctcttaaaaacaatatgattaccattctttcaaataaaagcggcagaggctgggagattcacatggaaagtgaaaaactctattactttacaattaatattctgggtgtaaaagaaaaaacactgccaattccctctggaaaatgttccattcttattgataaactgtga

SEQ ID NO: 35816 - protein, 409 aa, Unknown
  Obtained from environmental sample
  misc_feature (1)..(409): Xaa is any amino acid
MYSNSIFQAHSTLDLFYDHQEPNGAIRSAYDINSSAPVIEKDNHEGLGMPLFAWAEYNIYHKSGNKKRVKDTLPILCKYSTWIDTVFKKQNGLYKAPLGATGMTNAPRGDAYYAMDFNTMIAINMLYISALADILNDKETSFQYKRQYFSLKTRINSLMYNPTDGFYYDINKNEKQVPIKTIAGYWPLLAEIPNGEKAERIIEKLSDPKYFGTAHPFPSLALSEKEFDETGRGFRGSVFPYLTFMVIKGLERYQRWDLARECAIRHMYFMLDSMSPDGNHHRGNLWEAYLPTKEGPAKWSGKPAFPRPQYLTYDALSTICLTIENIVGLSISLPRKTVDWVIPSLEIMGVENLSLKNNMITILSNKSGRGWEIHMESEKLYYFTINILGVKEKTLPIPSGKCSILIDKL

SEQ ID NO: 35817 - DNA, 561 bp, Unknown
  Obtained from environmental sample
  misc_feature (1)..(561): n is a, c, g, or t
ttgacggacttcaggtgtataagagtgctcatagaggcgcttaaggaaaacggcgtttacgcggacgagatggcggactgggacatagacacgatggtcgcctcggcgcggttgcacgacatagggaagatagccgtatccgacgtgatactgaacaagcccggcaagctcactccggaggagttcgccattgttaagagccacgtcagggagggcgagcgtattatagacaagatagtaaccaagaccggcgacgaggagtttttgcaatgcgcacgcctctttgtaagctaccaccacgagcgctgggacggcagcggctacccttacgggcttgccgggttggaaatccccctcgtagggcgcattatggcgatcatagacgtctacgacgccctcgtctcctcgcggccctacaaaaagcccttctcccccgatatggccgtaaacaccatcatgcaggagtcaggcaagcacttcgacccgaacatagcggagatattcttcctgaagcgggaagagttcaatgcgatagccgccgatacggttaagcacggctga

SEQ ID NO: 35818 - protein, 186 aa, Unknown
  Obtained from environmental sample
  DOMAIN (2)...(133): HD domain
  misc_feature (1)..(186): Xaa is any amino acid
MTDFRCIRVLIEALKENGVYADEMADWDIDTMVASARLHDIGKIAVSDVILNKPGKLTPEEFAIVKSHVREGERIIDKIVTKTGDEEFLQCARLFVSYHHERWDGSGYPYGLAGLEIPLVGRIMAIIDVYDALVSSRPYKKPFSPDMAVNTIMQESGKHFDPNIAEIFFLKREEFNAIAADTVKHG

SEQ ID NO: 35819 - DNA, 747 bp, Unknown
  Obtained from environmental sample
  misc_feature (1)..(747): n is a, c, g, or t
atgcgcatcgaatccaaatcctcgcagttgttgttcacgcccatagcgcttacggcgttcgtcatgcttgcatccgccccngtcgcgcgcaaacaacatgacgacaggtcggttgtacgctctatactggacaaaaacggcatgaaggatatgtccgtaaacgacgtgaccgagtttagccgcgacggccgcgttatagtgctcaacctcaacaagcgcggtatcgacggcgtcggcatgactgccttccctacggagatattcaagctcaccgccctaaaggggctcttcctaaagggtaacgccctcaaggagcttccccaagagataggaaacctctccgaattggttgaactgaatcttgccgacaacatagatttgggcagacttccctcgggtatctgcaaccttagaaacctcagaaagctcgacatccgttactgcgggttgactgagctcccgcaggagataggtaacctgaagaatctcgaaaccctgcagatgtggggcaacggcttcatcgagttgccgtactgcattaccgagctaacaagcctgaaagagctctacctgaagaacaataagttgaccaagataccgtacgacatgataaaaatggacaatctgaagtacatagacgtccagctgaactatctatgcaaccttttgccggaggtcgaagcgtggctggtgagcagagacaggaggtacaaggatcaccaatactgtgataatgtcaagaaatga

SEQ ID NO: 35820 - protein, 248 aa, Unknown
  Obtained from environmental sample
  SIGNAL (1)...(26)
  misc_feature (1)..(248): Xaa is any amino acid
MRIESKSSQLLFTPIALTAFVMLASAPVARKQHDDRSVVRSILDKNGMKDMSVNDVTEFSRDGRVIVLNLNKRGIDGVGMTAFPTEIFKLTALKGLFLKGNALKELPQEIGNLSELVELNLADNIDLGRLPSGICNLRNLRKLDIRYCGLTELPQEIGNLKNLETLQMWGNGFIELPYCITELTSLKELYLKNNKLTKIPYDMIKMDNLKYIDVQLNYLCNLLPEVEAWLVSRDRRYKDHQYCDNVKK

SEQ ID NO: 35821 - DNA, 1056 bp, Unknown
  Obtained from environmental sample
  misc_feature (1)..(1056): n is a, c, g, or t
atggcaggcagtaaaattaatttacatggtataatgaagagcaaagtaaccagcgccctcatggtgctgggcctgcttttgctgttcaatcttttcttcacgaaaaacttctttgtcataacggtgcaggacgggcacctgttcggtactatcatcgacataatcaacaggggcgcgccgttgatgcttctttctatgggaatgactctggtaatagcctccaccggcgggacggatctttccgtaggcgctatcatcgcaataacatccgcaatggtgtcaaaacttatcggaggccaactggttatcgttgacggagtacaaagctacgtttccaataatcctatggcgttagccataattgcgtcattgctgctggccatgggattgggactgtggaacgggctgttggttactcacggtaaaattcaacccatagtcgccacccttatactgatggtagccggaagggggatagcccagttgattaccgacggtcaaatcatcactgtctattacaggcctttcttcttcatcgggggcggctggtttctgggtttgccgttcgcgattttcatcgtcgccttcgtctttatcatcgcccagatctttacccggaaaacttcgctgggtttgttcatagcttcagtaggaggcaactctgacgcaagctggtacgcgggtattgacgaaaaagccgtcaaattgttcagctttatattttgcggtttttgcgccggtgttgccggtttgatcatttgttccaacgtaaaatcggcggacgcgaacaacgccggcctcaatacggaactggacgcgattctcgcggcagttatcggcggaaccaatatggcaggcggcaaattcagccttaccggaagcctcgtcggggcactcctgattcagactctgactacaaccatttacgcttttggagtaccgcctgaggtttcgttggtagttaaggctctggtggttgtgctggtgtgcttcctgcaatcaagtattgccgcgaatttctttggtaaacttgtcgaggggaggagcagagcatga

SEQ ID NO: 35822 - protein, 351 aa, Unknown
  Obtained from environmental sample
  DOMAIN (50)...(330): Branched-chain amino acid transport system / permease component
  misc_feature (1)..(351): Xaa is any amino acid
MAGSKINLHGIMKSKVTSALMVLGLLLLFNLFFTKNFFVITVQDGHLFGTIIDIINRGAPLMLLSMGMTLVIASTGGTDLSVGAIIAITSAMVSKLIGGQLVIVDGVQSYVSNNPMALAIIASLLLAMGLGLWNGLLVTHGKIQPIVATLILMVAGRGIAQLITDGQIITVYYRPFFFIGGGWFLGLPFAIFIVAFVFIIAQIFTRKTSLGLFIASVGGNSDASWYAGIDEKAVKLFSFIFCGFCAGVAGLIICSNVKSADANNAGLNTELDAILAAVIGGTNMAGGKFSLTGSLVGALLIQTLTTTIYAFGVPPEVSLVVKALVVVLVCFLQSSIAANFFGKLVEGRSRA

SEQ ID NO: 35823 - DNA, 450 bp, Unknown
  Obtained from environmental sample
  misc_feature (1)..(450): n is a, c, g, or t
atggaaaaacagcaactaccggaagacttcaaagaatttatacaatgtctaaactcaaataatgttaaatatttgcttatcggcgggtgggcggtcggactgcacggacacccaagagcgacaaaagatattgatttccttatttttttagataataccaatttagaaaatcttgaaaaagcatttaacagttttggcgctccgcctgttgatattgattatcttcgtgaaaaaggcaatgttatcagaattggagtttcgccgattctaattgatattattaatgaggctgatggcattgattttgaagattgttattcaagaaaagaaaaaattacagttgaagacattgaaataccggtaatttcaaaagccgatttaataataaacaaaaaatcaaccggcagaaaatcagatatggcggatgctgaaaaatttagatataggtaa

SEQ ID NO: 35824 - protein, 149 aa, Unknown
  Obtained from environmental sample
  misc_feature (1)..(149): Xaa is any amino acid
MEKQQLPEDFKEFIQCLNSNNVKYLLIGGWAVGLHGHPRATKDIDFLIFLDNTNLENLEKAFNSFGAPPVDIDYLREKGNVIRIGVSPILIDIINEADGIDFEDCYSRKEKITVEDIEIPVISKADLIINKKSTGRKSDMADAEKFRYR

SEQ ID NO: 35825 - DNA, 471 bp, Unknown
  Obtained from environmental sample
  misc_feature (1)..(471): n is a, c, g, or t
atggaagagcaagcccgcaagttggggctagacccaatgccggacatgaccgtccatcagctttacgatctaatttttattcacgccgtagaaccgcaattaaaaacggaaaaaccaatcgctttactcgattacccagcttttgtcccgtgcctcgcaaaaaaatcgcctaacgggcaaaccgtagaacgctgggagttgtactgcaacggcatagaactagcgaattgctattcggaagaaaacgatcctcaagccgtaaaagatttttttacaaacgaagaagcggaaaaaaacaaaaccgccgttgtaaaacacaatatcgatcatgattattggaaaatattcgaaaaattccctcactgttccggcgtagcgataggattagacagattgattatggtattaacaggaaaaacaagcattgacggggtactgccttttgtggacttcacgaacaaaaacccctaa

SEQ ID NO: 35826 - protein, 156 aa, Unknown
  Obtained from environmental sample
  DOMAIN (1)...(153): tRNA synthetases class II (D, K and N)
  misc_feature (1)..(156): Xaa is any amino acid
MEEQARKLGLDPMPDMTVHQLYDLIFIHAVEPQLKTEKPIALLDYPAFVPCLAKKSPNGQTVERWELYCNGIELANCYSEENDPQAVKDFFTNEEAEKNKTAVVKHNIDHDYWKIFEKFPHCSGVAIGLDRLIMVLTGKTSIDGVLPFVDFTNKNP

SEQ ID NO: 35827 - DNA, 720 bp, Unknown
  Obtained from environmental sample
  misc_feature (1)..(720): n is a, c, g, or t
gtggcggcactgtcaggaactatagtcaacgctgttgcggtggtattgggctctttggccgggcttgttttgcctcgtatgcctgagcgcatgcgggaggttgtcatgcaggggctggggcttgctattctgttcataggaatggatatggggcttaagacgcggaactttatattggtaataatcagtttggcgctgggcgggatcgtcgggtcgttgctgcggcttgacgaactgttggactggacggggcggcggcttgaggcggcggtcaaaaagggcggcggggagggcggctccgtggcggagggcttcgtgagcgcgaccctgctcttctgcgtgggcgcgatggccgtgataggggccatagagggggcgctgcgcggcgaccacaccatactgtacacgaagtcgctcttggacggcatctcggccatgctcctgaccgccgcgctcggcataggcgtaatcttctcggcggcggcggtactcttgtaccagggggcgattgcgctgtcggcgaagtacataacctcgttcctgagcgctgcggaattagactcggcggtgacggaagtaagcgcggtaggcggaatattggtcgccgcgatcggtctgggagtactgaacgttaaaaagatcaacgtagtgaatttattgccgtcaatagtaattatagcggtattggcgttgattaataatcggtggggattgatataa

SEQ ID NO: 35828 - protein, 239 aa, Unknown
  Obtained from environmental sample
  DOMAIN (4)...(235): Protein of unknown function (DUF554)
  misc_feature (1)..(239): Xaa is any amino acid
MAALSGTIVNAVAVVLGSLAGLVLPRMPERMREVVMQGLGLAILFIGMDMGLKTRNFILVIISLALGGIVGSLLRLDELLDWTGRRLEAAVKKGGGEGGSVAEGFVSATLLFCVGAMAVIGAIEGALRGDHTILYTKSLLDGISAMLLTAALGIGVIFSAAAVLLYQGAIALSAKYITSFLSAAELDSAVTEVSAVGGILVAAIGLGVLNVKKINVVNLLPSIVIIAVLALINNRWGLI

SEQ ID NO: 35829 - DNA, 675 bp, Unknown
  Obtained from environmental sample
  misc_feature (1)..(675): n is a, c, g, or t
ttgatctttttaacgttcagtactcccagaccgatcgcggcgaccaatattccgcctaccgcgcttacttccgtcaccgccgagtctaattccgcagcgctcaggaacgaggttatgtacttcgccgacagcgcaatcgccccctggtacaagagtaccgccgccgccgagaagattacgcctatgccgagcgcggcggtcaggagcatggccgagatgccgtccaagagcgacttcgtgtacagtatggtgtggtcgccgcgcagcgccccctctatggcccctatcacggccatcgcgcccacgcagaagagcagggtcgcgctcacgaagccctccgccacggagccgccctccccgccgccctttttgaccgccgcctcaagccgccgccccgtccagtccaacagttcgtcaagccgcagcaacgacccgacgatcccgcccagcgccaaactgattattaccaatataaagttccgcgtcttaagccccatatccattcctatgaacagaatagcaagccccagcccctgcatgacaacctcccgcatgcgctcaggcatacgaggcaaaacaagcccggccaaagagcccaataccaccgcaacagcgttgactatagttcctgacagtgccgccacatctatttccttatcttccgtaatggtttaa

SEQ ID NO: 35830 - protein, 224 aa, Unknown
  Obtained from environmental sample
  misc_feature (1)..(224): Xaa is any amino acid
MIFLTFSTPRPIAATNIPPTALTSVTAESNSAALRNEVMYFADSAIAPWYKSTAAAEKITPMPSAAVRSMAEMPSKSDFVYSMVWSPRSAPSMAPITAIAPTQKSRVALTKPSATEPPSPPPFLTAASSRRPVQSNSSSSRSNDPTIPPSAKLIITNIKFRVLSPISIPMNRIASPSPCMTTSRMRSGIRGKTSPAKEPNTTATALTIVPDSAATSISLSSVMV

SEQ ID NO: 35831 - DNA, 372 bp, Unknown
  Obtained from environmental sample
  misc_feature (1)..(372): n is a, c, g, or t
gtgccaggacctttacgacgcgcgcgcttggccgacgcgggcgcgcccgccgtgatgccgctgggggcgcccatcggtaccaatagggggctgcggacggcggaacttatagagataatgatcgcggagtcgagtttgccggtgatagtggacgccgggataggcaggccgtcgcacgcggcggaggctatggagatgggggccgcggcggtgctgctaaatacggcgatagcggccagcgacgatccggtgcggatggcggaggctttcaaatacgcggttagagcggggcggcaggcgtatttggcgggaatggcggggacgtcgaagacggctagcgcttcttcgccgcttacggggtttctggggtga

SEQ ID NO: 35832 - protein, 123 aa, Unknown
  Obtained from environmental sample
  DOMAIN (2)...(123): Thiazole biosynthesis protein ThiG
  misc_feature (1)..(123): Xaa is any amino acid
MPGPLRRARLADAGAPAVMPLGAPIGTNRGLRTAELIEIMIAESSLPVIVDAGIGRPSHAAEAMEMGAAAVLLNTAIAASDDPVRMAEAFKYAVRAGRQAYLAGMAGTSKTASASSPLTGFLG

SEQ ID NO: 35833 - DNA, 438 bp, Unknown
  Obtained from environmental sample
  misc_feature (1)..(438): n is a, c, g, or t
atgcttagacctccaacctatcgaccaggtagtcttcctggtacctttaggggggttgaacccccagggatggtttatcttgaggagggcttcccgcttagatgccttcagcggttatcccgtcccgacgtagctacccggcacttgcccctggcgggacaaccggtacaccagcggtcggtccatttcggtcctctcgtactaaaaacagctcctctcaaccatccaacgcccatggcagatagggaccgaactgtctcgcgacgttctgaacccagctcacgtaccgctttaaatggcgaacagccatacccttgggacctgcttcagccccaggatgcgatgagccgacatcgaggtgccaaaccttcccgtcgatgtggactcttggggaagatcagcctgttatccccggagtaccttttatccgttaagtga

SEQ ID NO: 35834 - protein, 145 aa, Unknown
  Obtained from environmental sample
  misc_feature (1)..(145): Xaa is any amino acid
MLRPPTYRPGSLPGTFRGVEPPGMVYLEEGFPLRCLQRLSRPDVATRHLPLAGQPVHQRSVHFGPLVLKTAPLNHPTPMADRDRTVSRRSEPSSRTALNGEQPYPWDLLQPQDAMSRHRGAKPSRRCGLLGKISLLSPEYLLSVK

SEQ ID NO: 35835 - DNA, 303 bp, Unknown
  Obtained from environmental sample
  misc_feature (1)..(303): n is a, c, g, or t
gtgccaaaccttcccgtcgatgtggactcttggggaagatcagcctgttatccccggagtaccttttatccgttaagtgacggcgcttccactcgctgccgccagatcactaagacctactttcgtacctgctcggcctgtcagcctcgcagtcaagcctccttgtgcctttacactcatgcgccgatttccaaccggcgcgaggagaccttcgcgcacctccgttactcttttggaggcgaccgccccagtcaaaccgcctgcctatcactgtccccgaccccgattcacgggtcggggtag

SEQ ID NO: 35836 - protein, 100 aa, Unknown
  Obtained from environmental sample
  misc_feature (1)..(100): Xaa is any amino acid
MPNLPVDVDSWGRSACYPRSTFYPLSDGASTRCRQITKTYFRTCSACQPRSQASLCLYTHAPISNRREETFAHLRYSFGGDRPSQTACLSLSPTPIHGSG

SEQ ID NO: 35837 - DNA, 546 bp, Unknown
  Obtained from environmental sample
  misc_feature (1)..(546): n is a, c, g, or t
atgacagaatggccgagttatggaggcttttatgccgagagtaatacttttttcatggatcagatcagcgaacaccaaagagaccttacaaattcagcgagccagcgttttattgcagattatatagcaggtttttgcctcgctgtttcacggatgacaggcgtaattaaggggcttggcgttgaccgggagcgtcttcatgcaaacttaaacgatgacggcggaaatttgccggggggcataatggcggagcctgcctacattttattagcggaaacaggcgtttcagacgcgcacgaggttatccgcagaattaccctttccgcagaaaaagataaaacaagttttgccgcagctcttgcaaaagagcctgcgttactcgaaaaaataggcggcaaattaaaagaactcggattaattgaaacaacagacagcgcattgtcattctttgagaatccgcagcgttactgcggtcttgcttccgaaaaagcaaaaacaattgcaaaaaaatataaatcattaatgggaggaaatgatgttcaatga

SEQ ID NO: 35838 - protein, 181 aa, Unknown
  Obtained from environmental sample
  misc_feature (1)..(181): Xaa is any amino acid
MTEWPSYGGFYAESNTFFMDQISEHQRDLTNSASQRFIADYIAGFCLAVSRMTGVIKGLGVDRERLHANLNDDGGNLPGGIMAEPAYILLAETGVSDAHEVIRRITLSAEKDKTSFAAALAKEPALLEKIGGKLKELGLIETTDSALSFFENPQRYCGLASEKAKTIAKKYKSLMGGNDVQ

SEQ ID NO: 35839 - DNA, 468 bp, Unknown
  Obtained from environmental sample
  misc_feature (1)..(468): n is a, c, g, or t
atgatgttcaatgaaggtttatcttatgacgatgttcttttgcagcctggatattcggaaatactgccgaaagactgtaacattcaaactgtgttatgcaaaggaattaatcttaatgttccggtaatttcagccgctatggacactgtaacggaagaaaaacttgcgattgcaattgcgctggaaggaggagcgggagttgttcaccgtaatctaagccccgtcgaacaggcgcggcagatttcaggagttaagcgttttttaaactggataattgattctcccgtaactgttccgcatgatgcgcatatcagcgatgtcagggatttggtaaataaacacggtatctcaggccttccggtagtagacagcgaaggaaaactaaaaggaaatattacaaaccgcgatctgcgtttctgtgacgatgattccctgtctgtaaccagcgtaatgacggaaaaactgtaa

SEQ ID NO: 35840 - protein, 155 aa, Unknown
  Obtained from environmental sample
  DOMAIN (34)...(141): CBS domain pair
  misc_feature (1)..(155): Xaa is any amino acid
MMFNEGLSYDDVLLQPGYSEILPKDCNIQTVLCKGINLNVPVISAAMDTVTEEKLAIAIALEGGAGVVHRNLSPVEQARQISGVKRFLNWIIDSPVTVPHDAHISDVRDLVNKHGISGLPVVDSEGKLKGNITNRDLRFCDDDSLSVTSVMTEKL

SEQ ID NO: 35841 - DNA, 543 bp, Unknown
  Obtained from environmental sample
  misc_feature (1)..(543): n is a, c, g, or t
atggcgaaaaaaaagtttagatcaactactataattgcggttcgcaaagatggcaagatcgctatggcgggggacgggcaggttaccttcggcgagaccgttatgaagaataacgcccgtaaggtgcggcggctgatggacggcaaggtgttgtgcgggtttgcgggttccaccgcggacgtgtttaccctttttgaccgcttcgaggcgaagctcaaggagtattcgggcgatctgacgcgcgctgccgtggaactggcaaaagactggcgcatggaccgcagcctaagacggcttgaggcgatgatactcgtcgccgacgcttcaaagaccctgcttgtatcgggctctggcgacgttattgagccggccgacaacgccatcgccataggatcgggcggcaattacgcctacgccgcggctttagccttcctcgacggaagcaattattcggctgcggaaatcgccgaaaaaagccttaaaatcgccgggaatatctgtatctataccaacatggaaatacttctggaggaattgggatga

SEQ ID NO: 35842 - protein, 180 aa, Unknown
  Obtained from environmental sample
  DOMAIN (5)...(179): Proteasome A-type and B-type
  misc_feature (1)..(180): Xaa is any amino acid
MAKKKFRSTTIIAVRKDGKIAMAGDGQVTFGETVMKNNARKVRRLMDGKVLCGFAGSTADVFTLFDRFEAKLKEYSGDLTRAAVELAKDWRMDRSLRRLEAMILVADASKTLLVSGSGDVIEPADNAIAIGSGGNYAYAAALAFLDGSNYSAAEIAEKSLKIAGNICIYTNMEILLEELG

SEQ ID NO: 35843 - DNA, 444 bp, Unknown
  Obtained from environmental sample
  misc_feature (1)..(444): n is a, c, g, or t
ttgccgcccgatcctatggcgatggcgttgtcggccggctcaataacgtcgccagagcccgatacaagcagggtctttgaagcgtcggcgacgagtatcatcgcctcaagccgtcttaggctgcggtccatgcgccagtcttttgccagttccacggcagcgcgcgtcagatcgcccgaatactccttgagcttcgcctcgaagcggtcaaaaagggtaaacacgtccgcggtggaacccgcaaacccgcacaacaccttgccgtccatcagccgccgcaccttacgggcgttattcttcataacggtctcgccgaaggtaacctgcccgtcccccgccatagcgatcttgccatctttgcgaaccgcaattatagtagttgatctaaacttttttttcgccatatcctttattccctcttctttattagctattagctattag

SEQ ID NO: 35844 - protein, 147 aa, Unknown
  Obtained from environmental sample
  misc_feature (1)..(147): Xaa is any amino acid
MPPDPMAMALSAGSITSPEPDTSRVFEASATSIIASSRLRLRSMRQSFASSTAARVRSPEYSLSFASKRSKRVNTSAVEPANPHNTLPSISRRTLRALFFITVSPKVTCPSPAIAILPSLRTAIIVVDLNFFFAISFIPSSLLAISY

SEQ ID NO: 35845 - DNA, 759 bp, Unknown
  Obtained from environmental sample
  misc_feature (1)..(759): n is a, c, g, or t
ttgacgcgcgtccgccgccagcgtgaaccgcaggctttcatccgtccggggcttttccgctggctgaccaggttccgcggacgtgttgataatccctgcgacggcggccccacagggattatccgcaatgttaaagtaccgcagaccctgccttccctgctctgggaagacgaaatggcggatttcgcggatctgccggatgagaaaaaaatgctgtggccggccagggacaaggctttgattctggctatgtattccgcgggtctgcgtatttcagaattggtctcgttaaatatgaagatgatagcggctaacatggagagcgcgagaataacaggcaagggcggcaaggaacgtattgtgttcttttccgaagaggctagggcggcaattcatgattatctgcctgaacgggaatccagaattaggatggcggggttaaaggctgtcgatttgaaaggagccttgtttataagcgccaaagggcgttctatttccgtgccgggcgtgcgctggattatcggccaatatgccacggtttcgggacttgggaaaaacatacacccgcacagtttccgccacagttttgccacccatttagtgaatgccggatgtgacgtgcgggtcgtgcaggaaatgcttggacacgcgaggctttccaccacacagcgttactcccatgtcagcattgaaagactgaagaaggtgtatgccaaggcacatccgcatagcagagaacagataacagataacagataa

SEQ ID NO: 35846 - protein, 252 aa, Unknown
  Obtained from environmental sample
  DOMAIN (65)...(235): Phage integrase family
  misc_feature (1)..(252): Xaa is any amino acid
MTRVRRQREPQAFIRPGLFRWLTRFRGRVDNPCDGGPTGIIRNVKVPQTLPSLLWEDEMADFADLPDEKKMLWPARDKALILAMYSAGLRISELVSLNMKMIAANMESARITGKGGKERIVFFSEEARAAIHDYLPERESRIRMAGLKAVDLKGALFISAKGRSISVPGVRWIIGQYATVSGLGKNIHPHSFRHSFATHLVNAGCDVRVVQEMLGHARLSTTQRYSHVSIERLKKVYAKAHPHSREQITDNR

SEQ ID NO: 35847 - DNA, 591 bp, Unknown
  Obtained from environmental sample
  misc_feature (1)..(591): n is a, c, g, or t
ttgcctccggagccgatggcaatggcgtcattggccggctcaataacgtcgcctgagccggaaacaagcagggtctttgataaatcggcgacgaggatcatcgcctcaagccgcctgaggctgcgatccattctccagtcctttgcaagttctacggcggctcgtgtcaaatctcccgaatactccttgagttttgcctcgaagcggtcaaaaagggtaaacacgtccgcggtagaaccggcaaagccgcataacaccttaccgtccatcaagcggcgtaccttgcgggcgttattcttcatcaccgtctcgccgaaggttacctgtccgtcccccgccatagcgatcttgccgtccttgcgcacggctattatagtagttgatctaaactttttcctcgccataactctctcttccttcttccctttgttatctgttatctgttatctgttctctgctatgcggatgtgccttggcatacaccttcttcagtctttcaatgctgacatgggagtaacgctgtgtggtggaaagcctcgcgtgtccaagcatttcctgcacgacccgcacgtcacatccggcattcactaa

SEQ ID NO: 35848 - protein, 196 aa, Unknown
  Obtained from environmental sample
  misc_feature (1)..(196): Xaa is any amino acid
MPPEPMAMASLAGSITSPEPETSRVFDKSATRIIASSRLRLRSILQSFASSTAARVKSPEYSLSFASKRSKRVNTSAVEPAKPHNTLPSIKRRTLRALFFITVSPKVTCPSPAIAILPSLRTAIIVVDLNFFLAITLSSFFPLLSVICYLFSAMRMCLGIHLLQSFNADMGVTLCGGKPRVSKHFLHDPHVTSGIH

SEQ ID NO: 35849 - DNA, 543 bp, Unknown
  Obtained from environmental sample
  misc_feature (1)..(543): n is a, c, g, or t
atggcgaggaaaaagtttagatcaactactataatagccgtgcgcaaggacggcaagatcgctatggcgggggacggacaggtaaccttcggcgagacggtgatgaagaataacgcccgcaaggtacgccgcttgatggacggtaaggtgttatgcggctttgccggttctaccgcggacgtgtttaccctttttgaccgcttcgaggcaaaactcaaggagtattcgggagatttgacacgagccgccgtagaacttgcaaaggactggagaatggatcgcagcctcaggcggcttgaggcgatgatcctcgtcgccgatttatcaaagaccctgcttgtttccggctcaggcgacgttattgagccggccaatgacgccattgccatcggctccggaggcaattacgcgtacgccgcggcgttaggctacctcgacggaagcaattattcggctaaggaaatcgccgaaaaaagcctgaaaatcgcggggaatatctgcatctatactaacatggaaataactctggaggaattgggatga

SEQ ID NO: 35850 - protein, 180 aa, Unknown
  Obtained from environmental sample
  DOMAIN (5)...(179): Proteasome A-type and B-type
  misc_feature (1)..(180): Xaa is any amino acid
MARKKFRSTTIIAVRKDGKIAMAGDGQVTFGETVMKNNARKVRRLMDGKVLCGFAGSTADVFTLFDRFEAKLKEYSGDLTRAAVELAKDWRMDRSLRRLEAMILVADLSKTLLVSGSGDVIEPANDAIAIGSGGNYAYAAALGYLDGSNYSAKEIAEKSLKIAGNICIYTNMEITLEELG

SEQ ID NO: 35851 - DNA, 552 bp, Unknown
  Obtained from environmental sample
  misc_feature (1)..(552): n is a, c, g, or t
atgaatccaaattttgggcagattgtaatgaacgttgcttacgatgttcaaagcgcgacgcccggtgatgacggtgccatagtacgccagaccttccagttgaacctgggcactgtcggcggcctttcaaattccatgacccagttcgccgaaagaagctcttcaaagattgtacagcaagacggttacggcatgggctatatggagaacttcaagatcgacggcagcgggatcattacggggatcttttccaacggaactacccgcacactgggacaggttgcgatggcgagtttccccaaccagggaggtcttgagaaagccggggacaacactttcagaaagaccaataactcggggaacgcgaatatcggcccgtcaggcattgccggaaaaggcataatcaaggcaggcgttctggaaatgtcaaatgtagacatggcggatcaatttaccgacatgatcgttacacagcgcggtttccaggccaattccagaacgatacaaacggcggatcaactgctgcaggaattgttaagtctgaaaaggtaa

SEQ ID NO: 35852 - protein, 183 aa, Unknown
  Obtained from environmental sample
  DOMAIN (143)...(181): Domain of unknown function (DUF1078)
  misc_feature (1)..(183): Xaa is any amino acid
MNPNFGQIVMNVAYDVQSATPGDDGAIVRQTFQLNLGTVGGLSNSMTQFAERSSSKIVQQDGYGMGYMENFKIDGSGIITGIFSNGTTRTLGQVAMASFPNQGGLEKAGDNTFRKTNNSGNANIGPSGIAGKGIIKAGVLEMSNVDMADQFTDMIVTQRGFQANSRTIQTADQLLQELLSLKR

SEQ ID NO: 35853 - DNA, 669 bp, Unknown
  Obtained from environmental sample
  misc_feature (1)..(669): n is a, c, g, or t
atgggtgatttatacatcaaaaatatagctgcatgggatgataattgcaaaatacgtgcctacgacattgagaatgggatagataaaacatacaacaaagttttgcttccgtatgtattaaatacattagaacagtactcaaaatcaaatgatgttgtcttggatattggttgtggttgcggctttttgacttcaaaaattgctgaaagatggactgttgaagggcttgatatatctagtgctgcaattaattattcaaaaaataaatatccttatttatcctttatacaaggaaatgcttgtacagttaagttgtctcgaaaatataattttgccgttgcaaatatggtaatacacaatcttcccgatctgacagctttctttcaaaatgtttcttccatgttagtagatgacggagttcttctgatggttcttctacatcctctttattgggcaagagaaaaattagctgacaaagattttatatacgaaaaacaatttacttatagtaaaaaattaatgaattgttctaaacccgttaaatattttcatcgacctatatgtgattatatcagttcaatagaaaagaatagatttgccctgtggaatattgacccatatatgaagaatatgatggtgtacgttatcatgaatttcctcatatngtaa

SEQ ID NO: 35854 - protein, 222 aa, Unknown
  Obtained from environmental sample
  DOMAIN (54)...(143): Methyltransferase domain
  misc_feature (1)..(222): Xaa is any amino acid
MGDLYIKNIAAWDDNCKIRAYDIENGIDKTYNKVLLPYVLNTLEQYSKSNDVVLDIGCGCGFLTSKIAERWTVEGLDISSAAINYSKNKYPYLSFIQGNACTVKLSRKYNFAVANMVIHNLPDLTAFFQNVSSMLVDDGVLLMVLLHPLYWAREKLADKDFIYEKQFTYSKKLMNCSKPVKYFHRPICDYISSIEKNRFALWNIDPYMKNMMVYVIMNFLIX

SEQ ID NO: 35855 - DNA, 399 bp, Unknown
  Obtained from environmental sample
  misc_feature (1)..(399): n is a, c, g, or t
atggcggcgggaccggtgccggaggtcagcccggtcataaaggtggataaactgctctcggccagaaaactggtcggcgagatatacatggactccaaggtggaagactacatcgtgaacatcgtcttcgccaccagagaaccggagacggtgggactgggcgacatgaagtcgctgatatcatacggcgcgtcgccgcgcgccacactgttcctaacaagagcggccaaagcccacgccttcataagaggacgcggatacgtgacaccggaggacataaaatccgtaggaatggacatcctaagacacagggtgataaccacttacgaggcggaggcggagaatgtgacttcggagcagattgtgcagaagatatttgatagcgtggaggtgccgtaa

SEQ ID NO: 35856 - protein, 132 aa, Unknown
  Obtained from environmental sample
  misc_feature (1)..(132): Xaa is any amino acid
MAAGPVPEVSPVIKVDKLLSARKLVGEIYMDSKVEDYIVNIVFATREPETVGLGDMKSLISYGASPRATLFLTRAAKAHAFIRGRGYVTPEDIKSVGMDILRHRVITTYEAEAENVTSEQIVQKIFDSVEVP

SEQ ID NO: 35857 - DNA, 333 bp, Unknown
  Obtained from environmental sample
  misc_feature (1)..(333): n is a, c, g, or t
ttggggaggcgcttagttagaatgatacctaaggaagtgttacagaaagtccggcaaatcgagatccgcacccggcggattgtggactctatgctctcggggtcataccacagcgccttcaagggcaaggggatggagttttcggaggtgcggccttatattgagggggacgatgtccgcactatcgactggaatgttacggctcggatgggggcgccttacattaagaagtatattgaggagcgggagcttacggttatgcttgtcgtagacgcttcggcttcgggggacttcgggtctatcgacaaatttcaagggggagatggcggttga

SEQ ID NO: 35858 - protein, 110 aa, Unknown
  Obtained from environmental sample
  DOMAIN (1)...(81): Protein of unknown function DUF58
  misc_feature (1)..(110): Xaa is any amino acid
MGRRLVRMIPKEVLQKVRQIEIRTRRIVDSMLSGSYHSAFKGKGMEFSEVRPYIEGDDVRTIDWNVTARMGAPYIKKYIEERELTVMLVVDASASGDFGSIDKFQGGDGG

SEQ ID NO: 35859 - DNA, 492 bp, Unknown
  Obtained from environmental sample
  misc_feature (1)..(492): n is a, c, g, or t
atgaaaaaattgcacttagtatttatagcgcttgcaaccattttgttttttggttgctcagaaaaaaatccagaaggcgaaaacgagcctgctcaaaaaagcggctgggtttcccgttactgggacggttgcaaacagagctgttcgtggggtgggagtgacaaaacacagtaccctcccctggctagcaccgaccgttgcagggcttgcggaatagacggccatagcgagatagccgctattgataataacaggagcagttgcactggtggaaattcctacacctgttttgactttaccccgtacaaggtgaacgataacttggcttatgcttttgcggctgccccaacagaccaatgcggcaaatgctttgagctgcaatttgacggaggttctagatacccagctaatgcaaatcatctaaaaattaaaggcaagaccttgattgttatgaccagcaacaaggcggtgacgttgctgaagtcagtttga

SEQ ID NO: 35860 - protein, 163 aa, Unknown
  Obtained from environmental sample
  SIGNAL (1)...(22)
  DOMAIN (34)...(163): Glycosyl hydrolase family 45
  misc_feature (1)..(163): Xaa is any amino acid
MKKLHLVFIALATILFFGCSEKNPEGENEPAQKSGWVSRYWDGCKQSCSWGGSDKTQYPPLASTDRCRACGIDGHSEIAAIDNNRSSCTGGNSYTCFDFTPYKVNDNLAYAFAAAPTDQCGKCFELQFDGGSRYPANANHLKIKGKTLIVMTSNKAVTLLKSV

SEQ ID NO: 35861 - DNA, 300 bp, Unknown
  Obtained from environmental sample
  misc_feature (1)..(300): n is a, c, g, or t
gtggtggagttggccagttcaatgctttctctagccaaatcnggtgtttccacagaacaattaggtgagaagtatggtggtttgttgggtacttgcgaaatagagagcaattacaatgcttctacatacaaacagtgtcttacaaacaagtgcaacagcgtgttcaccgatgccactttaaaggcaggctgcatatttttagccgattggtttgaggcggctggcaacccaaccatgctctacagagaagttgaatgcccgcaatatttgataaacaaatacaaggctactttaaaataa

SEQ ID NO: 35862 - protein, 99 aa, Unknown
  Obtained from environmental sample
  misc_feature (1)..(99): Xaa is any amino acid
MVELASSMLSLAKSGVSTEQLGEKYGGLLGTCEIESNYNASTYKQCLTNKCNSVFTDATLKAGCIFLADWFEAAGNPTMLYREVECPQYLINKYKATLK

SEQ ID NO: 35863 - DNA, 408 bp, Unknown
  Obtained from environmental sample
  misc_feature (1)..(408): n is a, c, g, or t
atgagggacgaggggcggcacatagcgatggtctacatggtgcgcagctctatagacccgagcggggagcgggcgtgggaaaagatgagccgcgaagccgagggctgcggcgcggaggccgaggcgggcagccggtcgcccggatgggcctatcgggagaagagcgctntgagggatctgtttcttaccaagtacaaagagctgttcggcgaagaggcggcggcctccccggtgcacgctggcttggagtgcggtcactttgcggagaagttcgcaaaatataaggatatggacttcatatcgtgcggccccacgacaacggagatacacagcgtaaacgagacgctgcatacggatacggttgagaaattcgggaagctgttaatagaagtactgaaaagtctttaa

SEQ ID NO: 35864 - protein, 135 aa, Unknown
  Obtained from environmental sample
  misc_feature (1)..(135): Xaa is any amino acid
MRDEGRHIAMVYMVRSSIDPSGERAWEKMSREAEGCGAEAEAGSRSPGWAYREKSAXRDLFLTKYKELFGEEAAASPVHAGLECGHFAEKFAKYKDMDFISCGPTTTEIHSVNETLHTDTVEKFGKLLIEVLKSL

SEQ ID NO: 35865 - DNA, 999 bp, Unknown
  Obtained from environmental sample
  misc_feature (1)..(999): n is a, c, g, or t
atggatttcaatttagagattcttgaggtaccggaagagcttgttaattttataaaaacctgctctaaattcatcattgccggtcataaagagccggacggagactgcgtggggagccagcttgccctgcgcagcgttcttctgcgcatgggaaaagaagcgatagtttgttcggcaggtccttttaaacgcgcggaaataaaagaatatgcagggcaatttacctctattccgcctgaagcaaataaaacagatacaaaagtaataatagttgactgttcaggaaaagaaagaaccggaagtatcagcgaaattttaaatgaatttcctttcgcggtaatagatcatcatgccgccgtaaatcatccgccgtcaacaatcgaagaaccgatttatattgatcctaacgcaccctcatgctcattattgatatataaattaataaacacccttggtcttgagctaactgaagaagaagcgtctttgcttctttttgggatgtgcacagatacgggttttttcaggcatctgacggaaaggaacgcgcaggtttttgaatgcgtagcanaattagtctcatgcggcgtaagtcccaagaaaatattctataaattgaacggcggaaaaactcttggttccagaaaattattgggaaatattttatcaaggacagaatcttactttaacggaaaactcctgcttagttatgaaacattagatgagtttaaaacttttgggtttgaagccagagattctgacnatttaaatcaaatgcttttagcggtagaaggaacgcaagcaattgtaattatccgccaggagtgtgccgacaattgtactgtgagtttaagatcattggataaagttgacgtatcacagattgcggcatcccttggcggaggcggtcataagaacgcttctggcctcactatgaaaggagaccttccgtttgtaaaacaaataatgttagattcatttaaaaatactttcactgaataa

SEQ ID NO: 35866 - protein, 332 aa, Unknown
  Obtained from environmental sample
  DOMAIN (266)...(332): DHHA1 domain
  misc_feature (1)..(332): Xaa is any amino acid
MDFNLEILEVPEELVNFIKTCSKFIIAGHKEPDGDCVGSQLALRSVLLRMGKEAIVCSAGPFKRAEIKEYAGQFTSIPPEANKTDTKVIIVDCSGKERTGSISEILNEFPFAVIDHHAAVNHPPSTIEEPIYIDPNAPSCSLLIYKLINTLGLELTEEEASLLLFGMCTDTGFFRHLTERNAQVFECVAXLVSCGVSPKKIFYKLNGGKTLGSRKLLGNILSRTESYFNGKLLLSYETLDEFKTFGFEARDSDXLNQMLLAVEGTQAIVIIRQECADNCTVSLRSLDKVDVSQIAASLGGGGHKNASGLTMKGDLPFVKQIMLDSFKNTFTE

SEQ ID NO: 35867 - DNA, 540 bp, Unknown
  Obtained from environmental sample
  misc_feature (1)..(540): n is a, c, g, or t
atggaagtagtaaagggagagatagtgctgttaaggaagaagcgcaccgccttgaagaaagcgcaagcccgtcttggtgaaagcgataaccagcataggcaagacgcgacattgccaagatacgggatggtggtagacaacaaagaccccgagaagcagggacgagtaaaggtagccaccgacacgatagcgcccggaaccgtaacgccgtggataccggtaatagcgcccggagcgggaaaagacaccggcttgtggcaactgcccgagaaaggcggccaggcgcttatggcgttcgtaggcgaagggcaccagacccccgtagtaatggggagcgtatacaatataaacctgcagcccccgaaacacacaacggaaaagataaaagacagcaaagtatggcagagcaaaacccaccgcgtggagtttacagacgagggagggaaagaaagcataatagtgagcggggcggaagggcagatgaggatagtgataagcaaggacggcgggatagagctggtaaacgagttcctaatgtaa

SEQ ID NO: 35868 - protein, 179 aa, Unknown
  Obtained from environmental sample
  DOMAIN (39)...(109): Protein of unknown function, DUF586
  misc_feature (1)..(179): Xaa is any amino acid
MEVVKGEIVLLRKKRTALKKAQARLGESDNQHRQDATLPRYGMVVDNKDPEKQGRVKVATDTIAPGTVTPWIPVIAPGAGKDTGLWQLPEKGGQALMAFVGEGHQTPVVMGSVYNINLQPPKHTTEKIKDSKVWQSKTHRVEFTDEGGKESIIVSGAEGQMRIVISKDGGIELVNEFLM

SEQ ID NO: 35869 - DNA, 456 bp, Unknown
  Obtained from environmental sample
  misc_feature (1)..(456): n is a, c, g, or t
gtgggcaagatagtgataagcgatacgatcctcaacaaacccgataagctgaccgatgaggagcgcaccctgattaataagcacagtgccgagggcgagcggatcatcgacgagatcatcgcaaaatccgggatgagggagggcgaatatatgacccacgccaagaagttcgccggttatcaccacgagaagtgggacggcaacggttatccgcacgggctaaaaggtgagaagataccgcttgagggtcgcattatggccgtcgcggacgtatacgacgcgcttgtctccgagcgcccgtataagaagccgtttacccacgagcgggcggtggatattatcaagaaggacagcggcacgcacttcgacccgaaaattgtcgaggtgtttctggtagtggagggtgatttttggacggaaagaactatacttgcgtcaaactcacagacggaataa

SEQ ID NO: 35870 - protein, 151 aa, Unknown
  Obtained from environmental sample
  DOMAIN (1)...(95): HD domain
  misc_feature (1)..(151): Xaa is any amino acid
MGKIVISDTILNKPDKLTDEERTLINKHSAEGERIIDEIIAKSGMREGEYMTHAKKFAGYHHEKWDGNGYPHGLKGEKIPLEGRIMAVADVYDALVSERPYKKPFTHERAVDIIKKDSGTHFDPKIVEVFLVVEGDFWTERTILASNSQTE

SEQ ID NO: 35871 - DNA, 807 bp, Unknown
  Obtained from environmental sample
  misc_feature (1)..(807): n is a, c, g, or t
atgataatagcgttaaagccgggcgcgaacaaggaagacgtacaaaggttaatcgccgagcttgaaaagttaggtgtaaaagtcgatacttctcaaggttcttcgcagtcggttcttgggcttgtcggcgacactaccgtcattaacgacgaggcgttaaaagccaatcatctggttgaaaaagttatccgcgtacaggagccgtacaagcgcgccaaccgcgcgtttcacccccttgatacgattattgagtttgaatgtaacggcaataaagccaaaataggcaaaggtaatttcagcgttatcgccggaccttgctccgtggaaagcagagatcaattaatctctattgcaaaatccgttaaaaaatcgggcgcggctttccttcgcggcggcgcttttaagcctaggacaagcccctatagttttcagggcatgggctgtttaggactcgatcttatggtagaggcaaaaaaagaaacagggcttccgattgttaccgagttaatggaaataagccagcttgaattgtttgacgatgttgacatgattcaggttggagcgcgcaatatgcagaatttcaatcttttaaaagagctgggtcgatgccgaaagccgattctgcttaaacgcggaatggcgtccacaatgacggaactgctgatggcggcggaatatgttatggctggcggcaatgacaaaattgttctttgcgagcgcggaatccgcggatttgataatttttcgcgtaacgtacttgatatcgctattattcccgctcttaagaaaaaacccaccttcctgtaa

SEQ ID NO: 35872 - protein, 268 aa, Unknown
  Obtained from environmental sample
  DOMAIN (80)...(267): DAHP synthetase I family
  misc_feature (1)..(268): Xaa is any amino acid
MIIALKPGANKEDVQRLIAELEKLGVKVDTSQGSSQSVLGLVGDTTVINDEALKANHLVEKVIRVQEPYKRANRAFHPLDTIIEFECNGNKAKIGKGNFSVIAGPCSVESRDQLISIAKSVKKSGAAFLRGGAFKPRTSPYSFQGMGCLGLDLMVEAKKETGLPIVTELMEISQLELFDDVDMIQVGARNMQNFNLLKELGRCRKPILLKRGMASTMTELLMAAEYVMAGGNDKIVLCERGIRGFDNFSRNVLDIAIIPALKKKPTFL

SEQ ID NO: 35873 - DNA, 672 bp, Unknown
  Obtained from environmental sample
  misc_feature (1)..(672): n is a, c, g, or t
atgaacatacagggcggcttatcctacctgtaccctcagtcaactatgggggcgcatgtatcagacgccccgcaccagcagacattacgcgaaacgcctttgagtacccgttttaataccgcgtgttttggttgtctgggttatgaattggatttgcgttttctcacccccgcagaaaagcgcgagattaaagaacaaatcggcttttacaaagctcgccgtaaaacttttcaatacggaactttccagcggctggactcgcccaagaccaataaaacagtctggttatgcagagataagaaagaaaccgtagccggtttttttcagactcaggccaacgtcagtgagggacaggacagactgtgcatccccggtcttgatcccgataatatctaccgggtaagcactaaaccgcagcagttgtacatcaaacgatttgggggtttggtcaagcacctgttgccagtaacattgaaccctgcgggatttattctgagaaccgtcaatcgacattatacgctgaccgactgtgttgaaacttataattgccggggcagtgcgctggcggcgggaatcatgttgaataatcagttcatgggtggtaattacaacaacaaaacccgcctcttgggtgattacggctcaaatctgtatactgtttcatcaatataa

SEQ ID NO: 35874 - protein, 223 aa, Unknown
  Obtained from environmental sample
  DOMAIN (1)...(129): Melibiase
  misc_feature (1)..(223): Xaa is any amino acid
MNIQGGLSYLYPQSTMGAHVSDAPHQQTLRETPLSTRFNTACFGCLGYELDLRFLTPAEKREIKEQIGFYKARRKTFQYGTFQRLDSPKTNKTVWLCRDKKETVAGFFQTQANVSEGQDRLCIPGLDPDNIYRVSTKPQQLYIKRFGGLVKHLLPVTLNPAGFILRTVNRHYTLTDCVETYNCRGSALAAGIMLNNQFMGGNYNNKTRLLGDYGSNLYTVSSI

SEQ ID NO: 35875 - DNA, 801 bp, Unknown
  Obtained from environmental sample
  misc_feature (1)..(801): n is a, c, g, or t
ttgcgtgcgccggacaacgcggcgttccaggccgtgctcgaagccgccgggatcccactcgccgcgcccagcgccaatcgggccggggcgccgtcgcccaccaccgccgaacacgtgttagccgacctggacggtcgaatcgacgccgtgctcgatggcggcccctgccgagtgggcgtggagtcaacggtggtttcgttgggatccaacaattcgtcattctgcgcgcaagtcgcagaatctaggcccgcagttcaccgtgattcacctgcccgcctgctccgccccggaggcatctccctccagcagttacgcgaagttctgggcgaggtcgcggtggacgctgccgtcaccggaaacgtcccggcagacgtcgtccccggcgctcccggtatgaagtaccggcactacgctcccccagccccgctcgcgatcctgaccggagagttgcccgctgccgtgcaatacgtggcttcgtaccgcgctcagcaccgcagcgagaccgtggccgtgctctgccccgacgaggaagcgggggcattttcgggcagatgccacgttccgggtttcagagagcctcagccgccgaaaatgcaggtcgtcacctacgggtcgcaaaccgatcccgaatccctcgcgcgcggcctgttttcggcgcttagaaaattaagcacgccgaatatcggtcgcatctttgcccggctgcccgccgacgatgctggcatcaacctcgccacccgaaatcgacttcagaaggctgccggattcacggcgatcgacccaacccgcaacctcgattag

SEQ ID NO: 35876 - protein, 266 aa, Unknown
  Obtained from environmental sample
  DOMAIN (99)...(259): SUA5 domain
  misc_feature (1)..(266): Xaa is any amino acid
MRAPDNAAFQAVLEAAGIPLAAPSANRAGAPSPTTAEHVLADLDGRIDAVLDGGPCRVGVESTVVSLGSNNSSFCAQVAESRPAVHRDSPARLLRPGGISLQQLREVLGEVAVDAAVTGNVPADVVPGAPGMKYRHYAPPAPLAILTGELPAAVQYVASYRAQHRSETVAVLCPDEEAGAFSGRCHVPGFREPQPPKMQVVTYGSQTDPESLARGLFSALRKLSTPNIGRIFARLPADDAGINLATRNRLQKAAGFTAIDPTRNLD

SEQ ID NO: 35877 - DNA, 609 bp, Unknown
  Obtained from environmental sample
  misc_feature (1)..(609): n is a, c, g, or t
ttgtcggcgccaggtccatcgtgcagggacgtagttcgccgtcatcggaaaactccacgtgaatcgcgccgtcgcggaagtcggaaaagtgtccagcgcgcatcgggcatgaggaagaaccccaggtcacgacgtaaaacattccctccacgccggtccaggccaccgccgcccgagcattcgccccggcaacgccagcaaccaagtcagccggaaggcccggtgcccagccaccggcctgcaccagcaacgagttggcgtccagcatctggtgggcgatattcggcggcgcccaggcgacctccaccggggcgggcggcaagccctcgcccgggacaggcggcgaaccagtatcgtcggtgcgcggcggcacgacgatggtcgcggggttgcccgagtctggggttccgtcgggggcaaaatgcacggtcagcggcgcaaactcgtccgtcccctcaggcaccgcaacgcgtgaggtgtagaagaccaagtcggacaggcagagatcctcgggcccgagttgggtactcagcacgatgcgcacgccctcctcgtccggagtggcctgggccgatgcgtaagtcgggcagccggtcgagccggacgtga

SEQ ID NO: 35878 - protein, 202 aa, Unknown
  Obtained from environmental sample
  misc_feature (1)..(202): Xaa is any amino acid
MSAPGPSCRDVVRRHRKTPRESRRRGSRKSVQRASGMRKNPRSRRKTFPPRRSRPPPPEHSPRQRQQPSQPEGPVPSHRPAPATSWRPASGGRYSAAPRRPPPGRAASPRPGQAANQYRRCAAARRWSRGCPSLGFRRGQNARSAAQTRPSPQAPQRVRCRRPSRTGRDPRARVGYSARCARPPRPEWPGPMRKSGSRSSRT

SEQ ID NO: 35879 - DNA, 393 bp, Unknown
  Obtained from environmental sample
  misc_feature (1)..(393): n is a, c, g, or t
atgatcgtaaccattaagccaaaagaagttgaaatttccgaacaggtgcaagtcctcgttgtcggcggaggccctgcgggtatcggagcggcggtttctgcagccagactcggagcgcagacgctgcttctggagaaacgcggttttcttggcggcaatataaccggcgcatacgttgaaacctgcaactggtttttgtacggcacgcgattttccgcttacggattgtacgcggaaatggaagctgcctaccgcaccgaatggggaagaagtcatgacctgcgggaaaattcaccgcaccggttctcctcagagtatatgcggatttttttggacgaattgatccagcgggaacggattaaagtactccttcattcatttgtaaatgagtag

SEQ ID NO: 35880 - protein, 130 aa, Unknown
  Obtained from environmental sample
  misc_feature (1)..(130): Xaa is any amino acid
MIVTIKPKEVEISEQVQVLVVGGGPAGIGAAVSAARLGAQTLLLEKRGFLGGNITGAYVETCNWFLYGTRFSAYGLYAEMEAAYRTEWGRSHDLRENSPHRFSSEYMRIFLDELIQRERIKVLLHSFVNE

SEQ ID NO: 35881 - DNA, 867 bp, Unknown
  Obtained from environmental sample
  misc_feature (1)..(867): n is a, c, g, or t
gtgaatttagcgagaagcaataatatgactgtacatgggcatattctggcatggcacgaagcgactccggaatggatgacaaccggancaagggcggaggtcgaacagaatcttaaaaatcatattaattctgttttaacacactttaaaagcaggattgcctcatgggatgtggtaaatgaagcgattcaagacaacctttccgccgccgccgccgactggaaaaggtgtgtacgtaattctcaaaacccatggtacgacaaactgggatcggattacattgaaattgccttccgcgccgcccgagccgccgatcctgatataacgctttattataacgagtattttcacatggatggtttttattcatgggattcgataaactccgctcttaacaaagccgaagctgtacggaaaatgatagatgatatcaataccagatataaaaatgaaactagcggaagacgtaaccttattgagggcataggagtgcaatcgcatcattatggttttggtattaacttgaataatttacgctcatgtttggataaattcattactcttggaattcagatagcaataagcgaattggacatatcagcttcaggttatgtcaggggatcgggctctgatacggttatgactgaaaaagatgaattggcgcaggccaggctttacgcacggctgttcaaactgtacaaagaatatgccgctcatatatcacgtgtaacatggtggggaatggatgacggtaacagttggctttcccccggaaatccctgcctttttgactggaaactgaatgccaagaaagcgttttttgcggtaagcgatcctgttgcttttcttgtgaaatacggagaatga

SEQ ID NO: 35882 - protein, 288 aa, Unknown
  Obtained from environmental sample
  DOMAIN (1)...(280): Glycosyl hydrolase family 10
  misc_feature (1)..(288): Xaa is any amino acid
MNLARSNNMTVHGHILAWHEATPEWMTTGXRAEVEQNLKNHINSVLTHFKSRIASWDVVNEAIQDNLSAAAADWKRCVRNSQNPWYDKLGSDYIEIAFRAARAADPDITLYYNEYFHMDGFYSWDSINSALNKAEAVRKMIDDINTRYKNETSGRRNLIEGIGVQSHHYGFGINLNNLRSCLDKFITLGIQIAISELDISASGYVRGSGSDTVMTEKDELAQARLYARLFKLYKEYAAHISRVTWWGMDDGNSWLSPGNPCLFDWKLNAKKAFFAVSDPVAFLVKYGE

SEQ ID NO: 35883 - DNA, 903 bp, Unknown
  Obtained from environmental sample
  misc_feature (1)..(903): n is a, c, g, or t
atgatcgacaacaaatacgaccggaatcacgcggccgcgattgtggcttgcgccggagccttgggccccatcattccgccgagtatttttttcgtgctgtatggggtcatggccaacacctcaatcagcaggctttttctcgcgggcataataccggggtttgtcatcgtctttttcctcctggtcgccaacaacctcatctgcaagcgggaaaactacccggtcatggaaaaaaaacacagtcctatggaaaaactgcggtcggtccgggaggcgttttgggccttgatggcgccggttgtcgtattgggcggcatatacagcggttctttcactccgaccgaagccgcggtggtatcggttgtttacagcgccattatcagtgtttttgtttacagggaaataggcttcaaggatattcccgaggtcttcatccgggggggcctcacggcggccgccatactggtgattttcggtccggcggcttttttcggcaagcttctggccgtggcccaggtgccccaaagcctggcggagtggcttatcaacatcaccgccagccccatgttgttcatcattctggtcaatctcctcctcttggcggcgggtatgctgatggaaggcgtcgctgtgctaaccattcttaccccgctcttgatgcccatagccgccgtgtacaaaatcaatcctgtttatttcggcgtattgatctgcgtaaacctgtcccttggtctgttcaccccgcccttcgggctcaatttgttcattgcctcccgcatcgcgcaaacagacttcaccaaaaccctgcgctttttatggccgcaggctttggccgcgttattggccttggcggtcattatcgcctttcccgtaatttccacctggctgccgggtctttattga

SEQ ID NO: 35884 - protein, 300 aa, Unknown
  Obtained from environmental sample
  DOMAIN (1)...(293): DctM-like transporters
  misc_feature (1)..(300): Xaa is any amino acid
MIDNKYDRNHAAAIVACAGALGPIIPPSIFFVLYGVMANTSISRLFLAGIIPGFVIVFFLLVANNLICKRENYPVMEKKHSPMEKLRSVREAFWALMAPVVVLGGIYSGSFTPTEAAVVSVVYSAIISVFVYREIGFKDIPEVFIRGGLTAAAILVIFGPAAFFGKLLAVAQVPQSLAEWLINITASPMLFIILVNLLLLAAGMLMEGVAVLTILTPLLMPIAAVYKINPVYFGVLICVNLSLGLFTPPFGLNLFIASRIAQTDFTKTLRFLWPQALAALLALAVIIAFPVISTWLPGLY

SEQ ID NO: 35885 - DNA, 804 bp, Unknown
  Obtained from environmental sample
  misc_feature (1)..(804): n is a, c, g, or t
gtgccgattgtcgcccttacagccaatgcccttagcggaaacgaggagatgttcctttccaagggttttaacgcttttatcgcgaaaccgattgatgttatgcagttggacgccgttttaaatacctgggtgcgggacaggaaaagcattgaaattcttaaacaggcggaaatggtaatgcccgttattgaaaacgcggatcagaatattttggacggcgtacagatagagggccttgaccttgtccggggcaagaaaaagtacaccaatgacgccgcgtatctggatattttgcgctcctggcataaacatactccggcgttgcttgaaaagatgagaaatcctctttttgaaagtctgcccgaatacgctattacagtacacggtattaagggagccagccttggcatatgcgctgatgatataagcagtaaagctgaagagctggaacattacgccaaaagcggaaatatcgggaaagttcaggcggataattccatgtttattggtatggcggaatcgctgcttgcgaatataggggaattactggaaaaattcgacgtagggaaaaaggaaaagccaaaaagacacgttccggatccagcccttcttgacaggctgttggaggcggcaaaatcctataaatccactttaatggaagaaactatgtgttctattgaatcatatgattacgattcggacatggagcttgttgcctggctgcgccaacagatggatgaccttgaatatgacgcaatccgccagaagcttngaagtcggacgcccggctttgtcgaaacgtaa

SEQ ID NO: 35886 - protein, 267 aa, Unknown
  Obtained from environmental sample
  misc_feature (1)..(267): Xaa is any amino acid
MPIVALTANALSGNEEMFLSKGFNAFIAKPIDVMQLDAVLNTWVRDRKSIEILKQAEMVMPVIENADQNILDGVQIEGLDLVRGKKKYTNDAAYLDILRSWHKHTPALLEKMRNPLFESLPEYAITVHGIKGASLGICADDISSKAEELEHYAKSGNIGKVQADNSMFIGMAESLLANIGELLEKFDVGKKEKPKRHVPDPALLDRLLEAAKSYKSTLMEETMCSIESYDYDSDMELVAWLRQQMDDLEYDAIRQKLXSRTPGFVET

SEQ ID NO: 35887 - DNA, 633 bp, Unknown
  Obtained from environmental sample
  misc_feature (1)..(633): n is a, c, g, or t
atgggagcaatattgattggtgatggacatcttgtcagtctcaagcagataagcgccctgctttccaaagattacgatgtttcactggcaaagtccggggagatggcgctgcacatatgcgcccaggaacagccggatttgattctgcttgatgtggaaatgaccggcatggacggttttgagacaatagcccgcctgaaggaaaatgaacgtttgaagaatatcccggtaatttttctgaccggtaaccgcgacgccgacacagaggtaaaatgcctggaatcgggggcaatggattttatcaccaagcccgccaatgccgagattctgcgccacaggatagaactgcatcttcagttttccatataccaccttcacctggagcacatggtaaaggaactggaagataatatcggcctttcgcttgcggagctattggattgtaaagaatacaacgcggccatccacttgatgccttaccggaaaatatgtggaagtaactggctgaagagctcaactaccaaggggcattcttggacaccacctcacggccaaggatgcggatttgccaaaaccccgctcccccctctcaggaataagggaacccgggaacaaggaaataaaactgcctaa

SEQ ID NO: 35888 - protein, 210 aa, Unknown
  Obtained from environmental sample
  DOMAIN (2)...(115): Response regulator receiver domain
  misc_feature (1)..(210): Xaa is any amino acid
MGAILIGDGHLVSLKQISALLSKDYDVSLAKSGEMALHICAQEQPDLILLDVEMTGMDGFETIARLKENERLKNIPVIFLTGNRDADTEVKCLESGAMDFITKPANAEILRHRIELHLQFSIYHLHLEHMVKELEDNIGLSLAELLDCKEYNAAIHLMPYRKICGSNWLKSSTTKGHSWTPPHGQGCGFAKTPLPPLRNKGTREQGNKTA

SEQ ID NO: 35889 - DNA, 969 bp, Unknown
  Obtained from environmental sample
  misc_feature (1)..(969): n is a, c, g, or t
ttgccgggctatgaagagttgacgcgggagttttcgcccagcgtcatcgtgcccttcggctacgcgggcggggtgtacggtcttccggaaacccagtacttccatgtcatgttttaccgcaaggacatttttgccgaactgaatattaccgttcccgaaacatgggacgatctgatcggtattttgcccattattcaaaaaaacaatatgaacgtgggaatcccctcggtggcgactaccgtgcaggccaacatcgacttttccaatttcctcgcccatctgtaccagcgaaacggcaggttgtacaacgaggaaggctcccgcaccctgctggacggcgagacggccattgaagcgtttgacgtctacacgaaattttttacccattacaaaacgccggcggtgtatgattttctcaaccgtttccgcaccggtgaaatgccccttgctttcgccgattacaccaactttaacacccttgaagttttcgcgccggaactgcgcggactgtggggattcgcccacatgccgggccttcgcaaacaggacggcggaattgaccgctctgtgccgacgggaaccctcgcctcgatgattttttccaacgcgaagaaaccggaacttgcctgggaattcctgaagtggtgggtcagcgccgacacccagcttcgttttggccgggaacttgaaagcgtcatgggcgcggcggcgcggtatcccacggcgaattatgacgcttttacaaggctttcctggggctcggagcagatggccgtgctgcgggaacagcgctcatggacggttggcacgccggaagtgccgggcggttactatgtcagccgccatataaccaacgcggtgcgccgcatactgaacgagggcgaagatacgcgggaaaccctgctggattacagcataacgataaatgatgagctgctgaaaaaacgcaaggaattcggtctggagtag

SEQ ID NO: 35890 - protein, 322 aa, Unknown
  Obtained from environmental sample
  misc_feature (1)..(322): Xaa is any amino acid
MPGYEELTREFSPSVIVPFGYAGGVYGLPETQYFHVMFYRKDIFAELNITVPETWDDLIGILPIIQKNNMNVGIPSVATTVQANIDFSNFLAHLYQRNGRLYNEEGSRTLLDGETAIEAFDVYTKFFTHYKTPAVYDFLNRFRTGEMPLAFADYTNFNTLEVFAPELRGLWGFAHMPGLRKQDGGIDRSVPTGTLASMIFSNAKKPELAWEFLKWWVSADTQLRFGRELESVMGAAARYPTANYDAFTRLSWGSEQMAVLREQRSWTVGTPEVPGGYYVSRHITNAVRRILNEGEDTRETLLDYSITINDELLKKRKEFGLE

SEQ ID NO: 35891 - DNA, 360 bp, Unknown
  Obtained from environmental sample
  misc_feature (1)..(360): n is a, c, g, or t
gtggtattcgttgaggattggtacggggacggaataataggaccttcaagcatgggcggcagtgtaaggaaaaaaggcgaatgtacagtagacggcgagagatatattatttatgaagcaacaagacctgccggttcaggcaacatagagggcagaagcgtcgctttccagcaatattttagtgtgcgtcaaaaacgccgtcaaagcgggacaatttccattaccgagcattttaaggaatgggaaaaaataggcatgaaacttggcagtaatatgtatgaagcaaaattcctggtagaagccggcggcggcatgggctggtttgacgcctcacatatttctttttatcagaaagactaa

SEQ ID NO: 35892 - protein, 119 aa, Unknown
  Obtained from environmental sample
  DOMAIN (2)...(112): Glycosyl hydrolases family 11
  misc_feature (1)..(119): Xaa is any amino acid
MVFVEDWYGDGIIGPSSMGGSVRKKGECTVDGERYIIYEATRPAGSGNIEGRSVAFQQYFSVRQKRRQSGTISITEHFKEWEKIGMKLGSNMYEAKFLVEAGGGMGWFDASHISFYQKD

SEQ ID NO: 35893 - DNA, 1242 bp, Unknown
  Obtained from environmental sample
  misc_feature (1)..(1242): n is a, c, g, or t
atgattgacacccccgaaggcaaacgccctctttcgcaatcatccttttcggtctttatggaaagcggcgaccgtgatctgcgccaaagggcgtatcaaactttttacggctgttttgacgcgcacaaaaccgttattgcaagcctgtactccggttccgtcaaacaagacgttataaacgccagaataagaggcttcccttccgcccgcgccgcgtcccttttcgccgacgacgtaagcgaagctgtttacgacaacttgatatccgcagtcagcggcaatcttgacatattgcaccgctattacagtcttcgcaaacgagcgctgaaagtgcaggaacttcgccactatgacgtatacgctcctcttgtccccaccgctaaaaaaaccacaaactggaacgaagccgtcgatcttgtaagcaacgccctgtctccgttaggtgacgaatatgtctctactctgcaaacaggacttctgggcaggtgggcggatcgttacgagaacaaaggcaaacgttcgggcgcattttcttcgggatgttttacaggcgacccctatattttgatgaactacaaggaagattcaatccgtgatgttttcactctcgcccacgaaggcggtcattcaatgcactcatggtactccgcccgcaacaacccgttcccgcactacaattacacgatattcgaagcggaagtagccagcacttttaacgaagaactgttattccgatatctgataaaacaagccgacagcaaagaattgcgtctttatttggtcaacaaacacgccgacgacttgttagccacattgtaccgtcaaaccatgttcgcagaatttgaaaaaactacccacgaacttgaagaaggcggcactccgctgaccgtggaacttcttcgcagcgaataccgcaaactattggaaaaatatttcggtccggaaatggtacttgaagaggcaagcgatcttgaaggtttgcgtatcccacacttttacaacgcgttttatgtttacaaatacgcaacaggagtctccgccgccctcgcgttagcggatcgtgttctgtcaggcggcgaaaaggaaagacaggactatttcaccttccttaaatccggcggctcacgcttccctatcgaatcattaaaagccgccggagtagacatgagcagtcccgaacctgtaaacgccgcctgccgtgttttcggcaaactggttgatgaactggaaaagatgctttga

SEQ ID NO: 35894 - protein, 413 aa, Unknown
  Obtained from environmental sample
  DOMAIN (18)...(401): Peptidase family M3
  misc_feature (1)..(413): Xaa is any amino acid
MIDTPEGKRPLSQSSFSVFMESGDRDLRQRAYQTFYGCFDAHKTVIASLYSGSVKQDVINARIRGFPSARAASLFADDVSEAVYDNLISAVSGNLDILHRYYSLRKRALKVQELRHYDVYAPLVPTAKKTTNWNEAVDLVSNALSPLGDEYVSTLQTGLLGRWADRYENKGKRSGAFSSGCFTGDPYILMNYKEDSIRDVFTLAHEGGHSMHSWYSARNNPFPHYNYTIFEAEVASTFNEELLFRYLIKQADSKELRLYLVNKHADDLLATLYRQTMFAEFEKTTHELEEGGTPLTVELLRSEYRKLLEKYFGPEMVLEEASDLEGLRIPHFYNAFYVYKYATGVSAALALADRVLSGGEKERQDYFTFLKSGGSRFPIESLKAAGVDMSSPEPVNAACRVFGKLVDELEKML

SEQ ID NO: 35895 - DNA, 390 bp, Unknown
  Obtained from environmental sample
  misc_feature (1)..(390): n is a, c, g, or t
atgtcagcctgtaccgattcaggagcaaaccatatccgttttggcggcagaagttacgctcccacagcgacattttcactgttaaaaacggcatgggatatcgccgtatccaaaggatgccagccaaaagccggacctgtggtatcggcggatatgttctatacagaagacagggacgaatggaaactctgggcaaaatacggctgtcttgcccttgaaatggaaagcgcggaactctacactttagccgccaaatttaatcgtgaagccctatgtatactgaccatctccgacagcctgatcaccggagaagttacatcagccgaagagaggcaaataacctttacccgcatgatggaagtcgcacttcagacggcgattagcggttag

SEQ ID NO: 35896 - protein, 129 aa, Unknown
  Obtained from environmental sample
  DOMAIN (1)...(126): Phosphorylase family
  misc_feature (1)..(129): Xaa is any amino acid
MSACTDSGANHIRFGGRSYAPTATFSLLKTAWDIAVSKGCQPKAGPVVSADMFYTEDRDEWKLWAKYGCLALEMESAELYTLAAKFNREALCILTISDSLITGEVTSAEERQITFTRMMEVALQTAISG

SEQ ID NO: 35897 - DNA, 408 bp, Unknown
  Obtained from environmental sample
  misc_feature (1)..(408): n is a, c, g, or t
ttgtttccggaaatagaggtaaacagctggtggacaaaccttagctgccaggcagagaaagtgatagaactgtatcacggtcatgccacaagcgagcagtttcacagcgaattgaaaagcgacatgggagttgagaggcttccgtccgggaagtttgcggtaaacaaaatagtgctggcagtggcgatgaatgcatataacgcgctgaagatgcttggccaaaaatccatagagaagggaaacggcaaaaaagtgaaacgcaagcggctgggaaaggtaatccgagatttaatatgcgttgcgggaaaattagtaaagcatggcagggaactgatattcaaaattaacgagaaagatcccatgctgcctgtgtttttgcggctgaatgctttgttgggctgtccgtag

SEQ ID NO: 35898 - protein, 135 aa, Unknown
  Obtained from environmental sample
  misc_feature (1)..(135): Xaa is any amino acid
MFPEIEVNSWWTNLSCQAEKVIELYHGHATSEQFHSELKSDMGVERLPSGKFAVNKIVLAVAMNAYNALKMLGQKSIEKGNGKKVKRKRLGKVIRDLICVAGKLVKHGRELIFKINEKDPMLPVFLRLNALLGCP

SEQ ID NO: 35899 - DNA, 771 bp, Unknown
  Obtained from environmental sample
  misc_feature (1)..(771): n is a, c, g, or t
ttgaaagcatggggggaaaaacgggaaagcctgtttttcaaagaggcgcttgggctgccttacgtgtacgcgaaagaaacggcaaggctttaccttgggaagatggcgggagacgccgacgggattgtcgaacagttaagggaaagctccgcaaagataatacgccaagcgccgctgcacgggctttggatacaggggaaacactatcttcctgtggatgtcgacacgacggcaatggacaactcgaagacaaagaaagaaggggtgaaccggacgtaccggggatttgacgggtttcatcctataatggcgtatgtagggaaagaagggtacctgctggacagtgaattgcggcccggcagccagcactgccagaaagggacggctgcatttattgaagggttaaacgcgcgccttgggggcataagatcaggcgggcgtttgctgttccgcctggacagcggcaacgattctttcgatacccttaaagccgtgacagggaaagggcgttattgcatcgtanaacggaacaaacgaagggaaaacgacgaanaatggcttanaagggccaaacggcacgggaaacgggttgtgtcaaggaaagggaaaaaagtctggattggaaccgtgcggatgcacccgcagagaaaggatgaagtcctagaggacgtcatatgcgtgttcgaggttatagaacggaagactgacagccagggggaaccggtatttgtttccggaaatagaggtaaacagctggtggacaaaccttag

SEQ ID NO: 35900 - protein, 256 aa, Unknown
  Obtained from environmental sample
  misc_feature (1)..(256): Xaa is any amino acid
MKAWGEKRESLFFKEALGLPYVYAKETARLYLGKMAGDADGIVEQLRESSAKIIRQAPLHGLWIQGKHYLPVDVDTTAMDNSKTKKEGVNRTYRGFDGFHPIMAYVGKEGYLLDSELRPGSQHCQKGTAAFIEGLNARLGGIRSGGRLLFRLDSGNDSFDTLKAVTGKGRYCIVXRNKRRENDEXWLXRAKRHGKRVVSRKGKKVWIGTVRMHPQRKDEVLEDVICVFEVIERKTDSQGEPVFVSGNRGKQLVDKP

SEQ ID NO: 35901 - DNA, 798 bp, Unknown
  Obtained from environmental sample
  misc_feature (1)..(798): n is a, c, g, or t
ttgatttgccgttaccgtgcaaaggacgcccgttcatcggttttgagggaaacgcttatgccgtggcttaattatacagtcagaaaaaacggttataactatttggcgcatgaaagcgttattactctttttaacggttctgaaatttggattggggggcttggagacagagagcaagcggataaaattctgggacatgagtataacacaatttattttaacgaaatatcacagttgagttacgccgctgttactacggcttattctcggctggctatgcgaattaagggctgccgtaatttattttattatgactgcaatccgggcagccctttgcattgggcttacaagatttttgttttgaaaaggcaatttctttccggcgaacctttagagaaacctgaactttatcaatccatgttattgaaccccgaagataacagcgaaaatttgcctgaagattatatatctgacattcttgatggtctgcctgaaaaacaaaaagcccgcttccgtgacggtttatgggttaaagcggaaggcgttatctacgaaagatttgatgaaagcatgattgttaacgcttctgaattgcctgaacagtttgatagatacgcagcggggcaggatttcggtttgaatatcacgtttgttaaaatcggctggcttggcgatatgatttatgttctttgcgattatggggctttcaatatgactacgcaaagttttaataaggaactgacagcaagaggctggtttgattgtcctgacggaatgggggctgcctgtgtattgtga

SEQ ID NO: 35902 - protein, 265 aa, Unknown
  Obtained from environmental sample
  misc_feature (1)..(265): Xaa is any amino acid
MICRYRAKDARSSVLRETLMPWLNYTVRKNGYNYLAHESVITLFNGSEIWIGGLGDREQADKILGHEYNTIYFNEISQLSYAAVTTAYSRLAMRIKGCRNLFYYDCNPGSPLHWAYKIFVLKRQFLSGEPLEKPELYQSMLLNPEDNSENLPEDYISDILDGLPEKQKARFRDGLWVKAEGVIYERFDESMIVNASELPEQFDRYAAGQDFGLNITFVKIGWLGDMIYVLCDYGAFNMTTQSFNKELTARGWFDCPDGMGAACVL

SEQ ID NO: 35903 - DNA, 582 bp, Unknown
  Obtained from environmental sample
  misc_feature (1)..(582): n is a, c, g, or t
ttggattattgcgagagcagttgctaccgtttatcgtcgacggcaccgcgtctggcggaagatttgagcgcggcgctcaattacagccagttgctgaaagtgtaccgggcgctgctgaccgaaggcgtttccctgcgcgatatcgtcaccatcgccaccgtgctggtcgccagtagcacggtgacgaaagatcatattctgctggcggccgatgtgcgcctggcattgcggcgcagcattacccatccgttcgttcgcaagcaggagctgacggtgtatacgctgaataatgagctggaaaatctgctgaccaacgtggtgaatcaggcgcaacagggcgggaaagtgatgctcgacagcgtgccggtcgatccgaatatgctcaaccagttccagagtacgatgccacaggtgaaagagcagatgaaagcggcggggaaagacccggtgctgctggtgccaccgcagctgcgccctttgctggcgcgttatgcaaggttgtttgcgccggggctgcatgtgctgtcgtataacgaagtgccggatgagctggagttgaagattatgggggcgttgatgtaa

SEQ ID NO: 35904 - protein, 193 aa, Unknown
  Obtained from environmental sample
  misc_feature (1)..(193): Xaa is any amino acid
MDYCESSCYRLSSTAPRLAEDLSAALNYSQLLKVYRALLTEGVSLRDIVTIATVLVASSTVTKDHILLAADVRLALRRSITHPFVRKQELTVYTLNNELENLLTNVVNQAQQGGKVMLDSVPVDPNMLNQFQSTMPQVKEQMKAAGKDPVLLVPPQLRPLLARYARLFAPGLHVLSYNEVPDELELKIMGALM

SEQ ID NO: 35905 - DNA, 750 bp, Unknown
  Obtained from environmental sample
  misc_feature (1)..(750): n is a, c, g, or t
atggtactcagttacaccaaagaagcctcttccaaacaatggggtaaggtaatgggtgttcggatccatttccctctggaatcctttaattcctgggccgttattcaaccgccctttgagattcccgcttttgaaccgcaggccaatgtctcggatgacggaaccattgaggcgaaagaagatggtggtgatggtattaccgctccgagccgttttgaagacggatacggcgtggtaaagaatgtcggaaccattaaatccattgcagtcaatgtatatggtttgaatttcccccacggactctctactctttatattgacagcctcggaaacaaaagatcatcgttcatgggttatctgtcatttgacggatggggagagcttcgctgggacaatcctgcttatgtccaggaagtacggaatcgcgacctccgcctgtaccccttatacccggcctctacgcccttcgtcaaattcggtggctttgaaatcaaacgtgatgcggccaaggacggcggtgattttatcacctattttaaggacgtaaagattatttacgataaagcggttcttgataccgatagagacctggatgatgaagccctttggagtattatccaggaccgggaaaatgcccgcaagagttgggaaatggaacgttttggtcagaatcaggtactccgttatctggatggtcagaaacaggctcgtgagaatgagtttactcccacaccgaccagtaaccaataa

SEQ ID NO: 35906 - protein, 249 aa, Unknown
  Obtained from environmental sample
  DOMAIN (2)...(195): Flagellar filament outer layer protein FlaA
  misc_feature (1)..(249): Xaa is any amino acid
MVLSYTKEASSKQWGKVMGVRIHFPLESFNSWAVIQPPFEIPAFEPQANVSDDGTIEAKEDGGDGITAPSRFEDGYGVVKNVGTIKSIAVNVYGLNFPHGLSTLYIDSLGNKRSSFMGYLSFDGWGELRWDNPAYVQEVRNRDLRLYPLYPASTPFVKFGGFEIKRDAAKDGGDFITYFKDVKIIYDKAVLDTDRDLDDEALWSIIQDRENARKSWEMERFGQNQVLRYLDGQKQARENEFTPTPTSNQ

SEQ ID NO: 35907 - DNA, 924 bp, Unknown
  Obtained from environmental sample
  misc_feature (1)..(924): n is a, c, g, or t
atgaaagatgttattgctcccaataaggaagccctgcgtcaggcatttgaagcaactgccgatgtcaggtctttaattgtcaaagatattgaaagtcgtatagaacaggcgctttcatcattgccttccccccctactcttaagatacgcataaaagaattcggcagctattacaaaaaatatctgcgcttgcttaaatcgggtgttactgaaccgcaaattaccgatcttatgggtatcagagtcatttgcccctttattgaagacctgaccagggcagaaacattgataaaagaacattttaatgttattgaaacagaacaaaagggacattatacctttaaggaatttggttacgaatcaattcatttgttgataaagatacccgctgatattatccagaaaagagggcagaccagttgcgatgtggctgaaatacagatacgaaccattttacaggatgcctgggcggaagtagaacatgaactggtttacaaagcggaattcagcccctttgatatgccgatgaaacgcaaacttgccgctgtcaatgcaagcctttcccttgccgatattatttttcaggagattcgcggttaccagaagcagcttaatcaccaattggaaagacgccgggaaactttctaccagaagattgaagaatccaccgatgccctgcttttttcggacactgaccatcaaaagatagatcagaagcaagaaactgcccacctgcacaaaggcattagctccattgacgatctgctgctggatgccctgtatgcccacaacaaaaaccagtttgaagaggccattgccctctacagccagatacttgaactaaagccggaaaaatccgctgtttgttcacttatctacaaacatagggggaatggcaaattttgccccatccaagtatcatga

SEQ ID NO: 35908 - protein, 307 aa, Unknown
  Obtained from environmental sample
  DOMAIN (49)...(168): Region found in RelA / SpoT proteins
  misc_feature (1)..(307): Xaa is any amino acid
MKDVIAPNKEALRQAFEATADVRSLIVKDIESRIEQALSSLPSPPTLKIRIKEFGSYYKKYLRLLKSGVTEPQITDLMGIRVICPFIEDLTRAETLIKEHFNVIETEQKGHYTFKEFGYESIHLLIKIPADIIQKRGQTSCDVAEIQIRTILQDAWAEVEHELVYKAEFSPFDMPMKRKLAAVNASLSLADIIFQEIRGYQKQLNHQLERRRETFYQKIEESTDALLFSDTDHQKIDQKQETAHLHKGISSIDDLLLDALYAHNKNQFEEAIALYSQILELKPEKSAVCSLIYKHRGNGKFCPIQVS

SEQ ID NO: 35909 - DNA, 627 bp, Unknown
  Obtained from environmental sample
  misc_feature (1)..(627): n is a, c, g, or t
atgtgcgccgcgatgattttgccgtcgggcgagctgatagaccttatgagcgaacgcggcattgtcgtgaaagtagcgggaatcagcgagtggatacattatctggattatatgcgcgaatattcacttaacaaattgcttaatctgcgcccgcgcggaaaaagaatgttttccgatccgtggagaaaacttaaaattcttcaaattgaaaaatggtggaaacaccatatcgagaaaaaaacgctggctatcttaaaaccgacaaaactaataccggaaacgcctcacgatatgcgccatattatgtcatttacaagagagcactttgtaaatcttgaacttaattcagagatagcggtctcctccggttcggcggcggcggcgatggacgccggctattcgggcattgtaaacataagcccgttcgcctgccttatcgggcgcgtaattgagggcctgttcactccgtgggcgcgcgaacgcaattacccgattttatctgtggaagtagacggcaaccttctgccgccgaacattgtaaacaaactcaacatttttatggttaatgttctgcgctttaagggaggaagtgatctttcttctctggtagacggggtatcttcatga

SEQ ID NO: 35910 - protein, 208 aa, Unknown
  Obtained from environmental sample
  misc_feature (1)..(208): Xaa is any amino acid
MCAAMILPSGELIDLMSERGIVVKVAGISEWIHYLDYMREYSLNKLLNLRPRGKRMFSDPWRKLKILQIEKWWKHHIEKKTLAILKPTKLIPETPHDMRHIMSFTREHFVNLELNSEIAVSSGSAAAAMDAGYSGIVNISPFACLIGRVIEGLFTPWARERNYPILSVEVDGNLLPPNIVNKLNIFMVNVLRFKGGSDLSSLVDGVSS

SEQ ID NO: 35911 - DNA, 858 bp, Unknown
  Obtained from environmental sample
  misc_feature (1)..(858): n is a, c, g, or t
atgaaggaaaacgttccaagattcgcgcgtcttggcatacggaatgtcgccggacttttatgccattacccgcgcgactgggaggatcgcagatttaccgttccgatagccgaattccgacgggcaaaggtatgcacagatgtcaccgtactcgcccatgactggatttggtttggcggcaaacggacacccaaaatatttattgaagatgaaagcggcagggccgttctggtcgggtacaaccgcacctggcttgcgaaacagatggaagtcggtggacgctacagggtttggggcagttttgaatacaaatacggcgagatacgatccagcaattttgaatttgaagatgcttccaaagccgagaattttaacacaatgatgccggtttatcccctgtgcgccggactcagacaggctatgcttcgccgttttacagctaacgccattgaacagtacgccgccatgctggagaacgagcttcccggtgaaatcatagacagagacaagctgctttcaaaatcagccgcgatcaaggcgtatcattttccgtcttcacccgaagagagggaactggcaaaaaagacgctgatatatgaagaattgttttatcttgaagtaatggtgggcaagagggcattggaacgaaagggaacagggaacagggaacggggaacggggaatagagagcagggaactgggactagggaacagggactagggaccgggaattgttgtatgctatctgatcgtgatagcaactcgctatgcccacaaaccgctatacctgttccccgatccccgatccctgatccccttctttcactcgcccttttacccaccatcacttcaagataa

SEQ ID NO: 35912 - protein, 285 aa, Unknown
  Obtained from environmental sample
  misc_feature (1)..(285): Xaa is any amino acid
MKENVPRFARLGIRNVAGLLCHYPRDWEDRRFTVPIAEFRRAKVCTDVTVLAHDWIWFGGKRTPKIFIEDESGRAVLVGYNRTWLAKQMEVGGRYRVWGSFEYKYGEIRSSNFEFEDASKAENFNTMMPVYPLCAGLRQAMLRRFTANAIEQYAAMLENELPGEIIDRDKLLSKSAAIKAYHFPSSPEERELAKKTLIYEELFYLEVMVGKRALERKGTGNRERGTGNREQGTGTREQGLGTGNCCMLSDRDSNSLCPQTAIPVPRSPIPDPLLSLALLPTITSR

SEQ ID NO: 35913 - DNA, 912 bp, Unknown
  Obtained from environmental sample
  misc_feature (1)..(912): n is a, c, g, or t
atgctactccgctccattaccgcgccgttaaccgcaattcggggcattggccccgcgctggttccaaaactcgcgcggctgggcatacaaaacgcggcggacctgatctgccactacccccgcgattgggaagaccggacgattaccgtccccattggtgaatttcaacacaaacaagtctgcaccgaagttacggtaatagcccgcgactggatcggctatggcaaaatgcggacgctgaaagtgtatgtcgaggatgagagcggcagggcggcgctgctgtgttttaaccgtccctggctggataaacagctggcgcagggcgggcgctttcgtctctggggccgcttttattacaagtacggtgaaattcaatccagttcttttgagatagaagcgcttacggcaacggaagatacggataccaggcatatacttccggtttatcctctcagcgccggactgaatcaaacaacactccgccgtttggtaaacaacgcccttgagcagtatgccgccggattagaagacgaacttccccgggagattattgaacgggataaactgctgtccaaagccgccgccatcagtgccattcattttcccgcttccctcgcggaactggaactcgcgaagaaaacattaatttatgaagaattgttttatcttgaagtgatggtgggtaaaagggcgagtgaaagaaggggatcagggatcggggatcggggaacaggtatagcggtttgtgggcatagcgagttgctatcacgatcagatagcatacaacaattcccggtccctagtccctgttccctagtcccagttccctgctctctattccccgttccccgttccctgttccctgttccctttcgttccaatgccctcttgcccaccattacttcaagataa

SEQ ID NO: 35914 - protein, 303 aa, Unknown
  Obtained from environmental sample
  misc_feature (1)..(303): Xaa is any amino acid
MLLRSITAPLTAIRGIGPALVPKLARLGIQNAADLICHYPRDWEDRTITVPIGEFQHKQVCTEVTVIARDWIGYGKMRTLKVYVEDESGRAALLCFNRPWLDKQLAQGGRFRLWGRFYYKYGEIQSSSFEIEALTATEDTDTRHILPVYPLSAGLNQTTLRRLVNNALEQYAAGLEDELPREIIERDKLLSKAAAISAIHFPASLAELELAKKTLIYEELFYLEVMVGKRASERRGSGIGDRGTGIAVCGHSELLSRSDSIQQFPVPSPCSLVPVPCSLFPVPRSLFPVPFRSNALLPTITSR

SEQ ID NO: 35915 - DNA, 360 bp, Unknown
  Obtained from environmental sample
  misc_feature (1)..(360): n is a, c, g, or t
atggggtcctaccactattttgacgaaagcagcatcgacgacgtggacgcccagcttcgccgcatcttcgacgccctgagcgacaagatggtcatggcccacgccaaggactgtaagcgcgccaaagacaccggggaaaaacacgccgccattgacgccgacgagtcccataccttccggggttcaggcgcggtggagcttccggcagccggcctgggagtcctaaattacgatctctacgtaaaactgctggctaaagaccaccccaatatgccgctcattattgaacacctggacgaaaacgacattagccgcgcccagggtttcctgaaagacgtgcttaaacgacagggcgtataa

SEQ ID NO: 35916 - protein, 119 aa, Unknown
  Obtained from environmental sample
  misc_feature (1)..(119): Xaa is any amino acid
MGSYHYFDESSIDDVDAQLRRIFDALSDKMVMAHAKDCKRAKDTGEKHAAIDADESHTFRGSGAVELPAAGLGVLNYDLYVKLLAKDHPNMPLIIEHLDENDISRAQGFLKDVLKRQGV

SEQ ID NO: 35917 - DNA, 705 bp, Unknown
  Obtained from environmental sample
  misc_feature (1)..(705): n is a, c, g, or t
gtgcgcgacatacgtaattacaacaacggcattaggaaaagaaacatagctcaggaccacatgccttatatcgttgtaattattgacgaatttgccgaccttatggcgaccacaggcaaggagcttgagtcaactttggcgcgccttgcggcaatgagccgcgccgtgggcatacatctggttctggcgacgcagcgcccttcaattgacgttatcaccggccttatcaaagccaatatccccagccgcattgccttcatggtcgccagcaagatggacagccgcataatcattgacgcggtaggcgcggaaaagcttctgggcaagggcgatatgctgtacgcgggaatagaggaaccctttccaatccgcatgcagggggcttttgtatccgaggaagaagtcgaggcggtggtcgcccatgttaaaacattcggcgaacccgattatattgacgatgaaatcttctttgatgaggaagaggaagaagccgagccgtctcttttttccggcggcgacgatcccctgtacgaaaaagccctggaaatagtcatgcagcagggaaaggccagcgccagttacatacaacgccgcctgaaaatcggctacaaccgcgccgcccgccttgtggaagaaatggaacgcaggggcgtcgtcggcccggcgcaggggtcaaaaccgcgggatctattacggggagtttaa

SEQ ID NO: 35918 - protein, 234 aa, Unknown
  Obtained from environmental sample
  misc_feature (1)..(234): Xaa is any amino acid
MRDIRNYNNGIRKRNIAQDHMPYIVVIIDEFADLMATTGKELESTLARLAAMSRAVGIHLVLATQRPSIDVITGLIKANIPSRIAFMVASKMDSRIIIDAVGAEKLLGKGDMLYAGIEEPFPIRMQGAFVSEEEVEAVVAHVKTFGEPDYIDDEIFFDEEEEEAEPSLFSGGDDPLYEKALEIVMQQGKASASYIQRRLKIGYNRAARLVEEMERRGVVGPAQGSKPRDLLRGV

SEQ ID NO: 35919 - DNA, 312 bp, Unknown
  Obtained from environmental sample
  misc_feature (1)..(312): n is a, c, g, or t
ttgcagcagggccagcctgtgcgggctggaagggccgcgccgaacccgatactcagcagcatcacgcacttccgcgacgaatacatggagcacatcgtcaacaagaagtgccgcgccaagaaatgcaccgcgctgatacacttcgaaatcaaccgcgaaaagtgcatcggctgcacggtctgcgtccgcaagtgccccgtcgagtgcatcaggggcaacagaaaggagccgcacgtcattgaccagttccgctgcgctaagtgcggcatgtgctatgacgcctgccgcttcggcgccatcgataaaatctga

SEQ ID NO: 35920 - protein, 103 aa, Unknown
  Obtained from environmental sample
  DOMAIN (78)...(101): 4Fe-4S binding domain
  misc_feature (1)..(103): Xaa is any amino acid
MQQGQPVRAGRAAPNPILSSITHFRDEYMEHIVNKKCRAKKCTALIHFEINREKCIGCTVCVRKCPVECIRGNRKEPHVIDQFRCAKCGMCYDACRFGAIDKI

SEQ ID NO: 35921 - DNA, 1251 bp, Unknown
  Obtained from environmental sample
  misc_feature (1)..(1251): n is a, c, g, or t
gtgatagattggacgaccgaggttcgctatcccagttcaccccatgagcatggaagcctccacggcgacgcccacgagatgcccgaccgcccgcagtactacggcgacgaccacctgtggatagtgttggccgtgagcacatatataaaggaaacgggcgacagcgccttcctgaacgaaagcgtcccgttctacgccgggaagggcgctaaagcggagtccggcagcgtctacgaccacctagttcgcgcgctgaacttcaccaagtccaacgtcggcagccacggcttgccgctcttgggcttcgcggactggaacgactgcgtgaacctgcccaaaggctcggagtcaatcttcaacacctgcctctacagccgcgccctgcttgagatggtcgatttggagacgttcctcgggcacaatgacaagatcgagacctacgcagccgaccacgcggtcatgaagaagaacctcaacgagcgggcgtgggacggcgagtggtacgtgagctactacaacgccgacggcaccccgctgggatccaacaagaacagcgacggcaagatatacctgtatactcaggcgtggccggtgctcgctgatctcgccacggaggagcatgggcgcacggcgctcaactccgcccgcaaactgttgaacacggcgaaggggctcaaactctccacgccgggtttcaacggatacgacccgtcaaagggcggcataaccacctacccgccgggggccaaggaaaacggcggcatattcctccacaccaacccgtgggtaatgatcgccgaggcgctcatgggcgacggcgaccgcgcctacgaatactacaaccagatcaacccggcaacgaagaacgacatcatcgacgagtacgagtgcgagccatacgtctacccgcagaatattttgggagacgagcaccctcttttcggcttggcgcgcaacagttggctctccggcacctcgtcgtggacgtatcaggcggcaagccgctacataatggggctgcgcccgcaaatggacggcctcttagtagacccgtgcgtcccctcaggttggaagcgtttctctgtggagcgcaatttcagagggagccgctacgtaataattgtggagaaccccaatggcgtatgcaggggcgtaaagtcaatttccgtcgacgggaaagcgcttgacaaacctgtcgtccccgtctttacagacgggaaaaaacacgaaaacaaggtaacaatgggctga

SEQ ID NO: 35922 - protein, 416 aa, Unknown
  Obtained from environmental sample
  misc_feature (1)..(416): Xaa is any amino acid
MIDWTTEVRYPSSPHEHGSLHGDAHEMPDRPQYYGDDHLWIVLAVSTYIKETGDSAFLNESVPFYAGKGAKAESGSVYDHLVRALNFTKSNVGSHGLPLLGFADWNDCVNLPKGSESIFNTCLYSRALLEMVDLETFLGHNDKIETYAADHAVMKKNLNERAWDGEWYVSYYNADGTPLGSNKNSDGKIYLYTQAWPVLADLATEEHGRTALNSARKLLNTAKGLKLSTPGFNGYDPSKGGITTYPPGAKENGGIFLHTNPWVMIAEALMGDGDRAYEYYNQINPATKNDIIDEYECEPYVYPQNILGDEHPLFGLARNSWLSGTSSWTYQAASRYIMGLRPQMDGLLVDPCVPSGWKRFSVERNFRGSRYVIIVENPNGVCRGVKSISVDGKALDKPVVPVFTDGKKHENKVTMG

SEQ ID NO: 35923 - DNA, 924 bp, Unknown
  Obtained from environmental sample
  misc_feature (1)..(924): n is a, c, g, or t
atgatctttaataaaattaacaaaaatgaacagtttgtgggcaaagaaaacagtacgccgccgcaagccggattataccctggctttatgcggttattttttttattgattgttacggccttgctctttgttatcatcccgctttctcttgctccttccggaatctcgctgggtatttttttagcgggactgctcatcggcatgctgttggctttttccctccgcaaggcttatgaatgggaaagagccgttgtattgcggttcggtaaattcaacagagtatgcgggccgggcctgtattttctgatccccttggcagatcatgtatgccagatcattgatatccggataagggttacggatttttacgcgcaggaaaccctcaccggggattcggtgacggtcagggtggacgctttctgtttctggctggtatgggatccgcagaaggccgctctggaagttgaggattataaagaggctgtggccctcgcgtccaaggcggccctgcggaacgtcatttccaaaaacgaactttccacttttctgacccacggggatattatcgaaaagcagatacaggaagaagtggaaaaacagaccacggaatggggcataacggttcagtatattgagattaccgacatccagattcccgccgagcttcaggattcgctttcccgcgttgcccaggccgagagggaaaagaaaggccgtacattgcttgcggaagcggaaatagagattgcgaaaaaactggaggaggctatagtaatctacgcgaaagaccaggacgccctcaagctcaggattctttccatattaaacgaagggttaaagaccgggaattccatgatgctggtaccaaactccataacggatgagctaaaaacccaaggatattttcgggctccaggcgcttaa

SEQ ID NO: 35924 - protein, 307 aa, Unknown
  Obtained from environmental sample
  DOMAIN (73)...(247): SPFH domain / Band 7 family
  misc_feature (1)..(307): Xaa is any amino acid
MIFNKINKNEQFVGKENSTPPQAGLYPGFMRLFFLLIVTALLFVIIPLSLAPSGISLGIFLAGLLIGMLLAFSLRKAYEWERAVVLRFGKFNRVCGPGLYFLIPLADHVCQIIDIRIRVTDFYAQETLTGDSVTVRVDAFCFWLVWDPQKAALEVEDYKEAVALASKAALRNVISKNELSTFLTHGDIIEKQIQEEVEKQTTEWGITVQYIEITDIQIPAELQDSLSRVAQAEREKKGRTLLAEAEIEIAKKLEEAIVIYAKDQDALKLRILSILNEGLKTGNSMMLVPNSITDELKTQGYFRAPGA

SEQ ID NO: 35925 - DNA, 966 bp, Unknown
  Obtained from environmental sample
  misc_feature (1)..(966): n is a, c, g, or t
atgatcgtacttaaagaaataaggaaaaccttccgggtggcgaagcgtaaaaagggagctgccgccgcgctcttttcacttttcaggcgggagtatacggagatccacgcgctggaaggcatttctttctctgttgaaaaaggggaggttgtcggctttgtcgggccaaacggcgcggggaagtctacggcaatcaaaatcatgagcggcatccttgccccggattccggggagtgtacggtactggggatgtgtccctggaaatcgcgccaaaagtacgttagccatatcggagtggttttcggccagcgtacccagctctggtgggacgtgccagtacatgattcctttgaacttctgaaagacatttaccggattgacgaaaggtgtttcaaagaaaaccttggggagctttcgaagatcctcgaacttgagccgcttctctctgtccctctaagacagttgagcctgggccagcgtatgcgctgcgagatcgccgcgtccctgcttcacgatcctgaagtcctttttctggacgaacctacaataggccttgatgctgtttccaaactggcggtacggcgtatcatcgcggatctgaaccgcgaacggaaaatcacggtgatactgacttcccacgacatggacgacattgaggccctcaccgaccgcatacttctcatcggcaagggaaggctgctctacgacggcgcactgggcgcgctccgttcccgctacgacaggctcaggcggctggaactgcactacgagggcgattccgcgcttctgcccgagcctgccgggacaaaaatcgtttcacaaaaggaaaagcacgtggtttacgaagtcgataccggcgtcatcggcgtttcctccgccctgcgtgttttgggggagagtctcgacataagggacatgagtgcgggcagccgtcccatcgaggagctcatcgcctcgcgtatctaa

SEQ ID NO: 35926 - protein, 321 aa, Unknown
  Obtained from environmental sample
  DOMAIN (48)...(231): ABC transporter
  misc_feature (1)..(321): Xaa is any amino acid
MIVLKEIRKTFRVAKRKKGAAAALFSLFRREYTEIHALEGISFSVEKGEVVGFVGPNGAGKSTAIKIMSGILAPDSGECTVLGMCPWKSRQKYVSHIGVVFGQRTQLWWDVPVHDSFELLKDIYRIDERCFKENLGELSKILELEPLLSVPLRQLSLGQRMRCEIAASLLHDPEVLFLDEPTIGLDAVSKLAVRRIIADLNRERKITVILTSHDMDDIEALTDRILLIGKGRLLYDGALGALRSRYDRLRRLELHYEGDSALLPEPAGTKIVSQKEKHVVYEVDTGVIGVSSALRVLGESLDIRDMSAGSRPIEELIASRI

SEQ ID NO: 35927 - DNA, 948 bp, Unknown
  Obtained from environmental sample
  misc_feature (1)..(948): n is a, c, g, or t
atggcttccctgaaaagccttaaaaaccgttatgagccgtggaaggcgctccgtgaggaaattatcgacttgcaaaccctccacgagcttgcccttgaagcaaaggacgaaagagaagcggcaggcatagaaaacacccttaaaactttattggctaaacacgaaaaacataatttgtttgaacttatggcgggcgaaatggacaagaacgcctgcttccttaccgtccattcgggagcgggcgggactgaagcctgcgactggacgcagatgctctaccgtatgtacctgcgctgggcggagcaaaaaggcttttccgtcgaggaagttgaccagcaggaggccgaaggggggcttaaatccgccacctgcaaagtggacggggagtacgcttacggctatntgaaaggcgagtccggcatacaccggcttgtaagaatcagcccatttgacgcaaacgcgcgcaggcatacgtcctttgcctccgtttacctttttcccgttattgatgatacaatcgaagtagacataaaacccgaagatttacgggtagacacttaccgctcaggaggcgcgggagggcagcatgtaaacaagacggacagcgcggttcgttttacacacctgcctacgggaatagtcgtcgcctgccagaatgagcgcagtcagataaaaaaccgcgcgattgccatgagtatgcttaaagcgcggctttacgaatattacagagaggagaaggaaaaagaaaacgaaaaatattctcaggaaaaaaaggatatttcatggggacatcagataagatcatatgtgttccagccgtatacaatggtaaaagattaccgtacaaaagttgaaaaggggaatattcaggctgtaatggacggcgatattgacccgtttatagaggagtatttaaagttttcatggcgtaatggagagatgaattga

SEQ ID NO: 35928 - protein, 315 aa, Unknown
  Obtained from environmental sample
  DOMAIN (29)...(138): PCRF domain
  misc_feature (1)..(315): Xaa is any amino acid
MASLKSLKNRYEPWKALREEIIDLQTLHELALEAKDEREAAGIENTLKTLLAKHEKHNLFELMAGEMDKNACFLTVHSGAGGTEACDWTQMLYRMYLRWAEQKGFSVEEVDQQEAEGGLKSATCKVDGEYAYGYXKGESGIHRLVRISPFDANARRHTSFASVYLFPVIDDTIEVDIKPEDLRVDTYRSGGAGGQHVNKTDSAVRFTHLPTGIVVACQNERSQIKNRAIAMSMLKARLYEYYREEKEKENEKYSQEKKDISWGHQIRSYVFQPYTMVKDYRTKVEKGNIQAVMDGDIDPFIEEYLKFSWRNGEMN

SEQ ID NO: 35929 - DNA, 606 bp, Unknown
  Obtained from environmental sample
  misc_feature (1)..(606): n is a, c, g, or t
atgacttgcttgcgtgttcttgtgacgctgcctttctacggcggttcgctgcccgtgggccgctatgcggcgcaggccctgctggacgaagggcatatcgtgagcgtgtttgaagcgccggcttttttcagcgcgttttccgcgctcaagaccttgcaggtgggcgccgatcgcttggcgcaactggaaaattcctttttgcacacggtatctcaagccatttacgccaaggtggagagttttgagccggatcttgtgttgtgcctggcccaggcgccgcttgatcgcgccacgctgcgccgccttgagcgcgacaagacgccgacagccatgtggtttgtggaagatcatcaggtttttccctattggcgggcgtttgcgccttgctacgatttctttttcaccatccagaaggaaccgctcctcgacatgctgcgcgcggaaggccgccaggggcagctacctgcccctggccgccttgccgtcttttcacaagcccatgcaactggatgcggcggagcaacgccgctacggcgcggacgttggtttcctcggcgcgggctatcccaaccggcgcatggccttccgccaactgacaagctttga

SEQ ID NO: 35930 - protein, 201 aa, Unknown
  Obtained from environmental sample
  misc_feature (1)..(201): Xaa is any amino acid
MTCLRVLVTLPFYGGSLPVGRYAAQALLDEGHIVSVFEAPAFFSAFSALKTLQVGADRLAQLENSFLHTVSQAIYAKVESFEPDLVLCLAQAPLDRATLRRLERDKTPTAMWFVEDHQVFPYWRAFAPCYDFFFTIQKEPLLDMLRAEGRQGQLPAPGRLAVFSQAHATGCGGATPLRRGRWFPRRGLSQPAHGLPPTDKL

SEQ ID NO: 35931 - DNA, 774 bp, Unknown
  Obtained from environmental sample
  misc_feature (1)..(774): n is a, c, g, or t
atgtgcttttgcgtcgacgacagatactggatgctccataatgaagacattactcggggaattgccgcaaatgtgatcagtggcaaactggctaattgtagaattgtgataaaccgtactatcagggatcatgccgccaaagtaaatgcaggccccctgaaagaagcgtcggaaaatattggaagaataattgagcgaattcccgcaatgcacgcgactgatgaagtacggggacttgaaggacaggcggcggcggaatatttcggggtttttgatcatctcattgttgatcaaaaagaagacttcgtattttctgaacggaatagaaggccgcctcttgatgaagtgaatgccatgctttcatttgtgtataccttgctggcccacgatgtacgctctgccctggaaacggttgggctggatccggcggttgggtttttacacagggatcgtcccggccgtccggggcttgctctggacatcatggaggaattccgtccggtgattgcggataggctcgtgttatctctgatcaatcggcgacaagttggaaagaagggatttaccaaagcggctaacggggcagtaaccatggatgatgatacacggaaaacggttttaaccgaatatcagagccgcaagcaggatgaaattcatcatccctatattgaggaaacggttcctatcggccttcttttttttatccaggcaaatcttatggctcgttatatcaggggtgatattgatggatatcctccatttttctggcggtaa

SEQ ID NO: 35932 - protein, 257 aa, Unknown
  Obtained from environmental sample
  DOMAIN (7)...(248): Protein of unknown function DUF48
  misc_feature (1)..(257): Xaa is any amino acid
MCFCVDDRYWMLHNEDITRGIAANVISGKLANCRIVINRTIRDHAAKVNAGPLKEASENIGRIIERIPAMHATDEVRGLEGQAAAEYFGVFDHLIVDQKEDFVFSERNRRPPLDEVNAMLSFVYTLLAHDVRSALETVGLDPAVGFLHRDRPGRPGLALDIMEEFRPVIADRLVLSLINRRQVGKKGFTKAANGAVTMDDDTRKTVLTEYQSRKQDEIHHPYIEETVPIGLLFFIQANLMARYIRGDIDGYPPFFWR

SEQ ID NO: 35933 - DNA, 429 bp, Unknown
  Obtained from environmental sample
  misc_feature (1)..(429): n is a, c, g, or t
gtgatcagcgaactaaaaccggacaacaccgacgcttaccgctgtctttcgtgtaacagcctctgcgaagtttgtgttgacgtgtgtccgaacagggccaatgtgatggtggaattggagccgggcagtggtttgggagcgcatcaagtcctgcatatcgacagaatgtgcaacgaatgcgggaactgcgccattttctgcccccacgcgggtaagccgtataaggacaagctcacggttttttgttgcgaagaagattttgccgaaagcgaaaacgcgggcttccttaaaaccggcgcggatactttcaagattagactggaagacaagtccgtacttgccttccacaggggcgaagacacgatccctaagaactggatcgtgtttattgatgttgttcttgcaaagtatgattatttattagaataa

SEQ ID NO: 35934 - protein, 142 aa, Unknown
  Obtained from environmental sample
  misc_feature (1)..(142): Xaa is any amino acid
MISELKPDNTDAYRCLSCNSLCEVCVDVCPNRANVMVELEPGSGLGAHQVLHIDRMCNECGNCAIFCPHAGKPYKDKLTVFCCEEDFAESENAGFLKTGADTFKIRLEDKSVLAFHRGEDTIPKNWIVFIDVVLAKYDYLLE

SEQ ID NO: 35935 - DNA, 639 bp, Unknown
  Obtained from environmental sample
  misc_feature (1)..(639): n is a, c, g, or t
atgattctttacattgatccgggaacgggaagcgcgatgttctcaattttaatcggcgcggcggcgacaatttattttcttggccgcgcgttaataataaaattaaaagtttttttttcaggcggaaaaaccgttaacgctgcttctgcggaatatccttatgtaatctataatgaaggaaaacaatattggaatgttttcaaacctgtcgttgaagaatttgaaaacggaaaaatcaatctcttatatctgacttccgcgcaagatgatcctgtttttgatatttcatggagttttgttaaaccggaatttatcggcgaagggaaccgcgcgtttgcccgtcttaatatgctccgcgctggaatttgccttatgactactcccggtcttgacgtataccagctaaaacgttcaaagatggtcaaacattacgcgcatattcttcacgagccgggcgacgccatgtaccgtctctttggtctcgattattttgattccgtattattgaccggcgattaccaagtcgaggatatcagaactctggaacggaagagaaacattcccgaaaaaacactcctgactgtaggatgttcctaccttgacgtgtacgcagaaaaaatcaaaaatctccccccctga

SEQ ID NO: 35936 - protein, 212 aa, Unknown
  Obtained from environmental sample
  misc_feature (1)..(212): Xaa is any amino acid
MILYIDPGTGSAMFSILIGAAATIYFLGRALIIKLKVFFSGGKTVNAASAEYPYVIYNEGKQYWNVFKPVVEEFENGKINLLYLTSAQDDPVFDISWSFVKPEFIGEGNRAFARLNMLRAGICLMTTPGLDVYQLKRSKMVKHYAHILHEPGDAMYRLFGLDYFDSVLLTGDYQVEDIRTLERKRNIPEKTLLTVGCSYLDVYAEKIKNLPP

SEQ ID NO: 35937 - DNA, 954 bp, Unknown
  Obtained from environmental sample
  misc_feature (1)..(954): n is a, c, g, or t
atggccatgataggaatggtcgtggtcttgatatattttcttatttccctgttggctccgattttacctttctataattacgcggaacaggaaatgaagcatatttatatgcagccttcctttaaaccctcaggcgaagtcatggttagtacgcgagaggcttacttttctaagctcatggcgagggaggggcgtaccgaatacacagccgttgaaaaggaagagctcgacaacttacgccgcgaagccgaaaccaatcccatacataaaaaggtctacattttcggtactgatgttttaggccgggatcttttaacccgcgtaatatacggaggccggatttcaataggcattggcttagtcggtaccattaccgcaatgctctttgggactttttacggcgcgatagcaggctttatcggcggcaaaactgataacatcatgatgaggatagtcgatgtgatttacagcctgccttacctgatgctcgtcattgttatgatggctttgtttggcggcaagagcatcttcatcctttttatcgctatcgcgatgatttcatggctggaccttgccagggtagtccgtggccaggtaatgtcgctaaagaattcggagtttatcgaggcggcaagatctgccggcgcaggaacatggcgtattatttggaagcacctgcttcccaacattgttggactgataattgtctactcatccttggcattgcctactttcatcataaatgaagcctttctttccttcctgggtcttggcgtttccgctcccatgacttcctggggcgttttgattgacgacggcacgaaggttatggatctatacccctggctccttgtgataccggccataatcatgtcccttttcatcttttgcatgaatttcctcggcgacggcctcagggacgcctttgatccccaggccaagaacaggctgtag

SEQ ID NO: 35938 - protein, 317 aa, Unknown
  Obtained from environmental sample
  DOMAIN (112)...(315): Binding-protein-dependent transport system inner membrane component
  misc_feature (1)..(317): Xaa is any amino acid
MAMIGMVVVLIYFLISLLAPILPFYNYAEQEMKHIYMQPSFKPSGEVMVSTREAYFSKLMAREGRTEYTAVEKEELDNLRREAETNPIHKKVYIFGTDVLGRDLLTRVIYGGRISIGIGLVGTITAMLFGTFYGAIAGFIGGKTDNIMMRIVDVIYSLPYLMLVIVMMALFGGKSIFILFIAIAMISWLDLARVVRGQVMSLKNSEFIEAARSAGAGTWRIIWKHLLPNIVGLIIVYSSLALPTFIINEAFLSFLGLGVSAPMTSWGVLIDDGTKVMDLYPWLLVIPAIIMSLFIFCMNFLGDGLRDAFDPQAKNRL

SEQ ID NO: 35939 - DNA, 768 bp, Unknown
  Obtained from environmental sample
  misc_feature (1)..(768): n is a, c, g, or t
gtggaggaaaaacagatgtcaaatgatacgaacagcgaagaaattcttgaagtaaaaaacctccgcacttatttttatacagatgaaggggtcgttaaagcggttgacgatgtttccttttccctgcacaaaggcgaagtgattggcatagttggggagtccggatcgggcaaatcggtagcaaatctttccgtgatgaacctgattctttcgccgccaggtaaaatcgtaggtggcgaagttcttttccatggtgaagacattctgaaactaaaagaaaagcagctccagaagatacgcggggcaaaaatttccatgatttttcaggacccgatgacaagcctgaacccgtttttaagaatttctacccagctgatcgagaccataatgctgcatcagaacctggacaaaaagcaggcccgcgaaaaggccatcgagatgctgaacatggttggaattcctgccgccgctgaaagggtcgattcttatccccaccagttttctggcggtatgtgccagagggttatgattgcgatggccctctcatgcaacccggaaattcttatcgcggacgaaccgaccactgcactggacgtaacaattcaggcgcagatccttgatttgatcagggacttgacccacaaactcggcacggcggtgatccttataacccactccctcggagtagtggcgggaatgtgcgacaacatttacgtcatgtacgccggggcgtgtagtcgagttccgcactgcggaacaaatttttga

SEQ ID NO: 35940 - protein, 255 aa, Unknown
  Obtained from environmental sample
  DOMAIN (45)...(243): ABC transporter
  misc_feature (1)..(255): Xaa is any amino acid
MEEKQMSNDTNSEEILEVKNLRTYFYTDEGVVKAVDDVSFSLHKGEVIGIVGESGSGKSVANLSVMNLILSPPGKIVGGEVLFHGEDILKLKEKQLQKIRGAKISMIFQDPMTSLNPFLRISTQLIETIMLHQNLDKKQAREKAIEMLNMVGIPAAAERVDSYPHQFSGGMCQRVMIAMALSCNPEILIADEPTTALDVTIQAQILDLIRDLTHKLGTAVILITHSLGVVAGMCDNIYVMYAGACSRVPHCGTNF

SEQ ID NO: 35941 - DNA, 798 bp, Unknown
  Obtained from environmental sample
  misc_feature (1)..(798): n is a, c, g, or t
ttgagtgccggtcgcgcatgtctgctgacgcaagtttttggcgaaacgcgggttgaccatttccataacggaatgnatatgggcggcgacagccagcgggttgtgccggtagccccgggggagatcgtctactattttgacgagggagagcatccgctctacaacgaatccggcgtgggcaattttatggtgctgcagcacaccaacaatgtgcgcagctactactaccacatgcgccgggcatccgttgccaacgcgcgtacggcgctcgcgcacaacgagacgattggcctcagcggaaactcggggcgatccttcggcgcgcatctgcacttgagcgtttcagacgacaaaggctatatcaatcccttaatcatgctgccggaatatccggatcaccggtcgccggagatcgcgtctatcctgtttggcgtggacgggcgcgcgatcacggtgcccgcggactatcgcgtcagcggtctggatatgtttacgctgatggcgcgcgcctgggacacgcatgaagagatacgcgcgatagggattctcgcgccgtaccagatcagcttctcgcttgacgggaatatgctgaaaacgattgcctttgaccggctcatcaaaaagaacggacggctgctccttgcggacggcacgggcttcgccgaaacctggtcaagcgagggctatcttatcggaggggatctgcgcaatctgagcgggcagcataccatcagcatactcgcggcggactttgcgggcaacaccgcaagccgttcggtcaatgtacaatttcgataa

SEQ ID NO: 35942 - protein, 265 aa, Unknown
  Obtained from environmental sample
  DOMAIN (20)...(123): Peptidase family M23
  misc_feature (1)..(265): Xaa is any amino acid
MSAGRACLLTQVFGETRVDHFHNGMXMGGDSQRVVPVAPGEIVYYFDEGEHPLYNESGVGNFMVLQHTNNVRSYYYHMRRASVANARTALAHNETIGLSGNSGRSFGAHLHLSVSDDKGYINPLIMLPEYPDHRSPEIASILFGVDGRAITVPADYRVSGLDMFTLMARAWDTHEEIRAIGILAPYQISFSLDGNMLKTIAFDRLIKKNGRLLLADGTGFAETWSSEGYLIGGDLRNLSGQHTISILAADFAGNTASRSVNVQFR

SEQ ID NO: 35943 - DNA, 990 bp, Unknown
  Obtained from environmental sample
  misc_feature (1)..(990): n is a, c, g, or t
ttgatcagatcggccgagcctactggtgtggcggctaactcctttacggtcgcgggggcaacagcgacaaatgcagcaaactcaggcgtgattaccgccgtgttcccggccactgataagaagattgatatcgccgctataccaggagtaaccccacctgtgggtggagggacgcctgttaccactctttcagggactgagcagtacagcgtgacgtcagtaacttggagtagaaaggatgctactccctttgatcaaacctccgctaaattcgataaggatctagtgtacgttgtaacgttacagctagcggcgaagaccggttacaccctgcatgatgtaccgaaggatttcttcacggtcgcagggacgtcaaaaccggcggaatcaagtgtgactaatggtacgaacacaggcttggttgttgccgaattcccggcgacgggtgggacaaagattcctgccgcgggcgctgctttagggggagtgactgcacctgctgccggtggaacccctgtttcatcaggtgtaacctttaattcccagtatatacgaagcgtgtctatagcgtggtctcctacgataccgtcatcgggggaatttagtgggaaattcgaaccaggtaaggcatatacagcgactttaacagtaacgccagagacaggatacaccgtagctggtttggcaagtagcttcttcactgtcacgggggcaacgacaacattaacggtggcgaatagtggtgcgggccctggtggtacggtggctgccctgttcccggcgacaaagcctaatattgcgacggggtcgacgcttactcttactccaaattcaacgactggagcattaacggctgctttaacaggacttagcggcactaatacctatacgtacacctggaaaagtgggaggtatgccataggaactaactcagctacgtgggcagcccatttagttgaaagccatcnntggggagaagatactttgtga

SEQ ID NO: 35944 - protein, 329 aa, Unknown
  Obtained from environmental sample
  SIGNAL (1)...(25)
  misc_feature (1)..(329): Xaa is any amino acid
MIRSAEPTGVAANSFTVAGATATNAANSGVITAVFPATDKKIDIAAIPGVTPPVGGGTPVTTLSGTEQYSVTSVTWSRKDATPFDQTSAKFDKDLVYVVTLQLAAKTGYTLHDVPKDFFTVAGTSKPAESSVTNGTNTGLVVAEFPATGGTKIPAAGAALGGVTAPAAGGTPVSSGVTFNSQYIRSVSIAWSPTIPSSGEFSGKFEPGKAYTATLTVTPETGYTVAGLASSFFTVTGATTTLTVANSGAGPGGTVAALFPATKPNIATGSTLTLTPNSTTGALTAALTGLSGTNTYTYTWKSGRYAIGTNSATWAAHLVESHXWGEDTL

SEQ ID NO: 35945 - DNA, 324 bp, Unknown
  Obtained from environmental sample
  misc_feature (1)..(324): n is a, c, g, or t
atgtttgcagggcggttggagctaggggaaggctttccccttataatattatgcacaaccaaatccgtcaaggaatggatgctcacctgcaaccagcaaatagagtgggtacccgaccacatcaaaaacggtcggttcggcaaatggctggaaaacgcacgcgactggaacctgtcgcgcaaccgcttctggggaacgccaatacctgtgtggattgcaggtgacggcgaaatgctctgcataggctcaatagaggaattaaaaaaagcaagcggaactgagctgcacgacttgcacaaacacttcgtggataaaatagcataa

SEQ ID NO: 35946 - protein, 107 aa, Unknown
  Obtained from environmental sample
  misc_feature (1)..(107): Xaa is any amino acid
MFAGRLELGEGFPLIILCTTKSVKEWMLTCNQQIEWVPDHIKNGRFGKWLENARDWNLSRNRFWGTPIPVWIAGDGEMLCIGSIEELKKASGTELHDLHKHFVDKIA

SEQ ID NO: 35947 - DNA, 1044 bp, Unknown
  Obtained from environmental sample
  misc_feature (1)..(1044): n is a, c, g, or t
atgataagcaaactaacaaagttcgtgcaaatggcagccattgggtttgccttaacactcacattatcctgctctggcggagacgacaacggcggcggcacatcaagtgacagcggcggctatgtttccagctcctctggcgacaacggtagcggttctagcagttccgtaactggcggcggtggggcttctagttcgtctgccacaaatggtggcggtagttccagttccgtaactggcggcggtgggggttctagttccgtaactggcgggggtgggggttctagttcgtctgtcacgggcaatacgtcttcatccagcgagagttccagttccggttccgtgacaagcagttctagttcctctagcatcaacgcaagcagcaaaggcaacaatatattgaattataaaaccattaaaataggtgagcaaacttggatggcagagaacctagactacgatgttcccggcagcaaatgttatgatggcgaccctgccaactgtgcaatctacggtcgtctttacgactgggtaacagcaatggctctaacttctgattactatgagaagcaatatacttgtgctaatgaaggtacttgtacaaacttaaacgaaaagcgtagaggtatttgcccacttggttggcatatccctaccgatatggattggatattgcttttatattatgtggataacagaggtacgcctgagactccagtcgctaccgaaagtaccacggcaggtgggtatttgaaggcagccaaccactgggacgaagatggtaatggcactgacccacacggtttttccgccctgccgggcggtggctacggaacttactacggcagtctcagcttcggttctcttggcaaagccggtctctggtggactaacagagataattttggcagctacaacagtgccgatcgtactatgtatagcaacaccgctcgtgcttggtatatcagcaacgacaacaatctcagaggtaaatacagttatgataagacaaacttttacagtgtccgttgcgtaaaggattaa

SEQ ID NO: 35948 - protein, 347 aa, Unknown
  Obtained from environmental sample
  SIGNAL (1)...(26)
  misc_feature (1)..(347): Xaa is any amino acid
MISKLTKFVQMAAIGFALTLTLSCSGGDDNGGGTSSDSGGYVSSSSGDNGSGSSSSVTGGGGASSSSATNGGGSSSSVTGGGGGSSSVTGGGGGSSSSVTGNTSSSSESSSSGSVTSSSSSSSINASSKGNNILNYKTIKIGEQTWMAENLDYDVPGSKCYDGDPANCAIYGRLYDWVTAMALTSDYYEKQYTCANEGTCTNLNEKRRGICPLGWHIPTDMDWILLLYYVDNRGTPETPVATESTTAGGYLKAANHWDEDGNGTDPHGFSALPGGGYGTYYGSLSFGSLGKAGLWWTNRDNFGSYNSADRTMYSNTARAWYISNDNNLRGKYSYDKTNFYSVRCVKD

SEQ ID NO: 35949 - DNA, 402 bp, Unknown
  Obtained from environmental sample
  misc_feature (1)..(402): n is a, c, g, or t
atgagcagcaacggaaaaggcggaaataaccgaagatcccggcatcgttattccggccggaaagacgatcctgcaaaacacgataaaaaaagaaatcccgagaattttctcgcaagcgacaaatccgaaaaaaaccagtcaagcatgtacgagcgtcttcaatggacggcgccggtattgcccgccaattatcaaagcattacccctgaatgtccctggtgcgggaaacagataaaggacgttaactgcgccatcgcggataaagagacaggccgtccggttcattttgactgcgtgctcgcaagggttacggatatggtaacgctggaaacaaacgacgctgtctgttatataggcggcgggcgcttcggcgtaatcattacaataatcgccggaatataa

SEQ ID NO: 35950 - protein, 133 aa, Unknown
  Obtained from environmental sample
  misc_feature (1)..(133): Xaa is any amino acid
MSSNGKGGNNRRSRHRYSGRKDDPAKHDKKRNPENFLASDKSEKNQSSMYERLQWTAPVLPANYQSITPECPWCGKQIKDVNCAIADKETGRPVHFDCVLARVTDMVTLETNDAVCYIGGGRFGVIITIIAGI

SEQ ID NO: 35951 - DNA, 948 bp, Unknown
  Obtained from environmental sample
  misc_feature (1)..(948): n is a, c, g, or t
ttgaagttgacgaagcgaagatcaccatggatgcgtctttccgccaggatttgggagcggacagccttgatacttatgaattggtctacgccattgaggaagagatggggatttccattcccgacgaaaaagccaatgagtttgcaaccgtcaaggacgcctacgagtacatcaaatcccagcaaaaataagcctgatgtgccgtttcagactgcgccgacgcctgagcgaaaaaaggtcttaacggccttcttaaaaacggccggaataaggttcaagagacttgatctcttgaacctttcttttatacacaggtcggtttcaaacgaggcaaacagcaagttaaacaacgaaaggctggaattccttggggacgcaatacttggagccgtggcggcgaacctgctctaccggaagctggaaggtcgaagcgaaggggacttagccaaaattaaatcggtggtagtttcagaagccatcctttccgccgtcgccctggaactgcagctcgacactttgctgattctgggccggggcgaagagctttccggtggcaggacaaaaaaagccatacttgccgacgctttggaagccctgattggcgcaatctacctggattcggggtataaaagcgcctattcctttgtcagccgctttttaagcgtcgagattgaccgcgtgctggaaaaccgccacgcccaggactacaaatcccttttacaagagttctgccagaagctatacaaaaattacccgcattaccagcttgtcaagcgaacgggcccggaacacgagcgcatattctgggtggaggttttggtgaacggcaaaaccttcggcccggcctccggcagaaacaaaaagagcgccgagcaggaagccgcgaagctggcttatgaagcgctggataaagcccaggataaaacgccttataatggcaacagataa

SEQ ID NO: 35952 - protein, 315 aa, Unknown
  Obtained from environmental sample
  DOMAIN (236)...(302): Double-stranded RNA binding motif
  misc_feature (1)..(315): Xaa is any amino acid
MKLTKRRSPWMRLSARIWERTALILMNWSTPLRKRWGFPFPTKKPMSLQPSRTPTSTSNPSKNKPDVPFQTAPTPERKKVLTAFLKTAGIRFKRLDLLNLSFIHRSVSNEANSKLNNERLEFLGDAILGAVAANLLYRKLEGRSEGDLAKIKSVVVSEAILSAVALELQLDTLLILGRGEELSGGRTKKAILADALEALIGAIYLDSGYKSAYSFVSRFLSVEIDRVLENRHAQDYKSLLQEFCQKLYKNYPHYQLVKRTGPEHERIFWVEVLVNGKTFGPASGRNKKSAEQEAAKLAYEALDKAQDKTPYNGNR

SEQ ID NO: 35953 - DNA, 456 bp, Unknown
  Obtained from environmental sample
  misc_feature (1)..(456): n is a, c, g, or t
atgcggaaaaagataaaaatcccggcttttgttcccgactacggcgacgagcttcacaaaaccgccggtatagtagcctgcggggcaaggcgtccgcttatagcgtttaacatcaacctttccacctcggatgttaaaatagccaaaaaaatcgcaaagatcatccgtgaatcatccggcggccttaaatcggtaaagtctatcggtattatgcttcacgaacgaaacacagcccaggtatcaataaatatgacgaattatcaggacacgccgctttacagggtattggagcttgtaaaaattgaagccgcccgttatggcgtctcggtcattggcactgaaattataggcctcgttcccatgcacgcccttgtagactgcgcccattattatttaatgatagagaatttcgacggtgaaaagcaggttctggaaaattatctgttgccattataa

SEQ ID NO: 35954 - protein, 151 aa, Unknown
  Obtained from environmental sample
  DOMAIN (33)...(148): Formiminotransferase domain
  misc_feature (1)..(151): Xaa is any amino acid
MRKKIKIPAFVPDYGDELHKTAGIVACGARRPLIAFNINLSTSDVKIAKKIAKIIRESSGGLKSVKSIGIMLHERNTAQVSINMTNYQDTPLYRVLELVKIEAARYGVSVIGTEIIGLVPMHALVDCAHYYLMIENFDGEKQVLENYLLPL

SEQ ID NO: 35955 - DNA, 792 bp, Unknown
  Obtained from environmental sample
  misc_feature (1)..(792): n is a, c, g, or t
atggacggacggacaactgatacctgccgcgatatgcacggacgagtgttcagggtagacgatccgatatgggacgccatgtacccgcctaatcactgggggtgccgtgcccgcgtccgcagcctttcggataggatgctggagcggaaggggctgacgccggaaagctccgaaggccggatcgtcgaaaaagaggtgaccgtcggcaagggagccaaagcgcgaaaagagaccgtgacaggcctgaaccttggacacggggaaacgttctggacaggcgcgggttgggactacaatcccggaaaagaggcttggatgccggacttgagcgtctaccatccggatgacgctaaagcatttatccgagatagttttgacggaccggattacaagcgttttttcgaggcgcagggtgcaataggtggggttattccaatagcggttttagataagggctatgcaaacgctttaggcgcaaaaaacagcgtcgtccgcctatcatcagacaacttttggaaaaatggcgttaagcaccctggtgtgtcaataagcgaccttcagcaggtgcaactccatttagacgaagctgatgctgctgccattgttagggggggcgatagggctgagactctagtcgtatttaataaggtaggtaaggcatattataaaacagtgtttaaagcatcagccgataaggaagaagtttacttcttgtctatgcacgagagcaccgagaacaacatgaaaaacgtgttatctaaggccgtccggattataaagggtgggatataa

SEQ ID NO: 35956 - protein, 263 aa, Unknown
  Obtained from environmental sample
  misc_feature (1)..(263): Xaa is any amino acid
MDGRTTDTCRDMHGRVFRVDDPIWDAMYPPNHWGCRARVRSLSDRMLERKGLTPESSEGRIVEKEVTVGKGAKARKETVTGLNLGHGETFWTGAGWDYNPGKEAWMPDLSVYHPDDAKAFIRDSFDGPDYKRFFEAQGAIGGVIPIAVLDKGYANALGAKNSVVRLSSDNFWKNGVKHPGVSISDLQQVQLHLDEADAAAIVRGGDRAETLVVFNKVGKAYYKTVFKASADKEEVYFLSMHESTENNMKNVLSKAVRIIKGGI

SEQ ID NO: 35957 - DNA, 798 bp, Unknown
  Obtained from environmental sample
  misc_feature (1)..(798): n is a, c, g, or t
atggatcacaatgccctcgcggataagatttacgctggcgctgcgtttgacagtgccgctttgcacaaaacagccggcaatggttccaacttttggaaccttaaaggtattccgcacctctaccgacgcgatgacttcctctttggtatccggcttgagcataccctccatcgcctgatggatttcctcaaccgctttatagatgatgttgtatttgcgtatatcaactttttcctgatccgccaaaacctttgccttgggaaggggacgcacgttaaagccgatgataatggctttggacgcgattgcgaggtcgacatcgccctcgttaatcgggccgggcagggcctgtataacatgcagacggatttctttggtggaaagtttttcaaggctgctcttgagagcctccgccgaaccctgaacgtcagccttgatgattaccttgagttcctgtatggtgccgtcgcttatcctgtcgcgcagagtctcggccgtcacctgcttaaagtttttggcgtcctcaaagcgtttcaattcctggcgtttggacgaatactcgcgggcgattttttcgtcatctacagcctgcaagggatcgcctgcgttggggattccctcaaaaccaaggatttcaacgggcatggaaggggacgcgtgcttgagtttgtcgccgcggtcattgaagatcgcgcgtacttttcccggccatatacccgccacaaaagaatcgcccacggaaatagtgcctctttccacaatgacggtagccacaatgccgcgcccggatcgatttag

SEQ ID NO: 35958 - protein, 265 aa, Unknown
  Obtained from environmental sample
  misc_feature (1)..(265): Xaa is any amino acid
MDHNALADKIYAGAAFDSAALHKTAGNGSNFWNLKGIPHLYRRDDFLFGIRLEHTLHRLMDFLNRFIDDVVFAYINFFLIRQNLCLGKGTHVKADDNGFGRDCEVDIALVNRAGQGLYNMQTDFFGGKFFKAALESLRRTLNVSLDDYLEFLYGAVAYPVAQSLGRHLLKVFGVLKAFQFLAFGRILAGDFFVIYSLQGIACVGDSLKTKDFNGHGRGRVLEFVAAVIEDRAYFSRPYTRHKRIAHGNSASFHNDGSHNAAPGSI

SEQ ID NO: 35959 - DNA, 939 bp, Unknown
  Obtained from environmental sample
  misc_feature (1)..(939): n is a, c, g, or t
gtggctaccgtcattgtggaaagaggcactatttccgtgggcgattcttttgtggcgggtatatggccgggaaaagtacgcgcgatcttcaatgaccgcggcgacaaactcaagcacgcgtccccttccatgcccgttgaaatccttggttttgagggaatccccaacgcaggcgatcccttgcaggctgtagatgacgaaaaaatcgcccgcgagtattcgtccaaacgccaggaattgaaacgctttgaggacgccaaaaactttaagcaggtgacggccgagactctgcgcgacaggataagcgacggcaccatacaggaactcaaggtaatcatcaaggctgacgttcagggttcggcggaggctctcaagagcagccttgaaaaactttccaccaaagaaatccgtctgcatgttatacaggccctgcccggcccgattaacgagggcgatgtcgacctcgcaatcgcgtccaaagccattatcatcggctttaacgtgcgtccccttcccaaggcaaaggttttggcggatcaggaaaaagttgatatacgcaaatacaacatcatctataaagcggttgaggaaatccatcaggcgatggagggtatgctcaagccggataccaaagaggaagtcatcgcgtcggtagaggtgcggaatacctttaaggttccaaaagttggaaccattgccggctgttttgtgcaaagcggcactgtcaaacgcagcgccagcgtaaatcttatccgcgagggcattgtgatccattcgggcaaaatagcttcgctcaggcgtttcaaggacgacgcccgcgaggtggcggccggttacgagtgcggcataggtctgnacggttttgacgacatcaagaccggcgatatgtttgaagtaatcgagattgttgaaatagcgcgtaaattaagaactacctga

SEQ ID NO: 35960 - protein, 312 aa, Unknown
  Obtained from environmental sample
  DOMAIN (1)...(62): Elongation factor Tu domain 2
  misc_feature (1)..(312): Xaa is any amino acid
MATVIVERGTISVGDSFVAGIWPGKVRAIFNDRGDKLKHASPSMPVEILGFEGIPNAGDPLQAVDDEKIAREYSSKRQELKRFEDAKNFKQVTAETLRDRISDGTIQELKVIIKADVQGSAEALKSSLEKLSTKEIRLHVIQALPGPINEGDVDLAIASKAIIIGFNVRPLPKAKVLADQEKVDIRKYNIIYKAVEEIHQAMEGMLKPDTKEEVIASVEVRNTFKVPKVGTIAGCFVQSGTVKRSASVNLIREGIVIHSGKIASLRRFKDDAREVAAGYECGIGLXGFDDIKTGDMFEVIEIVEIARKLRTT

SEQ ID NO: 35961 - DNA, 354 bp, Unknown
  Obtained from environmental sample
  misc_feature (1)..(354): n is a, c, g, or t
atgccccaataccgtacggaaaggctgggtcaggcgatccaggaaaaaataagcgctcttatcatagacggctccattaaagacaacagggtaagcccttttctttccattacaaaagtcgacgtgtcaaaagacctttcctttgccgacgtttatgtttccgacatacgcggacagaaaatagaaaagggagtagagggccttcaaagcgccgcgggctttatccagacccggcttggggactcaatgcgaatacgaaaaattccccacctgcgttttcatacggacacgagcataggggagagttttgagttgataaaaaaaattgaacagttggtacaaactgatcattaa

SEQ ID NO: 35962 - protein, 117 aa, Unknown
  Obtained from environmental sample
  DOMAIN (5)...(109): Ribosome-binding factor A
  misc_feature (1)..(117): Xaa is any amino acid
MPQYRTERLGQAIQEKISALIIDGSIKDNRVSPFLSITKVDVSKDLSFADVYVSDIRGQKIEKGVEGLQSAAGFIQTRLGDSMRIRKIPHLRFHTDTSIGESFELIKKIEQLVQTDH

SEQ ID NO: 35963 - DNA, 918 bp, Unknown
  Obtained from environmental sample
  misc_feature (1)..(918): n is a, c, g, or t
atgtattttttgggcggtattctggagtactacgatgcaaacggaatttcagaatcgtcatcgacttttcagaacgctttttcgataaccatgtnttcggtatattataagcagtatattcaaattgacgccggttcgtctgtaatatggccaaaacgttttgaactggcatacctttttccgttaacgtttcccctgctgtatcagaacaataccggcgattttgacaatcttacaatgttcggaaatattaaatttcaatacccggatctgggatttatatggttctcgttatttattgacgagatggtttttgtaaaagaatttcttcatcttgacagggaaatgtacgcgtttcaggccggattacggtatctaattccttttattcccgccggttcgcttactgtaagctacactaaaatagaaccttattgttatacacaccaaaagacggagattccctggtataaccagccaatggagcaagcttatttaaatcatgggtatggtctgggttactatttaccgccaaattccgatgaaataaaggttgtgtttgaaacgataccggcgtcacggactgcggttaacgcgcagtttcagtttattcatcacggcgccgaatacggcgattacatggttgacggcagttcatatatatcagaactgaaaggaaccgaaagaagcgtcgatcccgctttacggaaggattttttaaacgacggcgcgtaccagtcattaatagtttttaaggcgggcgttaaacattcactgaagaaatttccattggaattccggttcaataccggcgttgttatttcatattggaaatacaatggcgatatccttgacaactcccaatatccttcacgaacgggaatcattgcacaagcaggtatacaaataaaatattaa

SEQ ID NO: 35964 - protein, 305 aa, Unknown
  Obtained from environmental sample
  misc_feature (1)..(305): Xaa is any amino acid
MYFLGGILEYYDANGISESSSTFQNAFSITMXSVYYKQYIQIDAGSSVIWPKRFELAYLFPLTFPLLYQNNTGDFDNLTMFGNIKFQYPDLGFIWFSLFIDEMVFVKEFLHLDREMYAFQAGLRYLIPFIPAGSLTVSYTKIEPYCYTHQKTEIPWYNQPMEQAYLNHGYGLGYYLPPNSDEIKVVFETIPASRTAVNAQFQFIHHGAEYGDYMVDGSSYISELKGTERSVDPALRKDFLNDGAYQSLIVFKAGVKHSLKKFPLEFRFNTGVVISYWKYNGDILDNSQYPSRTGIIAQAGIQIKY

SEQ ID NO: 35965 - DNA, 897 bp, Unknown
  Obtained from environmental sample
  misc_feature (1)..(897): n is a, c, g, or t
atgagtaaacacaaaccctgggctctggttctttccggaggcggggcaatggggcttgcgcatattggccttctcaagggcctggaagaaaccggttttccaaagccttcccttgtggcgggtacttcgatgggcgcaatcgtgggcggcctctacgctattggaatgtcgccagaggaaatggagcgttttattcttgatgaatttaacattaccgattaccttgacagttttgttttcaagatagacgggccctttggccggataattcagaccggacaggcgctggcgattctcgcgggcaagccggggatagatcccgggcagagggcgcttgagcttcttgaaagccttacagcgggaaagtgctttgatgaaaccgagattcccttccgctgcaacgcggtggatttgattagcggcagggaagttgtgttcaattccggctctttggcaatggcaatgagggcatccatgtcgcttccggttttttttgagccttttgactataacgggatgtgcttcgtggacggcggccttttgaacaatatgcctgtgtctattgcgcgtaacgaaggctttgatcggattctggcggtaaatgtaaccaacttttctcaggcaaaaccggaggatctcaaaaatggaccgcaggtaatttttcgcagcatagactgtgtcctacatgcccaggatgaagggggtaaagcccaagcggatttgacccttactattaagcttgctgctgcgcttttttcgttctacaaacaaaaagagcttatcgaggttgggaaaaaggtggtcagtgataacctgaacgccctggaagattttcttcgcccgtgtcttcacttgtcgaacaggtctccggtagttatcgaaagcgatcatgagtaa

SEQ ID NO: 35966 - protein, 298 aa, Unknown
  Obtained from environmental sample
  SIGNAL (1)...(20)
  DOMAIN (9)...(190): Patatin-like phospholipase
  misc_feature (1)..(298): Xaa is any amino acid
MSKHKPWALVLSGGGAMGLAHIGLLKGLEETGFPKPSLVAGTSMGAIVGGLYAIGMSPEEMERFILDEFNITDYLDSFVFKIDGPFGRIIQTGQALAILAGKPGIDPGQRALELLESLTAGKCFDETEIPFRCNAVDLISGREVVFNSGSLAMAMRASMSLPVFFEPFDYNGMCFVDGGLLNNMPVSIARNEGFDRILAVNVTNFSQAKPEDLKNGPQVIFRSIDCVLHAQDEGGKAQADLTLTIKLAAALFSFYKQKELIEVGKKVVSDNLNALEDFLRPCLHLSNRSPVVIESDHE

SEQ ID NO: 35967 - DNA, 600 bp, Unknown
  Obtained from environmental sample
  misc_feature (1)..(600): n is a, c, g, or t
atgagtaaagccgcgtttgtagttctggtcgggcgaccctcggtgggaaagtccaccctggtaaacctgctttgcggcgcaaaagtttccatagtcagctcggtgccgcagaccacgagaaatctcgtgcggggcatactcacgcgccccgaggggcagctggtttttgtggatactcccggccggcatgtctcggaaaaaaagttcaataaaaagctcatggatgtggcggatcgggcgctggacgattcggagctggttctctatgtgcttgacgccagccgccatccggggccggaggaagaagccgtagcggagcggcttaaggatttacagggcaggaccatcgcggctatcaacaagtgcgacgccgccggggcagatccaaaaaggctcgccggttttctgaaagaagccttgccggatttacccccctcccgctgctttgaaatttcatgctacaaaaaagaagggatccagtctctccttgcctgcctttttcaaatggcagatgagggagagccgctttaccctggggagtactataccgatcangaaagttctttcangattcaggagatcattagggaaaaagcatga

SEQ ID NO: 35968 - protein, 199 aa, Unknown
  Obtained from environmental sample
  DOMAIN (7)...(199): AIG1 family
  misc_feature (1)..(199): Xaa is any amino acid
MSKAAFVVLVGRPSVGKSTLVNLLCGAKVSIVSSVPQTTRNLVRGILTRPEGQLVFVDTPGRHVSEKKFNKKLMDVADRALDDSELVLYVLDASRHPGPEEEAVAERLKDLQGRTIAAINKCDAAGADPKRLAGFLKEALPDLPPSRCFEISCYKKEGIQSLLACLFQMADEGEPLYPGEYYTDXESSFXIQEIIREKA

SEQ ID NO: 35969 - DNA, 648 bp, Unknown
  Obtained from environmental sample
  misc_feature (1)..(648): n is a, c, g, or t
atggccccggttttggaagccgaccccggcgacctggaaaacggccggcggccccctcttgcgcctgggcgtggaacggatgcgccagggccaggtgacggccgtgggcagcttcgacggccgcttcggcacggtcacggccatccggcccgaagaccgagcggccctggccggccagggccgcctgtttcaggatctgcccgcctcgacccggagcccggtccggcttccgagccggccccggctaacgccgacggccgaggaaaaaccggctcctacgcctgcggcggccgggggcgctcccctactggacggcctggacgaaagccaggtccgggccgtcacctccccggccccggccctggcggccctggccggcccgggcgggggcaagaccctggtgctggtccgccgggcggcctggctcatccgctcctctttggcccggccagaagaaatcctcatgaccaccttcacccgcaaggcggccgaagacctggccccgcgccttacggccgccctggccggggcgggccggccccggagtatccgggtggccaccctccacggcctggcctacgaattcttgaaggcggcccagccggattgggacctggccccggccgattttctggacgagctccttaa

SEQ ID NO: 35970 - protein, 215 aa, Unknown
  Obtained from environmental sample
  misc_feature (1)..(215): Xaa is any amino acid
MAPVLEADPGDLENGRRPPLAPGRGTDAPGPGDGRGQLRRPLRHGHGHPARRPSGPGRPGPPVSGSARLDPEPGPASEPAPANADGRGKTGSYACGGRGRSPTGRPGRKPGPGRHLPGPGPGGPGRPGRGQDPGAGPPGGLAHPLLFGPARRNPHDHLHPQGGRRPGPAPYGRPGRGGPAPEYPGGHPPRPGLRILEGGPAGLGPGPGRFSGRAP

SEQ ID NO: 35971 - DNA, 483 bp, Unknown
  Obtained from environmental sample
  misc_feature (1)..(483): n is a, c, g, or t
gtgggcggcacgggcagcgcctcggaaagtctggttccgcccgattttctgcccgatgccttggagcccggcacggccaacacccacggcctggccggcctggccgccggggtgggcgtggtgctcagggaaggcccggccaagatccgcagccacgagatggatttgaccaggcgtttcctggacggcctcggccggatcaaggggctggccgtccgggggcccggggcgggggatgaccgcgtggccgtggtcgccctcaccctggccggctggtcgtcttccgacctttccctcgccctggagagggaggccggcatcctcacccgggccgggctccaatgcgctcccctggcccaccaggccctgggaaccttccaaggcggcggggtgacccgtttctccttcggctattacaacaccgccggggaaatagacatcgcccttagcgccctggaccggctggccgccgaacgggcctag

SEQ ID NO: 35972 - protein, 160 aa, Unknown
  Obtained from environmental sample
  misc_feature (1)..(160): Xaa is any amino acid
MGGTGSASESLVPPDFLPDALEPGTANTHGLAGLAAGVGVVLREGPAKIRSHEMDLTRRFLDGLGRIKGLAVRGPGAGDDRVAVVALTLAGWSSSDLSLALEREAGILTRAGLQCAPLAHQALGTFQGGGVTRFSFGYYNTAGEIDIALSALDRLAAERA

SEQ ID NO: 35973 - DNA, 1401 bp, Unknown
  Obtained from environmental sample
  misc_feature (1)..(1401): n is a, c, g, or t
atggccgaaagtaatgaatcgaacgacgtattcgggtacctcgtggaaggctgcaggaagatggacatggcggttattgtccgcacggatcctcacgcggttcatgataaggagaagaacgctcacccggaatggatcgccgtaaccgccgacggagaattcaggaaacactggtcatacgatcaggcatgggttacctgcgcccttggcccgatgaactttgaattcatgaccgaagtaaataaagagatcatcagccgctattgggtagacgggattttctccaaccgctgggcaggctcagggctctgctactgtgaaaactgcaaaaaactgtttcgggaaaaaacggggctcgaactcccaaaaacaatgaccttttcggatccctcctataaagcgtatatagattttcatgaggagagactatttgaactctgtaagttctgggatgaagaaataaaaaaattgagccccaacgcgcggttcattcccaactcgggaggaggagcgttaagcggtcttaatatgcgccggcttggggattattcagacatcctcttcgcggatcgccagtcccggtcaaagcacatgcccctatgggccaacggtcagaacggcaaggaattccgggcggtaatgggaaacaagcctgttggcggtattttccacatgggctttgaagatattcaccgttggaaagattctgtacagggaagcgatgaaatacggctttttatcgcagatggtgtgacccacgggctccgagtctggttcaccaaattccacgggaaaatctacgaccggcgctggcttgaaccggtaaaagaactctacaaccgttacgccgattgggaaccttacctaagaaataccggcaacctcgccagggtggcgctggtattttcacaggcaacgggaaagttttacggcgccgagaatgcccgacaaaaggtggaaaaccccatcaacgggttttatcaggccctgaccgaaagcagaattccctttgaaatggttcacgaaagttttttaagcgataatctgaatgatcaaaaatatctgtcaaaattcaaaaccctcatactgcccaacatcgcctgcctttccaatgcccagtgtgaagggctaaaggcttttgtaaaagccggcggcggcctaatcgccactttcgaaacgtcgctttacgacgaaagaggaaacaaganatccaatttcgggctttccgaattattcggtgtggatccggcaggccccatcgaagagccgatgaagaattcttaccttcgtttggaaatggataccaaacatccggtgctgtcgggttttttgtatacggagcggatcgttaacggcaacgcccggctgcccgtaaaagaaaatacccctttcccngnntag

SEQ ID NO: 35974 - protein, 466 aa, Unknown
  Obtained from environmental sample
  misc_feature (1)..(466): Xaa is any amino acid
MAESNESNDVFGYLVEGCRKMDMAVIVRTDPHAVHDKEKNAHPEWIAVTADGEFRKHWSYDQAWVTCALGPMNFEFMTEVNKEIISRYWVDGIFSNRWAGSGLCYCENCKKLFREKTGLELPKTMTFSDPSYKAYIDFHEERLFELCKFWDEEIKKLSPNARFIPNSGGGALSGLNMRRLGDYSDILFADRQSRSKHMPLWANGQNGKEFRAVMGNKPVGGIFHMGFEDIHRWKDSVQGSDEIRLFIADGVTHGLRVWFTKFHGKIYDRRWLEPVKELYNRYADWEPYLRNTGNLARVALVFSQATGKFYGAENARQKVENPINGFYQALTESRIPFEMVHESFLSDNLNDQKYLSKFKTLILPNIACLSNAQCEGLKAFVKAGGGLIATFETSLYDERGNKXSNFGLSELFGVDPAGPIEEPMKNSYLRLEMDTKHPVLSGFLYTERIVNGNARLPVKENTPFPX

SEQ ID NO: 35975 - DNA, 636 bp, Unknown
  Obtained from environmental sample
  misc_feature (1)..(636): n is a, c, g, or t
atggagtcatatgacaaaaggaaatccagcgtatactgttttgttaaggtggcaacaaatgatttaattatattggttgcttttacccctattgtggcttttctgttgggaattggcggaataacaattccgtggtcaacattattactttcggttgtactttttgtaattattccgctttctggaggaataattaccctccattcaataattaaccgcagggggaatgattattttataaatacgtttatacctaaatggagtaatgtaactatttctggattattgcttgcgctggttattattttttcttttcaaggaaatgttatattggaaaaccctttgcatattgcgttgattgttattccgttaattatacaaacatttttaattttttttattgcttacgttgcgtctaaattattaaagctgccgcatgatatagccgctcctgctggaatgattggagcgtctaatttatttgaattagcagtagcggttgctatcgccttattcggaacgcaaagcccagttgcattggcaattattattggagttcttatggaagtgcctgtaatgttaattttggttaaaattgtaaatagtacaaaaggcttgtttaattatgtgtcctaa

SEQ ID NO: 35976 - protein, 211 aa, Unknown
  Obtained from environmental sample
  misc_feature (1)..(211): Xaa is any amino acid
MESYDKRKSSVYCFVKVATNDLIILVAFTPIVAFLLGIGGITIPWSTLLLSVVLFVIIPLSGGIITLHSIINRRGNDYFINTFIPKWSNVTISGLLLALVIIFSFQGNVILENPLHIALIVIPLIIQTFLIFFIAYVASKLLKLPHDIAAPAGMIGASNLFELAVAVAIALFGTQSPVALAIIIGVLMEVPVMLILVKIVNSTKGLFNYVS

SEQ ID NO: 35977 - DNA, 669 bp, Unknown
  Obtained from environmental sample
  misc_feature (1)..(669): n is a, c, g, or t
gtgtatcagtctattgtatgtcctgaatgctggttttcatcaatggaaagcgatttttccctgcttccaaaggaaaatgtaaaaaaagcaaaggatgaacaggaacagcggataaatgatacccgccttatttttccctttgccgactttcatgaaaaccgcacccttatggaaggagccgcgtcccaataccttacattgcgctgttatgattattacaacaagcaggcctctcccacaattaaacaggggcttgcctcaatacgctgcgcgtggctgttagatgaaatgaataaaaaattccccgaacagcactatgactggcttgcctctcttttcagaaaaaaagccgagtatctttacaacgaagctcttgcccgtgaacaaaacggaaaagaaacgctttccgccatgaaagcctttggtcccgataccgataaaaattacgcgtacgaaggaatgctatacatgtgcgcctaccttcgctataacttcggccccgcccacgacgatgcggaacgaaaagagtcgcttgaagacgcgcgcaggactatcgccaaacttttcggcctgggtaaggcgtccaaagacaaaccgggcgcgttccttgaacacgcaagaaaactctatgacaccatcaatcaaaagctcgcggaaaatgaagcctga

SEQ ID NO: 35978 - protein, 222 aa, Unknown
  Obtained from environmental sample
  misc_feature (1)..(222): Xaa is any amino acid
MYQSIVCPECWFSSMESDFSLLPKENVKKAKDEQEQRINDTRLIFPFADFHENRTLMEGAASQYLTLRCYDYYNKQASPTIKQGLASIRCAWLLDEMNKKFPEQHYDWLASLFRKKAEYLYNEALAREQNGKETLSAMKAFGPDTDKNYAYEGMLYMCAYLRYNFGPAHDDAERKESLEDARRTIAKLFGLGKASKDKPGAFLEHARKLYDTINQKLAENEA

SEQ ID NO: 35979 - DNA, 702 bp, Unknown
  Obtained from environmental sample
  misc_feature (1)..(702): n is a, c, g, or t
ttggtcccgataccgataaaaattacgcgtacgaaggaatgctatacatgtgcgcctaccttcgctataacttcggccccgcccacgacgatgcggaacgaaaagagtcgcttgaagacgcgcgcaggactatcgccaaacttttcggcctgggtaaggcgtccaaagacaaaccgggcgcgttccttgaacacgcaagaaaactctatgacaccatcaatcaaaagctcgcggaaaatgaagcctgacggcagaaatataaaacttctaattgcgtatgacggtacggatttttcaggctggcagaggcagaccggcgaattacaaagcgattcgccttgtgatatgccggataaagcaagaaccgtacagggcgagatagaaaaggcgctggaaaaaatacacggacatgccgtaccccttacgggttccggcaggactgatgcgggtgttcacgcggcgggacaggccgccaatttttacacaagcataaaaagtatcccggcagaaaaatttgtccccgcccttaatacaatccttgcgcaggatatccgcatccttgaggcctgcgaaacagaccctgaatttcacgcccgcttcagcgccatttcgcgcacttaccgctatcactttattctcggccgccccgcccttccccacgaaagccgctacaaccttcagctttggcgctccccagaataa

SEQ ID NO: 35980 - protein, 233 aa, Unknown
  Obtained from environmental sample
  DOMAIN (89)...(201): tRNA pseudouridine synthase
  misc_feature (1)..(233): Xaa is any amino acid
MVPIPIKITRTKECYTCAPTFAITSAPPTTMRNEKSRLKTRAGLSPNFSAWVRRPKTNRARSLNTQENSMTPSIKSSRKMKPDGRNIKLLIAYDGTDFSGWQRQTGELQSDSPCDMPDKARTVQGEIEKALEKIHGHAVPLTGSGRTDAGVHAAGQAANFYTSIKSIPAEKFVPALNTILAQDIRILEACETDPEFHARFSAISRTYRYHFILGRPALPHESRYNLQLWRSPE

SEQ ID NO: 35981 - DNA, 1095 bp, Unknown
  Obtained from environmental sample
  misc_feature (1)..(1095): n is a, c, g, or t
atgtccgcaaaaccaataaaaaccatcggcatcctaggcgccggccaactagcccgtatgctggcgttaagcgggcatccgttgggattgcgctttgtcacccttgaccccgcgcccgacgcatgcgccgcggcggtgtctgtgcacgtcgttggcggctacgacgaccgcgaaaagttggagcaatttgccggtatggcggatgtcgtcacctacgagttcgagaacgtccccgccgagagcgtgaaatacctcgcggagaggcttcccgtctaccccccgccgtcggcgcttgccgtgtcgcgggacaggttcgccgagaagagcctttttgttgagttgggcatacccacgcctaaattttccgcggtggacactctcgacgctttgaatctggcggtaggggagatcgggctgccggcgctgctaaagacgcgtacgcttgggtacgacggaaagggccagagtgttatcagatccgacggcgacgttgagggggcatgggcgcgggcgggcggcgcgccgtgcatactggaggcttttgtcccctttacaagggagataagcgttgtggccgtgagggatcgcgccgggaggtcgctcttttatccggtgggagaaaacacgcactccggcggcatactgcgtcacacgatttgccgcgttgacgaccctatgcagggtgccgcggaggggttggccgtccgtctgttggagcgcttcggctacgtgggggtattggccttggagttgtttgaggtagacggtaagttattggcgaacgagatggcgccgcgtgtccacaataccgggcactggtctatagagggggcgcaggcgagccagttcgagaatcacgtccgcgccgttgccggcctgcctttgggtgctacggaggcggtttgccgtagcgcaatggtaaattttataggcgctatgccggacgcgtcggaggtgctttgcattgaaggggcgcacctgcacgattacggtaaggcgccgagggtcgggcgtaagctgggtcacgccacggtttgcggcgaccgggaggaaattgtggcggctgggttgaataggttgttagggttactttag

SEQ ID NO: 35982 - protein, 364 aa, Unknown
  Obtained from environmental sample
  DOMAIN (103)...(278): ATP-grasp domain
  misc_feature (1)..(364): Xaa is any amino acid
MSAKPIKTIGILGAGQLARMLALSGHPLGLRFVTLDPAPDACAAAVSVHVVGGYDDREKLEQFAGMADVVTYEFENVPAESVKYLAERLPVYPPPSALAVSRDRFAEKSLFVELGIPTPKFSAVDTLDALNLAVGEIGLPALLKTRTLGYDGKGQSVIRSDGDVEGAWARAGGAPCILEAFVPFTREISVVAVRDRAGRSLFYPVGENTHSGGILRHTICRVDDPMQGAAEGLAVRLLERFGYVGVLALELFEVDGKLLANEMAPRVHNTGHWSIEGAQASQFENHVRAVAGLPLGATEAVCRSAMVNFIGAMPDASEVLCIEGAHLHDYGKAPRVGRKLGHATVCGDREEIVAAGLNRLLGLL

SEQ ID NO: 35983 - DNA, 963 bp, Unknown
  Obtained from environmental sample
  misc_feature (1)..(963): n is a, c, g, or t
ttgatggccgagcggccgagcggtaccggcactaccttcgccgcgtttgagccgacgcttgactatgtagcggtaaaatttcccaaatggccatttgacaaatttgtatacgctcaaaaagaactgggtacgcagatgaaagccaccggcgaggtcatggcaattgccgacaccttcgaggaagcgctggtgaaggccgtccgcggcgcggagataggactttccggccttgacctgccccgtttatccgctaaatcagacgaagaaatccgccggctacttcaaaccgtgaccgatgaacgcctgtttgtgctgtatgaagcgctcaagcgcggcatcagcgtagatgaattgtacaacattaccaaagtagaccgctggtttttgcatgggctggttaatatcgtttcatcttcactgcccacccagtccacactactgtacaaaatggtcgatacctgcggcggcgaatttgaagccaaaacgccgtatttttactccattcaaaacggtacggaaaatgaggctttgccgtttatccggaaaagcggcaaacagcggattgtcgtactgggcagcggtccaatccgcattgggcagggcattgagtttgactacgcatgcgtgcattgcgtatggacgctaaaaagcatgggatacgaagttatcgtcattaacaacaaccccgaaacggtctccaccgactttgacaccgccgacaggctgtactttgaaccgctgtgcattgacgatgtaatgagcattatagagattgaacagccgttaggtgttatcgtagcctttggcggcggcacggcaatcaaactgacaaaaaagcttcacgagcgcggcgttaatattatcggcacttccgcggacagcatcgacatctgcgaagacaggcagcgcttgacgcgctgctggaacgctgcagaaaaacgccccagggttacggcgttatga

SEQ ID NO: 35984 - protein, 320 aa, Unknown
  Obtained from environmental sample
  DOMAIN (90)...(169): Carbamoyl-phosphate synthetase large chain, oligomerisation domain
  misc_feature (1)..(320): Xaa is any amino acid
MMAERPSGTGTTFAAFEPTLDYVAVKFPKWPFDKFVYAQKELGTQMKATGEVMAIADTFEEALVKAVRGAEIGLSGLDLPRLSAKSDEEIRRLLQTVTDERLFVLYEALKRGISVDELYNITKVDRWFLHGLVNIVSSSLPTQSTLLYKMVDTCGGEFEAKTPYFYSIQNGTENEALPFIRKSGKQRIVVLGSGPIRIGQGIEFDYACVHCVWTLKSMGYEVIVINNNPETVSTDFDTADRLYFEPLCIDDVMSIIEIEQPLGVIVAFGGGTAIKLTKKLHERGVNIIGTSADSIDICEDRQRLTRCWNAAEKRPRVTAL

SEQ ID NO: 35985 - DNA, 1335 bp, Unknown
  Obtained from environmental sample
  misc_feature (1)..(1335): n is a, c, g, or t
ttgtacggaatgaaggtgatgagcgacggcattcagcgcgccgcgggtgacaggcttcagcgtttccttaatttaattaccgggaacagatttacggctgtttttaccggttttgccataacagcgataatccagtcgtcatcggccacaacggtcatggtggtgtcccttgtaaacgcgggccttctcaaccttacacaggcaatagggcttatcatgggagccaatataggcaccacggttacggcgtggattgtctcccttatcgggttctcccttaaactttctgaacttgccctgccggcggtcggcataggttttatctgcagtattatcaaatggaaacacagaaacatcggagattttatcctcggtttcggccttctctttatgggccttgatattcttaccaagtctatgccctcgcttggggaaaatgtttatattattgcaaaagcttccaatatgggctttttaaccgatttgattggcgtggctttcggaacggtaatcacattgcttcttcactcgtcaagcgcgactaccgccataatactgaccatggcgtataacggcataataggttatgaattggcggcggcgatgatattaggcgcgaatatcggcactacaattgacgcggctctcgcttccatagggacaaagacaaacgcgaaacgcgccgcccttgtgcatgttctttttaacgtattcggaacagtctgggcattgccgctgctaaagccgcttttggcgcttgttgattttgtgactccgggcacaatgactttgggcatgatacatgatcctatggaaactgctcatctggccatgctgcatactgtgtttaacgtagtcaatacaattatctttttgccctttgttaattattttgccaggttcgtttctttcctaattaaagacgatccaagcgaagaaacgggtccggcacagtaccgctttacttacgcttcgggaaaaattcaaaacacgccggaaatgcaaattgttttcgcggaaaaagaagtcagggacatggcaaaccatgttttactgatgttctccagttttaacaaggtaattcaatccctttttgaaacgcaggacaagcagaccgccgtaacgaccctgggccttgaattaaggcagaaggaagaatacgccgaccagatgcgcgatcaaatcggcgcgtttttaatgacatgcgcgagggagcagcttaacccgcgctcggaacaccgcgtttcgcagttgctgcgcgttatctcggatttggaagaaatttccgacgactgctgcagtttaagttttattttggaaaacnggcgtaaatga

SEQ ID NO: 35986 - protein, 444 aa, Unknown
  Obtained from environmental sample
  DOMAIN (1)...(162): Na+/Pi-cotransporter
  misc_feature (1)..(444): Xaa is any amino acid
MYGMKVMSDGIQRAAGDRLQRFLNLITGNRFTAVFTGFAITAIIQSSSATTVMVVSLVNAGLLNLTQAIGLIMGANIGTTVTAWIVSLIGFSLKLSELALPAVGIGFICSIIKWKHRNIGDFILGFGLLFMGLDILTKSMPSLGENVYIIAKASNMGFLTDLIGVAFGTVITLLLHSSSATTAIILTMAYNGIIGYELAAAMILGANIGTTIDAALASIGTKTNAKRAALVHVLFNVFGTVWALPLLKPLLALVDFVTPGTMTLGMIHDPMETAHLAMLHTVFNVVNTIIFLPFVNYFARFVSFLIKDDPSEETGPAQYRFTYASGKIQNTPEMQIVFAEKEVRDMANHVLLMFSSFNKVIQSLFETQDKQTAVTTLGLELRQKEEYADQMRDQIGAFLMTCAREQLNPRSEHRVSQLLRVISDLEEISDDCCSLSFILENXRK

SEQ ID NO: 35987 - DNA, 516 bp, Unknown
  Obtained from environmental sample
  misc_feature (1)..(516): n is a, c, g, or t
ttgctgccttacgcggtaatgctcaatgtcgacctcgtatggatacacgcgtcggcgacagtactggaatctacgctggcgcactcgctcaatatgcgtaacgtgaagacgctagtggtcgaaatgggtgtcggtatgcgcatcacggagagcttctgtgcgcagcttgtggacggcatactaaatttattgagtgaactcggaatgtggaacgaaaagaccgggcggacacggccacaaacgcgaccgcaaatgcggacgccattggtttcaaaagatcgtagcgtcggctttttgaattcagatgcggctgggatatttattccgcacgccacgcacggcagccatgtaagcgcaggcgactgcatcggtatcgtcatagacccgctcacaggcgcagtcgtcgaggaaacgctcgcgccctgcgatggcttgctgtttacgctgagggaataccccgttgtcttcggcggttcgcttttggctcgaatcatggaggactccaaaaatggttaa

SEQ ID NO: 35988 - protein, 171 aa, Unknown
  Obtained from environmental sample
  misc_feature (1)..(171): Xaa is any amino acid
MLPYAVMLNVDLVWIHASATVLESTLAHSLNMRNVKTLVVEMGVGMRITESFCAQLVDGILNLLSELGMWNEKTGRTRPQTRPQMRTPLVSKDRSVGFLNSDAAGIFIPHATHGSHVSAGDCIGIVIDPLTGAVVEETLAPCDGLLFTLREYPVVFGGSLLARIMEDSKNG

SEQ ID NO: 35989 - DNA, 558 bp, Unknown
  Obtained from environmental sample
  misc_feature (1)..(558): n is a, c, g, or t
atgcgtattgagaccttaagcggcatcagagaactttatcttttaacaagaaacgataaagtgtcatcggtaaaggtagacatggggcgggcggaattgcaccccaaaaaaataccggttaatctttccggtgagaacgtgatcgaaaggcaagtaacaatcggcggcaaggaatataaaataacctgtgtttctatgggcaacccccatgctgttgttttctgtgacagaattgaagaacttgacctgcacataattggtccgttatttgaaaacaattcgctgttcccggaaagggtaaatactgaatttgtcgaaaagatggacaaaaatcatcttaaaatacgagtttgggaacgcggcaacggagaaacgcaggcctgcggaacgggagcttgcgcttccgcagttgccgccgttctggtcggacacagcgacaagggtgcggatataaaagtacagcttcctggcgggaatttaattattaattataccgatgatgcggtttatatgacgggcgattgcgtaaaagtgtttgacggagtagtggagatatag

SEQ ID NO: 35990 - protein, 185 aa, Unknown
  Obtained from environmental sample
  DOMAIN (62)...(178): Diaminopimelate epimerase
  misc_feature (1)..(185): Xaa is any amino acid
MRIETLSGIRELYLLTRNDKVSSVKVDMGRAELHPKKIPVNLSGENVIERQVTIGGKEYKITCVSMGNPHAVVFCDRIEELDLHIIGPLFENNSLFPERVNTEFVEKMDKNHLKIRVWERGNGETQACGTGACASAVAAVLVGHSDKGADIKVQLPGGNLIINYTDDAVYMTGDCVKVFDGVVEI

SEQ ID NO: 35991 - DNA, 975 bp, Unknown
  Obtained from environmental sample
  misc_feature (1)..(975): n is a, c, g, or t
atgtggcttataaatttatgcgcttttatggttgtcattcaatcatcccttacagactcttattcctcgctttttatcgcaatgagcactgtttttgcgtccgttttaaccgaattccttattttattaaaaagcgggagggaaagggctattatggacggcagtgccgtagcttccgcattgatcctgaccctccttttgcccaacaggatttccgctgtaaatgcggcggcaggggccgtttttgccatcgctgtaattaagcatagctttggcggcctcggttccaactggcttaatccggccgcaggaggctggctgtttatcaggttttcatggccagtctcttttatgagcgccctcgagggttcgcctctttcagtaatcggcgaaagcgtaagggagggcggctacggcattgacgcttttcttgccgtcccttccccatttggcgacgcgttaagatcattgctgaacagaaccattttttccataccgggagtggaacttccttccggttatttggacctttttacttcgcattttcccggcataatagccgaccgcggcgtatttgccctgcttttgggtaccataattatgactgcatcgcaggtgactcgttcctggattcccgctgtttaccttgctgtatttggcattcttgtccgctttgcgggtgccttgccttttggttccggttattggaacggcgatgtcatttttgccctttgctccggcggaactctggtagccgctttttttcttgccgcagacccggcaaccagtgccaaatccaatacaggaatattttttgcgactctggcggccggatgtattgcctttgtttttcgctggttcggaaacgaaccttatggagcaatatctaccattgttactttaaacgccatacttccgatattcagggttttggaaagtcgacagctatatagaatgcagaggccggcatcatga

SEQ ID NO: 35992 - protein, 324 aa, Unknown
  Obtained from environmental sample
  SIGNAL (1)...(18)
  DOMAIN (1)...(318): NQR2, RnfD, RnfE family
  misc_feature (1)..(324): Xaa is any amino acid
MWLINLCAFMVVIQSSLTDSYSSLFIAMSTVFASVLTEFLILLKSGRERAIMDGSAVASALILTLLLPNRISAVNAAAGAVFAIAVIKHSFGGLGSNWLNPAAGGWLFIRFSWPVSFMSALEGSPLSVIGESVREGGYGIDAFLAVPSPFGDALRSLLNRTIFSIPGVELPSGYLDLFTSHFPGIIADRGVFALLLGTIIMTASQVTRSWIPAVYLAVFGILVRFAGALPFGSGYWNGDVIFALCSGGTLVAAFFLAADPATSAKSNTGIFFATLAAGCIAFVFRWFGNEPYGAISTIVTLNAILPIFRVLESRQLYRMQRPAS

SEQ ID NO: 35993 - DNA, 303 bp, Unknown
  Obtained from environmental sample
  misc_feature (1)..(303): n is a, c, g, or t
ttgcgggaatataccggaagacgggaactgttcntgaagggactggacgatcttggcatacagcacacctcaccggaaggcgcttattatgtcatgcttgacatatccgaatacggatacgagagcgatcttgatttntgcgagaaattagccgaaagagtcggcgtaggcgcggtccccggttccagttttttcagggaggacataagcagcctgatacgttttcacttcgccaagaaaaacgatactctttatgaggcgctgaaccggctggaaaacatgaaagaacggatgcgaaagtga

SEQ ID NO: 35994 - protein, 100 aa, Unknown
  Obtained from environmental sample
  misc_feature (1)..(100): Xaa is any amino acid
MREYTGRRELFXKGLDDLGIQHTSPEGAYYVMLDISEYGYESDLDXCEKLAERVGVGAVPGSSFFREDISSLIRFHFAKKNDTLYEALNRLENMKERMRK

SEQ ID NO: 35995 - DNA, 897 bp, Unknown
  Obtained from environmental sample
  misc_feature (1)..(897): n is a, c, g, or t
atgtacaagttatccgacaggactgcaggttttacagattctgtcattcgcagaatgacccgcgtatctttgaagtacggggcggtaaatctttcgcagggttttcctgattttgacccgccaaaggaaattttagacaggcttgccgaaattgcgcataccgggccgcaccagtattccattacatggggcgctcaaaatttccgcgaggctctttgtgaaaaacagtcaaaactgatgggcaggcaaattgacccgcagcgcgaaatcgtggtaacttgcggcagtaccgaagcaatgatggcggctatgatgacggttgcgaatcccggcgacaaggtgattgttttctcgccgttttatgaaaattacggcgcggacacgattctgtccggcgcgcagcctgtttatgtgcctctgcgtccgcctttgttcaacttcgacgcaaatgaactggaagccgcatttaagcagcgccccaaagcgctgatactttgcaacccttccaacccgtgcggaaaggtgtttacccgtgatgaattaaccgtaatctccgatcttgcgaaaaagtatgacgcatatatcattaccgacgaggtgtacgaacatatcgtttacgcgccccatacgcatacttatatcgcgtcacttcccggcatgttcgagcggacaatttcctgcagttcactttcaaaaacttattcgataacgggctggcggctgggatatattatcgcgccggaagagatagttgaaacggcaaanaaggtacacgactttttaacggtaggcgcggcggctcccttgcaggaagcggcggtagtcgggctgcgttttcagccgcatactacgacgctcttttgcgggaatataccggaagacgggaactgttcntga

SEQ ID NO: 35996 - protein, 298 aa, Unknown
  Obtained from environmental sample
  DOMAIN (26)...(297): Aminotransferase class I and II
  misc_feature (1)..(298): Xaa is any amino acid
MYKLSDRTAGFTDSVIRRMTRVSLKYGAVNLSQGFPDFDPPKEILDRLAEIAHTGPHQYSITWGAQNFREALCEKQSKLMGRQIDPQREIVVTCGSTEAMMAAMMTVANPGDKVIVFSPFYENYGADTILSGAQPVYVPLRPPLFNFDANELEAAFKQRPKALILCNPSNPCGKVFTRDELTVISDLAKKYDAYIITDEVYEHIVYAPHTHTYIASLPGMFERTISCSSLSKTYSITGWRLGYIIAPEEIVETAXKVHDFLTVGAAAPLQEAAVVGLRFQPHTTTLFCGNIPEDGNCS

SEQ ID NO: 35997 - DNA, 1215 bp, Unknown
  Obtained from environmental sample
  misc_feature (1)..(1215): n is a, c, g, or t
atgtccacgagtttattgtatcatgcttttggtttgcggggctatgattatgtacataccaagtatgagggtggggccattcatttcagggtggagcctaagctggagttattgcgctgtccttgttgccggagtaggcaggtaaagcgtcgagggcgtttcgagaggaagttacggttgccgcctgtgggtcctaagccagtgtatattttgataaaagtgcctcgccttgaatgtctggcctgtggagcggttcggttgattgaattggggatggctgcggttcgcaggacgtacaccaggtcttttgaacgtctggtcgtggagttcagccgaatgatgaccctcaaggacgtggccaaacatctccaggtggggtgggattgcgtcaaggacatagtcaaaaggaatctccataaacgcttttccaaaccaaaacttagtcatttaagatatttggccattgacgaaatcagcgtttccaaggggcacaagtatttgacggtggtcttggacctggacagcggccaagttgtttttgtgggagacggcaaaggcgccgaagccttgaggccgttttgggacagactgaagcggtcaaaagctcgaattgcggccatctccacggatatgagtccggcttatgtggccgcggtgttggataattggccctcggcttctttggtctttgaccatttccatgtcgtcaagctgatgaatgaacaattgagcgatctgaggcgaaagctctaccatgaattgatgaccggccaggagaagaaaatactgaagggctcaagatggcttcttctcaaatcacctgaacatcttgatgcgcaacgcaacgaaagaaaacggctccaagaagctctggctttgaacgaacctctctccacggcttactacttgaaggaagacttgcggcaaatatggtctcagcccgacaaagcctacgccgccttggtcctggacggctggataaaaaccgcctcatcttccggcattggccctctggccaaaatgggccgcaccttggccaaataccgcttcggtatcttgaactggtatgaccaccacatctcttccggacctttggaaggcatcaacaacaaaattaaaaccctcaaacgacaagcctacggcttcagagacttggccttcttcaaactcagaatcttggccatacatcaagccaagtatgctttaaccggatga

SEQ ID NO: 35998 - protein, 404 aa, Unknown
  Obtained from environmental sample
  DOMAIN (152)...(250): Transposase
  misc_feature (1)..(404): Xaa is any amino acid
MSTSLLYHAFGLRGYDYVHTKYEGGAIHFRVEPKLELLRCPCCRSRQVKRRGRFERKLRLPPVGPKPVYILIKVPRLECLACGAVRLIELGMAAVRRTYTRSFERLVVEFSRMMTLKDVAKHLQVGWDCVKDIVKRNLHKRFSKPKLSHLRYLAIDEISVSKGHKYLTVVLDLDSGQVVFVGDGKGAEALRPFWDRLKRSKARIAAISTDMSPAYVAAVLDNWPSASLVFDHFHVVKLMNEQLSDLRRKLYHELMTGQEKKILKGSRWLLLKSPEHLDAQRNERKRLQEALALNEPLSTAYYLKEDLRQIWSQPDKAYAALVLDGWIKTASSSGIGPLAKMGRTLAKYRFGILNWYDHHISSGPLEGINNKIKTLKRQAYGFRDLAFFKLRILAIHQAKYALTG

SEQ ID NO: 35999 - DNA, 561 bp, Unknown
  Obtained from environmental sample
  misc_feature (1)..(561): n is a, c, g, or t
atgaatatacccatcaccgtaagctataagaacggtaatacccttttttactttgaacaattatcttccgttactttattggatagtttttcttgtttgataactgaatacaacgattatttatttgatgatgcgcttcgttctcaaaatgatcatatagcgttgacatggctgttgaaagaacggaccacaaataacattgccgtttatatgtctctaattgcagacgcaataaaattgtcagtatcagaaaaagaaatccacgatctaaattatccttttaaaaccattcccgccatgaaaatagcaaaacttgctgtttctaatccggtaaaaagtaaatacaaaggacttggttcatacatgctcaataaggctttagcccttgcgcgtacttgtaaccgccaatttcttgcctgtcgtttcctcactgtagacgcggatgtcgaacatgacaaaggcgtacttgcgttttataaaaaaaacggctttatcccaaacgcggagttgtacaataaaaaccgcaaaacaatcagtatgagaaaagatttatatcagtaa

SEQ ID NO: 36000 - protein, 186 aa, Unknown
  Obtained from environmental sample
  misc_feature (1)..(186): Xaa is any amino acid
MNIPITVSYKNGNTLFYFEQLSSVTLLDSFSCLITEYNDYLFDDALRSQNDHIALTWLLKERTTNNIAVYMSLIADAIKLSVSEKEIHDLNYPFKTIPAMKIAKLAVSNPVKSKYKGLGSYMLNKALALARTCNRQFLACRFLTVDADVEHDKGVLAFYKKNGFIPNAELYNKNRKTISMRKDLYQ

SEQ ID NO: 36001 - DNA, 777 bp, Unknown
  Obtained from environmental sample
  misc_feature (1)..(777): n is a, c, g, or t
atgaatatactgctgaaatacatatgcgtgtcgctcgtcaccgccgggggcgctattatgctgtacagcataataacgttctttaaatcactcgtcggtttcagggtgcaggcaaacgaacagaagatattcgcggattggatttacacggcatctatgctcctcatgctgttcttctttatatgctacatagccgttgacatcatctttattattgaggctgcggacacattttcaatgacaaatctgatcgtggcgatggtctttgttttcggcgcgatctttgttgataccatgattacaatgctcaaacgaatgtccgtcacaatttccaaaaagacaggcgagatcattgcgacgctcgtgaacgcgatagaggcgaaggaccggtatacgcgcgggcattcggttcatgtcgcggacgttaccaagcttatatataactacctgccagatggggtaagaaagaaaatcancaagacgacattggtggacgccgctattttgcacgatataggcaagataggaattccggacagcgtcctcaataaaatagatgcgcttacgccggaggagcggcatttgatagagcagcacgtaatgatggggaaaaaaattcttgaacagacaanctaccatttaatcggggatttagtttctgtcaccaccaaccatccgcggaaccggntatttcaaatcccgggggagaaaaataccgttgaggtcaaaagagagccnntnaccagagttatgngggcggtggacgaagggaagtaa

SEQ ID NO: 36002 - protein, 258 aa, Unknown
  Obtained from environmental sample
  DOMAIN (132)...(257): HD domain
  misc_feature (1)..(258): Xaa is any amino acid
MNILLKYICVSLVTAGGAIMLYSIITFFKSLVGFRVQANEQKIFADWIYTASMLLMLFFFICYIAVDIIFIIEAADTFSMTNLIVAMVFVFGAIFVDTMITMLKRMSVTISKKTGEIIATLVNAIEAKDRYTRGHSVHVADVTKLIYNYLPDGVRKKIXKTTLVDAAILHDIGKIGIPDSVLNKIDALTPEERHLIEQHVMMGKKILEQTXYHLIGDLVSVTTNHPRNRXFQIPGEKNTVEVKREPXTRVMXAVDEGK

SEQ ID NO: 36003 - DNA, 333 bp, Unknown
  Obtained from environmental sample
  misc_feature (1)..(333): n is a, c, g, or t
gtgtgcaaaagaatttttggaagtattggagaaaaagatatgatttccattgaaaaaaagcacttggatatgttgaagcatattttgaatttgcatattcctggtattgaagtcagagcttttggcagtagagtcaatggaaccaacagaaagtattccgatttggatttggcaattgtcggtgatggtaaattggataatcgttctttatggaaactaaaaaatacccttatggaatctaggttgccttttagggtggatgttttggattataacgctgtttcggaaagtttcaggaaaattatagataacgagtatgaggttataatttaa

SEQ ID NO: 36004 - protein, 110 aa, Unknown
  Obtained from environmental sample
  DOMAIN (14)...(110): Nucleotidyltransferase domain
  misc_feature (1)..(110): Xaa is any amino acid
MCKRIFGSIGEKDMISIEKKHLDMLKHILNLHIPGIEVRAFGSRVNGTNRKYSDLDLAIVGDGKLDNRSLWKLKNTLMESRLPFRVDVLDYNAVSESFRKIIDNEYEVII

SEQ ID NO: 36005 - DNA, 450 bp, Unknown
  Obtained from environmental sample
  misc_feature (1)..(450): n is a, c, g, or t
atgaaaaagggaagccttgccgacgtactgcggggagccgacgtttttatcggcgtttcagcgcccggcatggtaaccgctgaaatggtgaaatcaatggcgcctaacgcaattttatttccgatgtccaacccaacgccggaaatcatgccggatttggcaattgccgcgggagccgccgttgtggggacaggccgcagtgattttgcgaatcagattaacaatgttctcgcttttcccggcattttccggggtgcgctggatgtgcgcgcaaaagacattaacgatgaaatgaaaatagccgcggcttacgcgcttgccaatcttgtaagcgagaatgaattacgcgtcgattacattatcccggcggcttttgacccaagggtaagggatgctgtagcgcgcgcgacggctcaggccgcaattaagagcggtacggcaagagcgtaa

SEQ ID NO: 36006 - protein, 149 aa, Unknown
  Obtained from environmental sample
  DOMAIN (2)...(142): Malic enzyme, NAD binding domain
  misc_feature (1)..(149): Xaa is any amino acid
MKKGSLADVLRGADVFIGVSAPGMVTAEMVKSMAPNAILFPMSNPTPEIMPDLAIAAGAAVVGTGRSDFANQINNVLAFPGIFRGALDVRAKDINDEMKIAAAYALANLVSENELRVDYIIPAAFDPRVRDAVARATAQAAIKSGTARA

SEQ ID NO: 36007 - DNA, 717 bp, Unknown
  Obtained from environmental sample
  misc_feature (1)..(717): n is a, c, g, or t
ttggaggaatatatggcggaaggtcagccggcaaatgatgttgttgaattatttaataagggaaacgccgcaagaatgttaaataattatgcggaggcttttgatagttaccgcaaagcggcggatctggggtacgctcctgctcagtgtaatctggcgtactgttatgaaaaaggtcacggcgttccccataattttgccaaagcgcttgaatattatcagaagtcagcaaaccaggggtatgctcccgccatgtgtaatttgggatggtgttatgaaagcggcaacggagtagaaatgaatttggacaaagcggtcgcgtattataccaaatcggcggaactgggatacgcgccagctcagggtaatattggtttttgttatgaaaacggcaacggcgttacaaaagatttagagcgggctattagatggtacaaacaggctgcggctcagggaaatgtttttgcacagtataatttgggcgtatgctatgaatttggcaaaggtatcgccgcggatttggcaaaagcggtcgatttataccgaaaatccgcagagcatggatacgcgcccgctcagaattgccttggaatgtgttatgagaacggcaacggcgtgccgaagaatccgcttgtagcttttgaatggtataactacgccgcctttcagggatattcagccgcaaagaaaaatcttgaaaatcttaaaaaaaagtaa

SEQ ID NO: 36008 - protein, 238 aa, Unknown
  Obtained from environmental sample
  DOMAIN (190)...(225): Sel1 repeat
  misc_feature (1)..(238): Xaa is any amino acid
MEEYMAEGQPANDVVELFNKGNAARMLNNYAEAFDSYRKAADLGYAPAQCNLAYCYEKGHGVPHNFAKALEYYQKSANQGYAPAMCNLGWCYESGNGVEMNLDKAVAYYTKSAELGYAPAQGNIGFCYENGNGVTKDLERAIRWYKQAAAQGNVFAQYNLGVCYEFGKGIAADLAKAVDLYRKSAEHGYAPAQNCLGMCYENGNGVPKNPLVAFEWYNYAAFQGYSAAKKNLENLKKK

SEQ ID NO: 36009 - DNA, 693 bp, Unknown
  Obtained from environmental sample
  misc_feature (1)..(693): n is a, c, g, or t
atgatggccgagggaccatactacggcgaaagccggatcatcaataagcttaatctttcaataaaaaaaggaagcgtcacctgtttaatcggaagaaacggcgtcggcaaaaccacaactctcaaaagcattatgggtttggtaaaaactccgtcggggaaaataatttttgacggacatgacataattaaacttccggcttacgaccgcgtaaggctcggcataggatatgtgccgcaggggcgggatattttcccgcagatgactgtgcgcgaaaatcttgaattgggattacagccgcttgcggggaaaaaacaaaaagcggaaatacccgaatatctttttgaactgtttcccgccttgccgaaattcgcaaaacgtaaaggcggcgatttatcgggtggtcaacagcaacagctcgctatagcccgcgctcttgcggcggaaccgaaaattttaatactggacgaaccgacagagggtattcagccctcgattattcaggacattggcagggcgataaggagaatcaacactgaaaaagggataactgttcttcttgtggaacagtaccttgaattcgtgctggagatttcagaccatctgttcattatggaaaaaggaaacgtcgtgttaagcggagcgaccgccgaacaggacgcggaacatattcaaaagatattaacgatatag

SEQ ID NO: 36010 - protein, 230 aa, Unknown
  Obtained from environmental sample
  DOMAIN (24)...(208): ABC transporter
  misc_feature (1)..(230): Xaa is any amino acid
MMAEGPYYGESRIINKLNLSIKKGSVTCLIGRNGVGKTTTLKSIMGLVKTPSGKIIFDGHDIIKLPAYDRVRLGIGYVPQGRDIFPQMTVRENLELGLQPLAGKKQKAEIPEYLFELFPALPKFAKRKGGDLSGGQQQQLAIARALAAEPKILILDEPTEGIQPSIIQDIGRAIRRINTEKGITVLLVEQYLEFVLEISDHLFIMEKGNVVLSGATAEQDAEHIQKILTI

SEQ ID NO: 36011 - DNA, 369 bp, Unknown
  Obtained from environmental sample
  misc_feature (1)..(369): n is a, c, g, or t
ttgcacctgcaattttttttatacctntgcattgtggtgtgtaaatacaatatcagcatgaacgatgacgtaattcttgaatgggacgaggaaaagcgtcttcgtagtatagcagagcgtggcattgatttcacagcagcaatagatgttctttcagaccccaatatgtcgttgtatgtagatgagcgcaaggagtatggcgaggagcgatacaacgcatacggtatgtcaaacggatatcgcctacgcttgtgttttacgcctcgcgatggaaagattcgcgtaataacgatttttaaagttcacaaaaaagaatgggagaagcactatgggacaaatggtgagaatgaccgcacaggaagcgcgtag

SEQ ID NO: 36012 - protein, 122 aa, Unknown
  Obtained from environmental sample
  DOMAIN (24)...(113): Protein of unknown function (DUF497)
  misc_feature (1)..(122): Xaa is any amino acid
MHLQFFLYLCIVVCKYNISMNDDVILEWDEEKRLRSIAERGIDFTAAIDVLSDPNMSLYVDERKEYGEERYNAYGMSNGYRLRLCFTPRDGKIRVITIFKVHKKEWEKHYGTNGENDRTGSA

SEQ ID NO: 36013 - DNA, 606 bp, Unknown
  Obtained from environmental sample
  misc_feature (1)..(606): n is a, c, g, or t
gtgggcgccattgtcaaagacaccaatataagacttggggcgcaggactgcgcgtgtgaagaacaaggcgcccataccggcgaggtttctgtcctgcagttgaaagaccttggagtgcagaccatcatcctgggccacagcgaaagacgccatgtctacaaggaagacgacgcgctgatcaacaaaaaggtgaagcttgccctgaagcacggctttgaagtgatcctctgtattggggaactgctggaagagcgcgaggcaggcaaggttgaagctgtctgcgaatcccagaccgtanaggggcttgaaggcgtcagcgcatccgatttggccaatatcgtcattgcctacgaaccggtctgggccattggcaccgggaagaccgccacaccggaagacgcggaggcggttcacgcctttgtgcgncaggtgattgcgcggctctacggacagcctgccgcggataaaatcatcatccagtacggcggctcggtaaagccggacaacgccgcccagttgatggccaaagagaacatcgacggcgccctggtcggcggcgcggctcttaaaccggatacttttgtacctatcgcaaaatttaattag

SEQ ID NO: 36014 - protein, 201 aa, Unknown
  Obtained from environmental sample
  DOMAIN (1)...(198): Triosephosphate isomerase
  misc_feature (1)..(201): Xaa is any amino acid
MGAIVKDTNIRLGAQDCACEEQGAHTGEVSVLQLKDLGVQTIILGHSERRHVYKEDDALINKKVKLALKHGFEVILCIGELLEEREAGKVEAVCESQTVXGLEGVSASDLANIVIAYEPVWAIGTGKTATPEDAEAVHAFVRQVIARLYGQPAADKIIIQYGGSVKPDNAAQLMAKENIDGALVGGAALKPDTFVPIAKFN

SEQ ID NO: 36015 - DNA, 1128 bp, Unknown
  Obtained from environmental sample
  misc_feature (1)..(1128): n is a, c, g, or t
atggaaaagggcatctacaacgaacaggaatataaaaaagcgcttgcgtggaccaaacagtactgcaaggaaggctttgataaaaatcccgccgagttacagtactcccggcaagagaaggatacggcgtgggaatttgttgttaagatgatgtgcatcatcaaagatcttttcaacggcaatgccaatctgcccgccggctgtgaagaagagcggctgggtcataacgccatcgccggcggtttccagggccagcgccagtggacggacttctaccccaactgcgacttccccgaatccttgatgtgttcctcttttgattgggaaggcgcgcgggagccgtatatactggcaaccgaaaacgacaccctcaacggcattggaatgttattcgggaaactcctgaccgggaccgcgcagattttcgccgatgtgcgtacctactggagtcccgacgcggttaaacgcgtaacaggctatgaattgacgggcaaggcaaaggaggcgacaggcttgatccatctgatcaattccggcgcagcctgcgtagacgcttcgggagagatgaaagattcaaacggtaatgctttaatcaaaccgttctgggaagtaaaggacggggactggaaagcctgccttgcggctacaacctggaatcccgcggacttcggctatttccgcggcggcggtttttcatcgcgctttatcacaaaggcggaaatgcccgttaccatgtcgcggcttaacattgtcaaaggtataggcccggtgctgcaaatcgccgaaggctggacggtgaaccttccggataacgtgtcggatattctctggaaacgcaccgactacacctggccctgtacatggttcgccccgcgggttaccggcacaggcgcgttcaagaccgcttacgatgtcatgaacaactggggagccaaccacggttcaatctcatacggccacatcggcgcggacttgatttcgctgtgttccatactgcggattccggtgtgtatgcacaatgtgtctgaggaacaaattttccgccccgcctactggaacgcctttggaatgaacaaggaaagcgccgattaccgggcctgctctgcgcttggtccgatgtacaagtag

SEQ ID NO: 36016 - protein, 375 aa, Unknown
  Obtained from environmental sample
  DOMAIN (1)...(138): L-fucose isomerase, second N-terminal domain
  misc_feature (1)..(375): Xaa is any amino acid
MEKGIYNEQEYKKALAWTKQYCKEGFDKNPAELQYSRQEKDTAWEFVVKMMCIIKDLFNGNANLPAGCEEERLGHNAIAGGFQGQRQWTDFYPNCDFPESLMCSSFDWEGAREPYILATENDTLNGIGMLFGKLLTGTAQIFADVRTYWSPDAVKRVTGYELTGKAKEATGLIHLINSGAACVDASGEMKDSNGNALIKPFWEVKDGDWKACLAATTWNPADFGYFRGGGFSSRFITKAEMPVTMSRLNIVKGIGPVLQIAEGWTVNLPDNVSDILWKRTDYTWPCTWFAPRVTGTGAFKTAYDVMNNWGANHGSISYGHIGADLISLCSILRIPVCMHNVSEEQIFRPAYWNAFGMNKESADYRACSALGPMYK

SEQ ID NO: 36017 - DNA, 525 bp, Unknown
  Obtained from environmental sample
  misc_feature (1)..(525): n is a, c, g, or t
atgtgcgcttcgtatatgcgcgaactcgccaataaaaccgccaacggacttattaaggcgattccttccggcgtcgttatagtcgataaggatttgaaaattatagattgtaacgaacagtttgcccgtcttatgggcagcggagtagaagaattgtttgctttgtcgcccggactcgaaggggcggaacttcaaaaaatatcgccttttccgcagtattttcaaacgattatcgacccgtccggaccggaactcgctcatacggacgtgcgggacggcagcaaaatatttcgcctgaccgttttcgccgtggaaaaaggcgttaccgcggcgggagtcgtagaagacattaccgagccgcgagtgcgaatcgaaacgacggtcgagcgggcaagggaacttattaagaaaaacgtttcgaccgttcagcaaatagcgtttcttttgggagaaagcgcggcggaatccgaggcgatacttaattccattatagaatcctacacggtcggcgaagaagacgcctga

SEQ ID NO: 36018 - protein, 174 aa, Unknown
  Obtained from environmental sample
  misc_feature (1)..(174): Xaa is any amino acid
MCASYMRELANKTANGLIKAIPSGVVIVDKDLKIIDCNEQFARLMGSGVEELFALSPGLEGAELQKISPFPQYFQTIIDPSGPELAHTDVRDGSKIFRLTVFAVEKGVTAAGVVEDITEPRVRIETTVERARELIKKNVSTVQQIAFLLGESAAESEAILNSIIESYTVGEEDA

SEQ ID NO: 36019 - DNA, 1434 bp, Unknown
  Obtained from environmental sample
  misc_feature (1)..(1434): n is a, c, g, or t
gtggaagtcgcgacttacaacggcagggtatacgggttgtcatggcaggtctgcccgggcgcgttcttttaccgcagaagtatggcaaagaaatatctcggtacggacgatcctgccgcagtacaaagaaatttttccaacctggaacaattcataagaacggcaaggactcttaaagataagtcaggcgggagatgcgtagttatatccagccttggcgatcttgtaagaccattcctcagtatgcgcacactgccctgggtagtaaacggcagattgtttatcgatcctgtcatggaaaattgtatggactatatcaagaatgttcatgataacaggttggacggcgaagtaggccaatggtcagacggatggttcgcaggaatgaggggcgagcttaaagattattccggaaatccattggaagtattcgggtattttcttccgacatggggtttgcactatgtgttaaaaaccaacgcgccgaacacttccggcgattgggcgatgattcagggaccagttccctacagttggggcggcacatggattgcagcaagcgctaaaacaaagaatccaaacgccgccaaagagcttatccgttatctgacaacagacgataattttcttgaagcgtgggcgaaggacacgggagacgttgtaggcaatatcgaagttaataacaagatcaagaacagttacagggagcctttccttggcggacagaatcattatgccgccttttccgatatggcaaagaatgtgaacggcagtcttctgcagggaaccgatgaattaattaataatcagttcaatgacgcgctttatgcttatgtgaacggagaaaaaaccaaagaacaggctcttgccgacttcaaggcaagagttgcggataatcttaaagacgacgttttaaaaaggttaagattgatattgaatcaaagcggacctgaaacttccgttgcttccaatagtactgctaacacttccaataacacggtaacaacaaatacgtccggcggtatatttaaatacttgccaaacgcaagtgaaatgaagattgatacagatactaatgaaaaaggaggaaaatcaacgggcaaggtgagcattagtaaagagaaaatagacggcgttgagcaaactgtgattaatttaactattactttaaataaaggtcatcaatatccatggggtcagttaggaatttggggacctattgtagaaagggcaaaaacagcgtcgggaatacggtttaaggtatatggagacggtaatccttggtctttggaagtacaaacagaagaaataaaaacggattgggcgcggtacggatgtcgatttgatacgattaaaaataaagtttcaataatagatatacctttctcaaaacttacgcagcctgattggggtagaaaagtagtanttcaataa

SEQ ID NO: 36020 - protein, 477 aa, Unknown
  Obtained from environmental sample
  misc_feature (1)..(477): Xaa is any amino acid
MEVATYNGRVYGLSWQVCPGAFFYRRSMAKKYLGTDDPAAVQRNFSNLEQFIRTARTLKDKSGGRCVVISSLGDLVRPFLSMRTLPWVVNGRLFIDPVMENCMDYIKNVHDNRLDGEVGQWSDGWFAGMRGELKDYSGNPLEVFGYFLPTWGLHYVLKTNAPNTSGDWAMIQGPVPYSWGGTWIAASAKTKNPNAAKELIRYLTTDDNFLEAWAKDTGDVVGNIEVNNKIKNSYREPFLGGQNHYAAFSDMAKNVNGSLLQGTDELINNQFNDALYAYVNGEKTKEQALADFKARVADNLKDDVLKRLRLILNQSGPETSVASNSTANTSNNTVTTNTSGGIFKYLPNASEMKIDTDTNEKGGKSTGKVSISKEKIDGVEQTVINLTITLNKGHQYPWGQLGIWGPIVERAKTASGIRFKVYGDGNPWSLEVQTEEIKTDWARYGCRFDTIKNKVSIIDIPFSKLTQPDWGRKVVXQ

SEQ ID NO: 36021 - DNA, 477 bp, Unknown
  Obtained from environmental sample
  misc_feature (1)..(477): n is a, c, g, or t
gtggacgcgctccttgcgtcaataaaggactctaacctttcacttaacaggcaggccgtaataaacattcccgcaaggctcaggatgacgacgctttacgccgtatccgccgcaataaacggcagggtagccaatacatgcaacctcagcgaagactgggtcggttacgctacaaaatacggcgacggagccggcgatttcagccttttgtcccggttaacggtgacggaagtaaaggcccttggcagggaacttgggctgccttcaaaatttatcgaaaaagtgccggaagacgggctttccggcctgtccgacgaggaaaacctcggatttacctacgccgttttggacaaatatatcagggaaaactcttgcgaagacgccgctgttaaagaaaaaatagataaactgcaaaaatcaaaccaacacaaacttgcccttatgccgtattatatctataatcttgatcaagaatga

SEQ ID NO: 36022 - protein, 158 aa, Unknown
  Obtained from environmental sample
  DOMAIN (2)...(148): NAD synthase
  misc_feature (1)..(158): Xaa is any amino acid
MDALLASIKDSNLSLNRQAVINIPARLRMTTLYAVSAAINGRVANTCNLSEDWVGYATKYGDGAGDFSLLSRLTVTEVKALGRELGLPSKFIEKVPEDGLSGLSDEENLGFTYAVLDKYIRENSCEDAAVKEKIDKLQKSNQHKLALMPYYIYNLDQE

SEQ ID NO: 36023 - DNA, 747 bp, Unknown
  Obtained from environmental sample
  misc_feature (1)..(747): n is a, c, g, or t
ttgaaaataatcgctgatatacacatacattccccatggtcaagggccacgagttcacggttaagcccggcaagccttgagcgatgggcggggattaagggtatcggtcttcttggaaccggcgattgtacccatccgcggtggatagaagaactgagggataaccttgaagataatgactctggaagcggcttttacaggctgaaagaaaaaacccgcctggaatttgacgccggccccgcgcttgcggaaggactgcccagaccgggcgcggaccctcttcggcaaaacaccaatgtacattttgtcctcacaggcgagatcagcacgatctataaaaaagcgggaaagacacggaaagtccaccatgttgtcgtactgtcggatttcaaagccgccgctgttttcaacgcgaaactggaacgccttgggaacattcgttcggacggaaggcccattcttgggcttgattcggaagaccttctttccctgctgcttgaagccgatgacagggccatgttaattcccgcccatatctggacgccctggttttcggttcttggcgcaaaatcaggcttcgattccattgaggaatgttacggttcattgacttcacatatccccgcgatagaaaccgggctttcttccaacccgccaatgaactgggctttaagcggccttgaccgttattcgatcatctccaattcagacgcccattcgcctataaactggcaggaaccgccataa

SEQ ID NO: 36024 - protein, 248 aa, Unknown
  Obtained from environmental sample
  DOMAIN (5)...(242): PHP domain
  misc_feature (1)..(248): Xaa is any amino acid
MKIIADIHIHSPWSRATSSRLSPASLERWAGIKGIGLLGTGDCTHPRWIEELRDNLEDNDSGSGFYRLKEKTRLEFDAGPALAEGLPRPGADPLRQNTNVHFVLTGEISTIYKKAGKTRKVHHVVVLSDFKAAAVFNAKLERLGNIRSDGRPILGLDSEDLLSLLLEADDRAMLIPAHIWTPWFSVLGAKSGFDSIEECYGSLTSHIPAIETGLSSNPPMNWALSGLDRYSIISNSDAHSPINWQEPP

SEQ ID NO: 36025 - DNA, 936 bp, Unknown
  Obtained from environmental sample
  misc_feature (1)..(936): n is a, c, g, or t
atgccgcaggatgaacatggcgaactgtttttgtcgcccgtttcggcgacggcgaccgccgacttcgccgcttctatggcgctcgcgtcgcgtttttatcccgaatataaagaaaaattactcaactctgcgcgccgcgcctggaactggtgtctcgcgcgccctgacgctgccgggtttacgaatcctcccggcataaacaccggcatctacggagacgatgacagcggggacgagcgtttttgggcggcctgcgccttgttcgccgcgacaggggatgaaagctttcacgattatattaaaacatgcgggctttacgcccaggaatgccggactgacgttttgtttcccttcggcctgggctggggtaacgtggaagcatacgggctgatagagtatctttttcataccggctgcaaaacagatggcggcgtaacgctgcggatgaaggacaagcttctgcgctgttgtgaaattattatgaaattgcataaagataatccttacggcgtttcgttaggcgatgtctacaggtggggaagcaacatggtaactgccaacaacgccatgatgctgttattgggcagccgttttaccagtgacggccaggcgtataccgaagctgctttggaacactttcattatctgctgggcagaaaccccctttcccaaagctacattaccggctttggttcccaggcttcccagaatccgcatcaccgcccttcggtggcgaaaggcggcgcggttcccggaatgcttgtcggggggccctgcatgaatgtaacagagaccccgctatcaacgcccattgccccgacgctccgcccgccaaacgttatgtcgatcataaagacagctttgcttccaatgaagtcgcgatttattggaactcccctttttattttattatggcggttttgggtttgtaattga

SEQ ID NO: 36026 - protein, 311 aa, Unknown
  Obtained from environmental sample
  DOMAIN (1)...(275): Glycosyl hydrolase family 9
  misc_feature (1)..(311): Xaa is any amino acid
MPQDEHGELFLSPVSATATADFAASMALASRFYPEYKEKLLNSARRAWNWCLARPDAAGFTNPPGINTGIYGDDDSGDERFWAACALFAATGDESFHDYIKTCGLYAQECRTDVLFPFGLGWGNVEAYGLIEYLFHTGCKTDGGVTLRMKDKLLRCCEIIMKLHKDNPYGVSLGDVYRWGSNMVTANNAMMLLLGSRFTSDGQAYTEAALEHFHYLLGRNPLSQSYITGFGSQASQNPHHRPSVAKGGAVPGMLVGGPCMNVTETPLSTPIAPTLRPPNVMSIIKTALLPMKSRFIGTPLFILLWRFWVCN

SEQ ID NO: 36027 - DNA, 795 bp, Unknown
  Obtained from environmental sample
  misc_feature (1)..(795): n is a, c, g, or t
atgaaggataattattttaacgcaggattaaacaatattaataataattctcctgccgcccgattaaccggcaatccggccgtcaaattggtcagcgatattaaagtaggctggaatttaagcgaatctcttgaagccgctcatttgcagcatcttggcgaaaacccggcaatcagtcaaatggaaacagcctggggtaatcctgttacaaccaaaggaaatattaccgctataaaaaacgccggttttaacgcaattaggattcctgtttcatgggacaaggcggctgatcctgattacaatatccgtaaaaactggtttgcaagagttaaggaagttgtaaattatgctgtagataatgacatgtatattattattaatacgcatcatgatgaagatatatttaaatttacaaatgcggaaacaggaaaatcactttcggcattcaaaaaaatatgggaacagattgccgataactttaataattataatgaaaaattaattttcgaggcgttaaacgaaccaagaaccattggagcggcgtgggaatggacaggcggcgttccggaagaacacgcgaatttaaataaatattatcaggtttttgttgatacggtgcgcgcaagcggcggtaataatgacaagcgtatattaatgattaatacttacggcgcttccgccgaatcaacggcggtaaatgctttaactcttccgattgatactataccgaacagtcttattgtttcatttcatgcttatgtacccagagattttattgtctatgacaacccataa

SEQ ID NO: 36028 - protein, 264 aa, Unknown
  Obtained from environmental sample
  DOMAIN (49)...(263): Cellulase (glycosyl hydrolase family 5)
  misc_feature (1)..(264): Xaa is any amino acid
MKDNYFNAGLNNINNNSPAARLTGNPAVKLVSDIKVGWNLSESLEAAHLQHLGENPAISQMETAWGNPVTTKGNITAIKNAGFNAIRIPVSWDKAADPDYNIRKNWFARVKEVVNYAVDNDMYIIINTHHDEDIFKFTNAETGKSLSAFKKIWEQIADNFNNYNEKLIFEALNEPRTIGAAWEWTGGVPEEHANLNKYYQVFVDTVRASGGNNDKRILMINTYGASAESTAVNALTLPIDTIPNSLIVSFHAYVPRDFIVYDNP

SEQ ID NO: 36029 - DNA, 870 bp, Unknown
  Obtained from environmental sample
  misc_feature (1)..(870): n is a, c, g, or t
ttgcaaattgtatgcggagcacccaacgtgaaagctggcataaaagcggttctagctcccattggcgttgagttgccgttgccagatggcaaaacgctcaaaatgaaaaagacaaaaatccgcggtgtggagagttttggaatgctctgtgcggaagacgaaattggattatcccaaaatcacgatggaattttgctcctgccaaatgatgctccggtgggcaagccgtttgcagacctcggtttttacgacacggtttttgaaataaatgttacccccaaccgccccgatgctctttcgcacttggggatagcgagggaactggcggctgcatttgatttgccgctgaaatcgcagcagcaaaagccactcgatgttgcccctgcaacaccgatgaaattgagcgttgaagcacccacagcttgcccgcattatgttggcagggttataaacggcgtgaaaattgcgcccagccccgaatggatgcaaaaattgctgagggctgttggtatgaaccccataaacaatgttgttgacattacgaattttgttttaatggatattgggcaaccgcttcacagctttgatttgggcaaattgaaaggcggagaggtaaaagttcgtttcgcacatgatggcgagaaattcacaacgttggatggcaaagagcatatcttgcaaagcacggatttggctatttgcgatggaaatagcccggcttgccttgcaggtgttatgggcggattggaatcggaaataacggacgaaaccaaggatgtgtttttggaagcggcattttttaaccccaccgntgtgcgncagcaagcccagaggcttgggatatcgagcgatttcagctatcgtttttga

SEQ ID NO: 36030 - protein, 289 aa, Unknown
  Obtained from environmental sample
  DOMAIN (1)...(76): Putative tRNA binding domain
  misc_feature (1)..(289): Xaa is any amino acid
MQIVCGAPNVKAGIKAVLAPIGVELPLPDGKTLKMKKTKIRGVESFGMLCAEDEIGLSQNHDGILLLPNDAPVGKPFADLGFYDTVFEINVTPNRPDALSHLGIARELAAAFDLPLKSQQQKPLDVAPATPMKLSVEAPTACPHYVGRVINGVKIAPSPEWMQKLLRAVGMNPINNVVDITNFVLMDIGQPLHSFDLGKLKGGEVKVRFAHDGEKFTTLDGKEHILQSTDLAICDGNSPACLAGVMGGLESEITDETKDVFLEAAFFNPTXVRQQAQRLGISSDFSYRF

SEQ ID NO: 36031 - DNA, 501 bp, Unknown
  Obtained from environmental sample
  misc_feature (1)..(501): n is a, c, g, or t
atgattagccgaaacccaaaaatcgcgaacttaaaagcgggatacctctttcctgaaatcgccaaacgaaggcgggaattcgccgcttctcacccaaacgcgaaaattatcagtcttggagtggggaacaccacggagccgattatgcctcacgttacagcggggcttgttgaaggggcgcggaaacttggaacggttgatggttattccggctatcaggacgagggaatggcggagctgagggaaaaaatctcttccgtcttttacagcggcaaattctctatcgaggaaatatttatctcggacggggcaaagtgcgacatcggaagattgcaggttctcttcggttcggatacaaaaatcgcggtacaggacccttcctaccccgtatatgtggacggctccgttcttgcgggagccgccggcggctggcagggcgaaggctacgccggtatcacctaccttccctgcacagcggaaaacaatttttccctaacctga

SEQ ID NO: 36032 - protein, 166 aa, Unknown
  Obtained from environmental sample
  misc_feature (1)..(166): Xaa is any amino acid
MISRNPKIANLKAGYLFPEIAKRRREFAASHPNAKIISLGVGNTTEPIMPHVTAGLVEGARKLGTVDGYSGYQDEGMAELREKISSVFYSGKFSIEEIFISDGAKCDIGRLQVLFGSDTKIAVQDPSYPVYVDGSVLAGAAGGWQGEGYAGITYLPCTAENNFSLT

SEQ ID NO: 36033 - DNA, 357 bp, Unknown
  Obtained from environmental sample
  misc_feature (1)..(357): n is a, c, g, or t
atgagaattaacgaaaacatcgttacatggtcttcaacatattcggtaggaattaaaataattgatgagcagcacaagggattatttaatctggtcaacgatatgtacaatcataatactgatgataaagaagcggaacaggcttattttaatgatattatccggcaaaccgctaactatgttaaaattcactttgcgacggaagaacaaattatgagggcggccaaatttcagggttatccggagcataaaagagaccacgattcgtttattctgtctttgattgacattataagggatattgaagccggaaaaacggttacgcttttgtcctttacaaattttataaaagactga

SEQ ID NO: 36034 - protein, 118 aa, Unknown
  Obtained from environmental sample
  DOMAIN (17)...(75): Hemerythrin HHE cation binding domain
  misc_feature (1)..(118): Xaa is any amino acid
MRINENIVTWSSTYSVGIKIIDEQHKGLFNLVNDMYNHNTDDKEAEQAYFNDIIRQTANYVKIHFATEEQIMRAAKFQGYPEHKRDHDSFILSLIDIIRDIEAGKTVTLLSFTNFIKD

SEQ ID NO: 36035 - DNA, 630 bp, Unknown
  Obtained from environmental sample
  misc_feature (1)..(630): n is a, c, g, or t
ttggaagctaaacgaaaggtgacaaatatagaaccggatgagaccccgcgcagaaaaataaaccttgtacccctagccaatattgcgggttacgacgtgcgccccggtttttatgaaataaacggggctacagccatcccctgcggggtgaattttaccatccagtccgttggcgcagccagctgcgaactgcttctgttccggcgcgaggaagatgaacccgtggccgtgctgccctttccaaaacattaccgcataggaaatgtgtactccatgatagtgttcgggctggatatacacgaatttgaatacgcttaccgtatggatggcccttacgacccagcccacggcttactcttcgataaaagaaacatcatattggatccatacgcccgcgccgtaaccggccagagcgaatggggacgccataatccgaaacaaacatacaaagcccgggttgtacaggatgatttcgactggggtatattcgagcagccccttatacccatggacgaactggtaatatacgaattgcacgtacgcggttacacaaagcacccgtcctcaggggttaagcagcagggcacattcgcggggcttatggaaaagataccctacctgaaagaatag

SEQ ID NO: 36036 - protein, 209 aa, Unknown
  Obtained from environmental sample
  DOMAIN (40)...(131): Isoamylase N-terminal domain
  misc_feature (1)..(209): Xaa is any amino acid
MEAKRKVTNIEPDETPRRKINLVPLANIAGYDVRPGFYEINGATAIPCGVNFTIQSVGAASCELLLFRREEDEPVAVLPFPKHYRIGNVYSMIVFGLDIHEFEYAYRMDGPYDPAHGLLFDKRNIILDPYARAVTGQSEWGRHNPKQTYKARVVQDDFDWGIFEQPLIPMDELVIYELHVRGYTKHPSSGVKQQGTFAGLMEKIPYLKE

SEQ ID NO: 36037 - DNA, 657 bp, Unknown
  Obtained from environmental sample
  misc_feature (1)..(657): n is a, c, g, or t
atgtccgaaccggacaatgccgcttcaacaaaatgtattgatgagcttcttgaagcgatggactcctacttccccgatcctgtacgtgattccgataaacccttcatcatgccgattgaagacgtattcacaattcagggacgcggtactgtcgttaccggaaaagtggaacgcggtatactcaaactgaacgaagaagttgaaattatcggtattaaacccacaaagaaaacggttattaccggtattgaaatgttcaataaactgctcgatgaagcccaggccggcgataacgttggtactcttcttcgcggtattgagaaaaaagacgtagagcgcggacaggtactcgcaaaaccgggaaccattacacctcacaaaacattcaaaggtcagatttattgtctgtccaaagatgaaggcggacgccacagcccgttctttacaggttacagaccgcagttctatttccgcacaaccgatattaccggtactgtaaaacttcctgaaggcaaagaaatggtaatgcccggcgataacgccgaagttatcggtgaattgatccacccaatcgccatggaaaaaggtcttcgcttcgctatccgcgaaggcggtaagacagtcgcttccggtcaggttgtcgaaattatagagtaa

SEQ ID NO: 36038 - protein, 218 aa, Unknown
  Obtained from environmental sample
  DOMAIN (49)...(118): Elongation factor Tu domain 2
  misc_feature (1)..(218): Xaa is any amino acid
MSEPDNAASTKCIDELLEAMDSYFPDPVRDSDKPFIMPIEDVFTIQGRGTVVTGKVERGILKLNEEVEIIGIKPTKKTVITGIEMFNKLLDEAQAGDNVGTLLRGIEKKDVERGQVLAKPGTITPHKTFKGQIYCLSKDEGGRHSPFFTGYRPQFYFRTTDITGTVKLPEGKEMVMPGDNAEVIGELIHPIAMEKGLRFAIREGGKTVASGQVVEIIE

SEQ ID NO: 36039 - DNA, 663 bp, Unknown
  Obtained from environmental sample
  misc_feature (1)..(663): n is a, c, g, or t
atggtcaggttatgtggtcaggtaaaccaattactctataatttcgacaacctgaccggaagcgactgtcttaccgccttcgcggatagcgaagcgaagacctttttccatggcgattgggtggatcaattcaccgataacttcggcgttatcgccgggcattaccatttctttgccttcaggaagttttacagtaccggtaatatcggttgtgcggaaatagaactgcggtctgtaacctgtaaagaacgggctgtggcgtccgccttcatctttggacagacaataaatctgacctttgaatgttttgtgaggtgtaatggttcccggttttgcgagtacctgtccgcgctctacgtcttttttctcaataccgcgaagaagagtaccaacgttatcgccggcctgggcttcatcgagcagtttattgaacatttcaataccggtaataaccgttttctttgtgggtttaataccgataatttcaacttcttcgttcagtttgagtataccgcgttccacttttccggtaacgacagtaccgcgtccctgaattgtgaatacgtcttcaatcggcatgatgaagggtttatcggaatcacgtacaggatcggggaagtaggagtccatcgcttcaagaagctcatcaatacattttgttga

SEQ ID NO: 36040 - protein, 220 aa, Unknown
  Obtained from environmental sample
  misc_feature (1)..(220): Xaa is any amino acid
MVRLCGQVNQLLYNFDNLTGSDCLTAFADSEAKTFFHGDWVDQFTDNFGVIAGHYHFFAFRKFYSTGNIGCAEIELRSVTCKERAVASAFIFGQTINLTFECFVRCNGSRFCEYLSALYVFFLNTAKKSTNVIAGLGFIEQFIEHFNTGNNRFLCGFNTDNFNFFVQFEYTAFHFSGNDSTASLNCEYVFNRHDEGFIGITYRIGEVGVHRFKKLINTFC

SEQ ID NO: 36041 - DNA, 519 bp, Unknown
  Obtained from environmental sample
  misc_feature (1)..(519): n is a, c, g, or t
atgttagggctttatgccagaaaagttggaatgactcaagtatttgacgaggcgggaaatcttatgccggtatcggtattaaggatagacccgaatgttgtcatttccaaaaaaacaaaagaagcggacggttacgccgctgttgtcgtcggtatagacgaagctaagaaaaatcgcgtaacaaaagcccgcgcgggacaatttccccaaaccattacgccaaagaaaaagatttgcgaactgcgtgattttgaaaaagaagtcgccgtaggggactcccttggaattgaagtgttaaaagacgtcagatttgttgatgtttcaggcgtttccaaaggtaagggttttcagggcgttgtaaaacgctacaagttcggcggcggacgcaagacgcacggatcgaaattccaccgcgaacccggttcaacagggcagagcacatatcccgcanaaacttttaagaatgtaaaattacccggacgcatgggacgggaaaaagtaacggtttttaagccttag

SEQ ID NO: 36042 - protein, 172 aa, Unknown
  Obtained from environmental sample
  DOMAIN (8)...(171): Ribosomal protein L3
  misc_feature (1)..(172): Xaa is any amino acid
MLGLYARKVGMTQVFDEAGNLMPVSVLRIDPNVVISKKTKEADGYAAVVVGIDEAKKNRVTKARAGQFPQTITPKKKICELRDFEKEVAVGDSLGIEVLKDVRFVDVSGVSKGKGFQGVVKRYKFGGGRKTHGSKFHREPGSTGQSTYPAXTFKNVKLPGRMGREKVTVFKP

SEQ ID NO: 36043 - DNA, 855 bp, Unknown
  Obtained from environmental sample
  misc_feature (1)..(855): n is a, c, g, or t
ttgaagcctcaacaaatgtttgtgagcaggccgctgaacttcacccgagaccgtagggacgaaggtcccctcttgaaaactgtccgttttcaatatcaaacggaattggcgttttcgtcgcccgcgtcagatcaccaattccgcttcagaatattgccgcaaagcgataacaggcagcagataaaaaacttattgtggcgcataaacccaacgcccggtacaatctggcaaaccgttgacggttttggcaacgacgctctcgcgggacaaatcagcgcgccgcacagctatttccgtttcgggatagaagggactgcggaagtatcgggtgagccatatacagaatccggcgaaccgccgcgcgtactgctttacccgactgagttgacgcgcgcacatcgcgggctgcttgatttctacgatgacattaaccgttccgctcccgccgatgtgttggatcgtattcaacatttttcgcacgccgtccacgtctgtctgcgctatgagcgcggcgcgaccgcaaattcgacttcggcggcgcaagcgttcgacatcggcgccggcgtttgtcaggactatacgcacatattactcaccctcctgcgccttgataagattccctgccattacgttgccggtcttgcctccgactacggtgaaacccacgcatgggtcgaggcgtggacaggaaaccggtattgtgcaacagaccccacacgcgataaactaatagacgaaggctacatcgtcctgtcaagagggcgcgactttgccgacagttccattgaacgcggggtatttaccggaatgtgccgcggaacgcagacggtgaatctgaccatggagattttgtga

SEQ ID NO: 36044 - protein, 284 aa, Unknown
  Obtained from environmental sample
  DOMAIN (185)...(239): Transglutaminase-like superfamily
  misc_feature (1)..(284): Xaa is any amino acid
MKPQQMFVSRPLNFTRDRRDEGPLLKTVRFQYQTELAFSSPASDHQFRFRILPQSDNRQQIKNLLWRINPTPGTIWQTVDGFGNDALAGQISAPHSYFRFGIEGTAEVSGEPYTESGEPPRVLLYPTELTRAHRGLLDFYDDINRSAPADVLDRIQHFSHAVHVCLRYERGATANSTSAAQAFDIGAGVCQDYTHILLTLLRLDKIPCHYVAGLASDYGETHAWVEAWTGNRYCATDPTRDKLIDEGYIVLSRGRDFADSSIERGVFTGMCRGTQTVNLTMEIL

SEQ ID NO: 36045 - DNA, 531 bp, Unknown
  Obtained from environmental sample
  misc_feature (1)..(531): n is a, c, g, or t
atggaaactgctgcaaaattaaacgattccggcattgcattaaccgaagctaatcggccttatgaggccattccccttttccacaaagctctgtgcattgagcctgaaaacccccttctctggctgaatttgggcatcgcccagcaaaaaacaggcgattaccagaaagctctggaatgttaccagcgatctgtattgatagacgatgaaatgacagaagcttggggtgccatgggcctgatttattatgaacttgagcagtttgaccctgccgaaaaatgctatcaaaacgctctgggacgggactgcgattctccgaaaatatggaacaaccttggggttttgtacttttcccaaaaggattttgaggctgcccgccgctgttttgagagggctttgagcatcttgcccatgtattatgacgctctttttaacctgcgtgacacgtgcagggaattgtcggattacagagcggcggcggaatttgagcgcattttgcagggattgggccgcgaagggggatcgcactga

SEQ ID NO: 36046 - protein, 176 aa, Unknown
  Obtained from environmental sample
  DOMAIN (72)...(105): Tetratricopeptide repeat
  misc_feature (1)..(176): Xaa is any amino acid
METAAKLNDSGIALTEANRPYEAIPLFHKALCIEPENPLLWLNLGIAQQKTGDYQKALECYQRSVLIDDEMTEAWGAMGLIYYELEQFDPAEKCYQNALGRDCDSPKIWNNLGVLYFSQKDFEAARRCFERALSILPMYYDALFNLRDTCRELSDYRAAAEFERILQGLGREGGSH

SEQ ID NO: 36047 - DNA, 879 bp, Unknown
  Obtained from environmental sample
  misc_feature (1)..(879): n is a, c, g, or t
ttgcgctcacccttaagattatccgaaggcgaaggcgatttaacgaaaacaatccccgtcaaatccgatgacgaggtaggcgagctttccacttacttcaacaaaacaattcaaaaaatcagaggccttgtgcttctcattaaacagcaggcgggcgtgttgtcggatattggcaacgacctgtccagcaatatgaccgaaaccgcggcggcaattaaccaaattaccgcaaatatacagagtataaagggccgcgtaattaaccagagcgccagcgttaccgaaacaaacgcgaccatggaacaggttatcgtaaatatcaataagctcaacagtcatgttgaaaaccagagccgcaatgtttcccaggtttcatccgccattgaggaaatggtagccaatatcagttcggtaactcaaactctggttaataacaccgctaacgtagatacgttaaaagaagcctccgaagtaggaaggaccggattacaggaagtggcgacggacattcaggaaatcgcccgcgagtccgacgggcttttggaaattaacgcggtaatggaaaatatcgcaagccagaccaacctgctttcgatgaacgcggctattgaagcggcgcacgccggagaagcaggcaaaggctttgccgtagtcgccgatgaaatccgcaaactcgcggaaagttccagcgaacagtccaaaacgatcggtacagtactgaaaaaaatcgcggaatcgatcaaaaaaataacaagctccaccgaaaacgtactgaaacaattcgaggcgatagactccggcgtanagacagtatcacagcangaagaaacatccgtaatgctatggaggaacagggcgaaggaagcaagcaaatcctga

SEQ ID NO: 36048 - protein, 292 aa, Unknown
  Obtained from environmental sample
  DOMAIN (115)...(287): Methyl-accepting chemotaxis protein (MCP) signaling domain
  misc_feature (1)..(292): Xaa is any amino acid
MRSPLRLSEGEGDLTKTIPVKSDDEVGELSTYFNKTIQKIRGLVLLIKQQAGVLSDIGNDLSSNMTETAAAINQITANIQSIKGRVINQSASVTETNATMEQVIVNINKLNSHVENQSRNVSQVSSAIEEMVANISSVTQTLVNNTANVDTLKEASEVGRTGLQEVATDIQEIARESDGLLEINAVMENIASQTNLLSMNAAIEAAHAGEAGKGFAVVADEIRKLAESSSEQSKTIGTVLKKIAESIKKITSSTENVLKQFEAIDSGVXTVSQXEETSVMLWRNRAKEASKS

SEQ ID NO: 36049 - DNA, 582 bp, Unknown
  Obtained from environmental sample
  misc_feature (1)..(582): n is a, c, g, or t
atgagttttgactttataatgggcagcaacaaccccccattaaacggcagtctggcctatactttcaacattgacggctctttagatgttgattacaggatccacattgaacgcagcctaagcgcaatccccagaatcggtctcgacctgataacccacgagggtttcgaaggtcttcgctattacggatacgggccggtggaaaattacccggaccgcatgcttgcggcgatcctcgggatccacgaatccgccgttgaagcgcagcatttccctttcgtacctgtctctgaaaacggtggccatgagggaacccgctgggtagaattcatcggtccagacaagcggatcagggtctcgtcccagaccccattccacttcgatgcccaccacaattccgcggatgattacatatacgcgaggcacgatcatgaactggtcaggcggaaacagactttcatacatattgacgctgctcacggccccataggctcagaaatggcctggagtaccgttatgccaaaggcctactccttaggcggcggcagctatagcctgtgttttaaggttgagctgttttga

SEQ ID NO: 36050 - protein, 193 aa, Unknown
  Obtained from environmental sample
  DOMAIN (3)...(191): Beta galactosidase small chain
  misc_feature (1)..(193): Xaa is any amino acid
MSFDFIMGSNNPPLNGSLAYTFNIDGSLDVDYRIHIERSLSAIPRIGLDLITHEGFEGLRYYGYGPVENYPDRMLAAILGIHESAVEAQHFPFVPVSENGGHEGTRWVEFIGPDKRIRVSSQTPFHFDAHHNSADDYIYARHDHELVRRKQTFIHIDAAHGPIGSEMAWSTVMPKAYSLGGGSYSLCFKVELF

SEQ ID NO: 36051 - DNA, 789 bp, Unknown
  Obtained from environmental sample
  misc_feature (1)..(789): n is a, c, g, or t
ttgatgatagttgagaacgcgctggttgtgtacaagaacaaaccggcgctggttaaagagatatcaaacggtaaaataaccatttctcttcaaaacgccgaacaggtaaaagtccgcgataaagatatagagttaattcatccgggacctgtaaaaaacttaaatgatattctttacattcacaaaggggatgcagcttcagagaatccgtcggtaaaagaagcgtgggaattgatgtcagacgacgcggcgccttcccattcgcttaaagattttgccgcccttgttttcggagagtacaatgcggcgtccgcttatgccgcctattgtttattgtcggacggcctgtatttttccggtactattcactcgatagttccgagaagcagggaaattgtagaggccggggaaagaaagcgcgaagaaaaacagcgtgaaaccggcgaaagagccgcctttcttgaaaagataaaacattgtttgaaaaaacccgccgctaatccattgcttcccgaagacgcgcgttttttgcaggatgtcgaagcgctcgcttacggaaaatccgcgaagagccgcacaatgaaagaacttgggctgggagagactcccgaagacgcccatgccatgctgttaaccataggtttctggacgccgcaaattaatccccatcctctccgtttcggcattccgcagtcaagcgcggacattccgcttgaagcgcctccgcccgaagacagagttgatctttgccggcttgcggcattcgcgattgacagtccgggagcgtag

SEQ ID NO: 36052 - protein, 262 aa, Unknown
  Obtained from environmental sample
  misc_feature (1)..(262): Xaa is any amino acid
MMIVENALVVYKNKPALVKEISNGKITISLQNAEQVKVRDKDIELIHPGPVKNLNDILYIHKGDAASENPSVKEAWELMSDDAAPSHSLKDFAALVFGEYNAASAYAAYCLLSDGLYFSGTIHSIVPRSREIVEAGERKREEKQRETGERAAFLEKIKHCLKKPAANPLLPEDARFLQDVEALAYGKSAKSRTMKELGLGETPEDAHAMLLTIGFWTPQINPHPLRFGIPQSSADIPLEAPPPEDRVDLCRLAAFAIDSPGA

SEQ ID NO: 36053 - DNA, 315 bp, Unknown
  Obtained from environmental sample
  misc_feature (1)..(315): n is a, c, g, or t
atgaaccaaggtgaaatttggcttgttaatttagaccccacccttggcgctgaaatgaataagacccgtccggcattaattattagcgataataggctcggcaaattgccgctaaaaattgttgttccgattaccggatggaaagaggacgcgggaggacagcgtatcacatgctttggattctctcgccgacgtacttctccaccgcttccaagaatattccggcgttttcgacctgagcggcgatgtcggctttggatacaaggtagaattccttgtagtcgctatcacctcggatttcgaaagattttttaa

SEQ ID NO: 36054 - protein, 104 aa, Unknown
  Obtained from environmental sample
  misc_feature (1)..(104): Xaa is any amino acid
MNQGEIWLVNLDPTLGAEMNKTRPALIISDNRLGKLPLKIVVPITGWKEDAGGQRITCFGFSRRRTSPPLPRIFRRFRPERRCRLWIQGRIPCSRYHLGFRKIF

SEQ ID NO: 36055 - DNA, 405 bp, Unknown
  Obtained from environmental sample
  misc_feature (1)..(405): n is a, c, g, or t
atgccgcctgacaatatacctgaagatttggctgttttccgtttggagcaggcgagggagtgtctgcaagacgcgcgtgtgcccgtcatttcgcctaaaaccgccgctaaccgttcttattactgtatatttaacgccatgcgcgcggtcttgtcgcttgaccggttcgattcaaaaaaacattccggcataatctccgcttttaacaaagattacataagaaccggggtttttccggcgagtttttcggatattattaaaaaatctttcgaaatccgaggtgatagcgactacaaggaattctaccttgtatccaaagccgacatcgccgctcaggtcgaaaacgccggaatattcttggaagcggtggagaagtacgtcggcgagagaatccaaagcatgtga

SEQ ID NO: 36056 - protein, 134 aa, Unknown
  Obtained from environmental sample
  DOMAIN (7)...(131): Protein of unknown function DUF103
  misc_feature (1)..(134): Xaa is any amino acid
MPPDNIPEDLAVFRLEQARECLQDARVPVISPKTAANRSYYCIFNAMRAVLSLDRFDSKKHSGIISAFNKDYIRTGVFPASFSDIIKKSFEIRGDSDYKEFYLVSKADIAAQVENAGIFLEAVEKYVGERIQSM

SEQ ID NO: 36057 - DNA, 345 bp, Unknown
  Obtained from environmental sample
  misc_feature (1)..(345): n is a, c, g, or t
atgtgcgacaaagccttaataaacgagataacgtcaagggtctgcgccgccgctaaggaggtcttgggcgacaagttgagaaaggtaatcctnttcggctcatacgcgaggggcgactacgacgaggagtcggacatagacatcatggtgatagccgacattgcgttggaggaggcgaacgaggtgcgggataagattaatgatgtcgccggaaacttcttgtgggattacggcatacttgtctatttgagcatggattgcagcaacatttatcataaatataaggattattcgggtttctacataaacgtccagagagacggggtggaattgtatgccgcctga

SEQ ID NO: 36058 - protein, 114 aa, Unknown
  Obtained from environmental sample
  DOMAIN (7)...(101): Nucleotidyltransferase domain
  misc_feature (1)..(114): Xaa is any amino acid
MCDKALINEITSRVCAAAKEVLGDKLRKVILFGSYARGDYDEESDIDIMVIADIALEEANEVRDKINDVAGNFLWDYGILVYLSMDCSNIYHKYKDYSGFYINVQRDGVELYAA

SEQ ID NO: 36059 - DNA, 843 bp, Unknown
  Obtained from environmental sample
  misc_feature (1)..(843): n is a, c, g, or t
gtgcgcgttcaagacaacattgcgaaacccaagacggtaacggacgtaaaactttcagtcaacattcttgactcagaattaatcagtccgattttccattatcaggttaccgttgaatacattatcaaagacttgctctcaaaacacctcatcgacaatatcgatagaattattgaacaaattaaagacaacagaatcgatcaagggcttgaggagctttctgacagcgaaatcatcttcaacaaactgggtaaaattgaaacggtaacagatgacgaaattgacgatcctaaagcaaagcgttataacgttctggctaagagagtcttcgaaaaaattgccgaccttcgcgctgaaattgatcccgaatcctatgatgcccttaatattcgcgagaacattaaaaagatcattgatttggaaaatatccgtaaccgtggctttaacaccgctattaactcgcttaccgcgattcttgacacttcaagaatgggatatcagtacattgaaaacctcaagaacggacgtgaagtagcgttgcgcgaatatgaagacaccgatatagccaatctgccggacgagcgctatagcattaagcttcgctattttgacaatgcccagctcattgaagaccgcaaggcttacgatgtaatgatcaagagtttcgagactgaaattcagcatctgtgggatgttctggaagttatctatcaggataagaagagtgcctttgccattaccgattttgaagatttggccaagaaacaaagccaagaattcgcaagacaattaaagaaaaatccggcgaacccatgtacgaagatatcgcaaagtatgggatga

SEQ ID NO: 36060 - protein, 280 aa, Unknown
  Obtained from environmental sample
  misc_feature (1)..(280): Xaa is any amino acid
MRVQDNIAKPKTVTDVKLSVNILDSELISPIFHYQVTVEYIIKDLLSKHLIDNIDRIIEQIKDNRIDQGLEELSDSEIIFNKLGKIETVTDDEIDDPKAKRYNVLAKRVFEKIADLRAEIDPESYDALNIRENIKKIIDLENIRNRGFNTAINSLTAILDTSRMGYQYIENLKNGREVALREYEDTDIANLPDERYSIKLRYFDNAQLIEDRKAYDVMIKSFETEIQHLWDVLEVIYQDKKSAFAITDFEDLAKKQSQEFARQLKKNPANPCTKISQSMG

SEQ ID NO: 36061 - DNA, 486 bp, Unknown
  Obtained from environmental sample
  misc_feature (1)..(486): n is a, c, g, or t
atgcgcgaaagaatgaagagaatgtacgatttcctgtatccgattgaaagacgcgtgatggaagaaagactttcatggcttgaaaaggaatattacaggtttgattacatgatcaacccgtaccacctgcagccgggtctccttttggatgtagatattacgtcaatcaagaggaagaaagttaccttggacgcgatggcgaacgttctcaacgaattcctgcacggcgtatccaagggcttctcggatgccgcgtttgcgtcattcagccgcagaaggtcaacagtccgcgaagatataaatcagtctttcagcagcgcttccattgaagaggaacatactgttgcggaagcggctccgaaagcaaaagcaattgcggctcctaaagcggcagcccctgcgccaaagaaaaaagccggtgttgtagatacaaggtctaaatccaggagatccggcggtcgcggttcaacgcttacggaattatag

SEQ ID NO: 36062 - protein, 161 aa, Unknown
  Obtained from environmental sample
  misc_feature (1)..(161): Xaa is any amino acid
MRERMKRMYDFLYPIERRVMEERLSWLEKEYYRFDYMINPYHLQPGLLLDVDITSIKRKKVTLDAMANVLNEFLHGVSKGFSDAAFASFSRRRSTVREDINQSFSSASIEEEHTVAEAAPKAKAIAAPKAAAPAPKKKAGVVDTRSKSRRSGGRGSTLTEL

SEQ ID NO: 36063 - DNA, 816 bp, Unknown
  Obtained from environmental sample
  misc_feature (1)..(816): n is a, c, g, or t
atgagggaattgaacgagtctgttgagcgatggtgcgcggcgtataacgccaacctgatcccttaccttgatacccgtttgcgccgcggcggtattattcaaagccggatggtgctttggcagcgtatagcgaaagaaaacctgcgtgaattgcccgatgaagaaacttgccgtcaaatattcacaaacaaagttcagacgagaaaggtcgcaggggacttaaccgtaagcatcgtgcaccctcgggcaaaacggtcgctgaaatacagcctgcgtgatttgcaaggcgtactggtcggaatggaagtgagccttcagcctgtgctggtgacggaaaatcccgtctgcatcgtaagttacgaatacaagggcgaagaattgagctttgagattgaaccgattgaatttaatgaatccggtttcgacatcaccgctcccgtgttcggcgtgaattacaaacggcataaagacacggcgagggagaaacaaaagaaggttcttgaaaatcccgcccttgaatcggtcatgggtccggcgcacagtttcatacagcctgaaaatccgtttatgcgtcagaccgaaggaagccgcatagagatcgccgaaacaatccacacccacgagattttgatcagcgcgacggaaatggcgaaacgtattaagccggtactcggttatgtgccggaaggtttcatcgagtggttgaaagaagcgtatcccgaaggaacgccgtccaacctgcttgatgatttggtaaacaaatacaaaggacaacaggaagaaaagtcctttgagaagattcttaaatttgcgtaa

SEQ ID NO: 36064 - protein, 271 aa, Unknown
  Obtained from environmental sample
  misc_feature (1)..(271): Xaa is any amino acid
MRELNESVERWCAAYNANLIPYLDTRLRRGGIIQSRMVLWQRIAKENLRELPDEETCRQIFTNKVQTRKVAGDLTVSIVHPRAKRSLKYSLRDLQGVLVGMEVSLQPVLVTENPVCIVSYEYKGEELSFEIEPIEFNESGFDITAPVFGVNYKRHKDTAREKQKKVLENPALESVMGPAHSFIQPENPFMRQTEGSRIEIAETIHTHEILISATEMAKRIKPVLGYVPEGFIEWLKEAYPEGTPSNLLDDLVNKYKGQQEEKSFEKILKFA

SEQ ID NO: 36065 - DNA, 867 bp, Unknown
  Obtained from environmental sample
  misc_feature (1)..(867): n is a, c, g, or t
ttgaacaatatgcttggtgacctcattgaattggaagaatcggaaggcggtcataaagggcgcattaaagccgttgagaaggaattaaaaaacagaaacgatgacggtgcgggaaactttgttaaagggagaaagaaaaacgtaattgcgccagaagcgcatacaatggatttggtgaagcagaaaaagaatgaaaatctctctttggtaaaacagcttttttcagaacttggaatactcgggacagaatacgatttttttctttacaagcaaacggcaataaacttgattaaaatgcatgagactaccgctgttgcttttggagcggtacttcttgctatcaaagaacatgagccacatggaaatttccttaatatgttgaaggaaattgatattcacccaagaaaagcacagttttatatgaactacttccggcgttatggcaaatacgatcatttatcgcatttgggtagatcaaaacttgacgtatttgaggctttttcagatgaagaactcaagaaattgaatgacggcggtgaggtaaacgggcttactcttgacgccattgatcaaatgacagctaacgaattaaggaacaaacttagggaagcagaaaaaaaacttgacagccagaaagaacgttacaaaaaagaacttgaaactaagttagatgaaattaaagacctgactatgcggtactctcatacggaaccgccaaccaaagaacaaatagcgcaagcaacgcttcaaggacttaacaaagaatacactatcgcattggcggaagtaaacggcagtatccgcaacgctctttccttggtcgcaaagccgagaaaatcgaaaactgaacgtacagcagttgaatga

SEQ ID NO: 36066 - protein, 288 aa, Unknown
  Obtained from environmental sample
  misc_feature (1)..(288): Xaa is any amino acid
MNNMLGDLIELEESEGGHKGRIKAVEKELKNRNDDGAGNFVKGRKKNVIAPEAHTMDLVKQKKNENLSLVKQLFSELGILGTEYDFFLYKQTAINLIKMHETTAVAFGAVLLAIKEHEPHGNFLNMLKEIDIHPRKAQFYMNYFRRYGKYDHLSHLGRSKLDVFEAFSDEELKKLNDGGEVNGLTLDAIDQMTANELRNKLREAEKKLDSQKERYKKELETKLDEIKDLTMRYSHTEPPTKEQIAQATLQGLNKEYTIALAEVNGSIRNALSLVAKPRKSKTERTAVE

SEQ ID NO: 36067 - DNA, 480 bp, Unknown
  Obtained from environmental sample
  misc_feature (1)..(480): n is a, c, g, or t
atgaaagataaaaaaataaagaagataatacagttgtttacggcgattttcattttcgtcatgtcctccgcgccgcttttcgctcagacagcagctgaaattgaagaattattgaaagcaaaaacagtaagttacgaaaaggcggcgcgttttgtactggaagctgctgaagcggtttcgctgaaagacgcaaacacggcttttgcgttcgcggcggaacgcgcgtggcttccgaaaaaagcgtccgcggaacaagccgcaaagcttgacggcattgcgcttcttctcatgcgggcgttcgccgttaagggcggtatttggtattcatttacaaaaaacccgcactatgcgtaccgggaacttgtgtatcaggatattattcaaggcaagaccgacccggaaatgactttaaccggagaacaattcttatttcttgttaacaggcttatttctctccatgaagggaaggaacaaaaatga

SEQ ID NO: 36068 - protein, 159 aa, Unknown
  Obtained from environmental sample
  SIGNAL (1)...(28)
  misc_feature (1)..(159): Xaa is any amino acid
MKDKKIKKIIQLFTAIFIFVMSSAPLFAQTAAEIEELLKAKTVSYEKAARFVLEAAEAVSLKDANTAFAFAAERAWLPKKASAEQAAKLDGIALLLMRAFAVKGGIWYSFTKNPHYAYRELVYQDIIQGKTDPEMTLTGEQFLFLVNRLISLHEGKEQK

SEQ ID NO: 36069 - DNA, 1035 bp, Unknown
  Obtained from environmental sample
  misc_feature (1)..(1035): n is a, c, g, or t
atgaataataaaacccatatcagcagatccgccctacgggcggattttctattaattcttaccgcggctatctgggggtttggctttgtagcccaactttccggaatggaatattttggaccgtttgcgtataacggagttcgttttattttaggaagcctttctttggttccacttgttcttattaggagaaaaaataaggcttctttggaatcgttattgtatttactgaaggcttctattgcggcgggcagttgtctttttatcgccgtaattcttcaacagtttggtttgctttttactaccgccggaaacgcgggttttattaccgggctttatgtcgtatttacccccattgtgggaatttttctgggaagaaaaacagggcttcccacatggattggttccgttctgaccctcatagggctttattttatcagcgccgcaggccgttcttccgtgatccccggagacataattaccgtnatcagcgctttcttatggactgcgcatgttctgcttattgaccgttttatgaatgtgatatttcagcgtaacatttccattgacccgatagaactttcctcagggcaatntgcggtntgcggcgtattaatgctgttaggcgcattttctgttgagcctcatgtgacttccgtagtgggaaaaattaatccctcattgcttgataaaggtctttttgaatggctgcctttccccgcgtttattgccgctgttaaaaacggtgcaatgcgtttatctttgcagatttttattccaatcctgtacggcggactcggttccgttgggattgcttatactctccaggtggtcgcccaacgcgacgcgcctccggcacacgcggtaataatcctctgttttgaaggctgtttcgccgcccttggcggggtactgcttctttccgagaaaattggtttatggacattgtttggatttattctgatgcttgccgggatgttggctactcagtgggatgtgattgtaaagtcaaacaagtcaaccgataatatttag

SEQ ID NO: 36070 - protein, 344 aa, Unknown
  Obtained from environmental sample
  DOMAIN (166)...(331): Integral membrane protein DUF6
  misc_feature (1)..(344): Xaa is any amino acid
MNNKTHISRSALRADFLLILTAAIWGFGFVAQLSGMEYFGPFAYNGVRFILGSLSLVPLVLIRRKNKASLESLLYLLKASIAAGSCLFIAVILQQFGLLFTTAGNAGFITGLYVVFTPIVGIFLGRKTGLPTWIGSVLTLIGLYFISAAGRSSVIPGDIITVISAFLWTAHVLLIDRFMNVIFQRNISIDPIELSSGQXAVCGVLMLLGAFSVEPHVTSVVGKINPSLLDKGLFEWLPFPAFIAAVKNGAMRLSLQIFIPILYGGLGSVGIAYTLQVVAQRDAPPAHAVIILCFEGCFAALGGVLLLSEKIGLWTLFGFILMLAGMLATQWDVIVKSNKSTDNI

SEQ ID NO: 36071 - DNA, 714 bp, Unknown
  Obtained from environmental sample
  misc_feature (1)..(714): n is a, c, g, or t
gtgccacagtgttttacgcagaaaagacatattcaactgatgcgtaaaatagttttcgtgtttatgggcgggccaagcgttgagcaccctgtttctcttgtaagcggaacaggaattgcccgagccttagacccccataaatacgatattcaccctgtactcatctcacaagacgattattggacttggggacgcaaaccgctcaccccgtatcaatgccagaactttaacgtaaatttctttacaagcgcagaaaacgatatgcaaaaaaaactgcgcccctctttggaagaattaaaaccgatggacatcgcatttttagccctgcacggccgctttggcgaagatggtcatattcaggcgatgctggattatgcgggtattccatacacgggcagcggaatgctttccagcgcgctcgctatggacaaagtaaagagcaaggagatttacagagcgaacggtatccccactgcggagtttagggtttggcaaagggaaagtttttcaaaggaaaccatagaagaagcgtttgagcatttgggctcgcctattgttattaaagaccctctcggcggttcttcactggatatgggctttgcaaaaaatattgaagaggctggcaagatttgcgaaaggctttttgaaaaaagacggcaggcttttgacggagcagtttatagcaggcatggaagcgagctgcggttatattga

SEQ ID NO: 36072 - protein, 237 aa, Unknown
  Obtained from environmental sample
  DOMAIN (16)...(142): D-ala D-ala ligase N-terminus
  misc_feature (1)..(237): Xaa is any amino acid
MPQCFTQKRHIQLMRKIVFVFMGGPSVEHPVSLVSGTGIARALDPHKYDIHPVLISQDDYWTWGRKPLTPYQCQNFNVNFFTSAENDMQKKLRPSLEELKPMDIAFLALHGRFGEDGHIQAMLDYAGIPYTGSGMLSSALAMDKVKSKEIYRANGIPTAEFRVWQRESFSKETIEEAFEHLGSPIVIKDPLGGSSLDMGFAKNIEEAGKICERLFEKRRQAFDGAVYSRHGSELRLY

SEQ ID NO: 36073 - DNA, 384 bp, Unknown
  Obtained from environmental sample
  misc_feature (1)..(384): n is a, c, g, or t
gtgagcatcaacaccggaaacgcacctccggcaagcacgctncctgttccaaaagcaaatgcagaccgtgcctntgatgcagcagcctgcataggttgtggagcctgcgttgcggcttgcaaaaatgcttctgcaatgctatttgtttctgcaaaggtgagccacctttcgtatttgccccaaggcaagcccgaagctcaaaaaagagttctcgctatggtggagcaaatggacaaagaaggctttggaaactgcacaaatctctttgaatgcgaagcggcctgtccaaaaggcatttcggttgagttcatagcaaaaatgaaccgcgaatatatgtgtgccacagtgttttacgcagaaaagacatattcaactgatgcgtaa

SEQ ID NO: 36074 - protein, 127 aa, Unknown
  Obtained from environmental sample
  DOMAIN (23)...(46): 4Fe-4S binding domain
  misc_feature (1)..(127): Xaa is any amino acid
MSINTGNAPPASTLPVPKANADRAXDAAACIGCGACVAACKNASAMLFVSAKVSHLSYLPQGKPEAQKRVLAMVEQMDKEGFGNCTNLFECEAACPKGISVEFIAKMNREYMCATVFYAEKTYSTDA

SEQ ID NO: 36075 - DNA, 933 bp, Unknown
  Obtained from environmental sample
  misc_feature (1)..(933): n is a, c, g, or t
gtgcagtccgagacagaaattaaaaacattcaggataatttcagagagaaccactcaagggatttaatggaatttgaggagcggatttttaccattaccgccgcccccgccgatttgcgcgacaaacttgcggcagcgcggactaaaatgaaagagctgggctccgtaaacctcatggcccccgaagaatttgccgaaacaaaggaacgctttgaattcttaagcaatcaaatggcggaccttgaaaaagcaagaaaagatttggaagaccttaccgccgaaatccggcaggaatcttcggctttgtttctggaaacatacaatcgaatcaagaaaaattttcacaacatgttccgcaggcttttcggcggcggacgcgcggaactcaggctttcagaccccaaccatattttggaatcgggcatagaaattttcgcccagccgcccggaaaaaagctggaacacttaagcctgctctccggtggcgaatgttcaatgacggcggtcgccctgctttttgccacatacatggtaaaacccagccccttctgccttctggacgaaatagacgccgcgttagacgaacagaacgtagggcgctttgtccatcttctgcgcgagttcagcgacacgagccagtttattattattacgcataacaagaaaactgttacgggcgcgggaacgcttttaggcgttaccatgcaggaatcgggagtgacaaaacttatcacagtgcgtattgaacacggggaacttgcggtagaagactcggaaccgttccaaagcgagttatgggacgcggacggcaagtttgaagaagaagacatcgcacccgaagagggcagggagcttcctgtcggtatgaatgatccgaaaaaagtaacgcaggcgcagttaaggccgattagatcggcagtgccgaagaactga

SEQ ID NO: 36076 - protein, 310 aa, Unknown
  Obtained from environmental sample
  DOMAIN (64)...(242): RecF/RecN/SMC N terminal domain
  misc_feature (1)..(310): Xaa is any amino acid
MQSETEIKNIQDNFRENHSRDLMEFEERIFTITAAPADLRDKLAAARTKMKELGSVNLMAPEEFAETKERFEFLSNQMADLEKARKDLEDLTAEIRQESSALFLETYNRIKKNFHNMFRRLFGGGRAELRLSDPNHILESGIEIFAQPPGKKLEHLSLLSGGECSMTAVALLFATYMVKPSPFCLLDEIDAALDEQNVGRFVHLLREFSDTSQFIIITHNKKTVTGAGTLLGVTMQESGVTKLITVRIEHGELAVEDSEPFQSELWDADGKFEEEDIAPEEGRELPVGMNDPKKVTQAQLRPIRSAVPKN

SEQ ID NO: 36077 - DNA, 597 bp, Unknown
  Obtained from environmental sample
  misc_feature (1)..(597): n is a, c, g, or t
ttgccgccgtcgggaacggagggcgccgggtatttgccggaagcactcagaacgccggaaatgtaccttgccgccgtcgaacatgacgattccgcgcttgaatgccttcctgacacattgaagacacgggaattctaccttgccgccttccataaaaatgccgccacactttttgtaatgccgggagaattcagaacgccggaaatgtaccttgccgcagtgcaaagcgatggcaagctgcttagaaacattcacccggaattcaaacttccggaaatctgcctcgcagctgttcgcaatgacggctttgcgctcttctatgtgccggatgaacgtaaaacagcggaactctgcctgatcgccgttcagcatcatgccagtttgctctctgatgtcccggaggaacttaaaacagaagaactctgtcgtatcgccgtgcagaattatgcccgtgcgcttgagtttgtgccggagaatctcaaaacagaggaactttgcctgaccgctgtgcggaaagacatcggcgcgcttgagtatgtgccggaaaaactccgcacggcggagttctgcctggccggtcttgaaccgcatctatag

SEQ ID NO: 36078 - protein, 198 aa, Unknown
  Obtained from environmental sample
  misc_feature (1)..(198): Xaa is any amino acid
MPPSGTEGAGYLPEALRTPEMYLAAVEHDDSALECLPDTLKTREFYLAAFHKNAATLFVMPGEFRTPEMYLAAVQSDGKLLRNIHPEFKLPEICLAAVRNDGFALFYVPDERKTAELCLIAVQHHASLLSDVPEELKTEELCRIAVQNYARALEFVPENLKTEELCLTAVRKDIGALEYVPEKLRTAEFCLAGLEPHL

SEQ ID NO: 36079 - DNA, 504 bp, Unknown
  Obtained from environmental sample
  misc_feature (1)..(504): n is a, c, g, or t
gtgataaatacaaagatatttaaacgcntgcgcggaatgggaaatgacaacgcaagggaagaagtcgataaaatgattgtccttgattaccttattagaaataccgacaggcacgtcgggaattttggcgtattaagaaattcagaaacgttaaaatgggagaaaatcgctcccgtgtttgataatggcaattcgttttggcataacgcgcagggtattcaattcattaacggcaattctaaaagcgaatgcaggtcatttaccggagaaaatgagaaaaatgttttacttgtaggcgatacgctctggtataacaaaaacaaacttaatgacgttgataaaattatttccgggatttttaaacataataaaaatattgagaacgaaagaattgataaaattgtcaaagaattcaaaagaagagttgacaatttagaccttgtattggaacgcgacagaggaatcagaacaattgaaaacagcgggaacagttacagccgctga

SEQ ID NO: 36080 - protein, 167 aa, Unknown
  Obtained from environmental sample
  misc_feature (1)..(167): Xaa is any amino acid
MINTKIFKRXRGMGNDNAREEVDKMIVLDYLIRNTDRHVGNFGVLRNSETLKWEKIAPVFDNGNSFWHNAQGIQFINGNSKSECRSFTGENEKNVLLVGDTLWYNKNKLNDVDKIISGIFKHNKNIENERIDKIVKEFKRRVDNLDLVLERDRGIRTIENSGNSYSR

SEQ ID NO: 36081 - DNA, 510 bp, Unknown
  Obtained from environmental sample
  misc_feature (1)..(510): n is a, c, g, or t
atgaaaacacgaagtatgatatccttcgactgggcgatgaaacggcttcttcgccagaaagcgaatttcaggatacttgaaggttttttgagcgaattgcttcgccgtaatatcatagtcaaatatataggcgaaagcgaaggcaatgcaaccgataaggacaataagataaatcggatagatatctttgtagaagccgatggagcagagttagtaatcgttgaattgcagtttaacgaccagtatgattattttcaacgtatgctttatggcgtgtgcaagtcaataactgactatatgcacaaaggcgaaccctattcaagcgtacgcaaagcatattcgataaatatagtttacttcaatcttggcgtaagcgacgactatgtatatcatggatttacccaattcacaggacttcatacgaaaaacggtctttcgctcgacgaccaacaaaaggagctatatgggcagttctgttcccgggcaattgtacccgtgaaacctatataa

SEQ ID NO: 36082 - protein, 169 aa, Unknown
  Obtained from environmental sample
  misc_feature (1)..(169): Xaa is any amino acid
MKTRSMISFDWAMKRLLRQKANFRILEGFLSELLRRNIIVKYIGESEGNATDKDNKINRIDIFVEADGAELVIVELQFNDQYDYFQRMLYGVCKSITDYMHKGEPYSSVRKAYSINIVYFNLGVSDDYVYHGFTQFTGLHTKNGLSLDDQQKELYGQFCSRAIVPVKPI

SEQ ID NO: 36083 - DNA, 471 bp, Unknown
  Obtained from environmental sample
  misc_feature (1)..(471): n is a, c, g, or t
atgccatttacattatcatcttcagagttagaaattttgacaaacaagtacaaaaaagagaagaataagacccgcgccaaccgcatcaatatcattttattattgcataaaggttacagcggagtagaaatatcctctatcctgaatctggatatggacactgtctgtaaatggaaaaatcgttaccttagccgtactgatgatacaaattggctggatgatttctatcaaccctatttgggcaaattgtcctgtcatcaaatcagtcttttgagaaattatatccgtactttctttgtaggaaataaaaaagagttacaatcctttatagaggtttccttttctgtttcttacactttttcaggggttaacaaacttcttcatcgtataggactatcatatcagagcatacacaaattaccggggaaatgtcctgttgagcagcnaacatcatggattgaaacattttga

SEQ ID NO: 36084 - protein, 156 aa, Unknown
  Obtained from environmental sample
  misc_feature (1)..(156): Xaa is any amino acid
MPFTLSSSELEILTNKYKKEKNKTRANRINIILLLHKGYSGVEISSILNLDMDTVCKWKNRYLSRTDDTNWLDDFYQPYLGKLSCHQISLLRNYIRTFFVGNKKELQSFIEVSFSVSYTFSGVNKLLHRIGLSYQSIHKLPGKCPVEQXTSWIETF

SEQ ID NO: 36085 - DNA, 807 bp, Unknown
  Obtained from environmental sample
  misc_feature (1)..(807): n is a, c, g, or t
atgttcacagacgcgacaggccgtaaagattttatggatacggcgcgttttgcgtcccttcttgataaaattgtttctttttcaggggacgccgttatcgatctttccttgtggggagaattaagcctgcatcctgaaaaaatgaagttaatcgaagaggtcgtctcccgaaacacgctttcgcttgtaattgaaacttcgggtatcggctggaaagagcaggaactggaaagttgcgcgcggctttgttcggacttaacgcaaaagaaggagcgaaaaaacacattgccgcccctttcatggatcgtatctttggacagcgttgaccctcaacgttacacggaactgcgcggacatggttttgccgaagctgaaaattgcgctaaaaaattgttatccctgtttccaaaagactgctatacgcaggctgtgcgtataaaaggctcggaggaagatacggaaaagttttatcgttattggaaggcttcaaacgtaattattcaaaaatatgatgatttttgcggagcgcttgaaaaaaaacaggcttcggacatatcccccgtaatcagaaaaccatgctggcatataatgagggatatgcctgtattaattgacggtacagtgccgctttgcagagaggacacaggcgctttaaaacagcaaagcagccgtattttagggaatgttttttcagactctcttgaaaaaatctggaaagaaggagattcttattacagggaacaatgcgtaaaaaattattcgggactttgcagagactgcgatgaatactacacctttcatttttaa

SEQ ID NO: 36086 - protein, 268 aa, Unknown
  Obtained from environmental sample
  misc_feature (1)..(268): Xaa is any amino acid
MFTDATGRKDFMDTARFASLLDKIVSFSGDAVIDLSLWGELSLHPEKMKLIEEVVSRNTLSLVIETSGIGWKEQELESCARLCSDLTQKKERKNTLPPLSWIVSLDSVDPQRYTELRGHGFAEAENCAKKLLSLFPKDCYTQAVRIKGSEEDTEKFYRYWKASNVIIQKYDDFCGALEKKQASDISPVIRKPCWHIMRDMPVLIDGTVPLCREDTGALKQQSSRILGNVFSDSLEKIWKEGDSYYREQCVKNYSGLCRDCDEYYTFHF

SEQ ID NO: 36087 - DNA, 621 bp, Unknown
  Obtained from environmental sample
  misc_feature (1)..(621): n is a, c, g, or t
atggcagagcggacaaagttttcggcttactgtctttacagtttcctcatcagcgcggtgatttatcccatctccggccactggatatggggcggtggctggcttgctgagcttggtttccatgactttgcgggttctaccgcggtacacatggtaggcggcgtagcatcgttagtcggcgcggcaattgttggtccccgtatcggcaaatacgccgtaacaaaagacggcaaaaaaggcgaatcgagggcaattcccggacacagcctgacgcttggcgcgctcggtgttttcatactctggttctgctggttcggctttaacggtggttctactgtttccatggaaaaagtaattgaagatggagtagttacagctaataacatctatggcgccggtaaaatatttgttactacaaaccttgcggcggcaaccgcggcggtctttaccatgttcattacatggatacgctacaaaaagccggatgtgtcaatgacgcttaacggcgctcttgccggtcttgtagctattaccgctggatgcgatgttgtagatccattgggtgcgttctttattggcattgttgctgcgtttgtgattgtatttggaattgaattgtag

SEQ ID NO: 36088 - protein, 206 aa, Unknown
  Obtained from environmental sample
  DOMAIN (1)...(206): Ammonium Transporter Family
  misc_feature (1)..(206): Xaa is any amino acid
MAERTKFSAYCLYSFLISAVIYPISGHWIWGGGWLAELGFHDFAGSTAVHMVGGVASLVGAAIVGPRIGKYAVTKDGKKGESRAIPGHSLTLGALGVFILWFCWFGFNGGSTVSMEKVIEDGVVTANNIYGAGKIFVTTNLAAATAAVFTMFITWIRYKKPDVSMTLNGALAGLVAITAGCDVVDPLGAFFIGIVAAFVIVFGIEL

SEQ ID NO: 36089 - DNA, 450 bp, Unknown
  Obtained from environmental sample
  misc_feature (1)..(450): n is a, c, g, or t
atggaattttcgtcctttgacacgatgtgggtactcatagctgccgctcttgtattctttatgcaggcgggcttcgctatggtagaaacaggctttacgcgggcaaaaaatgccggaaatatcgtcatgaaaaacttgatggatttctgtatcggcaccccgacctactggttagttgggtttgggatcatgttcggaaccggtaaatttatcggcggcattgaccttatggtcagaggggattacgccacttctctggaattaacctttcccccgatggctttcctgatctttcagacggtgtttctgcgcaactgcggcgactatcgtctcgggagcgatggcagagcggacaaagttttcggcttactgtctttacagtttcctcatcagcgcggtgatttatcccatctccggccactggatatggggcggtggctggcttgctga

SEQ ID NO: 36090 - protein, 149 aa, Unknown
  Obtained from environmental sample
  SIGNAL (1)...(26)
  misc_feature (1)..(149): Xaa is any amino acid
MEFSSFDTMWVLIAAALVFFMQAGFAMVETGFTRAKNAGNIVMKNLMDFCIGTPTYWLVGFGIMFGTGKFIGGIDLMVRGDYATSLELTFPPMAFLIFQTVFLRNCGDYRLGSDGRADKVFGLLSLQFPHQRGDLSHLRPLDMGRWLAC

SEQ ID NO: 36091 - DNA, 501 bp, Unknown
  Obtained from environmental sample
  misc_feature (1)..(501): n is a, c, g, or t
ttgacgcgctgcctgagtttgttccaagaaaagcgtggatttatttaccaaacaccatgtttttccgagacggagcttcattcgcggtatgaaatacttatggaaggttactgcaaaactctccatatagaagcgcttaccatggtagatatggtcaagggagaaattattcccgcctgtatagactaccagaatgatctgacaaagcttcttcaacgaaagaaagcgttgggttattttgactcttcgctggaggaacaattgggaggtaatgtcgcgacgctggccgcttgtttgctcaagagattgtcggcgcttgaaagcgcgcttctggagaccaagggtgatcgggatattttggcccaggcgcgtttttaccgtgagaagattttttccgcaatgcaggaacttcggctgaccgttgatgagcttgaaacactggtagcaagaaaatactggccgttcccgacttacggtcagatattgttcagcgtgatttag

SEQ ID NO: 36092 - protein, 166 aa, Unknown
  Obtained from environmental sample
  misc_feature (1)..(166): Xaa is any amino acid
MTRCLSLFQEKRGFIYQTPCFSETELHSRYEILMEGYCKTLHIEALTMVDMVKGEIIPACIDYQNDLTKLLQRKKALGYFDSSLEEQLGGNVATLAACLLKRLSALESALLETKGDRDILAQARFYREKIFSAMQELRLTVDELETLVARKYWPFPTYGQILFSVI

SEQ ID NO: 36093 - DNA, 441 bp, Unknown
  Obtained from environmental sample
  misc_feature (1)..(441): n is a, c, g, or t
ttgacggagatgccgctaatctatccgcgaataaagaacttgcacgtgaaagtaaaagagtggaacgacaagataatatttttgcgcaagatagacaccggttcctgcgaccactcctacggtatacaagtcgcgagattggccggcgtacccacaagcgtcatacttcgggcgcgggaaatcttaaacaatctggagaacatggaactgacccccgaccacaaaccggcgttagcccgcaaaaaagacggcagtttcggcgctatggcctccgcgtcgtcgtcaccgacagacggaaacgacgccgtacaactaaacgcgattgacgaatacgcgcagtccatcatcgcgaaactgaagagcatcgacctgaacgccgttacgcctatggacgcgctgacgctgctctatgagttgcggaagaaggcggtcgaggggtga

SEQ ID NO: 36094 - protein, 146 aa, Unknown
  Obtained from environmental sample
  DOMAIN (1)...(68): MutS domain V
  misc_feature (1)..(146): Xaa is any amino acid
MTEMPLIYPRIKNLHVKVKEWNDKIIFLRKIDTGSCDHSYGIQVARLAGVPTSVILRAREILNNLENMELTPDHKPALARKKDGSFGAMASASSSPTDGNDAVQLNAIDEYAQSIIAKLKSIDLNAVTPMDALTLLYELRKKAVEG

SEQ ID NO: 36095 - DNA, 447 bp, Unknown
  Obtained from environmental sample
  misc_feature (1)..(447): n is a, c, g, or t
atgaattccccccgccccgccgtcccaaacgatatggaccaaatctacgctctggagcaagcgtgcagccaaaacccgtggactctcgacggcgtcgccggcagcctctcagacccaaacgccgtctttttggtgctggaaaaatcagagaaccgcataatcggttttgcttgttccttggtgattttagacgagttacacatactcgaagtcgccgtgaaccaagagtgcagaaatagcgggctgggaaccttattgatacttcaatcaatacaaaccgccgccgcaaagggcgctcgtcgagcgtacttagaggtcaggcgctcaaacctttccgccatacaactctacaaaaaatgcgggtttacggaggaagccgtcaaaaccggatactacggagacggggaggacgcggtatttatggagaataaatcgcttatatcctaa

SEQ ID NO: 36096 - protein, 148 aa, Unknown
  Obtained from environmental sample
  DOMAIN (45)...(123): Acetyltransferase (GNAT) family
  misc_feature (1)..(148): Xaa is any amino acid
MNSPRPAVPNDMDQIYALEQACSQNPWTLDGVAGSLSDPNAVFLVLEKSENRIIGFACSLVILDELHILEVAVNQECRNSGLGTLLILQSIQTAAAKGARRAYLEVRRSNLSAIQLYKKCGFTEEAVKTGYYGDGEDAVFMENKSLIS

SEQ ID NO: 36097 - DNA, 633 bp, Unknown
  Obtained from environmental sample
  misc_feature (1)..(633): n is a, c, g, or t
ttgaaatatctgctctttcggctaaatcaattgtttttttcacggacttacggaagcgaggcggcggctgtctgggaagcggcgagtatgatcacaatagtgtggctttttatttataattttattcttccaattaatcgcaaattgaaaaaagataaaaatttcatcaatatattgattaatacttatccgggaaatctgttaattgcttttttaataatcggcatagccggaatttttgaccttcttgattccgccgctctgcatttatcgctgagtttaaccaattacggtatagtagtctttgcgttgtcgattacatttatgttattccgaatgttcgtcataaaagacagagagcttaaagaaaaaagcgctctgctggaaagggcgactaatcccgcgtccgcgcgtgaaaaggtgtttaaatcatacggattaacggaacgcgaaaaggaagttgtcagattgatggcggaagggcttgataacaaggaaatcggcgaacgtctatttatatcgggcagaactacagcgttccacgcgacaaatattttccgtaaattcggcattattgacagcaaaaacagggggcggattgtatttttatccaagctgattggcgggttataa

SEQ ID NO: 36098 - protein, 210 aa, Unknown
  Obtained from environmental sample
  DOMAIN (144)...(204): Bacterial regulatory proteins, luxR family
  misc_feature (1)..(210): Xaa is any amino acid
MKYLLFRLNQLFFSRTYGSEAAAVWEAASMITIVWLFIYNFILPINRKLKKDKNFINILINTYPGNLLIAFLIIGIAGIFDLLDSAALHLSLSLTNYGIVVFALSITFMLFRMFVIKDRELKEKSALLERATNPASAREKVFKSYGLTEREKEVVRLMAEGLDNKEIGERLFISGRTTAFHATNIFRKFGIIDSKNRGRIVFLSKLIGGL

SEQ ID NO: 36099 - DNA, 1494 bp, Unknown
  Obtained from environmental sample
  misc_feature (1)..(1494): n is a, c, g, or t
ttgggattcgccgccgtatcggagaccgccttgggcgcggatttcctctccgcgcggatcgcccgcgatttagcgccgctcgccgcgagccgcgccgccacgggcaagccgcccttgatgatctcatcggcctgtcccgccatcgtcgattacatacaactctacgccccgatcctcgcgccctacatttcgcctcatgcctcgccgctactcacgcacgccagatttctccgctcccattacgaatcggaaggcggcgagaaaatcgcggtggtgttcatagggccttgcatagccaaaaaacacgaggccgatttgcgcaatacggagatcgacgcggccattactttcaccgaattgcgcagatggctggacaaagagggcgtgacgccccagacgatttcgttttcgatgtcccattccgccgtggcggattgcgcgttcgagccgcgccgtagcgctaagggggcgttcttcccccttgagggcggagagataaaggctttttccgcctacgtggcggaagcggcgaaggcggagaggggctatatacacaccatctcggcctccggctttccggcggtgcgcaggattttggagggttttgaccccgacgcgctggacgagccggtgttcttggaactcttagcctgtcccagcggctgcgttaccggccccggcatgtccggagcggtgccaggcgtcatccgccatacccgcctatgggattacgcccgctccgccgacgacaccctcgacgccgaaacgctctccggcttgccgcttgtcgacgccgattatcctacgtccatattgatggatgccccgcatacggaacaagagatatccgaggcgcttttgggcgtggggaaatacagcctcgccggacggctcaactgctcaagctgcggttacgacacctgccgcgatttcgccataggcctgctcgacgggcgggcggagaaatcgatgtgcgcctcgtatatgcgcgaactcgccaataaaaccgccaacgggcttatcaaggcgatacccaacggcgtagtcatcgtcgaccgcgacttgaaaatcatcgattgcaacatacagttcgcccgccttatggggagcgaaatcgaggaactgttcgccatatcgccgggattagagggcgccgacctcagaaaagtatcgcctttcccgcagtattttcaaactatcatcgacctgtcggggccggaactcgctcaagccgacgtgcgggagggcagcaagatattccacctaacggtcttcgccgtggaaaaaggcgtcaccgcggcgggagtcgtggaagacatcaccgcgccgcgcgtgcggatcgaaacgacggtcgagcgggcgcgtgaactcatcaaaaagaacgtgtctacggttcagcagatagcgttcctcttaggagaaaacgcggcggagtccgaggcgatactcaattccattatcgaatcttacactgtgggagaggaagatggctga

SEQ ID NO: 36100 - protein, 497 aa, Unknown
  Obtained from environmental sample
  DOMAIN (297)...(328): Putative Fe-S cluster
  misc_feature (1)..(497): Xaa is any amino acid
MGFAAVSETALGADFLSARIARDLAPLAASRAATGKPPLMISSACPAIVDYIQLYAPILAPYISPHASPLLTHARFLRSHYESEGGEKIAVVFIGPCIAKKHEADLRNTEIDAAITFTELRRWLDKEGVTPQTISFSMSHSAVADCAFEPRRSAKGAFFPLEGGEIKAFSAYVAEAAKAERGYIHTISASGFPAVRRILEGFDPDALDEPVFLELLACPSGCVTGPGMSGAVPGVIRHTRLWDYARSADDTLDAETLSGLPLVDADYPTSILMDAPHTEQEISEALLGVGKYSLAGRLNCSSCGYDTCRDFAIGLLDGRAEKSMCASYMRELANKTANGLIKAIPNGVVIVDRDLKIIDCNIQFARLMGSEIEELFAISPGLEGADLRKVSPFPQYFQTIIDLSGPELAQADVREGSKIFHLTVFAVEKGVTAAGVVEDITAPRVRIETTVERARELIKKNVSTVQQIAFLLGENAAESEAILNSIIESYTVGEEDG

SEQ ID NO: 36101 - DNA, 450 bp, Unknown
  Obtained from environmental sample
  misc_feature (1)..(450): n is a, c, g, or t
atgaacattgacagggcgacaggggggcatgattattttcatcaaaaactgcctgacaccctgcgggaagcaagcaagcggcttaaatcagagccggggcattatgtacaaattgaaaatagagacgcattggatttaattgtaaaatacgaccgtaaaaatgttttgatgtatcttgacccgccttatgtatgcgatacaagaaaacacaaaaaaatatacgagcatgaaatgagcgatattgaacataggcggttacttgaattgattagaaacgttaaagcgaatgttttaatctccggctatgacaatgaattatacgcaaagtatttagaaaaatggaataaaagcctgaacatatctactgacgaagcgggaaacaagcgtactgaatgtttgtggtttaactataattcacggcaatttgatttatttacaaatgagcaatga

SEQ ID NO: 36102 - protein, 149 aa, Unknown
  Obtained from environmental sample
  misc_feature (1)..(149): Xaa is any amino acid
MNIDRATGGHDYFHQKLPDTLREASKRLKSEPGHYVQIENRDALDLIVKYDRKNVLMYLDPPYVCDTRKHKKIYEHEMSDIEHRRLLELIRNVKANVLISGYDNELYAKYLEKWNKSLNISTDEAGNKRTECLWFNYNSRQFDLFTNEQ

SEQ ID NO: 36103 - DNA, 531 bp, Unknown
  Obtained from environmental sample
  misc_feature (1)..(531): n is a, c, g, or t
atgctcaaaccaaatatcaaatatcgggtaactttgacaggagaagaacgggattttttacagaaacttattcaaaaagggaataccgcaggctacaggatacgccatgctcagatactacttgcgctggatgagattcaggaaaatgaacactggacagacgcgaaaataggcgaagcatatggggtacgtcaacaggcagtaggtgtagtgcgtaagcgcttcgtggaagaaggcttcaaggccgccttggaacgcaaaaagaggacaactccaccggttatcaaaatagacggggaagcggaagcgaaaataatcgccttgacttgtagtacgccgccagaaggccgtagccggcggaccctgaaactaattgctcacaaggcggcagaactgggaatattagacagtatctctgaccacggtatcggagacctgtttaaaaaaacgacattaagccatggctacagaaagaatggtgcatggcaacgccgtccgccgaatatgcccagcggatggaagacgtattag

SEQ ID NO: 36104 - protein, 176 aa, Unknown
  Obtained from environmental sample
  misc_feature (1)..(176): Xaa is any amino acid
MLKPNIKYRVTLTGEERDFLQKLIQKGNTAGYRIRHAQILLALDEIQENEHWTDAKIGEAYGVRQQAVGVVRKRFVEEGFKAALERKKRTTPPVIKIDGEAEAKIIALTCSTPPEGRSRRTLKLIAHKAAELGILDSISDHGIGDLFKKTTLSHGYRKNGAWQRRPPNMPSGWKTY

SEQ ID NO: 36105 - DNA, 720 bp, Unknown
  Obtained from environmental sample
  misc_feature (1)..(720): n is a, c, g, or t
atgacaaccggcaactttccgccgattggcaataataccaacagattcacaggcgagtatgacggggacggaaaaactatcaccggcttgacagtaaccggcacgatagattatttaagtttattcggctatatcggcacaacaggcacggtgaaaaacatgatcgttaccggcacgataacccaaagcggatacgcgtttaccggcggcatagcgggctataatgaaggcacgattgacaactgttcctttagcggaaccgtcagcggcaattcaaccagcgattatattggcggcattgtcggacagaataacggcacgataataaacagcagaagcgccgcaacggtaagcggcagaaatcaaagcggcggcattgccggaaggaatcaaggcacgattgaaaacagttacaacacgggagccgtcagcggaaaccagcaagtcggcggtatcgccggaattaatatcggaagcggtaattacataaagaactgctataacacgggcgatgttaaaggcactgccacttcaatcaccagagtcggaggcattgtcgggtctaacgcatcaagctcaacagtagaatactgctacaataccggcaatgtttccggcccggctagtgtcggcggcatagtgggaaacaacgccagcggatgcacagtgcgaaactgcgtatcgctcggcgcaaaggtaaccggaactagtactcaatga

SEQ ID NO: 36106 - protein, 239 aa, Unknown
  Obtained from environmental sample
  DOMAIN (64)...(89): The GLUG motif
  misc_feature (1)..(239): Xaa is any amino acid
MTTGNFPPIGNNTNRFTGEYDGDGKTITGLTVTGTIDYLSLFGYIGTTGTVKNMIVTGTITQSGYAFTGGIAGYNEGTIDNCSFSGTVSGNSTSDYIGGIVGQNNGTIINSRSAATVSGRNQSGGIAGRNQGTIENSYNTGAVSGNQQVGGIAGINIGSGNYIKNCYNTGDVKGTATSITRVGGIVGSNASSSTVEYCYNTGNVSGPASVGGIVGNNASGCTVRNCVSLGAKVTGTSTQ

SEQ ID NO: 36107 - DNA, 828 bp, Unknown
  Obtained from environmental sample
  misc_feature (1)..(828): n is a, c, g, or t
gtgataaacgccataggagcgacaggttcgtctgtgggcgttgattttcttacggagcttgcgacgaataccgacgaacgcaccgctttgcgcatagctgcgttaggcgctctttctaaaataggcgatccaaaagggcttgacgctattataagctgtatcagcgcgaatgatccgaacttgcgctcttctgcggtaggagctcttggtccctttacgggagcggccgctgaaaacgcgatattagacgctttcagagattcttattaccgcacaagaatcgccgcggcgcaggcaagccgtgacagaaaacttgtctccgccattccgtttttaaaattccgcgccgaacgcgacgatgttcccaccgttaaagacgaggcgattcgcgcgttaggagccatcgctaatgacgaggcaaatgcggttcttgaaagtttatttctggagcgaaaaaatttagacggcatccgtatccttgcggcngatatgcttatgaagaacacgggcggaaaaaatttcggtaaacttattatagaacttgacgaagcaaaaaagaaaaatcagacaggtctttacaacggctttttaaaagtcgtaggcgagactgtagttgaaaataataaatccgaaatagagggcgtcgcgcgccgttttatgggcggcggcattatggaaaaattatacggtcttgatatggcgcttaataataaacttgcggggctaaaagaagaaataataacgcttacaaaagaaaaaaatgaaagcatttcaagaaaggcgcggcgtaccgctgaaagtcttgggatagaaatcccaagcaattag

SEQ ID NO: 36108 - protein, 275 aa, Unknown
  Obtained from environmental sample
  misc_feature (1)..(275): Xaa is any amino acid
MINAIGATGSSVGVDFLTELATNTDERTALRIAALGALSKIGDPKGLDAIISCISANDPNLRSSAVGALGPFTGAAAENAILDAFRDSYYRTRIAAAQASRDRKLVSAIPFLKFRAERDDVPTVKDEAIRALGAIANDEANAVLESLFLERKNLDGIRILAADMLMKNTGGKNFGKLIIELDEAKKKNQTGLYNGFLKVVGETVVENNKSEIEGVARRFMGGGIMEKLYGLDMALNNKLAGLKEEIITLTKEKNESISRKARRTAESLGIEIPSN

SEQ ID NO: 36109 - DNA, 480 bp, Unknown
  Obtained from environmental sample
  misc_feature (1)..(480): n is a, c, g, or t
atggtcgaaaaaaaaattaaagaaataatcgataaatgtcttaaagaaaccccgtgcgaagtccgcatcctctatgacgaaccaatgaaagatcacactacttttaaagttggaggtcccgcggactgcctgttacgtcccgaaggcgatggctttgtttctttttgcgtgaatattttaaatagttgtcgcgcggaaaaaacacctgtgtttgttcttggcggcggcgcgaatatagtagtctccgacaaggggatacggggcatagtattggatatgtgtaattggaaagacgaaaacgcccctgtaataaatactgaaaaatacgaaataaaatttaaaagcggaacaagcatagacgaagcggttgatacggcttgcgccgccggtttacacggacttgaattttttgccggaatgccgggcacggtaggcggcgcggtctggatgaacgcccgcntgtacctcgtgtcgatctga

SEQ ID NO: 36110 - protein, 159 aa, Unknown
  Obtained from environmental sample
  misc_feature (1)..(159): Xaa is any amino acid
MVEKKIKEIIDKCLKETPCEVRILYDEPMKDHTTFKVGGPADCLLRPEGDGFVSFCVNILNSCRAEKTPVFVLGGGANIVVSDKGIRGIVLDMCNWKDENAPVINTEKYEIKFKSGTSIDEAVDTACAAGLHGLEFFAGMPGTVGGAVWMNARXYLVSI

SEQ ID NO: 36111 - DNA, 354 bp, Unknown
  Obtained from environmental sample
  misc_feature (1)..(354): n is a, c, g, or t
gtgcgggtctacatccccctgcacaaaacagccaggatggtcattgatgacaatgttcagcatgaacagggcgagttaatttttccctggctgaatatcattaaaaacaacaggaacctttatcttaccaaatgggcggatcgcgccaatatcggcaagtcaataggatggcacacggcgcggcacacattcgccgttaaatcgctggaatccggcgcggatatctatacggtttccaagctgcttgggcatacggacataaccgccactcaggtttatgccaaggcaacagacaaaatgaagcgggaggccgtaaacgcgcttcccgaaatatttgtggggtctaacggatag

SEQ ID NO: 36112 - protein, 117 aa, Unknown
  Obtained from environmental sample
  misc_feature (1)..(117): Xaa is any amino acid
MRVYIPLHKTARMVIDDNVQHEQGELIFPWLNIIKNNRNLYLTKWADRANIGKSIGWHTARHTFAVKSLESGADIYTVSKLLGHTDITATQVYAKATDKMKREAVNALPEIFVGSNG

SEQ ID NO: 36113 - DNA, 1266 bp, Unknown
  Obtained from environmental sample
  misc_feature (1)..(1266): n is a, c, g, or t
atgaaattcttttttgaaacttacggctgccagatgaatattgccgagtccgcggccctggcattggcgggacgggagaaaggctggcttgaagcggcaagctttaaagaagcggatctggtgctgcttaatacctgttcggtcagggcaaccgcggaacagcgtgtttttggcaggcttgcacagtacaaggcgctaaaaaaaaagcggccttttaccctggttgtcgcgggctgtatggcggaacggctgggtgaaaaacttaaaaaagactatgctgtggattacgttatgggaacaggtgcccgttccattttcccgctcatcctggaatctgtcgaanagggcgccgcttttattgaaagctcagaaaagccggttttctccttttcttcttttcatcacgataactccgattatcagaattcctctccttttcgcagtttcgtcccaatcatgcacggatgcaacaatttttgctcttactgcattgttccgtatgtgcggggcagggaagtctcccgcgacccgcaaaatatcgcgcgggagatccgtcttgtgggcgagaggggagtgcgcgaaattaccctcttgggacagaatgtaaacaattaccattgggaaaatatcgactttgccgccctgttaaaacttgccgccgacgaagccgaaaaaagcggggtaaaatggatacgctttctttccgctaatccgggaaatttctcccgcgatacaatagaagttttggcttccaataaagtcttttgccgccatttgcatctgcccgttcagcatggttcaaacagcgtattaaaagcgatgaaccgcggctatacggcgcagagttttctggaactggtaaaggaaatccgctccgcgatgccgggaattaccctctccacggacatacttgtcggtttccccggcgaaaccgaggaagatgtggagcagacactgcatttaatggaagaaatcaagtttctttattcgtatatgtaccattttaacctccgcgagggtacaaaagcctttgatttgggcggcagaatagacgaaaaagtcaaaaaagagaggcttggaagggtgattgccctgcaaaaaaagcacaccgcccaactgttaaaagccagaatcggcagtacggaaactgtttttattgaggggatctcacgaaaaaatgccgatgaattaataacaaggactgaaaaagacgagatggctgttgttccccgtcataaatcgatgataggctctttgggcaaatag

SEQ ID NO: 36114 - protein, 421 aa, Unknown
  Obtained from environmental sample
  DOMAIN (150)...(322): Radical SAM superfamily
  misc_feature (1)..(421): Xaa is any amino acid
MKFFFETYGCQMNIAESAALALAGREKGWLEAASFKEADLVLLNTCSVRATAEQRVFGRLAQYKALKKKRPFTLVVAGCMAERLGEKLKKDYAVDYVMGTGARSIFPLILESVEXGAAFIESSEKPVFSFSSFHHDNSDYQNSSPFRSFVPIMHGCNNFCSYCIVPYVRGREVSRDPQNIAREIRLVGERGVREITLLGQNVNNYHWENIDFAALLKLAADEAEKSGVKWIRFLSANPGNFSRDTIEVLASNKVFCRHLHLPVQHGSNSVLKAMNRGYTAQSFLELVKEIRSAMPGITLSTDILVGFPGETEEDVEQTLHLMEEIKFLYSYMYHFNLREGTKAFDLGGRIDEKVKKERLGRVIALQKKHTAQLLKARIGSTETVFIEGISRKNADELITRTEKDEMAVVPRHKSMIGSLGK

SEQ ID NO: 36115 - DNA, 837 bp, Unknown
  Obtained from environmental sample
  misc_feature (1)..(837): n is a, c, g, or t
atgatgcttgaattcatgactgggaaacactgcccctatatatttacaagggcagtcgggcgcttaccgttacgggaatgcctgcgccgccggaacgcttttaattgtcggattgacggcgggactttttttgtccgagtggggaggaaaaaaatatggttagcaaaatatatgtcaattgaagttagaggcgtaaaaaaatcatatggaaacttttcggtctccctggacttttcagtgaataaaggagaaacgctggcgttggtggggccttccggctcgggcaaaacaacggcgctaaatcttatttcaggcatttccactcccgaagaagggaaaataatcgttgacggcgaggatatcagcaaccttccggtatatcgaagaaatatctcggtagtttttcaggatattgctttgtttccgcatttggatgtaggcggaaatattgcctacggcctttttgtccgcaaaatcaggcgaaaagagcgccaaaggatcgttgaagaaacattgaacaccgtccatttatcaggctatgcgcggcggcgcgtcgacaccctttcagggggcgaaaaacagagggtcgccattgcccgcgctcttgcttcgatgccaagggcgcttttgcttgacgaaccgttttccagcctcgacgcccctctacgcaaagagatgcgccgggaatttcttgaaatacgttcccgctcggacgcgccttgcgtgtttgtaacacatgatcgcgaagaggccgcgatagtagccgaccgcgttgcccgatgtgtactgcatattcactacatcgttggtatcaagagttttttctatttcgtttaa

SEQ ID NO: 36116 - protein, 278 aa, Unknown
  Obtained from environmental sample
  DOMAIN (83)...(266): ABC transporter
  misc_feature (1)..(278): Xaa is any amino acid
MMLEFMTGKHCPYIFTRAVGRLPLRECLRRRNAFNCRIDGGTFFVRVGRKKIWLAKYMSIEVRGVKKSYGNFSVSLDFSVNKGETLALVGPSGSGKTTALNLISGISTPEEGKIIVDGEDISNLPVYRRNISVVFQDIALFPHLDVGGNIAYGLFVRKIRRKERQRIVEETLNTVHLSGYARRRVDTLSGGEKQRVAIARALASMPRALLLDEPFSSLDAPLRKEMRREFLEIRSRSDAPCVFVTHDREEAAIVADRVARCVLHIHYIVGIKSFFYFV

SEQ ID NO: 36117 - DNA, 786 bp, Unknown
  Obtained from environmental sample
  misc_feature (1)..(786): n is a, c, g, or t
atgaacaaggaagatttagttcaaaaccttggcacaatagcccgttctggcacaaagagctttatgcagagtgtaacaggcgatgcaaaaagagatgtaaatttaatagggcaattcggcgttggtttctacagcgcatttatggttgcttcaaaggtggaagtgcattccaaaaaagcaggcgaagagcaaggctatcagtgggtatctgagggcacgggcgatttttccgtgaacgaacttccaaaagagaaaaacgggacaaaaatcaccatctacctcaaagacgatgacgattgcaaaaactttgcgcaggaatggcaaataaaaagcatagtgcgcaaatacagcgaatttgttacccaccccatttacatacactcgctggacaaagataaaaaggaaaatgttgagcgactgaacgaaaaacctgccctgtggaggcaaagcgcaaaaacaatagaggaaaagcaatacaaggaattttacgaactcgtttctcacgaggggggagagcctcttgcctggagccacaatcacgttgagggcacgcaggaatactggagcttgctttacattccatcaagagcaccttttggcgtgcgttatgcctctgagcatagccacgggttaaagctctatgttaagcgggtatttataatggacgattgcaaagagcttttgccaaactggctccgctttgcccgcggcgttatagataccgaagatttgcctttgaatgttagccgtgaaattttgcagagcaacaaaatagttggcaattaa

SEQ ID NO: 36118 - protein, 261 aa, Unknown
  Obtained from environmental sample
  misc_feature (1)..(261): Xaa is any amino acid
MNKEDLVQNLGTIARSGTKSFMQSVTGDAKRDVNLIGQFGVGFYSAFMVASKVEVHSKKAGEEQGYQWVSEGTGDFSVNELPKEKNGTKITIYLKDDDDCKNFAQEWQIKSIVRKYSEFVTHPIYIHSLDKDKKENVERLNEKPALWRQSAKTIEEKQYKEFYELVSHEGGEPLAWSHNHVEGTQEYWSLLYIPSRAPFGVRYASEHSHGLKLYVKRVFIMDDCKELLPNWLRFARGVIDTEDLPLNVSREILQSNKIVGN

SEQ ID NO: 36119 - DNA, 939 bp, Unknown
  Obtained from environmental sample
  misc_feature (1)..(939): n is a, c, g, or t
ttgccggaaggcaagacgccgggaaaaagaaaatttttagccaaaaagccggcgtataaccgcaaagaaaaagagcttgaaatggaggaaaaactcctccaaaccaaaaaaaagataacccacattgccaatcctgtgccgaaatccatagaaattatggaagttatttccgtatctgaattagcgaggaaaatgaaccttaaagcgtccgaccttatccagaaacttatgagcatgggtcagatggttacaattaaccagcagattgacgccgacaccgcgacgattctcgccgccgagttcggggcggacgtaaaaattgtcagcctttacgacgagacggtaattgaaactgaatcggacgacaacgcgataatgcttccgcgtcctcctgttgttaccgttatgggacatgtagaccacggcaaaacaaagttgttagacgccatccgcaagtccgacgtagtgtcgggcgaattcggcggcattacccagcatataggcgcttacatggtggaaaccccccacggcgcgattacatttttggatacgcccggccacgaagcgtttacccgcatgagggcgcgcggagcgcagataacggacatagtcgtccttgttgtcgccgcggatgacggcgttatgcctcagacagttgaggccattaaccacgcgaaagaggcggacgtgcctattatagttgccgtaaataaaattgacaaacctgaagcaaatccggacagggtaaaaagccagctttccgacttggggcttatgccggaagactggggcgggcagaccatgtttgtggaactttccgcgcttcaaaaaacaggtattgacaaactgatagacaccatccttttacaatctgaaattctggacttaaaagccaatttccagcgcagcgcggaaggaaaaattctgaatcgaaggtga

SEQ ID NO: 36120 - protein, 312 aa, Unknown
  Obtained from environmental sample
  DOMAIN (131)...(240): GTPase of unknown function
  misc_feature (1)..(312): Xaa is any amino acid
MPEGKTPGKRKFLAKKPAYNRKEKELEMEEKLLQTKKKITHIANPVPKSIEIMEVISVSELARKMNLKASDLIQKLMSMGQMVTINQQIDADTATILAAEFGADVKIVSLYDETVIETESDDNAIMLPRPPVVTVMGHVDHGKTKLLDAIRKSDVVSGEFGGITQHIGAYMVETPHGAITFLDTPGHEAFTRMRARGAQITDIVVLVVAADDGVMPQTVEAINHAKEADVPIIVAVNKIDKPEANPDRVKSQLSDLGLMPEDWGGQTMFVELSALQKTGIDKLIDTILLQSEILDLKANFQRSAEGKILNRR

SEQ ID NO: 36121 - DNA, 390 bp, Unknown
  Obtained from environmental sample
  misc_feature (1)..(390): n is a, c, g, or t
ttgaagcgcggaaagttccacaaacatggtctgcccgccccagtcttccggcataagccccaagtcggaaagctggctttttaccctgtccggatttgcttcaggtttgtcaattttatttacggcaactataataggcacgtccgcctctttcgcgtggttaatggcctcaactgtctgaggcataacgccgtcatccgcggcgacaacaaggacgactatgtccgttatctgcgctccgcgcgccctcatgcgggtaaacgcttcgtggccgggcgtatccaaaaatgtaatcgcgccgtggggggtttccaccatgtaagcgcctatatgctgggtaatgccgccgaattcgcccgacactacgtcggacttgcggatggcgtctaa

SEQ ID NO: 36122 - protein, 129 aa, Unknown
  Obtained from environmental sample
  misc_feature (1)..(129): Xaa is any amino acid
MKRGKFHKHGLPAPVFRHKPQVGKLAFYPVRICFRFVNFIYGNYNRHVRLFRVVNGLNCLRHNAVIRGDNKDDYVRYLRSARPHAGKRFVAGRIQKCNRAVGGFHHVSAYMLGNAAEFARHYVGLADGV

SEQ ID NO: 36123 - DNA, 882 bp, Unknown
  Obtained from environmental sample
  misc_feature (1)..(882): n is a, c, g, or t
atgacggcagatcggctgcttgaaacacttaattatagcgacattgacttttttagcggtgtaccagattcactactaaagccgttttgcgatgcagtatattcaaaatactccggggatcctacacaccatttcattacgcataacgaaggtggcgcggtcggtttcgcggcagggtatcacctcgcgaccggaaaagttccgtgtatatacctgcaaaacagcggcatcggcaatatcgcaaatccggttgtgtcactgaccagtccgcttgtgtatggaattccgattttttacatagtaggctggcgcggacagcctggtattgcggatgagccgcaacacgcgtttcaggggattgttacgggggcacagcttgaaacgcttggcattgccgtatttaagctaactgaaatgacaaaagaagacgagctaatccatgcaatgaacaattttaagcatttatttgctgagggcaaaagcgcggcgctactcatatctaaaagcgcgttaagcgatggcacctctcaaaagtactccaataactgggcgctctcaagagaagcggcaattgcgcgtatagctgaaatggcgcaagatgcgatcattgtttcttcgaccggaaaaatctcaagggaactgttcgaaacacgcaaacgcttaaatttgaaacacgatcacgattttttgacggttggctccatggggcacgattcaatgattgctttaaatatagcgctgcaacagcctcataggcaggtttggagcattcagggagacngggctttcctcatgcacatgggcgcggcagccatgatcgggagtatagcgccgcccaatctccggcacatgtgctcaacaacgccgcgcatgaaaacgtag

SEQ ID NO: 36124 - protein, 293 aa, Unknown
  Obtained from environmental sample
  misc_feature (1)..(293): Xaa is any amino acid
MTADRLLETLNYSDIDFFSGVPDSLLKPFCDAVYSKYSGDPTHHFITHNEGGAVGFAAGYHLATGKVPCIYLQNSGIGNIANPVVSLTSPLVYGIPIFYIVGWRGQPGIADEPQHAFQGIVTGAQLETLGIAVFKLTEMTKEDELIHAMNNFKHLFAEGKSAALLISKSALSDGTSQKYSNNWALSREAAIARIAEMAQDAIIVSSTGKISRELFETRKRLNLKHDHDFLTVGSMGHDSMIALNIALQQPHRQVWSIQGDXAFLMHMGAAAMIGSIAPPNLRHMCSTTPRMKT

SEQ ID NO: 36125 - DNA, 396 bp, Unknown
  Obtained from environmental sample
  misc_feature (1)..(396): n is a, c, g, or t
atgataatagcccgtattgagagcttaatccttgaacagggacaagacgacgcgattcgcagggcgcttgcctatgttgactcgggggcggatggaatcctgatccatagtcgtaaaaatacncctgacgaggtttttgagttttgccataaatttcgcgaataccatcctgccgtaccgcttgccattgtaccttcaacatatgcacaggtgagagaagacgagttggccgcttgcggagtgaacatcgtaatttacgcgaaccaacttttgcgaagcggttttcgcgcaatgcagaacacggctgaaattattctgcagaaccatcgggcaaaagaggcagatgaactctgccttccgataaacgaaattatccggctcataccggaatcatag

SEQ ID NO: 36126 - protein, 131 aa, Unknown
  Obtained from environmental sample
  misc_feature (1)..(131): Xaa is any amino acid
MIIARIESLILEQGQDDAIRRALAYVDSGADGILIHSRKNTPDEVFEFCHKFREYHPAVPLAIVPSTYAQVREDELAACGVNIVIYANQLLRSGFRAMQNTAEIILQNHRAKEADELCLPINEIIRLIPES

SEQ ID NO: 36127 - DNA, 774 bp, Unknown
  Obtained from environmental sample
  misc_feature (1)..(774): n is a, c, g, or t
atggatacaaacttgccctttccggcgatatacacgtcccggcctcgcagatggatattatataaacaaactgtctccaataaaaatgatgcggcgataaaaaacgcgccggaagatggtacagccggtattataggcgaacgcgcagccagagaattgcgttccggtcagatagttaatttaggcatcggttttcctgaaatggtaggaatatacgcttcaaaaatgggcattttaaaagatattaccattactgttgaagcgggcggcataggtggtcttccggcccccggcttcgcgttcggcgcgacaatcggcgcggatataattaccgatatggcgactcaattcgatttttatgacgggggcggccttgacatttgctttttggggggattggaagccgacaaagaaggcaatgtgaatgcccacaggctggaaggaagttacgccgggatcggcggcttcgccaacatcacccacgccacaaaaaccatagtattctgtatgagttttaccaccaaagggcttcttacagcaaacgaaaacggcaggatacagataaagcaggaaggctcaataaataaatttaaaaaagccgtttccgcgattagtttttccggtaaaaacgccatcaggcgcggacagagggtgttgtatgttaccgaacgatgcgtattcgagttgaccgaaaaaggactcaagttgaaagaggtataccccggaattgacgaaacgcgccaaattcgcaatatgcttgattttgagtgttga

SEQ ID NO: 36128 - protein, 257 aa, Unknown
  Obtained from environmental sample
  DOMAIN (42)...(251): Coenzyme A transferase
  misc_feature (1)..(257): Xaa is any amino acid
MDTNLPFPAIYTSRPRRWILYKQTVSNKNDAAIKNAPEDGTAGIIGERAARELRSGQIVNLGIGFPEMVGIYASKMGILKDITITVEAGGIGGLPAPGFAFGATIGADIITDMATQFDFYDGGGLDICFLGGLEADKEGNVNAHRLEGSYAGIGGFANITHATKTIVFCMSFTTKGLLTANENGRIQIKQEGSINKFKKAVSAISFSGKNAIRRGQRVLYVTERCVFELTEKGLKLKEVYPGIDETRQIRNMLDFEC

SEQ ID NO: 36129 - DNA, 735 bp, Unknown
  Obtained from environmental sample
  misc_feature (1)..(735): n is a, c, g, or t
gtgcacatgctcgtggaggagcagcgccgggagctcgaaaactacagccgcaacctgcaagggatggtcgaggagaagaccaagacggtgctggacctgcaaaacgccatactgcggacggtggcggagcttgtggagtgccgcgacgacacgaccggcgggcacatcgaacgtacgcagagctacctgcagatactcgtggacgccctctggacggacgagaagtaccgggacgaggtgtcgtcgtggaacatagacttcctgttgcagtcgtcccagttgcacgacgtgggcaagatcggcataaaggacagcatcctccagaaaccgtccaagcttaccccggaggagttcgaggagatgaagacgcacaccactttcggcataaaggtcatagagaagatacaggaaaacacctctgaggcgactttccttgagtacgctaagatattcgcgggcgcgcaccacgagaagtgggacgggtccgggtatccgcgcgggcttgtcggtgataccattccgctgcaggggcggctcatggccatagccgacgtctacgacgcgttgatttcggagcgcccatacaagaaggcgttcacgcacgaggaggccgttaaaatcatatcggaggggagcgggtcgcactttgatccgcatttggtcgatgtatttatgaagcacgagcacgagttcaggctgatcgctatgagcatgagcggaaaggccgggcaataa

SEQ ID NO: 36130 - protein, 244 aa, Unknown
  Obtained from environmental sample
  DOMAIN (52)...(189): HD domain
  misc_feature (1)..(244): Xaa is any amino acid
MHMLVEEQRRELENYSRNLQGMVEEKTKTVLDLQNAILRTVAELVECRDDTTGGHIERTQSYLQILVDALWTDEKYRDEVSSWNIDFLLQSSQLHDVGKIGIKDSILQKPSKLTPEEFEEMKTHTTFGIKVIEKIQENTSEATFLEYAKIFAGAHHEKWDGSGYPRGLVGDTIPLQGRLMAIADVYDALISERPYKKAFTHEEAVKIISEGSGSHFDPHLVDVFMKHEHEFRLIAMSMSGKAGQ

SEQ ID NO: 36131 - DNA, 501 bp, Unknown
  Obtained from environmental sample
  misc_feature (1)..(501): n is a, c, g, or t
ttgccgggatgcgccgcgccgcgcgttctgcccgcacctgcagggtcatcctttgcagtcgccttttctccgcagagaacgagcctggaactggtgctgtcctgcatccgggaggcggaacgaaaaattctggtcgcggcctatgcctttaccagcaagcccatatccacggccttgctggaggcgcacaagcgcggcattgaagtcttggtcgtggcggatcagaaaagcaacggcggccggtacacggcggtgagcttccttgccgaccacggcgtaccggtgcgattgaacgggcgatacgccatccatcatcataaattcatggtggtggacaaccggcatgtgcaaacgggcagcttcaactacagcgcagccgccgtggacaaaaacgcggaaaatgttctggtcgtgcggaatgtgccggaactggcggcgcaatatgcggcggaatggcagcgcttatgggctgaaggcgttgacgtgcatgcgaaccattaa

SEQ ID NO: 36132 - protein, 166 aa, Unknown
  Obtained from environmental sample
  SIGNAL (1)...(19)
  misc_feature (1)..(166): Xaa is any amino acid
MPGCAAPRVLPAPAGSSFAVAFSPQRTSLELVLSCIREAERKILVAAYAFTSKPISTALLEAHKRGIEVLVVADQKSNGGRYTAVSFLADHGVPVRLNGRYAIHHHKFMVVDNRHVQTGSFNYSAAAVDKNAENVLVVRNVPELAAQYAAEWQRLWAEGVDVHANH

SEQ ID NO: 36133 - DNA, 786 bp, Unknown
  Obtained from environmental sample
  misc_feature (1)..(786): n is a, c, g, or t
atgtggttccacaagtatatcggcagggaagacctgcccatcgttgacacatggtggcagacggaaaccggcggcgcgatgattgcggccttgccctacgccaccaagctgaaacccggctccgccacgtttcccctgccgggcattgatgccgcagttctcagcggcgacggcagtgaggaggcggacggcgggcatcttgtcattcgcaagccgtggcccggcatgatgcagaacgtgttcggcaacccggcgaaatacgcgtcctatttcgagcgtttcggcgcgtaccagtccggcgatggcgcgcggatagacgaggaaggatattattggattctggggcgcattgacgacagcatcaatgtttccgggcaccgtctgtccaccgcggaaatcgaatccgcgctggtggcgcatccccaagtcgccgaggccgccgtggcgccgatgccgcataatttgaagggtgaggccatctacgcctatgtggtgctggtggaggacgtgccttggtcggacgcgttgcgcaagacattgcgtgatgccgtgcgcaaggagatcggaccgctcgccacgccggaagtcatccaattcgtccatgccctgccgaaaacgctgtccggaaaaattatgcgccgcatgttgcgcaagattgccgccggcgctttcgacgaactgggagatgtcaccacgcttgccaagcccaaggtgattgacgggattattgagggctttaccaacctcaaggccgggcgtcccgaacaggcaaacgcggaaaaataa

SEQ ID NO: 36134 - protein, 261 aa, Unknown
  Obtained from environmental sample
  misc_feature (1)..(261): Xaa is any amino acid
MWFHKYIGREDLPIVDTWWQTETGGAMIAALPYATKLKPGSATFPLPGIDAAVLSGDGSEEADGGHLVIRKPWPGMMQNVFGNPAKYASYFERFGAYQSGDGARIDEEGYYWILGRIDDSINVSGHRLSTAEIESALVAHPQVAEAAVAPMPHNLKGEAIYAYVVLVEDVPWSDALRKTLRDAVRKEIGPLATPEVIQFVHALPKTLSGKIMRRMLRKIAAGAFDELGDVTTLAKPKVIDGIIEGFTNLKAGRPEQANAEK

SEQ ID NO: 36135 - DNA, 375 bp, Unknown
  Obtained from environmental sample
  misc_feature (1)..(375): n is a, c, g, or t
gtgggcttttccacatggattggcgactttgccgatccctatacctttctgcaaatgtggcgccgggattccaacctgaacgactccggctacaatgacgatgattatgaagcgttaatggaaaaatccatgtttgaagaaggcgaagcccggtgggcgattcttgccgaagcggagcagctgctccttgatcgcggttccgtgcttcccatttccttcagccaggcgattaatattgtagacacgggcgaactggaaggctggttccccaacgccctggacatccatcccttcaaatatctttcattcaaggcattccgccccctgccgggcgtggtcatgcataccaaagagcaaatagcaaggagcaaatag

SEQ ID NO: 36136 - protein, 124 aa, Unknown
  Obtained from environmental sample
  misc_feature (1)..(124): Xaa is any amino acid
MGFSTWIGDFADPYTFLQMWRRDSNLNDSGYNDDDYEALMEKSMFEEGEARWAILAEAEQLLLDRGSVLPISFSQAINIVDTGELEGWFPNALDIHPFKYLSFKAFRPLPGVVMHTKEQIARSK

SEQ ID NO: 36137 - DNA, 1233 bp, Unknown
  Obtained from environmental sample
  misc_feature (1)..(1233): n is a, c, g, or t
ttgcgggatgacaccgccatccttgagttcgccatttgggattcttccgtagagtttattcctccagcgacttccaccagccaaagcacctacaaagaccggccttcgataaattcctactgcctcgttattacgcggaacgggcttacgcccgtcatcttggacaacaacttcgactacgccggaaccgtaaaaacattggtttcaaaaatctatcataagaattcgcgtggcggtatacaactgcttcccgaacaggattttgaacaggaacgcaacgcgctgtacaacgctctcatcaaaccggttcttgagcgcggccttataccagccggggtaaaacgcttgcttatcgtgccggacggggagcttgccttcctgcccttcgacatactgcgtgaagacccgaacagccctgaattgggcatcagttaccgactgtcgatgtcgccctcggtgtcggtcagcattatggcggcgcagcagggaaacgccggcgccgggaatgtcctcgccttcggcggcgcctggtacagcaaggggaaaagcgcggcggaaagaacccgcgaccttatggtgcttgcgccggaagaaaccggaaagcccgcgcagagttttgatgatgccggggagtattaccagagcaggcttgcctgggctgaccttccgggcacggaaaccgaagtacgggcaatagaaaagatcgcaccgcggagcacagtggttttgggcagggaaacgagcgaaaagaaggtaaaagaaatgtcggctaacggggcgcttgaacgtatcccggtgctgcactttgcctgccacgggtactttaacagtacgcacccggaactctcggccatagtattctcggaaagttcagggcttctgccggaaagccctgaagacggctaccttacgtgggcgagggcggcgctgttgaggctgaacgcccgcgcggtaatactgtcggcctgcaatacggggaagggcggcttaaagcgcggggacggcatggtagggctggtgcgctcgttattggtaagtggaggccgcagcgcgggggtaagcctgtggccgataagcgatgaagtgacggttgaatttatggaaggagtataccggcggacgctgaaggaaggaaagagtttccgcgaggcgtattacgaggtaaagcaggagttccgtcgcggcaagtggggacatcctttttatcatgcggcttttgtgttgtatgagtaa

SEQ ID NO: 36138 - protein, 410 aa, Unknown
  Obtained from environmental sample
  misc_feature (1)..(410): Xaa is any amino acid
MRDDTAILEFAIWDSSVEFIPPATSTSQSTYKDRPSINSYCLVITRNGLTPVILDNNFDYAGTVKTLVSKIYHKNSRGGIQLLPEQDFEQERNALYNALIKPVLERGLIPAGVKRLLIVPDGELAFLPFDILREDPNSPELGISYRLSMSPSVSVSIMAAQQGNAGAGNVLAFGGAWYSKGKSAAERTRDLMVLAPEETGKPAQSFDDAGEYYQSRLAWADLPGTETEVRAIEKIAPRSTVVLGRETSEKKVKEMSANGALERIPVLHFACHGYFNSTHPELSAIVFSESSGLLPESPEDGYLTWARAALLRLNARAVILSACNTGKGGLKRGDGMVGLVRSLLVSGGRSAGVSLWPISDEVTVEFMEGVYRRTLKEGKSFREAYYEVKQEFRRGKWGHPFYHAAFVLYE

SEQ ID NO: 36139 - DNA, 327 bp, Unknown
  Obtained from environmental sample
  misc_feature (1)..(327): n is a, c, g, or t
atgaaatacataacttgcctggcgcttgccataaccttcatttttagctgcgccagtctaaagaccggaaatgcggatttttatgaaggatccgcaatgggataccgtgggataatccatgtgctggttggaatgaaaaacggaactattacggagattaccgtaatagaatccagtgaaaatccagccattggaggggctgccattgaggaattgacagaccttgcgctgatgtacaatacaacggagctcgacgcggtttccggggcaacggaaacaagcaagggcttccttgaagcggtcgaaaatgctatatttagcccatga

SEQ ID NO: 36140 - protein, 108 aa, Unknown
  Obtained from environmental sample
  SIGNAL (1)...(21)
  DOMAIN (34)...(108): FMN-binding domain
  misc_feature (1)..(108): Xaa is any amino acid
MKYITCLALAITFIFSCASLKTGNADFYEGSAMGYRGIIHVLVGMKNGTITEITVIESSENPAIGGAAIEELTDLALMYNTTELDAVSGATETSKGFLEAVENAIFSP

SEQ ID NO: 36141 - DNA, 522 bp, Unknown
  Obtained from environmental sample
  misc_feature (1)..(522): n is a, c, g, or t
atggcccgtgaaatcgacgccctgcgcccgttatgtgattttttaatcgtttccatgcactggggggatgaatacgtcatggaacctgtcccatatcagaccggtcttgccgcgtttctcgcggagcataatgtggacctcgttgtcggtcatcacccccacgtcttgcagcgttttgaattcctgccccgccccgacgggaaaaacaccctctgtttttattccctgggcaatttcgtttctcatcaaagggagaaagagagaatactgggcgctttgttgtttgtaacattcgtaaaagagggcgatgagctttccattttcgatccggggcttattcccgttatatgccactatgatcagaacttctcaaatacaaaagtgtatcccctgtactcatacaatgaagatctgctgagcaagcaccgtattcgcgttaccgacaaaaaactgacaatcgattacttccattccgttgtgaacgggctaaaggcaaaggtatttacgcgggaacctttttaa

SEQ ID NO: 36142 - protein, 173 aa, Unknown
  Obtained from environmental sample
  misc_feature (1)..(173): Xaa is any amino acid
MAREIDALRPLCDFLIVSMHWGDEYVMEPVPYQTGLAAFLAEHNVDLVVGHHPHVLQRFEFLPRPDGKNTLCFYSLGNFVSHQREKERILGALLFVTFVKEGDELSIFDPGLIPVICHYDQNFSNTKVYPLYSYNEDLLSKHRIRVTDKKLTIDYFHSVVNGLKAKVFTREPF

SEQ ID NO: 36143 - DNA, 306 bp, Unknown
  Obtained from environmental sample
  misc_feature (1)..(306): n is a, c, g, or t
gtgtcattatctgttatggaagcccgcagcatttttcgcagcatttcgccactcgatcaccgttattccatttccgaagcgccggtttttgaatcccttgtcccgtggatttccgaggaagcgtctatcgccgcctgcgtaagggcggagattgccctgaccgcggcccaccttgccgcgcggggcaaacttaccccggcgatcagggcggaactggaaaaagccgccagagcggttgattcggcagaggtctacccggaggaaaaaaaacccggcacaatatccgggcgctggttatgtgcttaa

SEQ ID NO: 36144 - protein, 101 aa, Unknown
  Obtained from environmental sample
  misc_feature (1)..(101): Xaa is any amino acid
MSLSVMEARSIFRSISPLDHRYSISEAPVFESLVPWISEEASIAACVRAEIALTAAHLAARGKLTPAIRAELEKAARAVDSAEVYPEEKKPGTISGRWLCA

SEQ ID NO: 36145 - DNA, 1014 bp, Unknown
  Obtained from environmental sample
  misc_feature (1)..(1014): n is a, c, g, or t
atgatcaaatcggccgagtacaggcggaataaagtagatggatcaacaaaagtgtccaacgccgcaaatcacacgctttacgcgcgctggacaggcaacagtgtaacggttaccttccataggaacggcgggacttccgcttcaatcccggcattatctaccgtttacaacagcagaataactttacccacgcctcccaccaggccggactatacttttgatagctggaataccaaggctgacggcaccgggacggcttttaactcggccacgcccgttacagcgaatatcgaagtgcacgccaagtggaaggcggttataaagtccgtaacgattaaatacgacgcctcaggcggcacgcccgtcccagcaagcaagacgctaaacaccggctcctcctaccagctaccatctgtaaccaaacccggatacaccttgtcgggctggtttaccgcgcctaatggcgggagcaaaatagagccgtcaagtaaagtgacagaccattgcacgctttacgcacgctggactgtcaaaaacataagggtttcctttaacgccgcaggcggcacgcccgccccgccgttcagggatataccgtttggttcagcctatggcgcgctgccaaatgtttccagagacaaattcacctttggcggctggtttaattcacgcggggagcaagtaggtaccggtacagccgtgactgacccgaacaaccacacgctttccgcgcgctggactgccattcctcaggcgcctgctgctcctgctccgaaacccgctcccgctccgacagctaaatgtgtcataaccttccataggaatggcgcgccatgtaacgcgatcccgcaaataacagccgcttgcaacagcagaatatctttgccctcgcctcccgcctggccgggtcattcttttgccggttggaatactaatgataaaggaagcggcagcgcttttacaggaagcgtacccaattcatcgaccttcgcggtgtgggccgtgtggaagtaa

SEQ ID NO: 36146 - protein, 337 aa, Unknown
  Obtained from environmental sample
  misc_feature (1)..(337): Xaa is any amino acid
MIKSAEYRRNKVDGSTKVSNAANHTLYARWTGNSVTVTFHRNGGTSASIPALSTVYNSRITLPTPPTRPDYTFDSWNTKADGTGTAFNSATPVTANIEVHAKWKAVIKSVTIKYDASGGTPVPASKTLNTGSSYQLPSVTKPGYTLSGWFTAPNGGSKIEPSSKVTDHCTLYARWTVKNIRVSFNAAGGTPAPPFRDIPFGSAYGALPNVSRDKFTFGGWFNSRGEQVGTGTAVTDPNNHTLSARWTAIPQAPAAPAPKPAPAPTAKCVITFHRNGAPCNAIPQITAACNSRISLPSPPAWPGHSFAGWNTNDKGSGSAFTGSVPNSSTFAVWAVWK

SEQ ID NO: 36147 - DNA, 888 bp, Unknown
  Obtained from environmental sample
  misc_feature (1)..(888): n is a, c, g, or t
atggcggcagtaaaaccggcgaaaaaaataaaaaaactggtgggcggcagaaggctcaaccgctcctacggcggcgacgcgtttattttttttattctgacggttttcggcctgttttttgcctatcccctggtatacgccattaacaacgcgttcaaacccctcaatgaaatttttctgtttccgcccaaactgtgggtacgtcagcccacgatgaataactttcaggacctgtttatcattatgagcaagtcctgggttaccttctcccgctatatttttaacacggtgctgatcaccgccgtgggaacaggcggcctgattatcgtggcatcaatgggggcttttgtcgtatcaaaatacaacttccccggcgcgaaactgttttttaacgtggtcattgtcaccctgatgttttccggttatgtcacggcgattcccaactatctggtaatgaccaaacttggctgggtggatacctacctttccgttatagtgccggccttcgctatgccgatgggtttcttcctgctcaagcaattcattgacaccattcccaatacgctccttgaagcggcaaaagttgacggcgcgaaagagtggcgtattttcctggtgataatccttcccatggtaaagcccgcgtggctgaccgtgatgatcttttccgtgcagaatctgtggaacgcccgcgcttccaactttatctattcggagcagcttaaaaccctgccttacgcgctctcgcagataatcacaggcggcatagcccgcgccggagtaggggctgcggtaacgctttttgtaatgatcgtgccgctggtaatgttcattttcgcgcagagcaacattctgcagacgatggcaagctcggggatcaaagaatga

SEQ ID NO: 36148 - protein, 295 aa, Unknown
  Obtained from environmental sample
  DOMAIN (89)...(295): Binding-protein-dependent transport system inner membrane component
  misc_feature (1)..(295): Xaa is any amino acid
MAAVKPAKKIKKLVGGRRLNRSYGGDAFIFFILTVFGLFFAYPLVYAINNAFKPLNEIFLFPPKLWVRQPTMNNFQDLFIIMSKSWVTFSRYIFNTVLITAVGTGGLIIVASMGAFVVSKYNFPGAKLFFNVVIVTLMFSGYVTAIPNYLVMTKLGWVDTYLSVIVPAFAMPMGFFLLKQFIDTIPNTLLEAAKVDGAKEWRIFLVIILPMVKPAWLTVMIFSVQNLWNARASNFIYSEQLKTLPYALSQIITGGIARAGVGAAVTLFVMIVPLVMFIFAQSNILQTMASSGIKE

SEQ ID NO: 36149 - DNA, 996 bp, Unknown
  Obtained from environmental sample
  misc_feature (1)..(996): n is a, c, g, or t
gtgtccgaaggcgggcgcatctgcttcgtgtctggcggcaagacccgccgcgcctccgtgcataacgccctcctgcttttggaaggccataggccgtctcacgtgctgattcatgacggggcaaggccctggataaaaccggcgctgattgaaaggattgcggagggggcaatcaagtacggggccgcgattccggcgcttccgctggttgacacccccaaggagcttaaagcctccgcaggaggcgtgaagttcgtcgaaaggcacctaaggcgcgagaacctgcgcgtcgtgcaaaccccgcaggggttcgcctttcccgaaatactggcggcgcacgaaaaggccgccgaaagggaagcgaacgaaggctttgagtacacggacgacgccgaggtctggggggagttcgcgggccgggtggcggcaatcccaggcgaggcggagaacaggaagatcacctacaaggaagacatggaggcggcggcaggcggcaaggcccaggcgagcgcgcaaagaatcggcattggaagggatttgcaccgcctggccgacggcaggaagttcctgcttgggggggtggagattccctttggcaagggggaactcggccattcggacggggacgtgctggcccacgcggtgtgcgacgccgtccttggcgcggcggccctgggggacatcggcgagcttttccccgacagcgatcccgcctggaaaggcgcggactccatgctgcttttaagccgcgcatggcagcgggtaaaggcccagggctggcggctggcaaacatggactgcgttgtgtgctgtgaaaagccaaaagtgcttccccatagggacaagatacgctcttctctggcaaaagtcctcgacgccgatccagccatggtttttgtcaaaggcaagacagcagagggccttggcctaataggcagcggagatgccgtggaagcgacggctgtctgcctgcttgggaaagctgtccagcaatga

SEQ ID NO: 36150 - protein, 331 aa, Unknown
  Obtained from environmental sample
  DOMAIN (1)...(165): Uncharacterized protein family UPF0007
  misc_feature (1)..(331): Xaa is any amino acid
MSEGGRICFVSGGKTRRASVHNALLLLEGHRPSHVLIHDGARPWIKPALIERIAEGAIKYGAAIPALPLVDTPKELKASAGGVKFVERHLRRENLRVVQTPQGFAFPEILAAHEKAAEREANEGFEYTDDAEVWGEFAGRVAAIPGEAENRKITYKEDMEAAAGGKAQASAQRIGIGRDLHRLADGRKFLLGGVEIPFGKGELGHSDGDVLAHAVCDAVLGAAALGDIGELFPDSDPAWKGADSMLLLSRAWQRVKAQGWRLANMDCVVCCEKPKVLPHRDKIRSSLAKVLDADPAMVFVKGKTAEGLGLIGSGDAVEATAVCLLGKAVQQ

SEQ ID NO: 36151 - DNA, 744 bp, Unknown
  Obtained from environmental sample
  misc_feature (1)..(744): n is a, c, g, or t
gtgaacctgataagcgtggagcagttgagctaccaggagttcctgctctccgtgcccgaccctacgtgcttcaacgcgatctcgctgcgcccgctggagggcgccatagccatggaggtgaacccgcagctcgtcttccccataatagacaagatgctgggcggcccaggcgacgccataaagcacatgcggacgatgaccagcatcgagcaatccatattcgacggtgtgctcaagctggcgctggacgacctcaaggacgcctggaagggcatcgttgacctgcacttccaagtgcaggccagggagacgtcgccgcagctcatccagatagtcgcccccaacgaggtggtcatcctcatcgtcttcgaggtgaagatggggcccgtcacgggcatgatcaacctggccataccgagcataatcctagagccggtggcgaacaagttcgaccaggagatgttcaccgggtacaaaaagagcgccacgttcgaggaggccaagctgctggtgaagagcatgaagcactgcagcatggaggtgtcggccgagatacgcggcacgtccctgctgctcgccgatgtgctgcagctgcaggtcggggacatgatcacgctatccaaaaaatacgacgacttcctcgacctcaccgtggacgggattccgaggatgaaggggctggtagccatcaacccccaccagaagcgggtcttccaggtgacgaaggtggcggaggaatactga

SEQ ID NO: 36152 - protein, 247 aa, Unknown
  Obtained from environmental sample
  DOMAIN (1)...(150): Flagellar motor switch protein FliM
  misc_feature (1)..(247): Xaa is any amino acid
MNLISVEQLSYQEFLLSVPDPTCFNAISLRPLEGAIAMEVNPQLVFPIIDKMLGGPGDAIKHMRTMTSIEQSIFDGVLKLALDDLKDAWKGIVDLHFQVQARETSPQLIQIVAPNEVVILIVFEVKMGPVTGMINLAIPSIILEPVANKFDQEMFTGYKKSATFEEAKLLVKSMKHCSMEVSAEIRGTSLLLADVLQLQVGDMITLSKKYDDFLDLTVDGIPRMKGLVAINPHQKRVFQVTKVAEEY

SEQ ID NO: 36153 - DNA, 1047 bp, Unknown
  Obtained from environmental sample
  misc_feature (1)..(1047): n is a, c, g, or t
ttgccccatggaacggtttctactccggtgttcatgccggtggggacatgcggcaccgtcaaggcaataaccgttgaagaccttaaagaaataggctttgagattatactttccaatacctaccatttatacctgcgccccggcatggaggtaatggctgcggccggcggcctgcaccgctttatgagttgggacgggaacctgttaaccgattccgggggctttcaggttttttcccttgctactctgcgcaaaatagttccggaaggggtatggttccagtcacatatagacggctcccggcagtttttaagcccggaaaaagccgtggagatacagtgcgttataggcagcgacatacagatgcagcttgacgtatgcaacgggtggggggcaaattacaaggattcggaaaaggccctggctataaccactgaatggcttggtagggcgaaaaaagcgtgggaagaaaagcagggccagggttatcagggcagtcttttcagcatagtccaggggaacttttttccggatttacggaagcgcagcgtcgaggactgtatcgcggccgatacccccggcatagcgataggcgggctttccgtcggggagcctcctgaggtttttgcccagacgatggcccttaccacggccatgctgccggaacaaaaaccgcgctacgttatgggcattggaacgccggattatatattggaagcgattgaaaacggcatagatatgtttgactgcgtaacacccacaagggaggggagaaacggcagggtatataccaggcagggtcctttgagccttaaaaaaatcgaaaaccggatggattttgcgccgatagataaagagtgcggatgtaaggtttgcaggcagtacagccgcgcctatcttcgccatttgtttaagtcacgggagattctctgttcgatgctcgcgagctatcataatttgttttttcttaaacagcttgtcgttgacgcaagaaaggcgatagaggaagggcggttcgttgctttcaaaaaagagttttttatctga

SEQ ID NO: 36154 - protein, 348 aa, Unknown
  Obtained from environmental sample
  DOMAIN (107)...(348): Queuine tRNA-ribosyltransferase
  misc_feature (1)..(348): Xaa is any amino acid
MPHGTVSTPVFMPVGTCGTVKAITVEDLKEIGFEIILSNTYHLYLRPGMEVMAAAGGLHRFMSWDGNLLTDSGGFQVFSLATLRKIVPEGVWFQSHIDGSRQFLSPEKAVEIQCVIGSDIQMQLDVCNGWGANYKDSEKALAITTEWLGRAKKAWEEKQGQGYQGSLFSIVQGNFFPDLRKRSVEDCIAADTPGIAIGGLSVGEPPEVFAQTMALTTAMLPEQKPRYVMGIGTPDYILEAIENGIDMFDCVTPTREGRNGRVYTRQGPLSLKKIENRMDFAPIDKECGCKVCRQYSRAYLRHLFKSREILCSMLASYHNLFFLKQLVVDARKAIEEGRFVAFKKEFFI

SEQ ID NO: 36155 - DNA, 339 bp, Unknown
  Obtained from environmental sample
  misc_feature (1)..(339): n is a, c, g, or t
gtgggggcgaaaatgactgacgccgttaaaaatgaactcgacagaatcgtaaacacgctggttaataccgggatcgtaacaaaaatcatcctcttcggctcttacgctaaaggggaggaacgccccggcagcgatatcgatctgtgtgtcctcacacgggtatccgacaaacatcccttagacgtcacaattgatctgcgcgtaaaattaattaaagtaagagagagaccgctggacctgtttgcctacaaccaagacgacttctccgccggcgcggagtgccccggctcattccaacacaacatcgcaaagaacggcgtggtactgtatggacaatga

SEQ ID NO: 36156 - protein, 112 aa, Unknown
  Obtained from environmental sample
  DOMAIN (9)...(109): Nucleotidyltransferase domain
  misc_feature (1)..(112): Xaa is any amino acid
MGAKMTDAVKNELDRIVNTLVNTGIVTKIILFGSYAKGEERPGSDIDLCVLTRVSDKHPLDVTIDLRVKLIKVRERPLDLFAYNQDDFSAGAECPGSFQHNIAKNGVVLYGQ

SEQ ID NO: 36157 - DNA, 399 bp, Unknown
  Obtained from environmental sample
  misc_feature (1)..(399): n is a, c, g, or t
gtgttctacggcatccacaccctgctgccgctgaacacccaattaacggtactgtgcgccctgcttttcatactctcgattatcgcctccgcaatgctgatgaaacgcggcctcgcgcgcctatggctcgcctacggcgcggcgctgtgcgccctgctgataattacggtaggcacatccgccggctacaaaatctacgccctcgaaagaacacagtacgccataatactgtcggcgtcgatagacgcgaagaatcaaccgtccggcaaccaaacgcttttcaccgcccacgagggaacaaaactgcaaatcagaaagacggtgggggagtggagcttagtgagcctgtctaacggcgcgagcggttgggtgacgacgtcggcgctggggaagatatga

SEQ ID NO: 36158 - protein, 132 aa, Unknown
  Obtained from environmental sample
  misc_feature (1)..(132): Xaa is any amino acid
MFYGIHTLLPLNTQLTVLCALLFILSIIASAMLMKRGLARLWLAYGAALCALLIITVGTSAGYKIYALERTQYAIILSASIDAKNQPSGNQTLFTAHEGTKLQIRKTVGEWSLVSLSNGASGWVTTSALGKI

SEQ ID NO: 36159 - DNA, 327 bp, Unknown
  Obtained from environmental sample
  misc_feature (1)..(327): n is a, c, g, or t
atgggaagaaagggcacggaacggcgtgtttacacgaaggaattcaaagccgaggcggcagcattggccgagaaaaaagaaaaaccgataagccggatcgcagtagatctgggaatcaacgagaacatgctgcgccgatgggtgcaggcttctcgggagtcggcggaaagcggcctgcatcgaaccataggttcgccgttcccaggccacggacggccaaaggatgcagagcttgcccgcctgcggaaagagaacaaagcgctcagggaagccaatgaaatcctaaaaaaagcggcggtcatcttcgcgcaaacagacccccagtaa

SEQ ID NO: 36160 - protein, 108 aa, Unknown
  Obtained from environmental sample
  DOMAIN (8)...(95): Transposase
  misc_feature (1)..(108): Xaa is any amino acid
MGRKGTERRVYTKEFKAEAAALAEKKEKPISRIAVDLGINENMLRRWVQASRESAESGLHRTIGSPFPGHGRPKDAELARLRKENKALREANEILKKAAVIFAQTDPQ

SEQ ID NO: 36161 - DNA, 1080 bp, Unknown
  Obtained from environmental sample
  misc_feature (1)..(1080): n is a, c, g, or t
atgtcttcacagtatgggaaaaaattaaaaatatcaatctttgggcaatcgcattccccggcgattggcgtgagcgttgacggtttgccggctggaatcaaaattgatatggacgaactttgggcctttctcaaacgcagggccccggggcaaaacgatatttccacggcccgttcggaagacgatgttcctgaaattttgtcagggttggttgaaaacgttacctgcggcgcgccgctcgcgataatcatccgcaatgaagatccccgctccgccgattaccgcgaactgcgggatattccccgcccgtcccacgccgatttcgccgcgcatataaagtacggcgggtttcaggatgtggcgggcggcgggcacttttccggcaggctgaccgcgcccttatgcgttgccggcgggatatgtttgcaaatattgcgcggcctgggaatcaacgttggagcgcatatatcgcggattggcaacgcggaagatgatccgtttgaccctgttggcgtaacaaacgcggatttcgaactaattcaaaaaaacccgctgcctgtactcaagcgggaagcgggcgacgcgatgagaaaacaaattctggaagcgagggaaaaaggcgattcggtcgggggtattgtcgagtgcgcggcaatcggcctgcccgttggattaggcgatccgatgtttgacggcattgaaaaccggatcgccgggattgtcttcggcatacctggcgtgaaaggcgttgatttcggaagcggcttcgccgtcgccggacgcaggggctcgggaaacaacgacagcttttttatggacggggaaaaggtaaggacgcgcacaaacaactcaggcggcatattgggcgggataacaaacggcatgcccgtgctgttccgcgcggcgtttaagcccacgccgtccataggcatggaacaggacagcgtcagcctgtcacaggcaaaagacgcggttttgcaggtgaaaggacgccatgatccgtgcatagttccacgggcgctgccctgcgtggaagcggcggcggctatagcgttatacgacgcttacctggatcgataa

SEQ ID NO: 36162 - protein, 359 aa, Unknown
  Obtained from environmental sample
  DOMAIN (9)...(359): Chorismate synthase
  misc_feature (1)..(359): Xaa is any amino acid
MSSQYGKKLKISIFGQSHSPAIGVSVDGLPAGIKIDMDELWAFLKRRAPGQNDISTARSEDDVPEILSGLVENVTCGAPLAIIIRNEDPRSADYRELRDIPRPSHADFAAHIKYGGFQDVAGGGHFSGRLTAPLCVAGGICLQILRGLGINVGAHISRIGNAEDDPFDPVGVTNADFELIQKNPLPVLKREAGDAMRKQILEAREKGDSVGGIVECAAIGLPVGLGDPMFDGIENRIAGIVFGIPGVKGVDFGSGFAVAGRRGSGNNDSFFMDGEKVRTRTNNSGGILGGITNGMPVLFRAAFKPTPSIGMEQDSVSLSQAKDAVLQVKGRHDPCIVPRALPCVEAAAAIALYDAYLDR

SEQ ID NO: 36163 - DNA, 468 bp, Unknown
  Obtained from environmental sample
  misc_feature (1)..(468): n is a, c, g, or t
atgcacggatcatggcgtcctttcacctgcaaaaccgcgtcttttgcctgtgacaggctgacgctgtcctgttccatgcctatggacggcgtgggcttaaacgccgcgcggaacagcacgggcatgccgtttgttatcccgcccaatatgccgcctgagttgtttgtgcgcgtccttaccttttccccgtccataaaaaagctgtcgttgtttcccgagcccctgcgtccggcgacggcgaagccgcttccgaaatcaacgcctttcacgccaggtatgccgaagacaatcccggcgatccggttttcaatgccgtcaaacatcggatcgcctaatccaacgggcaggccgattgccgcgcactcgacaatacccccgaccgaatcgcctttttccctcgcttccagaatttgttttctcatcgcgtcgcccgcttcccgcttgagtacaggcagcgggtttttttga

SEQ ID NO: 36164 - protein, 155 aa, Unknown
  Obtained from environmental sample
  misc_feature (1)..(155): Xaa is any amino acid
MHGSWRPFTCKTASFACDRLTLSCSMPMDGVGLNAARNSTGMPFVIPPNMPPELFVRVLTFSPSIKKLSLFPEPLRPATAKPLPKSTPFTPGMPKTIPAIRFSMPSNIGSPNPTGRPIAAHSTIPPTESPFSLASRICFLIASPASRLSTGSGFF

SEQ ID NO: 36165 - DNA, 504 bp, Unknown
  Obtained from environmental sample
  misc_feature (1)..(504): n is a, c, g, or t
atgaatcatataataaagattactataataaatacatttttttgggtttttgtacattttggaatttcatttttattcatgagaatacctgaaaagatcagattgcgcgcttttaacaataaaaagaaattttttattgtttctgaaaaagagatatggttttataaaaaaatatatttgaataaatggaaagataaattaccgcaatataataaaggttttaataaacgaaatttatccgacaaaatttcaaaagagtatcttgaattatttataaatgttacttgtcaggctgaaatggtacattacataataatttcatttggatttttatcggtatttttcgcgttactgacaaaaaatccaaaatattatttcataatatttgttttgatagctgcatttattgngatttttaatttgatgttttcatttattcaacgatataatcgttttagattgaataaaatattattaacaaaatatatggaagcaaaaaaatga

SEQ ID NO: 36166 - protein, 167 aa, Unknown
  Obtained from environmental sample
  misc_feature (1)..(167): Xaa is any amino acid
MNHIIKITIINTFFWVFVHFGISFLFMRIPEKIRLRAFNNKKKFFIVSEKEIWFYKKIYLNKWKDKLPQYNKGFNKRNLSDKISKEYLELFINVTCQAEMVHYIIISFGFLSVFFALLTKNPKYYFIIFVLIAAFIXIFNLMFSFIQRYNRFRLNKILLTKYMEAKK

SEQ ID NO: 36167 - DNA, 1443 bp, Unknown
  Obtained from environmental sample
  misc_feature (1)..(1443): n is a, c, g, or t
atgtatgaccgaacttacggaacttttgaaaaacttatgttttccgtagacagaaaatctcacacagctctgcatccttcaggcagacgcgctatttttctgggcgatgtatgcgacaggggacccgccaatgttgacgtattacgtcttgtgatgaacatggccgaatccggcgcggccctctgcgtgccgggcaaccacgatgtaaaattgctccgcaaactgcgcggaagcgacgtcaagctgactcacggactggaccttaccgtaaaagaactggaacaggagcctaaagagtttattgacaaggtaacgcaatttatttacgacttggtaagtcattatgtgctggatcagggcaaacttgtagtttcccatgccggcctctgtgaaaaatttcaagggcgcagttccggcagagtccgcggattctgcttatacggggacacaacaggcgagaccgacgagttcggtcttcctgtcaggctcaactgggcacaagaatacagaggcaaagcgctggtggtttacggtcatgtcccctccgcgcaagccttaagccttaacaatacaatctgcatagacacaggctgcgtcttcggcggaaaactcagcgcctaccgttacccggaaggcgaattgatcgaagttcccgccaggcaggaatactatgccccgattaagcctctgaattacaccgccgatgccgctgacggcaatgcctgcaacgaacccaatattgccgatattctgggatcgcggcgtattcaaaccaggctgtaccgcgacattgccataagcgaagaggcaagctctttcaccctggaaataatgaaccgtttttcggcaaacccccgttggctcatatacctgccgcctaccatgtcccccagcggaaccagcaaactcgactccttcctggaacacccattggaagcttttgattattacaagaagcgcggagtcacaaagatcatctgcgaagaaaagcacatgggttcccgcgcggtagttgttctctgccggaacgctgaaacggctaaaacccgcttcggcatcgagggcgattctctggggatcatctatacccgcacgggccgacacttttttttagaagaaaaagcccatgagcaggcgatcctcctccggctcaaagccgccctggacaagtccggtttttgggaaaccttttccacgaactgggtgtgtttggatacggagttaatgccctggtcggccaaagcccgttccctcattctggaacagtatgccccgaccggcatggcagggcaaaacggtcttgcgaaagccgttaaagcgttgcaggcggcaaaggtttcgtataacggcaaagatgttaccggtgttacgctggtctcgggaaccccgggcgatatgaaccttgccgccgtactggcggattatcaaactcgccgggaatga

SEQ ID NO: 36168 - protein, 480 aa, Unknown
  Obtained from environmental sample
  DOMAIN (5)...(183): Calcineurin-like phosphoesterase
  misc_feature (1)..(480): Xaa is any amino acid
MYDRTYGTFEKLMFSVDRKSHTALHPSGRRAIFLGDVCDRGPANVDVLRLVMNMAESGAALCVPGNHDVKLLRKLRGSDVKLTHGLDLTVKELEQEPKEFIDKVTQFIYDLVSHYVLDQGKLVVSHAGLCEKFQGRSSGRVRGFCLYGDTTGETDEFGLPVRLNWAQEYRGKALVVYGHVPSAQALSLNNTICIDTGCVFGGKLSAYRYPEGELIEVPARQEYYAPIKPLNYTADAADGNACNEPNIADILGSRRIQTRLYRDIAISEEASSFTLEIMNRFSANPRWLIYLPPTMSPSGTSKLDSFLEHPLEAFDYYKKRGVTKIICEEKHMGSRAVVVLCRNAETAKTRFGIEGDSLGIIYTRTGRHFFLEEKAHEQAILLRLKAALDKSGFWETFSTNWVCLDTELMPWSAKARSLILEQYAPTGMAGQNGLAKAVKALQAAKVSYNGKDVTGVTLVSGTPGDMNLAAVLADYQTRRE

SEQ ID NO: 36169 - DNA, 588 bp, Unknown
  Obtained from environmental sample
  misc_feature (1)..(588): n is a, c, g, or t
gtgaaaaaagcagctgaccaccctgacggaaatgtaccataccgcaacctgtttgacgcgtttgctcagggcaaacttcctttttccaacggttacattgtttcttcgtttttcagcgataaaaacgcatattcaatcttcgagattgtatcatacgcgggcgtcaaggaaatcttccttacagaaacaggacttcaatttgttacaggcgggaaaaaactctacatattggtagagaacgacacatacgacaagaaattcatggatcctgtcagcagagcgcagggcgaatccattccaaaacgctttaacgaagtggaaaccattatcgctcataaccaaacaagaataatggtagcaaaagagccgaacgagctttacggttcatttaccattcttaaacctaccagcattaacttctcgatagtgttctaccaactgcaggatgtttataaaacccttgcttcattctttgaagaagtgcttaacaggcagcgtaaagttccgcaaatggacgcgaaaaaagccgctcaattaatttcaactacagttcagaaaacaatgggacctcaaggcgagttcggttga

SEQ ID NO: 36170 - protein, 195 aa, Unknown
  Obtained from environmental sample
  misc_feature (1)..(195): Xaa is any amino acid
MKKAADHPDGNVPYRNLFDAFAQGKLPFSNGYIVSSFFSDKNAYSIFEIVSYAGVKEIFLTETGLQFVTGGKKLYILVENDTYDKKFMDPVSRAQGESIPKRFNEVETIIAHNQTRIMVAKEPNELYGSFTILKPTSINFSIVFYQLQDVYKTLASFFEEVLNRQRKVPQMDAKKAAQLISTTVQKTMGPQGEFG

SEQ ID NO: 36171 - DNA, 750 bp, Unknown
  Obtained from environmental sample
  misc_feature (1)..(750): n is a, c, g, or t
atgacaaaagcggaaattatcgcccgcatcgaaggcttgcacgaatttaacccgatgctcgggcatcgcggctgccgtatcgccgtatcttaccctgaaatttacgcaatgcaggtaaaggcgatattcaaagcggcttataaactccgctccgaaagaattgacgcgcgtcctgaaattatggttcctattgtcatgaatgtatcggaattaaaacttatcgcgtacggaaagaaaatcgaaggttcaaactatctgggtattgttgatattgaggaagctttaagaaaagaattgaaagcgaaagaagtggattacaaaatcggcaccatgatagaactgcctgcggcggctctcggcgcgggagaaattgcaaggtacggacgttttttcagtttcggtacaaacgatttaacccagacaacgttgggtatctcaagagacgattttaccgcctttatgccggactacaccctgtttgatcttatcgacggcaacccgttcagcacattggacaagagggtaaaggaacttattacaatggcgacagaccgcggacgcattacccgccccgatcttgtctgcggcttgtgcggcgagcacggcgctaatcccgccaacgtgcgtttctgcatggaagccggtttgaattatgtttcctgttccccgtattctgtcccgatagcgatactcgcggttgctcaggctgaaattgaaaagattgaaggaaaaacaaaaacaaaagaataa

SEQ ID NO: 36172 - protein, 249 aa, Unknown
  Obtained from environmental sample
  DOMAIN (1)...(238): PEP-utilising enzyme, TIM barrel domain
  misc_feature (1)..(249): Xaa is any amino acid
MTKAEIIARIEGLHEFNPMLGHRGCRIAVSYPEIYAMQVKAIFKAAYKLRSERIDARPEIMVPIVMNVSELKLIAYGKKIEGSNYLGIVDIEEALRKELKAKEVDYKIGTMIELPAAALGAGEIARYGRFFSFGTNDLTQTTLGISRDDFTAFMPDYTLFDLIDGNPFSTLDKRVKELITMATDRGRITRPDLVCGLCGEHGANPANVRFCMEAGLNYVSCSPYSVPIAILAVAQAEIEKIEGKTKTKE

SEQ ID NO: 36173 - DNA, 651 bp, Unknown
  Obtained from environmental sample
  misc_feature (1)..(651): n is a, c, g, or t
atgaaatataacaaaaaaaaagacgtatccgaccgccgcgccgccattatcgacgctttaatcaaatcaatagaaatattttcagctaataaagaagaaacgtttgaagaagtaataaccaacggaatacatccctttgcggacgctgttggtctggatcgcgtagttttttataagatggtggataccgaagaaggcaaacgtcccgggcaaatctatcgttgggataagtcggaaggcggtttgatgtctcttgatgaagaactgaaaattttacccaagcatcctattttagatgaatggttttcactattatcgaagggcgagcatatacgtttcaggaaaagcgattataccaaagatgtggcggctttgatgaaggtttatggcataatgtcaatattgatagtgcctattttcacgcgcggtgaattctggggagttatcaattttcaggagcataccgacgacagatattttgacgaagactgctccgatttgctgcatagcgcggcgcgcgtattttcaaacgcgattataaggaaggaatttaactatagcgctgaagaagcaatcaaagcgctcaagcgccgcgaaaaaatggaagccgcgctgaataaagnccgctatcatgtttctctcgcaaagtga

SEQ ID NO: 36174 - protein, 216 aa, Unknown
  Obtained from environmental sample
  DOMAIN (34)...(179): GAF domain
  misc_feature (1)..(216): Xaa is any amino acid
MKYNKKKDVSDRRAAIIDALIKSIEIFSANKEETFEEVITNGIHPFADAVGLDRVVFYKMVDTEEGKRPGQIYRWDKSEGGLMSLDEELKILPKHPILDEWFSLLSKGEHIRFRKSDYTKDVAALMKVYGIMSILIVPIFTRGEFWGVINFQEHTDDRYFDEDCSDLLHSAARVFSNAIIRKEFNYSAEEAIKALKRREKMEAALNKXRYHVSLAK

SEQ ID NO: 36175 - DNA, 1128 bp, Unknown
  Obtained from environmental sample
  misc_feature (1)..(1128): n is a, c, g, or t
atggacatctatatacagcctcttcttgaattcacaggccagcttgtctcatttgagcttatgccgtatcaggacggttttctcctgcgctttcccggcataggcaagggaaaggaaatcgcgccctttgttgacgagccggacctttttcaggtttacagcgaatataaaaaatgggggcgcatggtaggggtgcgcgtagtaggagagttaaattcaaaaatagcggacaggacctttcttgactacatcagaatctcggaagcgcatcaggcgcgggaattatcgaaaatagccgaaaaaatttacagcaaacacgacaagattaaaatgatccttattgccggcccttcaagttccggaaaaacaacaagcgcaaaaaggctttcaatagagctgatggttcttggccttaaccctattgccgtaagtctggacgattattacaggggaacggcggcgacgccgaaggacgaaaacggagagcctgactatgaatgtcttgaagctctggacgtgccttaccttaacgaacagttacaggccatgtaccgcggagatgaaattaccctgcccgtttacgattttaagtcgggagagcgcaaagcggaaggcggcaaaaaaatcaaattagacagccgtaacattctgattgtcgagggcatacacggtcttaacgacgctctcacctacagtatagaccgcggcacaaaattcaagatttacatttccgcccttacccagcttaaccttgacgaccacaacagaatccccacaagcgacaacaggcttttgcgccgcatggtgcgcgattcccaattcagagggatgcaggcggcgggcacaatgaaaatgtggcccaaagtgcaggcgggagaacgcaaacacattttcccgttccaaggctccgccgatgcaacgcttaactccgcgcttgattacgaactttcagttttaaaatactacgcagacccgctgttacgcgtaattaaacccggcatgaccgaatacgccgaggcggtaagactgcttgccttccttgaaaactttatccccattccgccacagtatgtgccgggaacgagtatcctgcgcgagtttatcggggggagcgagtttaagtattaa

SEQ ID NO: 36176 - protein, 375 aa, Unknown
  Obtained from environmental sample
  DOMAIN (111)...(317): Phosphoribulokinase / Uridine kinase family
  misc_feature (1)..(375): Xaa is any amino acid
MDIYIQPLLEFTGQLVSFELMPYQDGFLLRFPGIGKGKEIAPFVDEPDLFQVYSEYKKWGRMVGVRVVGELNSKIADRTFLDYIRISEAHQARELSKIAEKIYSKHDKIKMILIAGPSSSGKTTSAKRLSIELMVLGLNPIAVSLDDYYRGTAATPKDENGEPDYECLEALDVPYLNEQLQAMYRGDEITLPVYDFKSGERKAEGGKKIKLDSRNILIVEGIHGLNDALTYSIDRGTKFKIYISALTQLNLDDHNRIPTSDNRLLRRMVRDSQFRGMQAAGTMKMWPKVQAGERKHIFPFQGSADATLNSALDYELSVLKYYADPLLRVIKPGMTEYAEAVRLLAFLENFIPIPPQYVPGTSILREFIGGSEFKY

SEQ ID NO: 36177 - DNA, 447 bp, Unknown
  Obtained from environmental sample
  misc_feature (1)..(447): n is a, c, g, or t
gtggcaatatactctgatccgcaaaaaatgaccaaagagataaccgaacaaatcaacgcgggtattggcggcagtcttgaaggtatgaaaaaatccgttcaggatatgattaaaaatatactgaaggaacacgcccctgaacttgatgaaaagcaaagagaagaattgtgccaggcatggctgcccggagggaccggaaaaaaatctcccggcggcgggttaccgcccgacgtacttctttccatgatagaacaatttatctctttctcccgcggcgaaatgacagaatcggtagacaaaaatctccgcgaagaaatgggcgcatggaccaagcgttactggaacagctttccgcccgttgtacaacaaataattacggattatttgaaagataaaataaccgagaaagattttaagagcaggatttgtatcgctatggggctgtaa

SEQ ID NO: 36178 - protein, 148 aa, Unknown
  Obtained from environmental sample
  misc_feature (1)..(148): Xaa is any amino acid
MAIYSDPQKMTKEITEQINAGIGGSLEGMKKSVQDMIKNILKEHAPELDEKQREELCQAWLPGGTGKKSPGGGLPPDVLLSMIEQFISFSRGEMTESVDKNLREEMGAWTKRYWNSFPPVVQQIITDYLKDKITEKDFKSRICIAMGL

SEQ ID NO: 36179 - DNA, 717 bp, Unknown
  Obtained from environmental sample
  misc_feature (1)..(717): n is a, c, g, or t
atgatttccccgctgcttaactatccctgccgggccgtgttgtggtatcagggcgagtcaaacgataaaaaccccgatgaatacgcggcgcttttcatttccatgataaaagactggcgcgaaaagtacctgtctcaagtccccggtccccgactcccgactcccgactgccaactccctttcctttttgtccaactccccattttcggcgagccggaagataataacgaatcggattcatgggcaatcattagggatgcgcagctatcagccctgtccctccccatgacgggaatggccgccgcacttgagttgggcgagtggaacgatctgcacccaataaataaaaaaggcataggcctcaggcttgccctggccgtagaaaaactgttattcaaaaaacaaaacaccgcgcctgggcccttattgcgcgatattcgttgtgacaatgggcggctgttgtttacttttgacaactgcggcaaagggcttgccgccgatgagataccgtacatcagcataatcgccgacgggaaaattttccgcgtgcctgcggctgttgaaagccccgaatgtcttttggcggatatttcagggatcaataatccggaaaaggcgttgtacgcctgggcgcacaatccgcgcgaccggcagttgtacaactcggacggcctgcctgttattcctttcccgggccatgataggaacctgatgtaa

SEQ ID NO: 36180 - protein, 238 aa, Unknown
  Obtained from environmental sample
  DOMAIN (1)...(44): Domain of unknown function (DUF303)
  misc_feature (1)..(238): Xaa is any amino acid
MISPLLNYPCRAVLWYQGESNDKNPDEYAALFISMIKDWREKYLSQVPGPRLPTPDCQLPFLFVQLPIFGEPEDNNESDSWAIIRDAQLSALSLPMTGMAAALELGEWNDLHPINKKGIGLRLALAVEKLLFKKQNTAPGPLLRDIRCDNGRLLFTFDNCGKGLAADEIPYISIIADGKIFRVPAAVESPECLLADISGINNPEKALYAWAHNPRDRQLYNSDGLPVIPFPGHDRNLM

SEQ ID NO: 36181 - DNA, 636 bp, Unknown
  Obtained from environmental sample
  misc_feature (1)..(636): n is a, c, g, or t
atgggcattcacaatatcaaacaggacgccgtccgtgcgcttgggcggctttatttccgcaccagttacgggcaaaacgtactccaccattcaaaagaagtggcggtaattgccggtatgctggcggccgagataggctgtaaccgcgatcttgccaaacgcgccgcattgttacacgacattggcaagggtacggagtcaaattccgacttgaaccatgcggaaatcggtatggatatggcgcgtaaaatgggagaggatcctcggattatcaacgccatcgggagccatcacaatgacattgagccgacctgcatagaggcggtccttgtacaaatagccgacgcaatttcggcggcgcgtcccggagcgcgaaaagaaactctggacaattacatgaagcgccttgaaaaccttgaaaacatagccaccggctttaccggcgtagacaagtcctttgctattcaggcaggccgagagcttcgcataatagtgaacaatgaagcggtcaacgacgaacaaacaagagagatggcaaaggatattgccaaaaagattgagaatgatttgcattatccgggacgcattaaggtgacaatgatccgtgagacgagaattacagagtacgcaagatag

SEQ ID NO: 36182 - protein, 211 aa, Unknown
  Obtained from environmental sample
  DOMAIN (27)...(120): HD domain
  misc_feature (1)..(211): Xaa is any amino acid
MGIHNIKQDAVRALGRLYFRTSYGQNVLHHSKEVAVIAGMLAAEIGCNRDLAKRAALLHDIGKGTESNSDLNHAEIGMDMARKMGEDPRIINAIGSHHNDIEPTCIEAVLVQIADAISAARPGARKETLDNYMKRLENLENIATGFTGVDKSFAIQAGRELRIIVNNEAVNDEQTREMAKDIAKKIENDLHYPGRIKVTMIRETRITEYAR

SEQ ID NO: 36183 - DNA, 666 bp, Unknown
  Obtained from environmental sample
  misc_feature (1)..(666): n is a, c, g, or t
atgaaaaacaaccctgtccatgtgggggattccggcgttggaaaaacagccgtcacggaaggcctcgcccagcgcatagtcgcgggcaaggtgccggacacgctgaaaaacttcagcatctttgccctggacatgggagcgctgatcgcgggaaccaagtaccgaggcgactatgaggatcgggtcaagcgtgttctggaagaacttctgaaaaaagaaaaagtcattctttttattgacgagatacataccctggtcggcgcgggcgcggtatcgggcagcgcgatggacgcgtccaatatgttaaaacccgcgctaacgtcgggcaagctccgctgcatcggttccacaacccatgaagagtacggcaaattctttgacaaggaccgcgccctgtccaggcgtttccagaaaatagacatcaacgaaccccaggagtccgacgcgattaaaattcttaacgggcttaaatcaaaatacgaggaatttcacaaggtacactacagtgacgaggcgattgaagcggcggtccgcctctccgcccagttcatcaccgagcgccgcctgccggacaaggccattgacgttatcgacgaggccggcgcatttgcccgcatcagggcgggccaggccttcaaatccgaagaagccgccgagaacgcttaa

SEQ ID NO: 36184 - protein, 221 aa, Unknown
  Obtained from environmental sample
  DOMAIN (4)...(198): ATPase family associated with various cellular activities (AAA)
  misc_feature (1)..(221): Xaa is any amino acid
MKNNPVHVGDSGVGKTAVTEGLAQRIVAGKVPDTLKNFSIFALDMGALIAGTKYRGDYEDRVKRVLEELLKKEKVILFIDEIHTLVGAGAVSGSAMDASNMLKPALTSGKLRCIGSTTHEEYGKFFDKDRALSRRFQKIDINEPQESDAIKILNGLKSKYEEFHKVHYSDEAIEAAVRLSAQFITERRLPDKAIDVIDEAGAFARIRAGQAFKSEEAAENA

SEQ ID NO: 36185 - DNA, 465 bp, Unknown
  Obtained from environmental sample
  misc_feature (1)..(465): n is a, c, g, or t
atgccgcttattgtaaccgttgtttcaaaaatagcccgcatgccggaacgttctgtcggcgaaagcgaaaaagacaggctgcggctgctggaaaacaaactcaaggaaaaaatattcgggcaaaacagcgcgattgaggcggtagtaaaagccgtaaaacggtcgcgggccggattccgtaccgagggaaaaccggtggcgaatttcctctttaccgggcctacgggcgtcggcaagacggagcttgcccggcagttagccgacatcatgggcatcgccatgttccgttttgacatgagcgagtatcccgaacaattcgctgtgtcgcggcttgttggctcgtcgcccggctacctcggctncgncgtcggcggcccgcttcccgactccgtgcgcaagcagccccacgccgtggtcctcttaaaagtctctgtnaagccccttcggatntttttcacctcctaa

SEQ ID NO: 36186 - protein, 154 aa, Unknown
  Obtained from environmental sample
  DOMAIN (64)...(151): ATPase family associated with various cellular activities (AAA)
  misc_feature (1)..(154): Xaa is any amino acid
MPLIVTVVSKIARMPERSVGESEKDRLRLLENKLKEKIFGQNSAIEAVVKAVKRSRAGFRTEGKPVANFLFTGPTGVGKTELARQLADIMGIAMFRFDMSEYPEQFAVSRLVGSSPGYLGXXVGGPLPDSVRKQPHAVVLLKVSVKPLRXFFTS

SEQ ID NO: 36187 - DNA, 1257 bp, Unknown
  Obtained from environmental sample
  misc_feature (1)..(1257): n is a, c, g, or t
atgagaacggaagcgtcagcggcgttacggtacgggcaagcagcggctacgcaatccttgacgaagcggctgttgccgccgtctttgcctctgccccttttcccaggcctcattctccggcgcggattgccatacccatatcattcaaactcaggtaatttaagtttatggaggttatttatgaagaagcttacggcgttttttggttttgtctttttattgttagttttatttggaatgatctccgcctgccgaagggagatgtcccgcagggacaaggtgtccggcacagcggcctttgtttttaccgattcggccggaaggaaagttgagctgtcttcgcctatacggcgcatagctccttgcggcagtatggcgcagatgtatcttattcctctggcaccggatcttttatgcgccataacttcttcttacaaaggcgcagaggcggaatttcttccttccgcgcctgcctctcttccggctatagggcaattttacgggcaggccacgcttaatcccgaagagatcgccaaaatcaatcccgatgtcatcatcgacataggcgaaacaaaggatagcatagcaaatgatatggatgaaatttcggcaatgaccggcgtcccggtgattcatatcggcgccgatctgcgcggtactcccgaaacattccgtactctgggcagactcctgggcagggaagaaaagggtgaagaacttgccctcttttgcgaaaaaattcttttccgcgcggaacgcattatgaaccaagttgggacaggcaaaaaatccgttctctattgcatgggaaataacggacttaacgttctagcgcggaattcttaccactcggaaattattgactggatgaccgataaccgggccctggttgacaatccctcttccatgggcagcgggaatgaaagcaatatggaacagttgtttctctggaatcccgaagtaattttttttagccccggcagcgtctacgcttcggtaaaaaacgatcccgtatggaaagagttcagagcgatacgtaacggtacatactacgaggttcctcagggcccctacaactggatgggaagccctccttccatcaaccggtatttaggcgtactctggatgggtgcgatcctctacccgcaatacgtggactatgatctgtacgcggaaacagggaatactaccggctcttttacggttacgacctttcacaggaacggttcaacagccttattgcccatagccgggtaa

SEQ ID NO: 36188 - protein, 418 aa, Unknown
  Obtained from environmental sample
  DOMAIN (116)...(357): Periplasmic binding protein
  misc_feature (1)..(418): Xaa is any amino acid
MRTEASAALRYGQAAATQSLTKRLLPPSLPLPLFPGLILRRGLPYPYHSNSGNLSLWRLFMKKLTAFFGFVFLLLVLFGMISACRREMSRRDKVSGTAAFVFTDSAGRKVELSSPIRRIAPCGSMAQMYLIPLAPDLLCAITSSYKGAEAEFLPSAPASLPAIGQFYGQATLNPEEIAKINPDVIIDIGETKDSIANDMDEISAMTGVPVIHIGADLRGTPETFRTLGRLLGREEKGEELALFCEKILFRAERIMNQVGTGKKSVLYCMGNNGLNVLARNSYHSEIIDWMTDNRALVDNPSSMGSGNESNMEQLFLWNPEVIFFSPGSVYASVKNDPVWKEFRAIRNGTYYEVPQGPYNWMGSPPSINRYLGVLWMGAILYPQYVDYDLYAETGNTTGSFTVTTFHRNGSTALLPIAG

SEQ ID NO: 36189 - DNA, 939 bp, Unknown
  Obtained from environmental sample
  misc_feature (1)..(939): n is a, c, g, or t
gtgctggacggcgccatagcgattttcgacgcggtccacggcgttgagccgcaaaccgaaaccgtctggcggcaggcgcgcaggtacaatgtcccatgcataggctatgtgaacaaaatggacaggatgggggcggattttttctttgttatcgaagacgtaaaaaacaaattgaaaattaatactgttccgcttcaaattccaataggcagggaaaattcgtttgagggcgttatcgacttaatcgaaatgaaagaaatccgctggaaggaccaaggtgatgaaatggaatactgccccatcgcggcacagcgtgaggacgatgcgaaaaaatggcgcgagaaacttgtcgattcgctttcaggcgtttccgacattattaccgaaaaatacctcgccggcgaagaaattgacgataccctaatccgcgccgagcttcgcaaggcagtcattaagcgcgaacttctccccatgttcgcgggcgcgtcaaggcgcaatatgggcgtccagcccgtcattgacgctatagttgattacctgcccgcgccggacgagataaagcccgcggttgggcatcatattaaaaaagaggaagatatttcaattccctgcgatccaaagggacagcccataggccttgtttttaagattcaaaatgaccgcgaagcgggaagcctttgctatgtaagaatgtactcaggctctattccgtcgggcagcgcggtctttaatcaggggaagaaaaaacgcgaaagagcaaatagaattttacgtatgcattccaataaatcggagcctatggacagcttaagcgcgggtgatataggcgttattatcgggatgaagcttgcgcaaacgggcgacacaatagggagcgaaaggctggccgttttgcttgaaaagatgcagtttcccgagcctgtcatttcatttccatag

SEQ ID NO: 36190 - protein, 312 aa, Unknown
  Obtained from environmental sample
  DOMAIN (224)...(291): Elongation factor Tu domain 2
  misc_feature (1)..(312): Xaa is any amino acid
MLDGAIAIFDAVHGVEPQTETVWRQARRYNVPCIGYVNKMDRMGADFFFVIEDVKNKLKINTVPLQIPIGRENSFEGVIDLIEMKEIRWKDQGDEMEYCPIAAQREDDAKKWREKLVDSLSGVSDIITEKYLAGEEIDDTLIRAELRKAVIKRELLPMFAGASRRNMGVQPVIDAIVDYLPAPDEIKPAVGHHIKKEEDISIPCDPKGQPIGLVFKIQNDREAGSLCYVRMYSGSIPSGSAVFNQGKKKRERANRILRMHSNKSEPMDSLSAGDIGVIIGMKLAQTGDTIGSERLAVLLEKMQFPEPVISFP

SEQ ID NO: 36191 - DNA, 1245 bp, Unknown
  Obtained from environmental sample
  misc_feature (1)..(1245): n is a, c, g, or t
atgaaagagaaattattttcatttattgataattcctcaagcttagcggttgaacttgagacagaacttacaaaacgaatagccatttcccccgagtcaggcggagacggcgaattggaaaaatgcctattccttgagaagtggcttagcgctcatggcataacaaaccttgagcgttttgacgcgcccgatgacagggtaaaaagcaaaatacgaccgaatttagtcgcgacaattgacggtagcgcggacaataaagacattggaagactgtggattttaagccaccttgacgttgtacctccaggagaagaaaaattatgggaaagtgacccgtggactgttatacgcaaggatgattcaccgggacctagagttattggacggggtgttgaggacaatcagcaggggttagtgtcttccgttattatggcattggcttttgtcactcagggaataaaaccctcacggacaatcaagcttttatttgcggctgacgaagaagtggggtccgcttttggcattgagtggcttgtaaataatcatggcggtttatttaataaaaatgacatggtactggtgcctgacggtggggatataaagggcgaatgtattgaaatagccgaaaaacatattttttgggtgaagtttgttacccacggaaagcaggcgcacggttcaatgccggatttgggtgccaatgcttttttggcgggagcgaatcttgccgtgcgccttcatcagggactttcggcaaaatttaaaaagaaaaacccaatgtttgacccggactactccacttttcaaccgacaaanaaagaagcccaacgtcctaaatatcatactattcccggcgaagatgttttttatatggatatgcgcgtcctgccctgttattcgcaagaagccgtattggcgcaaatcaacaaaataaaagccaaagtggaaaaagaatataatgttacgattgaatatatagttgaacagtcaacgcagtcaaaagcgaccgacataaaaacgccgattgttacattactgaataaagcgatacctgaagtttattccgttaagccgcgccctatcggtatcggcggcggcactatggcggcatatcttcgcaacattggaattgactgcgctgtctggacaaagacgcaggaaactcttcaccagccgaacgagtacgctcttttggataatattctgggggacgcaaaggttttcgctttactggcaatcagttag

SEQ ID NO: 36192 - protein, 414 aa, Unknown
  Obtained from environmental sample
  DOMAIN (207)...(320): Peptidase dimerisation domain
  misc_feature (1)..(414): Xaa is any amino acid
MKEKLFSFIDNSSSLAVELETELTKRIAISPESGGDGELEKCLFLEKWLSAHGITNLERFDAPDDRVKSKIRPNLVATIDGSADNKDIGRLWILSHLDVVPPGEEKLWESDPWTVIRKDDSPGPRVIGRGVEDNQQGLVSSVIMALAFVTQGIKPSRTIKLLFAADEEVGSAFGIEWLVNNHGGLFNKNDMVLVPDGGDIKGECIEIAEKHIFWVKFVTHGKQAHGSMPDLGANAFLAGANLAVRLHQGLSAKFKKKNPMFDPDYSTFQPTXKEAQRPKYHTIPGEDVFYMDMRVLPCYSQEAVLAQINKIKAKVEKEYNVTIEYIVEQSTQSKATDIKTPIVTLLNKAIPEVYSVKPRPIGIGGGTMAAYLRNIGIDCAVWTKTQETLHQPNEYALLDNILGDAKVFALLAIS

SEQ ID NO: 36193 - DNA, 306 bp, Unknown
  Obtained from environmental sample
  misc_feature (1)..(306): n is a, c, g, or t
ttgcttgctttaattatccgcgcttttaacgaaaactcgctcgttatggcggaagcgggaacgggcgtaggaaaatctttcgcctatctccttcccgccatgcactttgcgcttgaaaacaaggagaaggttgtaatctccaccgctaccattacactgcagcagcaattatttgagaaggacatcccgcttgtcgcttcaagcatgggagacctaaaaataaaatccgtaattatgaaaggaaggggcaactatctgtgcccttcgaggcttgacgatacgctgagagaaggactgcttttttga

SEQ ID NO: 36194 - protein, 101 aa, Unknown
  Obtained from environmental sample
  misc_feature (1)..(101): Xaa is any amino acid
MLALIIRAFNENSLVMAEAGTGVGKSFAYLLPAMHFALENKEKVVISTATITLQQQLFEKDIPLVASSMGDLKIKSVIMKGRGNYLCPSRLDDTLREGLLF

SEQ ID NO: 36195 - DNA, 1290 bp, Unknown
  Obtained from environmental sample
  misc_feature (1)..(1290): n is a, c, g, or t
atggaagagggcgtaccggaaaccattgatgatgaagtaacgaacgagaaagcgcttgatgatgaggaagacgaaacaatttctcttaccggcgatgaaatggacaacatccttaactcggcggattttactgaagaatcgggaactgaagaaacgccggaagatgattcttccgctgacgtagagaacattgatatcgacattgatacaaacgaaacaccggaagagcagactgaagttgaccttgcgtcagatgacgccactcttgccacagacgacttagcggacatttcattagacgatacatcatcaaccgacctcgcggcagacgacgccgctcttgccacagacgatttagcggacatttcagataccgacctcgcggcagacgaaaccgctcttgccacagacgatttagcggacatttcagatactgacctcgcggcagacgacgccgctcttgctacagatgacttagctgacatttcagataccgacattgcggcagacgacaccgctcttgctacagacgacttagccatttcgacagaggaatcaacagaagagcagtctgacactgaaaccattactgacgatgactttgccggtatgtcgttagacgacgattccttatcaagtacagaccttgcgatggatgacttttctgatatatcttcagaagatacctcgtcaactgatctcgcgtcagacgacgctttatcggatgacgctccctcagccgacgctttgacagacgacgctttatcggatgacgctctctcagccgacgctttgacagacgacactctgtcggatgacgctttgtctaccgaagtttcatcaactgaaacatcgtcaatcgacacagaagaagaagacgccgaccttgcgtcagatgactttgccaacatttcgttagatgataccgcactggacatcgacgttgtctcaagtgattttgccgacatttcatcaacggatgactcttcttctgacctcgcggcggacgacattgcggcagatgacctcgcagtagacgatctcgcgtcggatgaccttgcggcagacgatgcttccgcgcagtatgacgaacttgaaatggatgattttacagggctttcgcaagaagatacagaagcaattgccggagcggatgatgaattggataaactgcgcgaagaaggcgcgatgctcatgacggaagcccctgaaaacagcgattatcttgaaaatgattcatttgaagatctgtcagacgcggtgattgacgaacctggtattatcatctaa

SEQ ID NO: 36196 - protein, 429 aa, Unknown
  Obtained from environmental sample
  misc_feature (1)..(429): Xaa is any amino acid
MEEGVPETIDDEVTNEKALDDEEDETISLTGDEMDNILNSADFTEESGTEETPEDDSSADVENIDIDIDTNETPEEQTEVDLASDDATLATDDLADISLDDTSSTDLAADDAALATDDLADISDTDLAADETALATDDLADISDTDLAADDAALATDDLADISDTDIAADDTALATDDLAISTEESTEEQSDTETITDDDFAGMSLDDDSLSSTDLAMDDFSDISSEDTSSTDLASDDALSDDAPSADALTDDALSDDALSADALTDDTLSDDALSTEVSSTETSSIDTEEEDADLASDDFANISLDDTALDIDVVSSDFADISSTDDSSSDLAADDIAADDLAVDDLASDDLAADDASAQYDELEMDDFTGLSQEDTEAIAGADDELDKLREEGAMLMTEAPENSDYLENDSFEDLSDAVIDEPGIII

SEQ ID NO: 36197 - DNA, 333 bp, Unknown
  Obtained from environmental sample
  misc_feature (1)..(333): n is a, c, g, or t
ttgccaagcaatgctgaatggcaaaaacttatagattttgttggaggctatgaaacagcaggaaccaaattgaaagctattagtgggtggaatgattaccaaggagtatccggcaatggcacgaacgatttcgatttttcggctctgccgggcggttacggcaattctagtggcagtttcttcaatgtcggcaactacggccgctggtggtctgccacggagggcagtgcttacaatgcctacgtccggtacatggtctacaacctcgccagcgtgcgcaacgactacgacgataagacgatcccagtctctgtgcgttgcgtccaggactaa

SEQ ID NO: 36198 - protein, 110 aa, Unknown
  Obtained from environmental sample
  misc_feature (1)..(110): Xaa is any amino acid
MPSNAEWQKLIDFVGGYETAGTKLKAISGWNDYQGVSGNGTNDFDFSALPGGYGNSSGSFFNVGNYGRWWSATEGSAYNAYVRYMVYNLASVRNDYDDKTIPVSVRCVQD

SEQ ID NO: 36199 - DNA, 447 bp, Unknown
  Obtained from environmental sample
  misc_feature (1)..(447): n is a, c, g, or t
atgaaaatttatttagacaactgttgctataatagaccatttgatgatcaaactcaaatgagggtgtttttagaagcccaagctaaaatttacattcagactttggttgtggataaaaaaatagaattggtttattcttatatgtctatttttgagaatagtgataatccaaataagaaacatcttaaaattatttttgacttttttaaaaatgcgactcaatttgtgaatgatgcagaaatgcaacaagttgaagaaattgccaaaagtgtggcaaaacagaatattaaaaataaagatgctctgcatattgcaagtgcgattttgtctaaatgtgaatattttataacaactgatgacataatcttgaaaagatataaaggcaacgaaatagtagtatgttcgcctatagaatttctaaatttttgggagagagaaaatgcgtag

SEQ ID NO: 36200 - protein, 148 aa, Unknown
  Obtained from environmental sample
  misc_feature (1)..(148): Xaa is any amino acid
MKIYLDNCCYNRPFDDQTQMRVFLEAQAKIYIQTLVVDKKIELVYSYMSIFENSDNPNKKHLKIIFDFFKNATQFVNDAEMQQVEEIAKSVAKQNIKNKDALHIASAILSKCEYFITTDDIILKRYKGNEIVVCSPIEFLNFWERENA

SEQ ID NO: 36201 - DNA, 579 bp, Unknown
  Obtained from environmental sample
  misc_feature (1)..(579): n is a, c, g, or t
gtgattggcttcctgcgccactatggtctggacaaggacttccgcctgaacatcgaggccaaccacgccgaactggcgggtcacgactttgcccatgagcttgaaaccgccgccgccgcggggcttttcggctcggtagacgccaaccgcggcgagccgcgcaacggctgggacacggatcagttccccacggattactacgaaaccgcaatggccatgtacgccatccttaaagccggcggctttaccacaggcggcctcaatttcgacgccaaaatccgccgcaattcaattgatcccgcagacctgttcattgcccacatcggcggcatggacgcgtttgccgtcggcctggagattgcccagcggatcatcaccgacggaaaaatacccgcgtttgtcaaaaaacgctactcttcgtttaactcaggcgacggcgcgaaattcgacaagggcgaaatgaccttaagccagcttgctgaaatcggaaccgccgcaggctatggcaaaaccggccttaccagcggcaagcaggagcatctggagaatattttgaatcagtacctgttggggatttag

SEQ ID NO: 36202 - protein, 192 aa, Unknown
  Obtained from environmental sample
  misc_feature (1)..(192): Xaa is any amino acid
MIGFLRHYGLDKDFRLNIEANHAELAGHDFAHELETAAAAGLFGSVDANRGEPRNGWDTDQFPTDYYETAMAMYAILKAGGFTTGGLNFDAKIRRNSIDPADLFIAHIGGMDAFAVGLEIAQRIITDGKIPAFVKKRYSSFNSGDGAKFDKGEMTLSQLAEIGTAAGYGKTGLTSGKQEHLENILNQYLLGI

SEQ ID NO: 36203 - DNA, 894 bp, Unknown
  Obtained from environmental sample
  misc_feature (1)..(894): n is a, c, g, or t
atgaaaaagctgcgtgcctttgcttcggagctggtttttaaccccaccgaaaagccgttgacgaaaggcgatttaataccgctgatttcaggctgcgacggctgtattgcaggggtagatttttttacagcaggggtaatcgaaagcgcaggaaacctcaaggtcatttccaggtacggcgtcggtgtggatcgggtagacctgaccgcggcaaaggcaaaaaatatcgtcgtctgcaatacgcccggcgccaatacccaggcagttgcagacctcaccatcggtatgcttctttgcctggcccgcaaaatacccattctcgacaaaaaaacaaaagaaggccaatggccacgctccaacggcatcgaattatccggcaagaccatcggtatcctgggtctgggcgcggtaggcaaagcggtagcgaaacgcgcctcagggttttccatgagggtactcgcctgcgatccggtcatcaacagggagtatgtcgaatcgaacggcatcgttcctatcgatttcaatacgcttgtccgggaggcggattttctctgccttcacctgccattaacagaagagaccagaaatattatttcagctgatgtaatgaagtccatgaaaaagggctcaaccatcgtgaacacggcacgcggcggtcttatcgacgaagccgcagcctatgaactccttgtttccggacatttgggcggaatgggactggacgtatacgaaacagaacctcccaaaaaatcgcctttgtttgatttggaaaacgtagtattaacgccccacacggccgcccacaccgccgaagctaccgcaggcatggctgaaatgtcagtgcaaaacctaatcgacgtgctttccggcagggattgcccgaatgtcgtgtaa

SEQ ID NO: 36204 - protein, 297 aa, Unknown
  Obtained from environmental sample
  DOMAIN (1)...(297): D-isomer specific 2-hydroxyacid dehydrogenase, catalytic domain
  misc_feature (1)..(297): Xaa is any amino acid
MKKLRAFASELVFNPTEKPLTKGDLIPLISGCDGCIAGVDFFTAGVIESAGNLKVISRYGVGVDRVDLTAAKAKNIVVCNTPGANTQAVADLTIGMLLCLARKIPILDKKTKEGQWPRSNGIELSGKTIGILGLGAVGKAVAKRASGFSMRVLACDPVINREYVESNGIVPIDFNTLVREADFLCLHLPLTEETRNIISADVMKSMKKGSTIVNTARGGLIDEAAAYELLVSGHLGGMGLDVYETEPPKKSPLFDLENVVLTPHTAAHTAEATAGMAEMSVQNLIDVLSGRDCPNVV

SEQ ID NO: 36205 - DNA, 549 bp, Unknown
  Obtained from environmental sample
  misc_feature (1)..(549): n is a, c, g, or t
ttgaaatcgataggaacgatgccgttcgattcgacatactccctgttgatgaccggatcgcaggcgagtaccctcatggaaaaccctgaggcgcgtttcgctaccgctttgcctaccgcgcccagacccaggataccgatggtcttgccggataattcgatgccgttggagcgtggccattggccttcttttgtttttttgtcgagaatgggtattttgcgggccaggcaaagaagcataccgatggtgaggtctgcaactgcctgggtattggcgccgggcgtattgcagacgacgatattttttgcctttgccgcggtcaggtctacccgatccacaccgacgccgtacctggaaatgaccttgaggtttcctgcgctttcgattacccctgctgtaaaaaaatctacccctgcaatacagccgtcgcagcctgaaatcagcggtattaaatcgcctttcgtcaacggcttttcggtggggttaaaaaccagctccgaagcaaaggcacgcagctttttcatggcaggnctttcgaaatccggctga

SEQ ID NO: 36206 - protein, 182 aa, Unknown
  Obtained from environmental sample
  misc_feature (1)..(182): Xaa is any amino acid
MKSIGTMPFDSTYSLLMTGSQASTLMENPEARFATALPTAPRPRIPMVLPDNSMPLERGHWPSFVFLSRMGILRARQRSIPMVRSATAWVLAPGVLQTTIFFAFAAVRSTRSTPTPYLEMTLRFPALSITPAVKKSTPAIQPSQPEISGIKSPFVNGFSVGLKTSSEAKARSFFMAGLSKSG

SEQ ID NO: 36207 - DNA, 831 bp, Unknown
  Obtained from environmental sample
  misc_feature (1)..(831): n is a, c, g, or t
ttggacttggtaagaaccataaacccttcaaccgacccttcagttccggcgctggatatcatgccaggaatttttgaaagttattcattctatggaacttatcgtcctggctctgaaaacccctttgaagacctcgttgaacactgctgccagacgatttcagatctgctcaggaaaacaagcgacggaggatgggtttttgtttataatgaggaaggcgataatccggaattcaaccttcgccttggaaaagccatccttgtttacgccgaaaccgcgcaaaacaatctatgggctggaatcggccgttccctcattctttcggccatctcgaccgccgaaaaaaacgacgaaagcctatcaacagaactgacaagcgcaaagctataccgcatcctctgcccgctcgatacctaccccagggccctggaaatcgactcgtcatccggcggcatttgggcatggactgcggctcaggctgtcagcggttcacagcaaggcgacatactggacataagcgtaactttccctgtcggagaaactcattatatgatcatccggggtatacgaactttttcccgagtccagctttacggcatggacttccgctcggacacccaatttgagcgttacgattcctcaggctggagctacatcagccaggagcagaccttgattgtaaaaatgaggcaccgcaattccgaagagcgtatcaggatcatttacagggaagcgccaagacccgtcgttgcgcctccggttgtcgaagagacccccgtaaccgagagcaactccgtcccagccgtcacaggagaaacaaatgactattga

SEQ ID NO: 36208 - protein, 276 aa, Unknown
  Obtained from environmental sample
  misc_feature (1)..(276): Xaa is any amino acid
MDLVRTINPSTDPSVPALDIMPGIFESYSFYGTYRPGSENPFEDLVEHCCQTISDLLRKTSDGGWVFVYNEEGDNPEFNLRLGKAILVYAETAQNNLWAGIGRSLILSAISTAEKNDESLSTELTSAKLYRILCPLDTYPRALEIDSSSGGIWAWTAAQAVSGSQQGDILDISVTFPVGETHYMIIRGIRTFSRVQLYGMDFRSDTQFERYDSSGWSYISQEQTLIVKMRHRNSEERIRIIYREAPRPVVAPPVVEETPVTESNSVPAVTGETNDY

SEQ ID NO: 36209 - DNA, 1449 bp, Unknown
  Obtained from environmental sample
  misc_feature (1)..(1449): n is a, c, g, or t
atggatcttgtcaacaaactgctggacgaggcggaaggcgtatattacaaaataggcgagtttgatcacaaaccgcagaatgacgctatgggttcagtccttgttgatgacaatgaaatgaaggttactttaattttaacgcctccgggagaaggcggctgcgaccttacggtagaagctttccacagcctgcttattcagaacagggtttacaacggtgtaaaagaggaattcctgcaggaattcgcggacagccccgtttacagggaacatgtggaagtcgccgagggactaaggcccgtcaacggcaaagacgcctatatcaaatataattttgaaaccgatcagacaaagatatcgttaaaagagggagcaaacggcaaggttaattttaaagaactcaatattattcaaaacgtaacggcggattcggttcttgcgacaaaagtgccgcctgaagacggcgttgacggcaagaccgttacggggaaaattcttccggccaaagccggaaacgacatccccatgcctgtcgggaacaatgtgcgcctcaacgataacgaagacaccattctggctaatattaacgggcaggtactgatagcaaacggcaagattaacgttgagccggttcttacggttgaaggcgacgtanacttaanaacaggaaatattattttccttggaaatgttattatcggcggaaatgtggaagacggattctcggtaaaggcggacggaaatattgaaataaaaggaactgtgtcaaaagcggaattggacgctgaaggcgacattattatttatcagggagtaaacggcaaaggcggcgacaagaaaataagggcggggcgttcgctttggtcgcgttttattgaaaacgccaatgtggaagtggggaacatggtagttgtaaccgacggtattatcaactctaatgttgacgcggtaaaaagcatagtctgtatgggcaaacgcgcgagtattatgggcggccgtctgcgcgccggagaggagatcagcgccaatgttctgggaaacccgacaagcggcacggaaacaatttgcgaggtaggctttgatcccaagagcaaagtcgaattggaacggcttatggcccagaaaacggcttccacggacgagcttgaaacaatcaggatggatcttcaggttttaataaatacaaagaaacagcgcaagactcttcctgaagagaaagaagcctatatgcaggaattaatggaaaggcgccaggttttaacagaggaattgaaaaaggtggatgaaaggatcgtaaaagtacaggaattcatgaacggcatacaaacccgcggaagggtgtccgcggccaagaaggtgtatcccggcgtaaaaataatgatccgcgatgtgaaagaagaggtcaaaagcgattaccgcgccacgacctttattttggaaacggcctaa

SEQ ID NO: 36210 - protein, 482 aa, Unknown
  Obtained from environmental sample
  DOMAIN (29)...(482): Protein of unknown function (DUF342)
  misc_feature (1)..(482): Xaa is any amino acid
MDLVNKLLDEAEGVYYKIGEFDHKPQNDAMGSVLVDDNEMKVTLILTPPGEGGCDLTVEAFHSLLIQNRVYNGVKEEFLQEFADSPVYREHVEVAEGLRPVNGKDAYIKYNFETDQTKISLKEGANGKVNFKELNIIQNVTADSVLATKVPPEDGVDGKTVTGKILPAKAGNDIPMPVGNNVRLNDNEDTILANINGQVLIANGKINVEPVLTVEGDVXLXTGNIIFLGNVIIGGNVEDGFSVKADGNIEIKGTVSKAELDAEGDIIIYQGVNGKGGDKKIRAGRSLWSRFIENANVEVGNMVVVTDGIINSNVDAVKSIVCMGKRASIMGGRLRAGEEISANVLGNPTSGTETICEVGFDPKSKVELERLMAQKTASTDELETIRMDLQVLINTKKQRKTLPEEKEAYMQELMERRQVLTEELKKVDERIVKVQEFMNGIQTRGRVSAAKKVYPGVKIMIRDVKEEVKSDYRATTFILETA

SEQ ID NO: 36211 - DNA, 732 bp, Unknown
  Obtained from environmental sample
  misc_feature (1)..(732): n is a, c, g, or t
atggataataaaaatatgataaaaacaatactaggttttgggatatttgatttttgccctgctctttttattaccgattgcgatgcccgtttggttattagcctgtttggattaataaaaccaatgatgcatattatttaccgtcttgcgcaattatgggctctgtcattacttcctatcgcaggacatacggaagttaaaggcagggagaatattcctaaaaaaggcggcgtttgttttgtcagtaatcattgtggtttnttcgatattgttatattgcttgcttcttgcggacggccatttggttttattgcaaaaaaagagttgctctatgttccgtttatgaatgcatggatttacatgcttgggggtctttttattgacaggggtaatgtcagaaatgcaatcaaaacgataaacaaaggcgtacagcgaataaaatcaggtggcagtatgataatttttcccgaaggacaccgttccaaaggcagggggcttcttcccttccatcccggttccctaaaacttgccacccaggccggagccgtaattgtccctgtcgcaattgagggcagttatgaggtctttgaaaaaaactaccgcgttgtctccgcaaagacaaaaatagcgtttttggaacctattgatacaaaaagcatacctttggaggatcgcaaacaaatactatgtgacaggatttactcggcaattaaagaggaattaaaattataa

SEQ ID NO: 36212 - protein, 243 aa, Unknown
  Obtained from environmental sample
  DOMAIN (63)...(190): Acyltransferase
  misc_feature (1)..(243): Xaa is any amino acid
MDNKNMIKTILGFGIFDFCPALFITDCDARLVISLFGLIKPMMHIIYRLAQLWALSLLPIAGHTEVKGRENIPKKGGVCFVSNHCGXFDIVILLASCGRPFGFIAKKELLYVPFMNAWIYMLGGLFIDRGNVRNAIKTINKGVQRIKSGGSMIIFPEGHRSKGRGLLPFHPGSLKLATQAGAVIVPVAIEGSYEVFEKNYRVVSAKTKIAFLEPIDTKSIPLEDRKQILCDRIYSAIKEELKL

SEQ ID NO: 36213 - DNA, 744 bp, Unknown
  Obtained from environmental sample
  misc_feature (1)..(744): n is a, c, g, or t
gtgaatctgtcaaaatcccgttattgcaaagggattcgatgtccaaagatactctggctggaagcgcataaaagcgaagtaagggacgaatccgtgcttaacagagcggttcttgataccggaaacagggtcggcgatttggcgatgggctgttacggcgcgtatagcgaagtcccctacaatgacgataaatccctgatgattgccgaaacaagacggcttttggacgcgaagacggaaataatctgcgaagcctctttttcccatgacggtaatttttgcagtgtcgacatactccgcgtttgcggctgtgaatttgagattaccgaagttaaaagctcgacaaaagttaaaccaatttattataacgatatcgcgtaccagtactatgtcctttcttcctgcgggttaaacgtaaaaaaagcgtctataatgcacataaaaaaaacatacgagcggcaggggaagatagaccttaacgggctttttaccgcacatgactgtacggaaaaaatacgcgccatgcaaaaggatgtcgccgccaatatcgaacggttcaaaaaaatcgccggggaagaaaacgaacccgatatggacatagggccgcattgttttgagccttacgaatgtgaataccatacctggtgctggaagcatattccagaaaacagcgtctttgacatatcgggtctgcgtaagaaaaaaaagttcgatctttataaacnggggcattataagctgtga

SEQ ID NO: 36214 - protein, 247 aa, Unknown
  Obtained from environmental sample
  misc_feature (1)..(247): Xaa is any amino acid
MNLSKSRYCKGIRCPKILWLEAHKSEVRDESVLNRAVLDTGNRVGDLAMGCYGAYSEVPYNDDKSLMIAETRRLLDAKTEIICEASFSHDGNFCSVDILRVCGCEFEITEVKSSTKVKPIYYNDIAYQYYVLSSCGLNVKKASIMHIKKTYERQGKIDLNGLFTAHDCTEKIRAMQKDVAANIERFKKIAGEENEPDMDIGPHCFEPYECEYHTWCWKHIPENSVFDISGLRKKKKFDLYKXGHYKL

SEQ ID NO: 36215 - DNA, 609 bp, Unknown
  Obtained from environmental sample
  misc_feature (1)..(609): n is a, c, g, or t
ttgattgcggcaagcgaaagcgctaaaaaatccatacattttcgcgacttgttaaaaagcaaaagcctccttgtcttttcgtcgtttgacgtgcgcggcgtacaggtggcagccgctgcaaaaaacgttatcgccatcgctttcggcctgcttgacgccttaaagacccagggagaagccagcggttttgaaggcgcgaatttgcttggcgacggaacggaatccctgctgctggccgccggcttgaacgagatccaaacactgggtgtggctatgggcgccacccatccggaaacatttacttccatttccggcatcggggatcttgacgttacctgccgttccgtttttggaagaaaccgccgctttggcaaagacattatagagaaaaagatccttgcgccgtttaaggatatagacgatcttatcgcccgcattggcgagcttgattacttgccggaaggggttgcggcagcaaagtatgtaaaagtccttgctgaaaaataccgcttaaaaatgcccatttcaaccgggctttacaggatcttgaaccgcgagatagaagcgcacgcgttcctaaagcaatttttaagcgagcttaggcgttag

SEQ ID NO: 36216 - protein, 202 aa, Unknown
  Obtained from environmental sample
  DOMAIN (29)...(196): NAD-dependent glycerol-3-phosphate dehydrogenase C-terminus
  misc_feature (1)..(202): Xaa is any amino acid
MIAASESAKKSIHFRDLLKSKSLLVFSSFDVRGVQVAAAAKNVIAIAFGLLDALKTQGEASGFEGANLLGDGTESLLLAAGLNEIQTLGVAMGATHPETFTSISGIGDLDVTCRSVFGRNRRFGKDIIEKKILAPFKDIDDLIARIGELDYLPEGVAAAKYVKVLAEKYRLKMPISTGLYRILNREIEAHAFLKQFLSELRR

SEQ ID NO: 36217 - DNA, 798 bp, Unknown
  Obtained from environmental sample
  misc_feature (1)..(798): n is a, c, g, or t
atgagtaacgaaacgcccaagtggcgtaaaatgaaaaaaaatgaaagcgatataaacgccgccgaagcattactgcgtacaaatgaatgtaagtgcgtaagcgcgtgcgggcggttcctttctcttgatgagacaaaaggccatgtttggatgttaaatgaaaataaaacaagcccctcggcgttaataatatattcaaaaagcactgtaattcccgtattatgcggtaaaaaagagctcccttcccccgattttcttaaagaatttgttaaaaaaaagaaaattcactcgttacaggggcagaaagaagatgtgtttgttctggaaaacatattgaaacaaatgggtgcgcaaacatctgatattttcgattacgatcttatgaaccttgataaacagcccgacccagaaagtttttcgtccggtcctgtaaatattattttacgcgtcccccgtttaatagatttagacgcgatagccccgttacaggcggcgtatgaaaaagaggaagtcctgcccagcggttcatgcttaagtcccgcgacaagcagggtaaaccttgcgcacattatcgcaaaaggacaaatcctttgcgccgaaatagacggacgtatagtcggaaaaataaatataaacgccgtttcctttacaagacatcaagtaggaggcgtctatgttcaccccgatttccgcaacatgggaatcgctcgccgaatggcggcggaatttattatgtctcttattaattcaggaagaggggtaacccttttcgtaaaaaaagncgaatatacacgctaa

SEQ ID NO: 36218 - protein, 265 aa, Unknown
  Obtained from environmental sample
  DOMAIN (197)...(264): Acetyltransferase (GNAT) family
  misc_feature (1)..(265): Xaa is any amino acid
MSNETPKWRKMKKNESDINAAEALLRTNECKCVSACGRFLSLDETKGHVWMLNENKTSPSALIIYSKSTVIPVLCGKKELPSPDFLKEFVKKKKIHSLQGQKEDVFVLENILKQMGAQTSDIFDYDLMNLDKQPDPESFSSGPVNIILRVPRLIDLDAIAPLQAAYEKEEVLPSGSCLSPATSRVNLAHIIAKGQILCAEIDGRIVGKININAVSFTRHQVGGVYVHPDFRNMGIARRMAAEFIMSLINSGRGVTLFVKKXEYTR

SEQ ID NO: 36219 - DNA, 753 bp, Unknown
  Obtained from environmental sample
  misc_feature (1)..(753): n is a, c, g, or t
atggctaatttagacgctgatttaattatcataggcgcgggtcctgcggggcttacagccgcgcagtacggggcaagggcgaacttgaaagttcttgtaatcgaggcaatgggaccgggcgggcagattttggttattgaccagcttgaaaattatccgggcgttaccgagtcggtgtcaggttacgagttttcacgcgccttgtatcagcaggccgaaaaattcggagcgtcttttcttacagattccgtaacaagtataaaaaaaacgggctttttcagtatcagcctggcaagcgggaaaacccttacggcttgcgcggtaattctcgcggcaggttcaaaaccggggctactcggcgttcccggcgaaagtgaatacggcggtaagggcgtttcttactgcgctacctgtgacggtcattttttcaagaacaaaaaaatgtttattgttgggggaggggacgccgcctgcgaggaagcgcgctacctttcaaatttaacggacaagattgtattggttcacaggcgggataaattccgcgctcaggaagcccttgcccaaagagtaatgaacaacccgcatatagaggtgcgttttaacacggtaataaaggaaataaaaggcgataaaaaagtaaaatcggtcgtgttaggcgaaacaatcagcgataaagtttacgaggaagagacggatgccgttttttatttttgtcggaacagttccccagacatcgcttgtcgcgggagatga

SEQ ID NO: 36220 - protein, 250 aa, Unknown
  Obtained from environmental sample
  DOMAIN (147)...(239): Pyridine nucleotide-disulphide oxidoreductase
  misc_feature (1)..(250): Xaa is any amino acid
MANLDADLIIIGAGPAGLTAAQYGARANLKVLVIEAMGPGGQILVIDQLENYPGVTESVSGYEFSRALYQQAEKFGASFLTDSVTSIKKTGFFSISLASGKTLTACAVILAAGSKPGLLGVPGESEYGGKGVSYCATCDGHFFKNKKMFIVGGGDAACEEARYLSNLTDKIVLVHRRDKFRAQEALAQRVMNNPHIEVRFNTVIKEIKGDKKVKSVVLGETISDKVYEEETDAVFYFCRNSSPDIACRGR

SEQ ID NO: 36221 - DNA, 1140 bp, Unknown
  Obtained from environmental sample
  misc_feature (1)..(1140): n is a, c, g, or t
atgggcgggcggatgattttacaagatgttgaaacggacggagcattaaatgagaaagaagaattcctaaccaaacaattaattacatatattggcaataaacgggctttattgggtttaataggagacggaattaaaaaggtacaaaataaactgcgcaaaaataaattaaaaatgttcgacgtgttcagcggttcgggcatcgtggcaagattttttaaacaattttccgagttgcttatcgtcaatgatttggaaaaatattcaacgttaataaatgaatgttatttatccaatgaaaaagaattaaacttatctttattgcgcgaatactacgatgaagttataaataatattgataagcgtccgataaaaggcattatttcagagttatatgctccaaacgacgataaaaatataatgcctaacgagcgtgttttttatacggcgcgaaacgcgacatatatcgacaccgccagacaattaatcgggaaattgccgcaggaaatacagaaatattttttagctcccctgttgtcggaagcgtcaattcacgcgaatacgtcaggcgtttttaaaggtttctataaaaataaagagactggtctaggtcaatttggagggaaaaatcaggacgcgctgttcagaattaccggcgatattgtattgccgttttcggtattcagcaattttaactgcgaaaccatcgtttacaacggcgatgcaaacgaaattatcaaaaatgcgccggaagttgatatagcgtatgttgatcctccctacaatcagcatccctacggttccaattactttatgttgaatttaatactggagtatcaatatccccaaaacgccagtaccgtttccggcataccctccaactggaaccgttccggttacaataaagaacacaaggctttgcggttattagccgatcttgttaccggtattaaatcgaaatacgtgcttatttcgtttaattcagaaggatatattaccattgaacaaatacgcaatatgctcaacaacatgggcactgttgaaatcatggaaataaaatataatactttcagaggcagccggaatttaaacagccgtgagatatatgtaaaagaatatttatttttgctggagaaatga

SEQ ID NO: 36222 - protein, 379 aa, Unknown
  Obtained from environmental sample
  DOMAIN (30)...(340): D12 class N6 adenine-specific DNA methyltransferase
  misc_feature (1)..(379): Xaa is any amino acid
MGGRMILQDVETDGALNEKEEFLTKQLITYIGNKRALLGLIGDGIKKVQNKLRKNKLKMFDVFSGSGIVARFFKQFSELLIVNDLEKYSTLINECYLSNEKELNLSLLREYYDEVINNIDKRPIKGIISELYAPNDDKNIMPNERVFYTARNATYIDTARQLIGKLPQEIQKYFLAPLLSEASIHANTSGVFKGFYKNKETGLGQFGGKNQDALFRITGDIVLPFSVFSNFNCETIVYNGDANEIIKNAPEVDIAYVDPPYNQHPYGSNYFMLNLILEYQYPQNASTVSGIPSNWNRSGYNKEHKALRLLADLVTGIKSKYVLISFNSEGYITIEQIRNMLNNMGTVEIMEIKYNTFRGSRNLNSREIYVKEYLFLLEK

SEQ ID NO: 36223 - DNA, 831 bp, Unknown
  Obtained from environmental sample
  misc_feature (1)..(831): n is a, c, g, or t
ttgtggcggcggcaaagaaaacacttcacctcgcgtaaggagcatattatggctgaacggatcataatgcctaaacaaggcctccagatgaccgagggaaccgttgtcgaatggcttgtgcaggaagggggggaagtggtcgagggccagcccctgtttaccatagaaacagataagttgacgataaccatcgacgctctggtgtcgggaaccctgctgaaaattgttgccgctcccggcgatacggttcccattaccgctcttatcggtgtggtaggaaagccaggcgaagatatttcctcaatactgcttgcggaagccggaagcgcggcggacggcggtacgtcaggagtgacaactgcccctatgggcggaactttggctgccgtttccgctgcggcatctccgccccgcgctccgggcgagcgggtctttatctctcccagagcaaagacaaaggccgtggagcggggcttggactggcagagcctgcgcggttccggtcccgatgggatgatcgtggaacgggacgttttggctgcccgtgtggacacgttaggcgtaaaagccacgccgttggccgccaaagtcgcctctctggtgggagtgaacctggcggacgtacagggttcaggcgaccggggcaagatagtccgcgctgatgtagaacgaatccgtgctgcccgcaaagccggtaagactggcgaaaagaatcttatccccatgcggggcatgcggaagttaattgccgagcggatgaagcagagccagaacgaaacgcccaaacctgccaccgcgtatcggtacgcatggacgaagctgttcgattga

SEQ ID NO: 36224 - protein, 276 aa, Unknown
  Obtained from environmental sample
  DOMAIN (19)...(92): Biotin-requiring enzyme
  misc_feature (1)..(276): Xaa is any amino acid
MWRRQRKHFTSRKEHIMAERIIMPKQGLQMTEGTVVEWLVQEGGEVVEGQPLFTIETDKLTITIDALVSGTLLKIVAAPGDTVPITALIGVVGKPGEDISSILLAEAGSAADGGTSGVTTAPMGGTLAAVSAAASPPRAPGERVFISPRAKTKAVERGLDWQSLRGSGPDGMIVERDVLAARVDTLGVKATPLAAKVASLVGVNLADVQGSGDRGKIVRADVERIRAARKAGKTGEKNLIPMRGMRKLIAERMKQSQNETPKPATAYRYAWTKLFD

SEQ ID NO: 36225 - DNA, 936 bp, Unknown
  Obtained from environmental sample
  misc_feature (1)..(936): n is a, c, g, or t
ttgcacacggcggaactttacgacgaagtgaaaaaccacggcaaggagctggggcttaccagcgcggaaattgggtacgattacgccgctctggccgcgcggaaagactcggtggtaagcacgctacgccggggcattgaaggtctaatcaagggcagaaaaatcaccctcattaagggtaccgccgcctttaccggccccaaaacttttaaggtaactgatgccgccggtgcggaaaccgaatacggcggggtgaacgtcataatcgccagcggcagcgaaccttcgtccattcccgtccccggcgcaaacctgcctgaggttctcaactccgatgcggtactctcgctcacggcgattcccgattcggcggttataatcggcggcggagtaataggcattgagttcgcaactcttttcaacagcctgggaaagaaaatcaccattatcgaaatgttgcccaggatactcaacggcatggatcagaatatttgtgacgccatgaccaaaactttttccaagcggggagtagaaatccacaccggcgcgaaactgttggagataaaagcggccccttgcggcgtggtctgcgcttacgaagaaagcggcgcgaaaaaagaagccatgggcagtattgttatcatggcggtgggccgccagcctgtaagcaaaaacctgaacctcgcggcggcgggggttgccgaaaaccggggatacattaccgtggatgaaaagatgatgactaatgtgccggggatttacgctatcggcgacgttaccggcaaggtacagctcgcccatgtgggcagcgcccagggtatggtcgcggccgcggtcatcgccggaaagaaagcgacgatgaactacgacattatccccgcctgtgtctacaccaatccggaatcgccagtattggcaaaaacgaaaaccangtaa

SEQ ID NO: 36226 - protein, 311 aa, Unknown
  Obtained from environmental sample
  DOMAIN (1)...(263): Pyridine nucleotide-disulphide oxidoreductase
  misc_feature (1)..(311): Xaa is any amino acid
MHTAELYDEVKNHGKELGLTSAEIGYDYAALAARKDSVVSTLRRGIEGLIKGRKITLIKGTAAFTGPKTFKVTDAAGAETEYGGVNVIIASGSEPSSIPVPGANLPEVLNSDAVLSLTAIPDSAVIIGGGVIGIEFATLFNSLGKKITIIEMLPRILNGMDQNICDAMTKTFSKRGVEIHTGAKLLEIKAAPCGVVCAYEESGAKKEAMGSIVIMAVGRQPVSKNLNLAAAGVAENRGYITVDEKMMTNVPGIYAIGDVTGKVQLAHVGSAQGMVAAAVIAGKKATMNYDIIPACVYTNPESPVLAKTKTX

SEQ ID NO: 36227 - DNA, 408 bp, Unknown
  Obtained from environmental sample
  misc_feature (1)..(408): n is a, c, g, or t
atgaaaattttggtatatggttctttaaacattgatcttgttttttcggtagaccatattgccgctctcggagaaaccatttcaagcctttctttaagtaaaaacgccggaggcaagggcgcaaatcaggcggcagcgctggcaaaagccggaatggaaacctggatttccgggaaaatcggaaaggacggtgtttttctgcttgagcttctcgaaagttatggagtacataccgaaaaagtcgtacattacgaaggcccttccggtcaagctataattcaggttgataaaagcggacagaattccattgttctctttgcgggcggaaacggtcttgtacaacctgacgaaattaataaatgcctttcattttttgaaaaagngcgatatagttttacttcagaatga

SEQ ID NO: 36228 - protein, 135 aa, Unknown
  Obtained from environmental sample
  misc_feature (1)..(135): Xaa is any amino acid
MKILVYGSLNIDLVFSVDHIAALGETISSLSLSKNAGGKGANQAAALAKAGMETWISGKIGKDGVFLLELLESYGVHTEKVVHYEGPSGQAIIQVDKSGQNSIVLFAGGNGLVQPDEINKCLSFFEKXRYSFTSE

SEQ ID NO: 36229 - DNA, 633 bp, Unknown
  Obtained from environmental sample
  misc_feature (1)..(633): n is a, c, g, or t
ttgccagcgctgccgcctgatttgcgcccttgcctccggcgtttttacttaaagaaaggcttgaaatggtttctccgagagcggcaatatggtctaccgaaaaaacaagatcaatgtttaaagaaccatataccaaaattttcatttatattgtattataactgcagaggaatatatatgcaacaaaatgatgaatcattattaaagcggctgaataaacctttaggagttattgacgctgtaattgataccgatacatggaatgaagtagacgatcagtacgctttgtcatttttaattaaatctgacgcgaagatcaaacttaaagcaatatatgccgctccttttttaaaccataaatcatcaagtcccgaagacggtatggaaaaaagttatggtgaaattttacatataatttctcttttggaaagagatgacttaaagtcaattgtaaaaaaaggatcaaaaacatttcttgcttccgagacagaacctgtagattcacaagcggctcgtgatttagcggaacgggcaatgaactattcaccggaaaatcctctttatgtaattgcgattggcggcaataaccaatattgcttctgccttgcttataaatcccgaaatacgggatag

SEQ ID NO: 36230 - protein, 210 aa, Unknown
  Obtained from environmental sample
  misc_feature (1)..(210): Xaa is any amino acid
MPALPPDLRPCLRRFYLKKGLKWFLRERQYGLPKKQDQCLKNHIPKFSFILYYNCRGIYMQQNDESLLKRLNKPLGVIDAVIDTDTWNEVDDQYALSFLIKSDAKIKLKAIYAAPFLNHKSSSPEDGMEKSYGEILHIISLLERDDLKSIVKKGSKTFLASETEPVDSQAARDLAERAMNYSPENPLYVIAIGGNNQYCFCLAYKSRNTG

SEQ ID NO: 36231 - DNA, 561 bp, Unknown
  Obtained from environmental sample
  misc_feature (1)..(561): n is a, c, g, or t
ttgcgattggcggcaataaccaatattgcttctgccttgcttataaatcccgaaatacgggatagaatagtcattgtgtggctgggcggacacgctcattcttggcctgataccaaagaatttaacatgatgcaggacgtagccgcggcgcgtattatttttggcagcggcgcggctttggttcaacttccatgtatgggagtagtttccgcttttacggtttcaggtcccgagttggaatattggcttaaaggtaaaaataaactgtgtgattatcttgtacaatacacgaatgaatccgctgttaaagacggcggattgccaaactggactcgtgttatttgggatgtaacaactgtcggttggcttcttaacgaaaactatatgcatgattatcttgttcccggccccattccccaatatgatcatcactatggtttcgatccgggccgccactttattcgctatgtttaccatattgaaagagacagactttttaaggctctttttgaatgtttgtcccgtcctcttgatcacctcccttcccccgtattaacataa

SEQ ID NO: 36232 - protein, 186 aa, Unknown
  Obtained from environmental sample
  misc_feature (1)..(186): Xaa is any amino acid
MRLAAITNIASALLINPEIRDRIVIVWLGGHAHSWPDTKEFNMMQDVAAARIIFGSGAALVQLPCMGVVSAFTVSGPELEYWLKGKNKLCDYLVQYTNESAVKDGGLPNWTRVIWDVTTVGWLLNENYMHDYLVPGPIPQYDHHYGFDPGRHFIRYVYHIERDRLFKALFECLSRPLDHLPSPVLT

SEQ ID NO: 36233 - DNA, 459 bp, Unknown
  Obtained from environmental sample
  misc_feature (1)..(459): n is a, c, g, or t
atgtctgagaatagggttatcgggaaagacaatgctataccttggtcgattaaggggaaccttgcgcattttaaggaagtgacaatggattttccctgcatcatgggcagaaaaacgtgggagtctcttcctaaaaagccgcttccgggacggcttaatattgtcgtttcaaaaacattgacagctaacgatttcccggacgcgcaggatgtaaaagtttttccttcgcttgaatcggcgattgaatactgcgaagactatgaaaaagtttttatctgcgggggagaggcgatttataaacaggctatgccgttggcgaataggatcgatcttacattgattcccgggcagtacgacggcgatacatattttccggatattgataataactggataaaaaaagagactgccgattttaaaaatttttctgttattacttatgaaagggagaaaatatga

SEQ ID NO: 36234 - protein, 152 aa, Unknown
  Obtained from environmental sample
  DOMAIN (1)...(149): Dihydrofolate reductase
  misc_feature (1)..(152): Xaa is any amino acid
MSENRVIGKDNAIPWSIKGNLAHFKEVTMDFPCIMGRKTWESLPKKPLPGRLNIVVSKTLTANDFPDAQDVKVFPSLESAIEYCEDYEKVFICGGEAIYKQAMPLANRIDLTLIPGQYDGDTYFPDIDNNWIKKETADFKNFSVITYEREKI

SEQ ID NO: 36235 - DNA, 411 bp, Unknown
  Obtained from environmental sample
  misc_feature (1)..(411): n is a, c, g, or t
atgattgtaagcgcgtggaccccaatcgatcttccgcgcatggcgcttcctccttgccattacgcgtttcaggtaacggtaattgacggtaaagtgaatcttctctggaatcagcgttctgtcgatgttgctttgggactgccgtttaatatcgcaagttacggttgtcttcttcatttgcttgcgaaagaagcggggctgggcgaaggcaagttaatcggttttttgggggatacgcatatttacgtaaaccatgtcgagggtatccgtgtgcagacagagcgagcgccaaaagctttgccgcggataaagacggaaaattttacgtcgatttttgattggcattacggggatacggtcattgagggatatgatccgcatccggcgattaagtttgaaatagcggtgtga

SEQ ID NO: 36236 - protein, 136 aa, Unknown
  Obtained from environmental sample
  DOMAIN (1)...(136): Thymidylate synthase
  misc_feature (1)..(136): Xaa is any amino acid
MIVSAWTPIDLPRMALPPCHYAFQVTVIDGKVNLLWNQRSVDVALGLPFNIASYGCLLHLLAKEAGLGEGKLIGFLGDTHIYVNHVEGIRVQTERAPKALPRIKTENFTSIFDWHYGDTVIEGYDPHPAIKFEIAV

SEQ ID NO: 36237 - DNA, 723 bp, Unknown
  Obtained from environmental sample
  misc_feature (1)..(723): n is a, c, g, or t
ttggatatgaggtttcatctttataaaccggttacatattacggcgtaactgttccgggcgaggatgaagaatcggtaattcccagcagtataagtaataatgagtattacttaaggagccttcagttaaacaggcttgctttggaaacttttgaatacggcgattatgacgcctccgccggttttgcgcaggaagcgattcgttatgccgaactttccgacgaatatgtttctgttcaacttctcgccgaggcaaaacgcttactggcatgggctgacaaaaacaatatcgcggcaaagttcccgaacaattacagcgaaggaaaaacacagtatgaaaacgcggtagacgcccatgctaacgaaaattggaacgaatcaatcggcgcggcaattaaatcaatagaaatttttgccgcttttgaatccggcggaaagcctcccgctgtaacggcacctgctgcttcaaaacccgcggcatccggttcgctggcaaagcagtacactgtaagaacatggagagtagagagagattgtctgtggactatcgcgggttatccgtgggtttacggcgacccttggaaatggaaagaactctacgacgccaataaagataaaatgcccgaaccggcaaaccccaatttaattgaacccggtatggtgttggatattcccagcattaaaggcgagacccgtcagggaatgtggactcccaacagataa

SEQ ID NO: 36238 - protein, 240 aa, Unknown
  Obtained from environmental sample
  misc_feature (1)..(240): Xaa is any amino acid
MDMRFHLYKPVTYYGVTVPGEDEESVIPSSISNNEYYLRSLQLNRLALETFEYGDYDASAGFAQEAIRYAELSDEYVSVQLLAEAKRLLAWADKNNIAAKFPNNYSEGKTQYENAVDAHANENWNESIGAAIKSIEIFAAFESGGKPPAVTAPAASKPAASGSLAKQYTVRTWRVERDCLWTIAGYPWVYGDPWKWKELYDANKDKMPEPANPNLIEPGMVLDIPSIKGETRQGMWTPNR

SEQ ID NO: 36239 - DNA, 471 bp, Unknown
  Obtained from environmental sample
  misc_feature (1)..(471): n is a, c, g, or t
ttgcaagcgccggcgcagaaaaaaatcaaactcatatttttcgataataatacaaaagactgggctattgttgtgcctgttatcgaaaacgaacatggcaaacaatttgtcatggtgcgtcagtggcggcacggctcgaaaagtttaagccttgaattccccggcggcgtttttgaggagggcgaagacccaaaggacgcggcaatgagggaactgcgcgaggagacaggatacattccgaagaagattgaaaaaatcggggaattcagtcccaacccggcgataatgtcaaacagggtgcatttttttcttgcggaagaattgacaaactgcggcaagctatctcttgatgaagacgagtatgtcgaagttgttttagtcaacgccgatgaagtaattcaaggcatgggaaaagagccgtatgttcacgcgctgatgggttcagctttagcgctctacaataaaaaataa

SEQ ID NO: 36240 - protein, 156 aa, Unknown
  Obtained from environmental sample
  DOMAIN (21)...(148): NUDIX domain
  misc_feature (1)..(156): Xaa is any amino acid
MQAPAQKKIKLIFFDNNTKDWAIVVPVIENEHGKQFVMVRQWRHGSKSLSLEFPGGVFEEGEDPKDAAMRELREETGYIPKKIEKIGEFSPNPAIMSNRVHFFLAEELTNCGKLSLDEDEYVEVVLVNADEVIQGMGKEPYVHALMGSALALYNKK

SEQ ID NO: 36241 - DNA, 483 bp, Unknown
  Obtained from environmental sample
  misc_feature (1)..(483): n is a, c, g, or t
gtggggcttatttttattgtagtcgggctaaatatctttcaggcgcaaaggcgggttgttctggaacgccgtgaggagatcggtcttctgcgggcgctgggggcttcaagtacggctgtgcggctggtttttgtctgggacggttttatcatcgggcttgccggagccgtactgggcctggttccggggcttctcattgcgtataacattcagacgtttttttcactgcttgaaagtgcggtgaactttttcatcaatttctttaattctgttttcggctttattggtggtaatgccggacagggtgaattcgcggtgtttcccacgcagattttttatctgaaagagattccttccagggtcattccgcgtgaagtggtactgattttcttttttggttttttctcggcccttctggcagcctggttcgcgtccgggaaagtttccgcaacaaagcccgcggaggttttacgttatgagtga

SEQ ID NO: 36242 - protein, 160 aa, Unknown
  Obtained from environmental sample
  DOMAIN (1)...(153): Predicted permease
  misc_feature (1)..(160): Xaa is any amino acid
MGLIFIVVGLNIFQAQRRVVLERREEIGLLRALGASSTAVRLVFVWDGFIIGLAGAVLGLVPGLLIAYNIQTFFSLLESAVNFFINFFNSVFGFIGGNAGQGEFAVFPTQIFYLKEIPSRVIPREVVLIFFFGFFSALLAAWFASGKVSATKPAEVLRYE

SEQ ID NO: 36243 - DNA, 813 bp, Unknown
  Obtained from environmental sample
  misc_feature (1)..(813): n is a, c, g, or t
ttggttttttctcggcccttctggcagcctggttcgcgtccgggaaagtttccgcaacaaagcccgcggaggttttacgttatgagtgatttaaccactgatttcaaaagtgacagcacaattatttgtgtgaagaatttggtcaaggactacgagtcggggactgagacgctccacatactccgtggcattagtttcagcgttgtgcggggcagctctgtggcaatctcaggacagagcggcagcgggaaaagcacttttctcaacattataggagggcttgatcgttttgatacgggaatcgtggaggtcgcggggagcgatatttccaatctcggcgaaagcgaactttcctcttacaggcagcggcggataggctttgtttttcagtttcattatttattgaaagattttaccgccctggaaaacgtaatgctccccctttacatgatgggcagccgcaaaaaagacgccattgaaaaggccaaagttttattgtccgatatgaagctggaaagccgctgggggcattttccttcccagctttcaggcggggagcggcagcgcgtagcggcggcgcgggccatggtaaacgatcccgacataattctggcggatgagcccacgggaaaccttgatcccggcaacagcgcgcttgtggcggagctcctttacgccggcgcggaaaaatggaacaaaacgctcatcgtggttacgcatagcgaggctgtcgcgtcccgcgccaaagtacgctatgttcttgaaaacggccttcttgaagaaacggatttttccaaaagggaagagccttga

SEQ ID NO: 36244 - protein, 270 aa, Unknown
  Obtained from environmental sample
  DOMAIN (71)...(257): ABC transporter
  misc_feature (1)..(270): Xaa is any amino acid
MVFSRPFWQPGSRPGKFPQQSPRRFYVMSDLTTDFKSDSTIICVKNLVKDYESGTETLHILRGISFSVVRGSSVAISGQSGSGKSTFLNIIGGLDRFDTGIVEVAGSDISNLGESELSSYRQRRIGFVFQFHYLLKDFTALENVMLPLYMMGSRKKDAIEKAKVLLSDMKLESRWGHFPSQLSGGERQRVAAARAMVNDPDIILADEPTGNLDPGNSALVAELLYAGAEKWNKTLIVVTHSEAVASRAKVRYVLENGLLEETDFSKREEP

SEQ ID NO: 36245 - DNA, 399 bp, Unknown
  Obtained from environmental sample
  misc_feature (1)..(399): n is a, c, g, or t
ttgaaagccggcccgggaaaaatacgtccggctttttttatcgccctgcgctaccttttgggccgggcccgcgagggcgggcgttacctccgaggggccgccgccggcatcgccctgagccttatccccattattgtaacgcttatcgttgctgacggaatgatacggggaataacagaccgttacctggaattggggactggccaccttcaagtttacaattactttaacactcatgagccggaagccgctcttcctgtcattaaggaaattcccggcatcaggggcgcctggccggaacggcatggcctgggggtagtcttttacggctcgtcctcaaagggagtaacgatcagggcggtggagaaatccttttgggaggacccaggagctcgatga

SEQ ID NO: 36246 - protein, 132 aa, Unknown
  Obtained from environmental sample
  misc_feature (1)..(132): Xaa is any amino acid
MKAGPGKIRPAFFIALRYLLGRAREGGRYLRGAAAGIALSLIPIIVTLIVADGMIRGITDRYLELGTGHLQVYNYFNTHEPEAALPVIKEIPGIRGAWPERHGLGVVFYGSSSKGVTIRAVEKSFWEDPGAR

SEQ ID NO: 36247 - DNA, 819 bp, Unknown
  Obtained from environmental sample
  misc_feature (1)..(819): n is a, c, g, or t
atgttggcaattgttggtatagtggagtttaccatgaattatagtagcgcttttatccccaccctgagggaagttcccgcggatgcggtcattgccagccaccgcttgatgttccgatcaggcatgatccgcaaacttgccaacggtctctttgcctatctgccgctgggactccgttctttccgcaaagtggaacagatcatccgtgaagaaatgaacgctattggcgctttggagttaaaacctaccgtggtgctgcccggtgaaatatggaaagaatcgggccgttgggacgctatgggcgaaggaatgctgcgggcaaaaaaccggctggataatgattttgtcgtgtctcctactgccgaggaagcctttaccgccattgtgcgggatgagctttccagttaccgccagcttcccctgaccttgtaccagatcaataccaagttccgcgatgagatacgcccccgttacggcgtaatgcggggccgggaatttgtaatgaaagacgcctattcgtggcacagtaacgatgaaagcctggatgagacctaccaggcgatgggccgcgcctaccgccggattttcaaacgctgcggcctgacggtcattccggtcaaggcggactcaggcgcgatgggcggttccggttcggaagaatttatggtggagagcgaaattggcgacaataccctgatcctctgcaaaaactgtgattatgccgccaatgtggaaaaagccggctgcgctcccgactatgatacggcacagactgccgcttccgttccgcccatcgaaaagatgacacccccaatgtaa

SEQ ID NO: 36248 - protein, 272 aa, Unknown
  Obtained from environmental sample
  DOMAIN (60)...(230): tRNA synthetase class II core domain (G, H, P, S and T)
  misc_feature (1)..(272): Xaa is any amino acid
MLAIVGIVEFTMNYSSAFIPTLREVPADAVIASHRLMFRSGMIRKLANGLFAYLPLGLRSFRKVEQIIREEMNAIGALELKPTVVLPGEIWKESGRWDAMGEGMLRAKNRLDNDFVVSPTAEEAFTAIVRDELSSYRQLPLTLYQINTKFRDEIRPRYGVMRGREFVMKDAYSWHSNDESLDETYQAMGRAYRRIFKRCGLTVIPVKADSGAMGGSGSEEFMVESEIGDNTLILCKNCDYAANVEKAGCAPDYDTAQTAASVPPIEKMTPPM

SEQ ID NO: 36249 - DNA, 669 bp, Unknown
  Obtained from environmental sample
  misc_feature (1)..(669): n is a, c, g, or t
atgatcgggggctgtgcatttttgaatacgtttatttcgcgaggccggatttggttatcgacgggcttttctgtatataaaacgcggcacaacatggggttgatacttgcggaagaacatccggtagatgcggatctggtctgcggggtgccggattccggcctggatgccgctgtcggatacagcgaaaaaagcggaatacaacttaccgcaggctttgtaaaaaaccggtacatcggccgcagttttatctatcctacgcaaacccagcgggataacgctgtaaagctcaagctcaaccccctggcggccagcatccgcggaaaaaggatcgtgcttgtggacgattccattgtccgcggcacgacaagcgaaaaaattgtcaggagccttaaaaactctggcgctaaagaggtacacatgagggtttcttcgccgcctttccgccacacctgccattacggaaccgatatagactgcgaggaaaacctgatagcgaacaaaatgagcctggaggatatcagggcaaaaatcggcgctgacagccttggctatatcagcatagatggactgaagcgtgcttgcggcggatgtttactggacttttgcactgcctgctttacaggcaccggcgagtccgcgagagcaaagaaaaatgtttttgaataa

SEQ ID NO: 36250 - protein, 222 aa, Unknown
  Obtained from environmental sample
  DOMAIN (14)...(165): Phosphoribosyl transferase domain
  misc_feature (1)..(222): Xaa is any amino acid
MIGGCAFLNTFISRGRIWLSTGFSVYKTRHNMGLILAEEHPVDADLVCGVPDSGLDAAVGYSEKSGIQLTAGFVKNRYIGRSFIYPTQTQRDNAVKLKLNPLAASIRGKRIVLVDDSIVRGTTSEKIVRSLKNSGAKEVHMRVSSPPFRHTCHYGTDIDCEENLIANKMSLEDIRAKIGADSLGYISIDGLKRACGGCLLDFCTACFTGTGESARAKKNVFE

SEQ ID NO: 36251 - DNA, 828 bp, Unknown
  Obtained from environmental sample
  misc_feature (1)..(828): n is a, c, g, or t
atgaaaactattagtcccggaaagctgaacgaggaatgtgccgtttttgcagtcagcctggcgattgacgaagccgccgggcttacctacaacggcctgttgtcactgcagcaccgcggccaggaaggcgcgggcatcgctgtagtacacgacgggcatattttttgccacaaggacatagggcttgtcagcgaggtcttttcaactgccgagcttgagaaactaccaaaaggaaaaatcgccgtcgggcacacgcggtactcgacaaccggcgtcaataaaagggaaaacgtggggccgtttgtaacggattacctgaccggaagaatcgctgtagcgcataacggcaacataacaaacgcccttgtaatacgcgaaaatttaaagcgccagggcctgcgtttcggagctaccagcgacagcgaggttatttcatcgtttatggcatactacatgatgaaggatgaaaacgttttgtcaggcatcctgaaagccgcggatatgctgcggggcgcgttttcgcttgcgatagtctgcaacgatgacaagctgatcgccatccgcgatccaaacggtttccgccccctgtgcatcgggcaaaacgaactgggctacgccgtggtttcggagagctgcgcgctggacgcctgcgattttaaattcgtaagggacgtgctgcccggcgaggtcgttgtgatcgaaaacggcgaaatgaagagcgagggtataaggcttaaaaacaaagaagatgatcgggggctgtgcatttttgaatacgtttatttcgcgaggccggatttggttatcgacgggcttttctgtatataa

SEQ ID NO: 36252 - protein, 275 aa, Unknown
  Obtained from environmental sample
  DOMAIN (13)...(211): Glutamine amidotransferases class-II
  misc_feature (1)..(275): Xaa is any amino acid
MKTISPGKLNEECAVFAVSLAIDEAAGLTYNGLLSLQHRGQEGAGIAVVHDGHIFCHKDIGLVSEVFSTAELEKLPKGKIAVGHTRYSTTGVNKRENVGPFVTDYLTGRIAVAHNGNITNALVIRENLKRQGLRFGATSDSEVISSFMAYYMMKDENVLSGILKAADMLRGAFSLAIVCNDDKLIAIRDPNGFRPLCIGQNELGYAVVSESCALDACDFKFVRDVLPGEVVVIENGEMKSEGIRLKNKEDDRGLCIFEYVYFARPDLVIDGLFCI

SEQ ID NO: 36253 - DNA, 849 bp, Unknown
  Obtained from environmental sample
  misc_feature (1)..(849): n is a, c, g, or t
atgacagaatcggcacgaggggccagcgactttatacaaaaaccatcaggttcggaatcggcggacatccatgtggtaaaagacacccttatagagaaactgcttggttatggcgcttcataccggaggttgcagggcaagaaagttctttcaccgtcggaatttaaacccaaagaagtggcaaaaccttcgcctataatggatatgcttacttcggtaagcccggcaaaagttgaacctgccaaaccgccgaccccggttcgtaaaccggcaaacaccgagatcatcgccataggcataagcaccggtggcccggacgcgcttagagtagtctttgcccaactggacgcggatctgaaaacccccattgtggtggttcagcacatgcctccgggttttaccaatgaatttgccaagagcctggacaggatttgccctctggatgtaaaggaagccgaagacggtgatcccatactgccgggcaggatattgattgctcagggcaacaaacacctggaagttgaaaagaaattgagagcctgtgtcagactttccgatacccccctggtttccggccaccggccttccgccgacgtattgtttgcctcggtcgcgatggcttaccagaatcacgctctgggcgtaattatgaccggcatgggccgcgacggcgcacagcagcttggcacgatttacaaggaaggcggcatgacccttggtcaggacgaagcgagcgcggttgtttacggtatgccccgcgtggcttacgagcttggtcatgtcatggagcaggtttccctgcaaaaaatggcccggcgcatctgcgatgtagcgaaaacctaccgataa

SEQ ID NO: 36254 - protein, 282 aa, Unknown
  Obtained from environmental sample
  DOMAIN (95)...(277): CheB methylesterase
  misc_feature (1)..(282): Xaa is any amino acid
MTESARGASDFIQKPSGSESADIHVVKDTLIEKLLGYGASYRRLQGKKVLSPSEFKPKEVAKPSPIMDMLTSVSPAKVEPAKPPTPVRKPANTEIIAIGISTGGPDALRVVFAQLDADLKTPIVVVQHMPPGFTNEFAKSLDRICPLDVKEAEDGDPILPGRILIAQGNKHLEVEKKLRACVRLSDTPLVSGHRPSADVLFASVAMAYQNHALGVIMTGMGRDGAQQLGTIYKEGGMTLGQDEASAVVYGMPRVAYELGHVMEQVSLQKMARRICDVAKTYR

SEQ ID NO: 36255 - DNA, 864 bp, Unknown
  Obtained from environmental sample
  misc_feature (1)..(864): n is a, c, g, or t
atgacagatcggccgagcgtttcgcaaccttcgtcccgctgctctgctccctcagttaaatcggcctgcccaattaaagacgaggttcttatcgcgagtaacagcgagggaaaagccgctttcgatttattaatcgtaagggaattgacaggcgggctttacttcggcaaacgcggacggtttgacgagccttcaaacggacatagtcccggcgcggcttttgatacggaaacatattcatggatggaaattgaacgggtactccgcgcgggttacgaagcggcggcggtacggcggaaaaaactctgcgtagtggacaaggcaaatgtgcttgagtcctcccgtttctggcgcgaagttgcctcggtggtttcaaaggactatcccgatatagaaacaagttacctctatgttgataacgccgccatgcagttgattcgcgctcccggacaattcgacgttatcgttacatcaaacctttttggagatattctttccgatgaggcgtccgtgcttacaggttcaataggtatgcttgcatctgcaagtctcggtgcgccagtgcagggcggaaccagaccgggaatgtatgagcctatccacggttcagcgccggatatcgccgggaaggacatcgccaatccgctcgctgcaatactttcggcggcgatgatgctccgttactccttcggtcttgagaaggaagcgctgtcaattgaaacggcggtcaacaaggtgctggatcagggattgcggacaggggacatcgcaagcagaggcgcagcaagcagcggcgagaaaattgttggtaccaaggcaatgggcgaagcagtacttaaagcgttggagactaatcttccttaa

SEQ ID NO: 36256 - protein, 287 aa, Unknown
  Obtained from environmental sample
  DOMAIN (1)...(278): Isocitrate/isopropylmalate dehydrogenase
  misc_feature (1)..(287): Xaa is any amino acid
MTDRPSVSQPSSRCSAPSVKSACPIKDEVLIASNSEGKAAFDLLIVRELTGGLYFGKRGRFDEPSNGHSPGAAFDTETYSWMEIERVLRAGYEAAAVRRKKLCVVDKANVLESSRFWREVASVVSKDYPDIETSYLYVDNAAMQLIRAPGQFDVIVTSNLFGDILSDEASVLTGSIGMLASASLGAPVQGGTRPGMYEPIHGSAPDIAGKDIANPLAAILSAAMMLRYSFGLEKEALSIETAVNKVLDQGLRTGDIASRGAASSGEKIVGTKAMGEAVLKALETNLP

SEQ ID NO: 36257 - DNA, 801 bp, Unknown
  Obtained from environmental sample
  misc_feature (1)..(801): n is a, c, g, or t
gtggtcatgggcctgcgcgtccgcagcgattttttctccgccgacacaagaatagacagcagccagatatacgcggcgagccgccttgtgtcacaggtgaccggcgtgaaggttcaaccgaacaaggccatagtcggcgacaacgcgttcgcgcacgaggcgggaatacaccagcacggagtattggcgaaaagggaaacctacgagatcatgactccgcagtcaatcggtattccgcaaaaccgcatggtgcttggcaaacattcaggccgccacgcttttgaagagcgcctgaaagacctgggtttgagcgttgaagccgaggcattggagaaaatattcgcggacttcaaggatcttgccgacaagaaaaaagtagtcagcgaccgcgacattgaagccctggtaatggacagggcggtctccgtccccgaaacatggaagctggatcattgggcggtgaacacgggttccgctttgggcgcggccggcgttatacgtttacggcacaaagacggcgaatttaaaaaattggtctgcatgggcgacggtcccatcgattcgatcttcaaagcgatcaacaaaattacaggcagggaacctgagcttgagctttatgaaatcggcgccattacaggcggttcgtcatcccagggtgagacaatggtaaaaatcgcgatggacggacggcgctggaacgggcgcggcgtttccaccgatgtaattgaatcttcgataatggcttatctttccgcgattaacgcgatggaatgggactgngcgcagattaaggaagattag

SEQ ID NO: 36258 - protein, 266 aa, Unknown
  Obtained from environmental sample
  DOMAIN (126)...(257): LeuA allosteric (dimerisation) domain
  misc_feature (1)..(266): Xaa is any amino acid
MVMGLRVRSDFFSADTRIDSSQIYAASRLVSQVTGVKVQPNKAIVGDNAFAHEAGIHQHGVLAKRETYEIMTPQSIGIPQNRMVLGKHSGRHAFEERLKDLGLSVEAEALEKIFADFKDLADKKKVVSDRDIEALVMDRAVSVPETWKLDHWAVNTGSALGAAGVIRLRHKDGEFKKLVCMGDGPIDSIFKAINKITGREPELELYEIGAITGGSSSQGETMVKIAMDGRRWNGRGVSTDVIESSIMAYLSAINAMEWDXAQIKED

SEQ ID NO: 36259 - DNA, 630 bp, Unknown
  Obtained from environmental sample
  misc_feature (1)..(630): n is a, c, g, or t
gtgcgccaggcccttggcttgccgccgaggaagagcgccgttgtttccagcctggatattccggcgcggccgccccagctttgccagggctgtccccacgccgacagtttcgaggccattaaaaccgcggtcgcacagatcgatccccggcccggccatcccaatgtgggaatcaactccgacatcggctgttattcgttaggcgccacgccgccgtactcggtccccgaaagcattgtctgcatgggcgcatcaatcggtatggcaaaaggcgcggcggacgcgggcctgaaatacagcctggctgtcatcggcgattccacgtttattcactccggcattaccggccttattgacgccgctgtggcggacatccccatgaccctcaccatcctggacaactccaccgtcgccatgaccggttgccaacaaaccatgataccatcggaaagccttcgcggcctgattctcggctgcggggtaaaggccgagcatcttgtggaactggaagcgaagaaacagtttgcccaggaaaactcaagtaagctgaaagccgagatcgaacaccggggcctgtctgtggtgattttcaaacgtgaatgcctggaagcgttcaggaagagacgctaa

SEQ ID NO: 36260 - protein, 209 aa, Unknown
  Obtained from environmental sample
  DOMAIN (61)...(197): Thiamine pyrophosphate enzyme, C-terminal TPP binding domain
  misc_feature (1)..(209): Xaa is any amino acid
MRQALGLPPRKSAVVSSLDIPARPPQLCQGCPHADSFEAIKTAVAQIDPRPGHPNVGINSDIGCYSLGATPPYSVPESIVCMGASIGMAKGAADAGLKYSLAVIGDSTFIHSGITGLIDAAVADIPMTLTILDNSTVAMTGCQQTMIPSESLRGLILGCGVKAEHLVELEAKKQFAQENSSKLKAEIEHRGLSVVIFKRECLEAFRKRR

SEQ ID NO: 36261 - DNA, 783 bp, Unknown
  Obtained from environmental sample
  misc_feature (1)..(783): n is a, c, g, or t
atgaaggtagaggcgctgcccaggcacacgggcgtgcacgccgcgggcgtagttatttttccgcaggacgcacgcgagtgcctaccccttgcgcgccaaaaggacaacgtaattaccacgcaatttgatatgggtgaggtagaaaagctagggtacctaaaaatggactttttggccataaaaacccttaccgacataaaaaaggcgcttacgtacataaagaaaaaccacggaaagacggttgactttgataggcacggctacgacgaccccgaggtgtttaattaccttgcgtcaggggcaacggacgcggtttttcagctagaatccggcggcatgaagtcctttatggcaaagcttaggccaaaaaacctagaggaagtcaccgcaggcatagccctataccgcccgggacccatggattatatcccaaaatacctagaaaaccgcaaggcacccgacaaaatccaataccttacccatcacttaaagcccatactggacgtaacctacggcgtaattgtctaccaagagcaggcaatgcaaatagtacgttcccttgcaggctacagcatggcgcgcgcagacgagttccgcaaaatgatttccaaaaaaaaggaggacgacataaaanaggaaatcgccgtctttttgcacggaataggcgaatcggtaaagcagggtgaaaacggtcagcccgacaaggtacagcctgcggttaaggggtgtatagaaaacggaatttccgaaggaggttgcgacccgaaatttggacgcaaatga

SEQ ID NO: 36262 - protein, 260 aa, Unknown
  Obtained from environmental sample
  DOMAIN (1)...(228): Bacterial DNA polymerase III alpha subunit
  misc_feature (1)..(260): Xaa is any amino acid
MKVEALPRHTGVHAAGVVIFPQDARECLPLARQKDNVITTQFDMGEVEKLGYLKMDFLAIKTLTDIKKALTYIKKNHGKTVDFDRHGYDDPEVFNYLASGATDAVFQLESGGMKSFMAKLRPKNLEEVTAGIALYRPGPMDYIPKYLENRKAPDKIQYLTHHLKPILDVTYGVIVYQEQAMQIVRSLAGYSMARADEFRKMISKKKEDDIKXEIAVFLHGIGESVKQGENGQPDKVQPAVKGCIENGISEGGCDPKFGRK

SEQ ID NO: 36263 - DNA, 561 bp, Unknown
  Obtained from environmental sample
  misc_feature (1)..(561): n is a, c, g, or t
atggaccggcgccgcttttattcaaccggctacctcacgataaccgattacgatgaaaaagaaaagtatttcacgcttgattatccgaatattgaggtgcgtagcgccttcgcgaaatcgcttgcgacgcggtgtctaaagaccccttcaaactggtcgtactcgtcatgcaaaaagctaatggcggcgctaaacggcggcgacgtagacgccgcgatggaggcggtgaagctgtttatgaccaaaatcccgtacgacttgtttcaaaaaagggagaacttctttcaatcggtgatatacgtggtattcgcaatgctcggtctcgactgccgcacggaggaaagaatcgccgccgggcggattgatatggtcgtcgagacacgcggctttgtttactgcttcgagttcaaattagacggcacagcggaggcggcgctcgcgcagatcgacagcaaggaatacgcgatcccgtggacgggtcgcgggaagaaggtcttcaaggtcggggtgaactttgatttcgagaagaagaactcnggggaagttgggtgtctgcggtag

SEQ ID NO: 36264 - protein, 186 aa, Unknown
  Obtained from environmental sample
  misc_feature (1)..(186): Xaa is any amino acid
MDRRRFYSTGYLTITDYDEKEKYFTLDYPNIEVRSAFAKSLATRCLKTPSNWSYSSCKKLMAALNGGDVDAAMEAVKLFMTKIPYDLFQKRENFFQSVIYVVFAMLGLDCRTEERIAAGRIDMVVETRGFVYCFEFKLDGTAEAALAQIDSKEYAIPWTGRGKKVFKVGVNFDFEKKNSGEVGCLR

SEQ ID NO: 36265 - DNA, 510 bp, Unknown
  Obtained from environmental sample
  misc_feature (1)..(510): n is a, c, g, or t
atgataataatgggcatagaccccggtaccgccgttaccgggtacggtgtgatcagcgtttccggcaactctgtctcttgggttgactcgggggtgatcgttaccgataccgccgagccgctcagcgaacggctattaataatatatgacgggttgtccgctaagatcaatgagtattcccccgtccgcgtggctgtggaggaggctttttacggcaagaacgtccacactactttggttctcggccacgcccgcggggtggctatgctggcggcggcgcaacgtgggtgcggggtgtttgagtacagcccgcgcgagattaagaagtcggtgacgggcaacgggaacgcgtctaaggatcaggtggagtacatggtaaaaacgctgctgcgcccggagggcggcaagatgcggcaggacgcttacgacgcgctggctgtggcgatgtgcgacttttacaatatggggcggggggcgttgctcgtaaataagaataaaaaggataaataa

SEQ ID NO: 36266 - protein, 169 aa, Unknown
  Obtained from environmental sample
  DOMAIN (3)...(151): Crossover junction endodeoxyribonuclease RuvC
  misc_feature (1)..(169): Xaa is any amino acid
MIIMGIDPGTAVTGYGVISVSGNSVSWVDSGVIVTDTAEPLSERLLIIYDGLSAKINEYSPVRVAVEEAFYGKNVHTTLVLGHARGVAMLAAAQRGCGVFEYSPREIKKSVTGNGNASKDQVEYMVKTLLRPEGGKMRQDAYDALAVAMCDFYNMGRGALLVNKNKKDK

SEQ ID NO: 36267 - DNA, 618 bp, Unknown
  Obtained from environmental sample
  misc_feature (1)..(618): n is a, c, g, or t
ttggctattggtacggaagccattgaccgcctccattccaccgcgcaaagccatagccgcgtaatagtcattgagctgatgggacacaaagccggctggctggcgctgtatgccggagttgccggcggcggcgatattatccttataccggaaatcccctataacataaaagccatcggcgatcatctgagagacagggcaaaatcaggcaagaccttttccatagtggttgtcgcggaaggcgcgctttccgttgaagaatcaaaaatggaaaagcgcgaccgcaaaaagtaccgcgccgaaaacggcccttcagtcgcctaccgcgttgcccgcgagatagaggcggaaaccggtatggaaacccgcgccaccgttctgggttatgtacaacgcggcggcatccccagcgcctccgaccgcgttcttgccacgagcctcggtacagccgccgcggacctcctcgccaaaggcgattacggccgcatggttgccctcgacggcgacatgattacatcggtcaatttaagcgtccccgaaagcaaagtaaaaaccgtatcagaaaatcattatatgctcgacaccgctattgctgtggggacgtgtttagggaactag

SEQ ID NO: 36268 - protein, 205 aa, Unknown
  Obtained from environmental sample
  DOMAIN (1)...(157): Phosphofructokinase
  misc_feature (1)..(205): Xaa is any amino acid
MAIGTEAIDRLHSTAQSHSRVIVIELMGHKAGWLALYAGVAGGGDIILIPEIPYNIKAIGDHLRDRAKSGKTFSIVVVAEGALSVEESKMEKRDRKKYRAENGPSVAYRVAREIEAETGMETRATVLGYVQRGGIPSASDRVLATSLGTAAADLLAKGDYGRMVALDGDMITSVNLSVPESKVKTVSENHYMLDTAIAVGTCLGN

SEQ ID NO: 36269 - DNA, 747 bp, Unknown
  Obtained from environmental sample
  misc_feature (1)..(747): n is a, c, g, or t
atgggcgaactgcacatcaatattattctggacaagattaaaacgaatcaaaaaattgaagttgaaacccatgttcccaaagttgcctaccgtgaaacgatcaccaaaaagtccagcgccgaatacacccacaaaaaacaaaccggcggccacggccaatacggaaaggtagtgttggacatcaaccccctgggcaggggagaaggctacaaatttgaaaacaaaatctttggcggcgcggttccaaagaactatattcccggcgttgaaaaaggcattgcggaaggtatggcccacggaacaatggctcaatacccggttgtcgatgtggaagtggccattgtggacggaaaataccatccggttgattcatcggaactttcgttcaagctggcagcgcgtaacgcctttagggaagctatgcgtcaggcaaaccccaccctgctggaaccgatcatgaacctgactgtttttgtggaagaaaaatacctgggcgacgtaatgagcgacctttccggcaaacgcggaaaaatccttgggcaggactcggtgggcggcattgcggaaatccgcgcagaggttcctcaggctgaacttttgcgttactcgatagacctgcgttcaattacttcggggaccggctcttttagcgtgggttttgaccattacgcgccaatctcgggccgcatcgccgacgaagtaatcaaggcgcgcgagtcgttcaagattcaggaagcggatgaatag

SEQ ID NO: 36270 - protein, 248 aa, Unknown
  Obtained from environmental sample
  DOMAIN (147)...(234): Elongation factor G C-terminus
  misc_feature (1)..(248): Xaa is any amino acid
MGELHINIILDKIKTNQKIEVETHVPKVAYRETITKKSSAEYTHKKQTGGHGQYGKVVLDINPLGRGEGYKFENKIFGGAVPKNYIPGVEKGIAEGMAHGTMAQYPVVDVEVAIVDGKYHPVDSSELSFKLAARNAFREAMRQANPTLLEPIMNLTVFVEEKYLGDVMSDLSGKRGKILGQDSVGGIAEIRAEVPQAELLRYSIDLRSITSGTGSFSVGFDHYAPISGRIADEVIKARESFKIQEADE

SEQ ID NO: 36271 - DNA, 939 bp, Unknown
  Obtained from environmental sample
  misc_feature (1)..(939): n is a, c, g, or t
gtgagcgttaggcgcaaattcctgatattggccatactctgtttgatttcatttccggcgttttctcaagcatatctggaattgaacttaaacccggcgtacagcgggaaccctttcgcaaaaacaaaacagccgcttgatgttttcagggtgatagaaagagcgtcaaacgataaaagtattaagggaatagttttaaacattgcgtctgttcccaaagataaatgttatttgtgggaattgcgtagcgcgctggaacaatttaaagcaaacgggaaaaaaatatgcgcgtatataagcaatgcaaatattgatgtttattgtcttgccactgttgcggataaaattgtcatggacgatcttggaaacctgaacataatgggttatgccataggcagaggttatgcgcgtcacgctctggacaaactcggtatcggcgtgcgtgaattgcgttattttgagtataaatccgccggcgaaacatttacaagggattccatgtcggaagcggatcgcaggcagtacaatgattatcttgacgatacgtttaatcttacccgcgacactttaaaaaaagcgcgtaactggacggacgaaaaatttaacgctgtcttaaacaacggttttctttattcggcatggagcgcgcatgctgacggtcttgttgattctgtaggcggaaaagatgcggtatatcaagctgtctggcaaattgaggaaaaatatcgccgcttctttcaaattgtacggagcgtccgattcaagcataactggcggcaatatcgcgtattcacctcgnaaatcgaggagttttttcagaagaagaccgcctgttgtcgccgtagtttacgcaaacggggaaacgtccatgagacagggcatggaagcggtaaaacttgcgaaaattatcagagaattggggcaaaatacggaagttaa

SEQ ID NO: 36272 - protein, 312 aa, Unknown
  Obtained from environmental sample
  SIGNAL (1)...(22)
  DOMAIN (87)...(243): Peptidase family S49
  misc_feature (1)..(312): Xaa is any amino acid
MSVRRKFLILAILCLISFPAFSQAYLELNLNPAYSGNPFAKTKQPLDVFRVIERASNDKSIKGIVLNIASVPKDKCYLWELRSALEQFKANGKKICAYISNANIDVYCLATVADKIVMDDLGNLNIMGYAIGRGYARHALDKLGIGVRELRYFEYKSAGETFTRDSMSEADRRQYNDYLDDTFNLTRDTLKKARNWTDEKFNAVLNNGFLYSAWSAHADGLVDSVGGKDAVYQAVWQIEEKYRRFFQIVRSVRFKHNWRQYRVFTSXIEEFFQKKTACCRRSLRKRGNVHETGHGSGKTCENYQRIGAKYGS

SEQ ID NO: 36273 - DNA, 897 bp, Unknown
  Obtained from environmental sample
  misc_feature (1)..(897): n is a, c, g, or t
atggtcggcctatcctgggccgtagtcgcggcgctcgtcgccctgttcatgtttgtgagccgtacgttccgcaacgttatagaccgcaagatagccgaaaaccgcgaaaagtggttcaagggcatccgcttccgcagcatagagatattgacctccgagaagctgacgtccaccgcgctcttcgtctccaaggctntgcgctacgcgatatacgccgtgctgctctacgcggctctgcccatgatcttcgcgatcttcccggcgacgcggcacctcgccgccctgctcttctcgtgggtcgccgcccccgtggtctcaatgggcgagagtttaatcacctacctgcccaacctgctgcgcatagccgtcatcatagtggtaatgcgctacatactcaagttcatgcgctacgtcgccgccgagatagaggcggaacgcttggtgatacccggcttctaccccgactgggcgcgggcgactctcaacatattgcggatattcatctacgccttcaccattgtgctgatctttccgttgctgcctaattcggactcctcgatcttcaagggcgtttcggtcttcatcggcgtgcttttctccatcgggtcgtccagcgtaatatcaaacatggtagccggaatggtcatcacctacatgcgctccttcaagataggcgaccggataaaggtgggcgacgtctacggcgacgtcgtggagaagacgctcttcgtgatccgcatacagactataaagaaagaggtcatcaccgtgccgaactcctctatactgtccgcgaacgtaacaaactacagcaccgcggccggcgagggcggtcagggcgtaataatctccctcgacgtatccgtatgctacgactctgcctctcggccgatctga

SEQ ID NO: 36274 - protein, 298 aa, Unknown
  Obtained from environmental sample
  SIGNAL (1)...(24)
  DOMAIN (162)...(297): Mechanosensitive ion channel
  misc_feature (1)..(298): Xaa is any amino acid
MVGLSWAVVAALVALFMFVSRTFRNVIDRKIAENREKWFKGIRFRSIEILTSEKLTSTALFVSKAXRYAIYAVLLYAALPMIFAIFPATRHLAALLFSWVAAPVVSMGESLITYLPNLLRIAVIIVVMRYILKFMRYVAAEIEAERLVIPGFYPDWARATLNILRIFIYAFTIVLIFPLLPNSDSSIFKGVSVFIGVLFSIGSSSVISNMVAGMVITYMRSFKIGDRIKVGDVYGDVVEKTLFVIRIQTIKKEVITVPNSSILSANVTNYSTAAGEGGQGVIISLDVSVCYDSASRPI

SEQ ID NO: 36275 - DNA, 588 bp, Unknown
  Obtained from environmental sample
  misc_feature (1)..(588): n is a, c, g, or t
gtggattatataagcaaaccattccgctcttctataatcaaggtaagggtcaataaccaaaggttaatggtaaagcaaataaaagccatagaagagctaggtttattggatcatttaaccggcataaccaacaggcgaggctttgacaatagaattaatttggaatggctaagggcaattagagatagtagttgtcttagcatggctattttagatatagaccattttaaggtatataacgatgaatacggacacgcacaaggtgatgttcttttgcgcacgcttgcccaaaaaattacttctatgcttagaaggccaggagattttgttgcgcgttggggtggagaagaatttgtgttaatgatgccaaacacaacccaaaaaggtgctaccgagcacgcagaggaaattcgcaaatccgtacaagaaatggaagtaccaaatttgccatctgcaacagtgagcataggagtagcttctgtttttccttcaataaattcctcaataacagaaattttcgatatggcagacaaagccctttaccaagccaaaaatacggggcgaaacaaagtgtgcttctttacctaa

SEQ ID NO: 36276 - protein, 195 aa, Unknown
  Obtained from environmental sample
  DOMAIN (30)...(190): GGDEF domain
  misc_feature (1)..(195): Xaa is any amino acid
MDYISKPFRSSIIKVRVNNQRLMVKQIKAIEELGLLDHLTGITNRRGFDNRINLEWLRAIRDSSCLSMAILDIDHFKVYNDEYGHAQGDVLLRTLAQKITSMLRRPGDFVARWGGEEFVLMMPNTTQKGATEHAEEIRKSVQEMEVPNLPSATVSIGVASVFPSINSSITEIFDMADKALYQAKNTGRNKVCFFT

SEQ ID NO: 36277 - DNA, 834 bp, Unknown
  Obtained from environmental sample
  misc_feature (1)..(834): n is a, c, g, or t
ttgggttccggggtgatcgtttcgcgcgacgggtacatcctgaccaactaccacgtggtggccggggccgacgagatagagataaagacgaccgacgggcgtagcttcgacgccttcgtcgtgggcgccgactctctctccgacgtcgccgttgtgaagatcaaggagaacgtgaacaacctacccgtcgcctacctcggcgacagcgacctgctccggcccggcgactgggcggtggccatcggcaacccgttcagcctgacctcgtcggtcaccatgggtatcgtctcggcgataggccgccagacgccaaatcccggcggcggcgcggcgcagtaccagaactacatccagaccgacgcggcgataaaccccggaaactccggcggcgccctcgtcaacatcaagggcgagttggtcgggatcaacacgatgatatacacgcagaccggcggctacatgggcataggcttcgccgtgcctatcaacatggcgcgcaagatcatggaagacctaatattcgacggcaaggtaagccgcgggtggctgggcgtctccattcaggagctcgatagggccacgcgtgaggccttcggccttccggccgagaccaaaggcgtgctcatcggcgacgtcttcaaaggccagccggcggacaaggccggtatcaaacgcggcgacgtggtgcagagcatagacggaaaacccaccgagaacgccaacagcctgcgcaacctggtggcgtcaatataccccggaaaggatggtgcctgtcgtgctgctgcgcaacggaaagcggatggcggagaacgtcaagctggcctcgagaggtga

SEQ ID NO: 36278 - protein, 277 aa, Unknown
  Obtained from environmental sample
  DOMAIN (1)...(169): Trypsin
  misc_feature (1)..(277): Xaa is any amino acid
MGSGVIVSRDGYILTNYHVVAGADEIEIKTTDGRSFDAFVVGADSLSDVAVVKIKENVNNLPVAYLGDSDLLRPGDWAVAIGNPFSLTSSVTMGIVSAIGRQTPNPGGGAAQYQNYIQTDAAINPGNSGGALVNIKGELVGINTMIYTQTGGYMGIGFAVPINMARKIMEDLIFDGKVSRGWLGVSIQELDRATREAFGLPAETKGVLIGDVFKGQPADKAGIKRGDVVQSIDGKPTENANSLRNLVASIYPGKDGACRAAAQRKADGGERQAGLER

SEQ ID NO: 36279 - DNA, 309 bp, Unknown
  Obtained from environmental sample
  misc_feature (1)..(309): n is a, c, g, or t
atggtgcctgtcgtgctgctgcgcaacggaaagcggatggcggagaacgtcaagctggcctcgagaggtgagtcggaggtcttggcgcagtccggcggtcagtcgggcggtgccggccaaggggcgcagacaaaggaggacggtcggttcatgggcaagaccgtggacgcgataacgccggaattgcgtgacaaacttggattgccgagaggcgtccagggcgtgacggtcacgcagttggagcgtggaagcatagccgcccaggaaggggtacgggtaggtgacgttataatggaaatcaacagataa

SEQ ID NO: 36280 - protein, 102 aa, Unknown
  Obtained from environmental sample
  misc_feature (1)..(102): Xaa is any amino acid
MVPVVLLRNGKRMAENVKLASRGESEVLAQSGGQSGGAGQGAQTKEDGRFMGKTVDAITPELRDKLGLPRGVQGVTVTQLERGSIAAQEGVRVGDVIMEINR

SEQ ID NO: 36281 - DNA, 429 bp, Unknown
  Obtained from environmental sample
  misc_feature (1)..(429): n is a, c, g, or t
atgaatagtacaattatggcggaggcaaaagcagtctcgcaagaagcagtcaattttacgctggatacggttaacggcgcgcctatttacagacagattattcagcagattgagtacgctattctttcggggcggatacagcccggcgaccgtttgcctacgattcgttctttggcggtggaacttaaaacaaacccgaacaccatcgccaaagcttacaacgaattggagattcgcggaattctgacgactcaggtgggcagcggtacttacatttccgacaaaaagcccgtgatagaggacgacagtcttaaacggaaaattcgggaagtcgccggaagattcatgcaggaaatgaaggatttgggagttgaaaaaaaagaactgcccgaattaatagaatcgattattaaggaggaaaagaaatga

SEQ ID NO: 36282 - protein, 142 aa, Unknown
  Obtained from environmental sample
  DOMAIN (29)...(92): Bacterial regulatory proteins, gntR family
  misc_feature (1)..(142): Xaa is any amino acid
MNSTIMAEAKAVSQEAVNFTLDTVNGAPIYRQIIQQIEYAILSGRIQPGDRLPTIRSLAVELKTNPNTIAKAYNELEIRGILTTQVGSGTYISDKKPVIEDDSLKRKIREVAGRFMQEMKDLGVEKKELPELIESIIKEEKK

SEQ ID NO: 36283 - DNA, 849 bp, Unknown
  Obtained from environmental sample
  misc_feature (1)..(849): n is a, c, g, or t
atgaatttttttgataaaggacagccgttggtcagtaacaagccgatgaaaatgaaaccggatttttctttgattttgcttcagcttgtcatattgattgccgcgtctgcggcgcttacggcggtttttcttaaaacctctgcgccgggaaacactgaggatatttgcgtctataccgctgtttttattgccgtgtttattttgacattctgtatacgcaaaaataacgaatgggaacgagccattgttcttcgcttcggtaagtttcaaaaggttaggggaccggggctgtttttccttctgcctgtcgccgaccgtgtcgcccaaacagtcgatatgcgaatcagggtttcggatttttccgcgcagaaaactttgacgggcgattccgttaccgtcgatgttgacgcaatatgtttctggcttgtatgggacccgcaaaaggcggttctagaagttgagaattatgttgacgcagtggtgtactcttccaagactgcgctccgtaacgccgtttcaagccatgatctttccacttttcttgaacgcagtgatgtaatcgaaaaacaaattcaggaagaagttgacaaaaaaaccaccgattggggaataacggttcttcatatcgagattacggatattcagatacccgaacccttacaggattcgctttcgcgtgtcgcgcaggcggaaagggaaaagaagggacgtattcttcttgcggaagcggaaattgaaattgccaagaaactggaagaggcgatttcgatctacgccaaaaatgaaaatgcgatgaaactaaaaatactttctattttgaatgaaggtttaaagccggcagttcaatga

SEQ ID NO: 36284 - protein, 282 aa, Unknown
  Obtained from environmental sample
  DOMAIN (71)...(245): SPFH domain / Band 7 family
  misc_feature (1)..(282): Xaa is any amino acid
MNFFDKGQPLVSNKPMKMKPDFSLILLQLVILIAASAALTAVFLKTSAPGNTEDICVYTAVFIAVFILTFCIRKNNEWERAIVLRFGKFQKVRGPGLFFLLPVADRVAQTVDMRIRVSDFSAQKTLTGDSVTVDVDAICFWLVWDPQKAVLEVENYVDAVVYSSKTALRNAVSSHDLSTFLERSDVIEKQIQEEVDKKTTDWGITVLHIEITDIQIPEPLQDSLSRVAQAEREKKGRILLAEAEIEIAKKLEEAISIYAKNENAMKLKILSILNEGLKPAVQ

SEQ ID NO: 36285 - DNA, 966 bp, Unknown
  Obtained from environmental sample
  misc_feature (1)..(966): n is a, c, g, or t
atggaacaacttggctatgcagattccgaattggccttcccttatcttgctcttgtgataaaattcttgaagcactatccagcagatttaatggaacttgaaactccaagccccggagcatggcttgttggcatagcagctaaaataatgggcatgaaagttttgagccactatcgcacagatgtaccaagctacactcgctcgcttgtgaaagaagcatggatgcggcgttatgtgctcggtcttatacgaattttctaccagaacacagcacctgtaattagcccttgcgaagcatatcgcanaattttggaaacagaaataaaagtaaaaccagaacacataaaggtattgccaaggggaatacctcttgaaaacttttcaccatcgcttagaaaacacagtgttaattcccatatcacgttcttatatgttgggcgaatttctgttgaaaaaaacattccttttttggaaaaattgtggaaagaattttgcaaggaaaataaagatgcagaacttattttcgttggtggcggctggtatttggaaacattgaaagaaaatatgaaagaatattcaaacgtgcatttttctggtgtaaaaactggcaaagaacttgcggaattttacgcaaatgcagatttctttttatttcccagcgcaacagatacctttggaaatgtgatagtggaatccatagcaagcggcacccctgttttggtaaccgacaaaggcggtcctcaagatatagttaacaacgcgagccaaaaatgcggctggattttgcaatacgaagatttaaatgcttggaaggaacaattaaagcagtgctacgaaatggttggaagccccgaatacgaacaaatgcggcttgcctgcacagaacacggcaaaaactatacattggaaaaaatggcaacagcccagtgggaatttttcagggaaatcctctcggtacagaactaa

SEQ ID NO: 36286 - protein, 321 aa, Unknown
  Obtained from environmental sample
  DOMAIN (127)...(300): Glycosyl transferases group 1
  misc_feature (1)..(321): Xaa is any amino acid
MEQLGYADSELAFPYLALVIKFLKHYPADLMELETPSPGAWLVGIAAKIMGMKVLSHYRTDVPSYTRSLVKEAWMRRYVLGLIRIFYQNTAPVISPCEAYRXILETEIKVKPEHIKVLPRGIPLENFSPSLRKHSVNSHITFLYVGRISVEKNIPFLEKLWKEFCKENKDAELIFVGGGWYLETLKENMKEYSNVHFSGVKTGKELAEFYANADFFLFPSATDTFGNVIVESIASGTPVLVTDKGGPQDIVNNASQKCGWILQYEDLNAWKEQLKQCYEMVGSPEYEQMRLACTEHGKNYTLEKMATAQWEFFREILSVQN

SEQ ID NO: 36287 - DNA, 339 bp, Unknown
  Obtained from environmental sample
  misc_feature (1)..(339): n is a, c, g, or t
atggcgcgtaacatggtgtgcgaatggggtatggctgaagaactggggcctgtagcctatgggcaggaggatgagccgattttccttggaaaagaaattgcaagacacaaggattattcggaagataccgctcagcgtatagacagggcagttaaagacattcttgatcgtgcaagggaaaacgccgccgctattatcagcagccataaaacagagcttgaaaatctttcggatgctttgcttgcgcgtgaaactttgatagacgaagaagtacgggaaatcctagggcttccgcaaaaggaaagctcaatattatcaggtgaaggagagccttcttaa

SEQ ID NO: 36288 - protein, 112 aa, Unknown
  Obtained from environmental sample
  DOMAIN (1)...(94): Peptidase family M41
  misc_feature (1)..(112): Xaa is any amino acid
MARNMVCEWGMAEELGPVAYGQEDEPIFLGKEIARHKDYSEDTAQRIDRAVKDILDRARENAAAIISSHKTELENLSDALLARETLIDEEVREILGLPQKESSILSGEGEPS

SEQ ID NO: 36289 - DNA, 429 bp, Unknown
  Obtained from environmental sample
  misc_feature (1)..(429): n is a, c, g, or t
atgagcatttatgatataaataccaacgaggaaatcaggggaactagtctgcaaaacggaaagacctaccgcgccagggtgagggtgtcaacaaaccgggaccggacctacctcgccctgcgggttcccgttccttccggcgccgagattctggacgcgacattcgttaccaccgcttcctatggggacaagggcggtacaagcgggaatgaacagatacgttcaagttcatggttaagccaccagtttattatggacaacgaggttcaatatttctgggatcattttaataagggtgaatcaacggtcagtttccttttccgtacggcaaggaggggtgtgtaccccacgccgccggttcaggcggagtgtatgtatgaagcggaaattttcggacgcggttcggggcttctttatactattgagtag

SEQ ID NO: 36290 - protein, 142 aa, Unknown
  Obtained from environmental sample
  misc_feature (1)..(142): Xaa is any amino acid
MSIYDINTNEEIRGTSLQNGKTYRARVRVSTNRDRTYLALRVPVPSGAEILDATFVTTASYGDKGGTSGNEQIRSSSWLSHQFIMDNEVQYFWDHFNKGESTVSFLFRTARRGVYPTPPVQAECMYEAEIFGRGSGLLYTIE

SEQ ID NO: 36291 - DNA, 1314 bp, Unknown
  Obtained from environmental sample
  misc_feature (1)..(1314): n is a, c, g, or t
gtggagaagaatatactcagtcttgcagggccaagtatnttaataatgtngatttcagcgatatacaatataactgatacgttttttgtcagttctttgggtactagccatgtggcggctgtcggtatagcgtttcccctcatggcgattattcaagctatgggatttttctttgggcagggatcgggaaattatatttcgcgggctttgggggcgcaaaatgccgatggcgcttcacggatggctgtaacggggcttgtcagcggttttatcggtatggcggcggtagccgttgtaggacttgccctccttgggcatttggcggactggcttggcgcgacgcagactataaagcctcatgcgaaggaatatattttctttatcttgctcgcatccccttggatagtatcagctaatgttttaaatcagcagttgcggtttcaaggaagcgcggcgatagcgatgtttggaatgttgtcgggggcgattttaaatatttttcttgatccgctttttatttttgtttttggaatgggggtaaaaggagcggcggccgccacgttaatcagccagataacaagtttttgcatactctttttttattgtactacgcgtaagggaaatatatctattaattttaaacttttttcaccttccatgaagcgttacgctgaaatgtttaaggggggagttccggcgcttatcaggcagagtcttatgagtatcgcttcaattattattaatcattttgcaagaccttacggggacgcggccattgccgcaatttcaatttccaataggattgccatgttcgccacgtcggttgttcttggctttgggcaggggtttcagcccgtgtgcggttttaattacggcgcgaaattatacggcagggtaaaaagagccttctggttctgcgtaaaattatcctgcggcggtttatttgtaatttcaatcgttatggcgatattcgcgccttcgatcataatgctgttcagaaagaatgatttggacgtaatagcgattggcgctctgggactgcggcttcagtgtataagccttccctttacggcgggcataataatggtaaatatgatgactcagacaatgggaagagctctggaagcaagcatagtagccttttcccgccagggattatttctgataccgagcctttttattctgggaccccttctggggcttaatggaattcagcttgcaagacccgtatcggagcttgcaagccttgtagtagtaataccggtattaattaaaacgcttaaaagtttatctgttactgatgattttgtttga

SEQ ID NO: 36292 - protein, 437 aa, Unknown
  Obtained from environmental sample
  DOMAIN (232)...(393): MatE
  misc_feature (1)..(437): Xaa is any amino acid
MEKNILSLAGPSXLIMXISAIYNITDTFFVSSLGTSHVAAVGIAFPLMAIIQAMGFFFGQGSGNYISRALGAQNADGASRMAVTGLVSGFIGMAAVAVVGLALLGHLADWLGATQTIKPHAKEYIFFILLASPWIVSANVLNQQLRFQGSAAIAMFGMLSGAILNIFLDPLFIFVFGMGVKGAAAATLISQITSFCILFFYCTTRKGNISINFKLFSPSMKRYAEMFKGGVPALIRQSLMSIASIIINHFARPYGDAAIAAISISNRIAMFATSVVLGFGQGFQPVCGFNYGAKLYGRVKRAFWFCVKLSCGGLFVISIVMAIFAPSIIMLFRKNDLDVIAIGALGLRLQCISLPFTAGIIMVNMMTQTMGRALEASIVAFSRQGLFLIPSLFILGPLLGLNGIQLARPVSELASLVVVIPVLIKTLKSLSVTDDFV

SEQ ID NO: 36293 - DNA, 345 bp, Unknown
  Obtained from environmental sample
  misc_feature (1)..(345): n is a, c, g, or t
atgaagatactctcctacagcctcccgttttcgagcggagagatactcgatatgtgcgtggattatttacaaaaggcgcacgggcttgacttatcgttctcggtacgcgacgggatcaatatcatccgctacgccctgaaactgaaagagagcgacaagagcgcgaatacggaggagttgtttaagagggcggtgagccaaatactcggcgacgacgcccttgatatagacaaactggcgcaaaatcgcaaacggcagggcgacatcccgtctatgaacttaggcgacttcttcttctccgacgacgaagacctcaacccggacgcagaaaagggatggggttga

SEQ ID NO: 36294 - protein, 114 aa, Unknown
  Obtained from environmental sample
  misc_feature (1)..(114): Xaa is any amino acid
MKILSYSLPFSSGEILDMCVDYLQKAHGLDLSFSVRDGINIIRYALKLKESDKSANTEELFKRAVSQILGDDALDIDKLAQNRKRQGDIPSMNLGDFFFSDDEDLNPDAEKGWG

SEQ ID NO: 36295 - DNA, 477 bp, Unknown
  Obtained from environmental sample
  misc_feature (1)..(477): n is a, c, g, or t
atggataaaatcgtcgtagacaacgtcgaattggccctagcccatcccgtcgcgacagccgcggagtggataggccaatcggaaccgatgcgccaactgctcgcctgctggatcaccgttgacaaacgcgacctcccgctcacgccgcgaatcatcggctacccggggatcggcaaaaccacgctcgccatagccgccgctagagcgcgggggcaagacgtctacatcatgcaatgcaccgccgacacccgcccagaagacctattggtcacgccggtgctctccgaacaaggcaaaatatcctaccacgcctcgccgcttctcaccgcagccgtcagaggcgccgtggccattctcgacgaaggcaacaggatggcggagaagtcgtgggcgtcgctcgccggactcttcgacaaccgcaggatggcggagtcggtcgtcgccggaataaacagtatgcgcccaccccgattttag

SEQ ID NO: 36296 - protein, 158 aa, Unknown
  Obtained from environmental sample
  DOMAIN (51)...(156): ATPase family associated with various cellular activities (AAA)
  misc_feature (1)..(158): Xaa is any amino acid
MDKIVVDNVELALAHPVATAAEWIGQSEPMRQLLACWITVDKRDLPLTPRIIGYPGIGKTTLAIAAARARGQDVYIMQCTADTRPEDLLVTPVLSEQGKISYHASPLLTAAVRGAVAILDEGNRMAEKSWASLAGLFDNRRMAESVVAGINSMRPPRF

SEQ ID NO: 36297 - DNA, 471 bp, Unknown
  Obtained from environmental sample
  misc_feature (1)..(471): n is a, c, g, or t
atgacagattcggccgaggcgtcgccacaagtccgacaaaccgagttcctgaaactggtggagcctgaggacatcatcaagtacggtctgatacccgaactggtcggtcgcctgcccgtcttcgcctcgctggagccgctggacaaggacgcgctgatccgcatactcacacagcccaagaacgccatagttaagcagttcgccaaactgttcgacatggacggcgtggagctgaccttcgaggacggcgcactggaggccatggcagaccaggcagtggccaagaaactgggtgccaggggactgcgcgccatgatggagcagaccttgatggaccacatgttcgagctgcccgaccccgaacgcgacgagaccctgacgctgaagatcacccgcgccgacgtggagaagaaactcggagccgtgatcagctctgataccggagcgcaacccatggacgaggccgggtga

SEQ ID NO: 36298 - protein, 156 aa, Unknown
  Obtained from environmental sample
  misc_feature (1)..(156): Xaa is any amino acid
MTDSAEASPQVRQTEFLKLVEPEDIIKYGLIPELVGRLPVFASLEPLDKDALIRILTQPKNAIVKQFAKLFDMDGVELTFEDGALEAMADQAVAKKLGARGLRAMMEQTLMDHMFELPDPERDETLTLKITRADVEKKLGAVISSDTGAQPMDEAG

SEQ ID NO: 36299 - DNA, 1134 bp, Unknown
  Obtained from environmental sample
  misc_feature (1)..(1134): n is a, c, g, or t
atgtcagacccctcacgcattgaccacccggatgccttggacagggcggcggtggagacgtggctgcgcgagcgcaaccccgaaaaactggccgacctgtggcggatggcggacgacacccgccgccggtgcgtgggcgatgaagtctggctcaggggcctaatagaaatatccaacaactgccgccaacgctgtgcctactgcgggatttcgtcccatctcacgggaatcggcaggtaccgcatggccgccgccgacatactggaatcggccaaaaaagccgtccgctaccgcttcggcacagtggtcatacaggccggcgaggactcgcacataactggcccatggctggccgacgtaatcagggccataaaagccgaaacaggcctagttatgaccctcagcatgggcgagcgcccagacgaggacctccgcgcctggcgcgaagccggcgcagaccgctacctgctgcgcttcgagacatcggatcaaaaactctacacgcgcatccacccagatctcgatggccgtagttccgacaggcccgcccaactgcggcgtatgagggacatgggctatgaaatcggcaccggcgtgatgataggcctgccaggtcagacttgggcctccctggccgaagacgtactactgttccgccagtacgacatggacatgctgggcgtgggtccattcgtggaggcccccggcacaccgctggcgggcccaatgggaaagacactgcggcaagaagctgggcgcgaccaagtgcccgccgacgaactcacgacgctcaaagttgtcgccctgacccgtctcgtctgccccacttccaacatacccgccaccaccgcgctggaggcaatagaccctgcaaatggtcgaatcgagggcctgcaaaaaggcgccaacgtcatcatgcccaacctcaccccgcccgactgccgcgaaatgtacagcacctatcccggcaagccaggctccagtgcccgcagcaaagtggccgcttggttgcgctggcccgatgcctcagatacccgcaggaagaccaccgacgaagaagtcgccggcatagtggccgagatagagtcaatcggcagaaagccgtcgagaggggttgggtttcggcggcggtag

SEQ ID NO: 36300 - protein, 377 aa, Unknown
  Obtained from environmental sample
  DOMAIN (55)...(218): Radical SAM superfamily
  misc_feature (1)..(377): Xaa is any amino acid
MSDPSRIDHPDALDRAAVETWLRERNPEKLADLWRMADDTRRRCVGDEVWLRGLIEISNNCRQRCAYCGISSHLTGIGRYRMAAADILESAKKAVRYRFGTVVIQAGEDSHITGPWLADVIRAIKAETGLVMTLSMGERPDEDLRAWREAGADRYLLRFETSDQKLYTRIHPDLDGRSSDRPAQLRRMRDMGYEIGTGVMIGLPGQTWASLAEDVLLFRQYDMDMLGVGPFVEAPGTPLAGPMGKTLRQEAGRDQVPADELTTLKVVALTRLVCPTSNIPATTALEAIDPANGRIEGLQKGANVIMPNLTPPDCREMYSTYPGKPGSSARSKVAAWLRWPDASDTRRKTTDEEVAGIVAEIESIGRKPSRGVGFRRR

SEQ ID NO: 36301 - DNA, 831 bp, Unknown
  Obtained from environmental sample
  misc_feature (1)..(831): n is a, c, g, or t
atgaaaaaagctatctntgcggtgattgtactggtggtgattgtactggtttttgtcctttatgccgcagttcccgcgcggtccacacgccctaacatggtactcatacaaggcggaaccttcaccatgggaagcccggcgaatgaaccagctcgtgacaatgatgaagtccagcacgaggtaacggtaagctccttttacatgggaaggactgagttaacccagaaagaatacagagaagtgatggggaccaatccgagcagtttcaagggagacaatctgccggtggagggggtaagttggtttaacgcaatagagttctgcaaccgcctgagccagcgggagggcctgacccccgcgtatacggtaaacgggacgaatgtaacctgggaccggaacgccaatggctacaggctgcccaccgaggcggaatgggagtacgcctgccgggccgggacggtcacgccttttagcacggggaacaacattaccacgatacaggcgaattacgatggttttccttacaacaacaacgcgaatgggacgttccggaacaggacggtggaggtgagaaatttcaggccgaatgcctggggtttgtataatatgcacggaaacgtatgggaatggtgctgggatttgtatggggagtacgcaagcggtgcgcagaccgaccctgtgggcgcctcctcgggatctaaccgcgttatacgcggcgggagctggcgtattcatgcgcagttcctgcgttccgcgaacaggtacgaaaacgtcgctccgtctcacgcaagcaacgctcttggcttccggctggcgctgcccataaattaa

SEQ ID NO: 36302 - protein, 276 aa, Unknown
  Obtained from environmental sample
  SIGNAL (1)...(22)
  DOMAIN (29)...(273): Domain of unknown function (DUF323)
  misc_feature (1)..(276): Xaa is any amino acid
MKKAIXAVIVLVVIVLVFVLYAAVPARSTRPNMVLIQGGTFTMGSPANEPARDNDEVQHEVTVSSFYMGRTELTQKEYREVMGTNPSSFKGDNLPVEGVSWFNAIEFCNRLSQREGLTPAYTVNGTNVTWDRNANGYRLPTEAEWEYACRAGTVTPFSTGNNITTIQANYDGFPYNNNANGTFRNRTVEVRNFRPNAWGLYNMHGNVWEWCWDLYGEYASGAQTDPVGASSGSNRVIRGGSWRIHAQFLRSANRYENVAPSHASNALGFRLALPIN

SEQ ID NO: 36303 - DNA, 849 bp, Unknown
  Obtained from environmental sample
  misc_feature (1)..(849): n is a, c, g, or t
ttggcgatgacggcctgcgagctaaatcctttatatatacgggtagagtttattgaaggcgtaccggatgccggtacggcagggacgccgcttgcccttacaggaaaagtcagacccggttttgcgaataacaaagatattatttggtctgtcgcagacgccggaactaccggagcgagtataagcggagatattttaaatgctacggcggtaggaatagttatagtaaaggcggtaatacaaaacggcattgcggaaggaaaagaatatacccaggattttgttattgtattcatcgacggcggcgaagtgataacgcccatcgccaatgtcgcgctaaacataaccggccccgccaagaacagcgcgccggatactgcggcagttcccgcggatccttccgcccattatacagcgggcccggtctcgtggtcgcctgacgacaacccgttccttggccttactgtatatacggcgacggttacgcttacggcggatgaaggctatacgtttacgggactggcaggcgcgaccgtcaacggggaaagcgcgagcgtaagcggcaacaccggaacggcggttacgatatcgcatacattcgccgcgacgcttgacaaggaaattaccggaataaagatcaaaacacagcccatagagctgacatacgcagaaggcgagaggctggatctagccggccttgcggtaacgttgagctttgattccggaccgccggaagacgcggcttacgataattttaacgcctacaatatatcggcaaaccccgcgcacggaacggcactaacggcggctcataacggacagccagtcgtgataagcgcggcggcatag

SEQ ID NO: 36304 - protein, 282 aa, Unknown
  Obtained from environmental sample
  misc_feature (1)..(282): Xaa is any amino acid
MAMTACELNPLYIRVEFIEGVPDAGTAGTPLALTGKVRPGFANNKDIIWSVADAGTTGASISGDILNATAVGIVIVKAVIQNGIAEGKEYTQDFVIVFIDGGEVITPIANVALNITGPAKNSAPDTAAVPADPSAHYTAGPVSWSPDDNPFLGLTVYTATVTLTADEGYTFTGLAGATVNGESASVSGNTGTAVTISHTFAATLDKEITGIKIKTQPIELTYAEGERLDLAGLAVTLSFDSGPPEDAAYDNFNAYNISANPAHGTALTAAHNGQPVVISAAA

SEQ ID NO: 36305 - DNA, 756 bp, Unknown
  Obtained from environmental sample
  misc_feature (1)..(756): n is a, c, g, or t
gtgctgggtgggaacggaaccaacacgaccggatatcgccttaccggggaggggctcaatgtgcttgggcttcctaaaacaatagacaacgacattgagggcactgaccggacttttgggtttgactcagcccttgctatagctacagatgccattgaccgcctgcactctacagcgcaaagccacagcagggttatggtaattgagcttatgggccataaggcaggctggcttgccctttacgccggagtcgcaggcggcggagatgtgatccttattcctgaaataccttacgatattaaaagcattggccggcatcttgaggaacgcgccaggcacggcaagagtttttccattgttgtagtagctgagggtgccctttcggttgatgaaagtagaatggacaaaaaggacagaaaaaaatttcgtgctgacactgtgcatccgtctatcgcttaccgcatagccagggaaattgaaactgaaacaggcatggacaccaaagcaaccgttctgggctatgtgcaaaggggcggcataccggcggctactgaccgcattcttgccacaagtcttggcactgccgccgcagagcttcttgcccgaggcgaatatggccgtatgattgccctgaaaggaaacgaaattacatcagtagaccttaacgttcctgcgggaaaaacaaagaccattccccattcccactacatgctcgataccgcgctatctgttggcacctgtttagggaatccttaa

SEQ ID NO: 36306 - protein, 251 aa, Unknown
  Obtained from environmental sample
  DOMAIN (2)...(202): Phosphofructokinase
  misc_feature (1)..(251): Xaa is any amino acid
MLGGNGTNTTGYRLTGEGLNVLGLPKTIDNDIEGTDRTFGFDSALAIATDAIDRLHSTAQSHSRVMVIELMGHKAGWLALYAGVAGGGDVILIPEIPYDIKSIGRHLEERARHGKSFSIVVVAEGALSVDESRMDKKDRKKFRADTVHPSIAYRIAREIETETGMDTKATVLGYVQRGGIPAATDRILATSLGTAAAELLARGEYGRMIALKGNEITSVDLNVPAGKTKTIPHSHYMLDTALSVGTCLGNP

SEQ ID NO: 36307 - DNA, 570 bp, Unknown
  Obtained from environmental sample
  misc_feature (1)..(570): n is a, c, g, or t
atgagtaatatatcaacaaccgacaaacgctttttcgccggaatcgccaaattgctttcagatgcccgtcacacagcanagaaggctgtncatttcattatggtttccacctactggcaaatcggccggcgtatcatcgaacaggaacaaaaaggtaaaaaacgcgctgattatagcgattatcttattactaatctctcccgctatctgggtgagtcttttgggaaaggattctcagaagcaaacttgtggaatatgcgccaattttatcttgtgttccctgattatcctcaattccctagacagtgtctagagaatctaagctggtcaaacatcaatcttattatgcgtctcgatgatcgaaaagagcgtaaatattatcttaaagaaagctctgagcaaaattggtcttatcgtcaactcaaacggaatataaaaaccggatactatcgcagacagattcccataaaatcagcgaataaaaaacagaaaaacaccgcactgcctgtcattaccgatccgatggtgcttgagtttcttggtttgccggaggatacaagcggcatgtaa

SEQ ID NO: 36308 - protein, 189 aa, Unknown
  Obtained from environmental sample
  DOMAIN (11)...(188): Protein of unknown function (DUF1016)
  misc_feature (1)..(189): Xaa is any amino acid
MSNISTTDKRFFAGIAKLLSDARHTAXKAVHFIMVSTYWQIGRRIIEQEQKGKKRADYSDYLITNLSRYLGESFGKGFSEANLWNMRQFYLVFPDYPQFPRQCLENLSWSNINLIMRLDDRKERKYYLKESSEQNWSYRQLKRNIKTGYYRRQIPIKSANKKQKNTALPVITDPMVLEFLGLPEDTSGM

SEQ ID NO: 36309 - DNA, 777 bp, Unknown
  Obtained from environmental sample
  misc_feature (1)..(777): n is a, c, g, or t
atggaatacgaaggttctttccttaacgacgctcatcccgatcttaaagcggattttgttattgccaatccgcctttcaacgacagcgactggtcgggcgataggctccgcacggatggccgctggcagtacagccgcgaaacgccgccgccttatggcaacgcaaactacgcatggatacaacacttcgtctatcatttgaatccgaaaggttccgccggatttgtacttgctaaaggctcactttcatcaaaaacgaatggtgaagataaaatccgcaaggctctaattgacgaggggcttgtggattgtattgttaatttgccgacgaaactttttctcaatacacagatacccgcttgtctatggtttctttgccgcgccaaggagagtgataaaaaacactcaagacgcgataaaattctgtttatcgacgcgcggaatatgggctcgcttatcagccgaaaaacacgcgaactaactgaaaaggatatccgtacaatagcggacacttaccatacatggaaatccggcaaaggttataaggatacaccgggattttgcaagtccgcgcttgtcaccgaagtcgccgcccttgattatgttctcacgccggggcggtatatcggcttacccgatgacgaagacgatttcgacttcgttgaacgggtgcgaactttaaccgccgaactggaagcgcaaatgaaggaaagcgttttgcttgacaagcgtatccgcgataatctggcgaaagtggatggagtaaaaaaaggataa

SEQ ID NO: 36310 - protein, 258 aa, Unknown
  Obtained from environmental sample
  DOMAIN (2)...(217): N-6 DNA Methylase
  misc_feature (1)..(258): Xaa is any amino acid
MEYEGSFLNDAHPDLKADFVIANPPFNDSDWSGDRLRTDGRWQYSRETPPPYGNANYAWIQHFVYHLNPKGSAGFVLAKGSLSSKTNGEDKIRKALIDEGLVDCIVNLPTKLFLNTQIPACLWFLCRAKESDKKHSRRDKILFIDARNMGSLISRKTRELTEKDIRTIADTYHTWKSGKGYKDTPGFCKSALVTEVAALDYVLTPGRYIGLPDDEDDFDFVERVRTLTAELEAQMKESVLLDKRIRDNLAKVDGVKKG

SEQ ID NO: 36311 - DNA, 450 bp, Unknown
  Obtained from environmental sample
  misc_feature (1)..(450): n is a, c, g, or t
ttggccggggcgacagttgtcgttccaagccacgaaaaagattggggaaaggataattttacaaaaatccccaacggctgcggaggtatcgaaattatgtacccttatatgctgagcgcggctaacgaaggaaaaatcacctttaacaaggctgtcgaagtatgcgccgcgaatccggcaaaacttttcgggttggataataagggaagcctgcgcgcgggcgcggacgcggatattgttatttacgatccgaataaaaatgttacggtaagcgtttccaacactcactctaaatgcgaccatacaatttgggaaggcgtaaacctgcgcggctatcccgtccaaacatacttgcgcggaaaacttgtgtatgacaatggcaagtatgtaggttcgccgggcgacggaaaatatatcgcgcgttcacggcggaaaagcggtgcgttatga

SEQ ID NO: 36312 - protein, 149 aa, Unknown
  Obtained from environmental sample
  misc_feature (1)..(149): Xaa is any amino acid
MAGATVVVPSHEKDWGKDNFTKIPNGCGGIEIMYPYMLSAANEGKITFNKAVEVCAANPAKLFGLDNKGSLRAGADADIVIYDPNKNVTVSVSNTHSKCDHTIWEGVNLRGYPVQTYLRGKLVYDNGKYVGSPGDGKYIARSRRKSGAL

SEQ ID NO: 36313 - DNA, 795 bp, Unknown
  Obtained from environmental sample
  misc_feature (1)..(795): n is a, c, g, or t
ttgatggccgagagcttccctttttgtttaactgattgccgtagaaagccgctttctattcaggttcaccccgacaaaaagcaggcggaagaaggctttaagcgtgaaaatgaagagggaatagcaattgattcgcctttaagaaactataaagaccaaaacgcaaagaacgaattaatctgcgcccttactcctttcacgctcattgccggattcatggaaccgaataaaatatacgcttctttgggaggagattcactgcacgaacaatgggaattggtaagaaaattagaatctctttacccgcaggatgcaggcgcttattcgccgcttttccttaatgtaatttcactacagccagggcaggggctttttattcctgcgggtacgccccatgcgtatatcagcggtttcggcgtagaattaatgaccagttccgataatgtaatccgcggcggacttacaagcaagcacgttgacgtcgatgaattaaaaagaatagcaaagccggttccttttgttccgcagataattactccttgcggcgaaccgctgacttgctatcctctgcatggagaaaatttttctctttatcacattcacggcggcgaaaaaaccgtattttttccgcagagcggtcattcaatctgcatagtaatggaaggggaattaaaaatagagaatcagatttttaaaaaaggcgagtctttttatcttccgtcctgcggcaaagacgctcttttactagaaggaaacttttccctgttcgccgcatgcgtaaccgatgcaaaatga

SEQ ID NO: 36314 - protein, 264 aa, Unknown
  Obtained from environmental sample
  DOMAIN (1)...(231): Phosphomannose isomerase type I
  misc_feature (1)..(264): Xaa is any amino acid
MMAESFPFCLTDCRRKPLSIQVHPDKKQAEEGFKRENEEGIAIDSPLRNYKDQNAKNELICALTPFTLIAGFMEPNKIYASLGGDSLHEQWELVRKLESLYPQDAGAYSPLFLNVISLQPGQGLFIPAGTPHAYISGFGVELMTSSDNVIRGGLTSKHVDVDELKRIAKPVPFVPQIITPCGEPLTCYPLHGENFSLYHIHGGEKTVFFPQSGHSICIVMEGELKIENQIFKKGESFYLPSCGKDALLLEGNFSLFAACVTDAK

SEQ ID NO: 36315 - DNA, 489 bp, Unknown
  Obtained from environmental sample
  misc_feature (1)..(489): n is a, c, g, or t
atgcgtaaccgatgcaaaatgaaaatccttttagacgccgattcgtgtcctaagtccgtaagagacttgttgctcagaagagcggcaaaacttaaaataagaataatatttgccgctaacaggcaaatccccgaatcggacggggcggaaatggaaatttgttccggtaaagaaaatgccgccgacgacaggattgtagaactatccgaaaaaggcgatcttgcgataacaagggacgttccgcttgcaaaaaggctcatagaaaaagacgtgtctgtaattgacgaccgaggcagggtttttacacataacaatataaatgaatatctttccatgcgtaattttaaagtaggactggctgacaacggacttgaaatcgtaagaataccgaattacggaaagaaagaacttaaatcgttagccgatgcgctggataggacattaaccgctatgctccgtcttcagggtactggttctgcgcctgcttga

SEQ ID NO: 36316 - protein, 162 aa, Unknown
  Obtained from environmental sample
  DOMAIN (7)...(150): Uncharacterized BCR, YaiI/YqxD family COG1671
  misc_feature (1)..(162): Xaa is any amino acid
MRNRCKMKILLDADSCPKSVRDLLLRRAAKLKIRIIFAANRQIPESDGAEMEICSGKENAADDRIVELSEKGDLAITRDVPLAKRLIEKDVSVIDDRGRVFTHNNINEYLSMRNFKVGLADNGLEIVRIPNYGKKELKSLADALDRTLTAMLRLQGTGSAPA

SEQ ID NO: 36317 - DNA, 486 bp, Unknown
  Obtained from environmental sample
  misc_feature (1)..(486): n is a, c, g, or t
ttgaccagttcctcgatctccggtacgaccacccggcctatgaccgcctctatctcctcaagcgccgtcccgccgggccgcagcagcgtaggctccccacccatgaacgagacgatggtcgactctatccccaccgaacactcgcccccgtcgatgaccatatccaccgctgaaccgagctgcgccctcacgtgctccgccgcggtgggactgacggagccgaagaggttggcgctcggcgccgctatcgggacgccggcggcaagtatcaagccgcgagcgatctcatttgaaggcatccgcaacgccgcgcccggcagaccggcggtcactatgtcgggaacaacgggcttcttgggaaggacgacggtcagcggccccggccaaagcgcgtcgatcagccttttggcggccatcgggacgtcaaccgccaaatcgccaagccgctctttttcggcgatgtgcagaatcaacgggtcgaaatag

SEQ ID NO: 36318 - protein, 161 aa, Unknown
  Obtained from environmental sample
  SIGNAL (1)...(22)
  misc_feature (1)..(161): Xaa is any amino acid
MTSSSISGTTTRPMTASISSSAVPPGRSSVGSPPMNETMVDSIPTEHSPPSMTISTAEPSCALTCSAAVGLTEPKRLALGAAIGTPAASIKPRAISFEGIRNAAPGRPAVTMSGTTGFLGRTTVSGPGQSASISLLAAIGTSTAKSPSRSFSAMCRINGSK

SEQ ID NO: 36319 - DNA, 768 bp, Unknown
  Obtained from environmental sample
  misc_feature (1)..(768): n is a, c, g, or t
ttggcacccggaaaattattaaggaggcattttatgaaaataaaacattttttggtatttgcgttgataccgtccattctttttttagcgggttgtaaccccacaaacgcgcaatataatagaagcaccatatctgtttttggaacaggcgttgttttggctcagcctgatatgatccagatgagcataactttaagtaaaaccgccccaacaaccaaaagcgctcaggaagaagtaagcaagatgaccagacaagcgttggcgatttttaaagaggctaatatcgaagataaaaatataagcaccgcatctttaacattcaatacggagtatgcttacaacagcggcaggcgtgttttaatcggtcagagagctgaacaaagaattactttttccatcgaagatattaatagtgataatgaaaaagtctcggtaataatagataatcttataaaaattaatggaatagaattaaatcaactgaatttcagcgtaaaagataatacggagtattttatcaagtccagagaactggctttccaaaaagccgttgaaaaagccaatcaatacgccgaattgtcagacttaaaaataattaaagtattaagcatatcggaagaaggaacgccgcaagtttcgacaacgcgcaaattgtatactcaaaacgcgtttttagaggcggattcttttgccggcacttcaaccgtattgccaatgggagaattggaaataacaaccaaaatactggtagtgtttctgttaaagtaa

SEQ ID NO: 36320 - protein, 255 aa, Unknown
  Obtained from environmental sample
  DOMAIN (40)...(255): Protein of unknown function (DUF541)
  misc_feature (1)..(255): Xaa is any amino acid
MAPGKLLRRHFMKIKHFLVFALIPSILFLAGCNPTNAQYNRSTISVFGTGVVLAQPDMIQMSITLSKTAPTTKSAQEEVSKMTRQALAIFKEANIEDKNISTASLTFNTEYAYNSGRRVLIGQRAEQRITFSIEDINSDNEKVSVIIDNLIKINGIELNQLNFSVKDNTEYFIKSRELAFQKAVEKANQYAELSDLKIIKVLSISEEGTPQVSTTRKLYTQNAFLEADSFAGTSTVLPMGELEITTKILVVFLLK

SEQ ID NO: 36321 - DNA, 900 bp, Unknown
  Obtained from environmental sample
  misc_feature (1)..(900): n is a, c, g, or t
atgcccaatatattggcagtcttggttgttgaaaatataaaacccttgcccaaaggagaaccttcaatagaaatggtgatttcttcttactcagacggagaaattatcgccgaagccgttgatcttgacacaggagccggcggcgaacattgtatattgactgtttccttaaaatcccttgatgaatcgtcccgagatataactattcctgatttcgctctggaatcaaacgaggagccgccttcaagtttgtatcagcgcgctaaaaaggtgcggcaaaaagacgtttcttacacatggcttcttgttcttattgttgtttttattgttttagggcttatcgcgggctggctgttcatatttgacggtatggatgttgtcaactcaattgtaaataagacatcttctgaaaaagttgttacacctctgcctgttaaggaacctacgggacacgtgaaaaaaacggaacctgtaaaaaaacaggagccggaacctgttaaagagcctgagcctgttaaagcggtcgaacctgttaaagtgaccgaacctgccaaaccgcctgagcctgttaaaccgcccgagccggtcaagcagactgagcctgttcaacaaaaagttgaaccggttcctgtgattcaagctcccgctaccgcgccggcgcaaagaccgcaacagagaggagaaacgcgcaatccgccggttgcgtcatataaagttccaactactatcccaagagagggcgtaaattacagaattcgatggggcgatactttatgggatattgccgaagcgttttaccgtaatccctggctgtatccgagaattgccaggtataataacataagaaacccgaacttgattatttcaggacggacaatacggattcctcccaggaattaa

SEQ ID NO: 36322 - protein, 299 aa, Unknown
  Obtained from environmental sample
  DOMAIN (250)...(296): LysM domain
  misc_feature (1)..(299): Xaa is any amino acid
MPNILAVLVVENIKPLPKGEPSIEMVISSYSDGEIIAEAVDLDTGAGGEHCILTVSLKSLDESSRDITIPDFALESNEEPPSSLYQRAKKVRQKDVSYTWLLVLIVVFIVLGLIAGWLFIFDGMDVVNSIVNKTSSEKVVTPLPVKEPTGHVKKTEPVKKQEPEPVKEPEPVKAVEPVKVTEPAKPPEPVKPPEPVKQTEPVQQKVEPVPVIQAPATAPAQRPQQRGETRNPPVASYKVPTTIPREGVNYRIRWGDTLWDIAEAFYRNPWLYPRIARYNNIRNPNLIISGRTIRIPPRN

SEQ ID NO: 36323 - DNA, 384 bp, Unknown
  Obtained from environmental sample
  misc_feature (1)..(384): n is a, c, g, or t
atgtatcagatcggccgagatattcgatatgattcgttttatcgtccgccggtgtggactgtaggcatggggctggtggcaagcgccgcggcgattatccagcttgccgcgcccaaagaacggcgggtgggactgcccaacagccattaccttatacatcagcccctttcgggaattcgcggcgttgccacagatattgaaattcacgccagagaactggacaaactgcgggaaaaaatcaaccgcctcatagccgatgaaaccggcaatcctttcagccaggttgaaaaagatactgaccgcgattactggatgagcgcgcaggaggcggtaaaatacggccttatcagcaaggtcattaccaaccgggacgagattaaatag

SEQ ID NO: 36324 - protein, 127 aa, Unknown
  Obtained from environmental sample
  DOMAIN (5)...(123): Clp protease
  misc_feature (1)..(127): Xaa is any amino acid
MYQIGRDIRYDSFYRPPVWTVGMGLVASAAAIIQLAAPKERRVGLPNSHYLIHQPLSGIRGVATDIEIHARELDKLREKINRLIADETGNPFSQVEKDTDRDYWMSAQEAVKYGLISKVITNRDEIK

SEQ ID NO: 36325 - DNA, 675 bp, Unknown
  Obtained from environmental sample
  misc_feature (1)..(675): n is a, c, g, or t
atgcggaataaaatagtgaattcggctgatgaggctgtaacgccgataaaagacggcgccatcattatggtcggcggctttatggcatgcggcacgccggaaattttaattgacgcgttggttaaaaaaggcgtacaaaatttgaccgttatatgcaatgacggcggatggcctgacaggggcgtcggcaggctcatagccaatgggcaggtgaggcgcctaatcgcgtcccatgtggggcttaaccccgaagtggcaaggcgcagcaataccacagtcgaggccgacaggatggaattgaccctggttccgcaggggacgctcgccgagcgcataagggcgggcggcgcgggacttggcggcgttcttactccgaccggggtggggacaataatagccgagggcaaacatataataaatatcgacggcagggacttcctgctggaaaatcccctccgcgcggatttcgccctgctcagggcttccaggattgataaaatggggaacacgattttcttcggaaccacaaaaaattttaacccccttatggcgactgccgccgattatgtaatcgccggggcctgtgagattgtagaggccggcggcattgatcctgacgttatacatctttcaggcatatttgtagacgcgatagttggaggggaaaaaccatga

SEQ ID NO: 36326 - protein, 224 aa, Unknown
  Obtained from environmental sample
  DOMAIN (6)...(221): Coenzyme A transferase
  misc_feature (1)..(224): Xaa is any amino acid
MRNKIVNSADEAVTPIKDGAIIMVGGFMACGTPEILIDALVKKGVQNLTVICNDGGWPDRGVGRLIANGQVRRLIASHVGLNPEVARRSNTTVEADRMELTLVPQGTLAERIRAGGAGLGGVLTPTGVGTIIAEGKHIINIDGRDFLLENPLRADFALLRASRIDKMGNTIFFGTTKNFNPLMATAADYVIAGACEIVEAGGIDPDVIHLSGIFVDAIVGGEKP

SEQ ID NO: 36327 - DNA, 579 bp, Unknown
  Obtained from environmental sample
  misc_feature (1)..(579): n is a, c, g, or t
atgaacttcaacatattaatcgcaggcgttggtggtcaaggcacactccttgcgagcaaaatttttggcaactatgcacagttgataggcaaagactgcaaagtatccgaagtgcatggaatggctcaacgcggcggcagcgttgtgacttatgttagaattgcagacaaagtttatagccccttgtttgacaaaaagcaagccgatgttgtgctggcttttgaggaacttgaagccttgcgttctgcggggtatgttaaagacgacgggattatcgttgtcaataagcagaatatatatccaatgccgtgcgctttgggtatggctgaatatcctagcgatatttacgagcagttggcggagtataaggctgcgattcacaagatagatgcgattagcattgctaccaaattgaataatattcgcacggttaatatcgctatgctcggtttttgtgcggcggtgttgggtctaaagagagatgtttttgtggaggcgataaagagaagtgtgggtggggctacgttggaggttaatctaaaggcgtttgaggggggatttactatattctcccactaa

SEQ ID NO: 36328 - protein, 192 aa, Unknown
  Obtained from environmental sample
  DOMAIN (11)...(188): Pyruvate ferredoxin/flavodoxin oxidoreductase
  misc_feature (1)..(192): Xaa is any amino acid
MNFNILIAGVGGQGTLLASKIFGNYAQLIGKDCKVSEVHGMAQRGGSVVTYVRIADKVYSPLFDKKQADVVLAFEELEALRSAGYVKDDGIIVVNKQNIYPMPCALGMAEYPSDIYEQLAEYKAAIHKIDAISIATKLNNIRTVNIAMLGFCAAVLGLKRDVFVEAIKRSVGGATLEVNLKAFEGGFTIFSH

SEQ ID NO: 36329 - DNA, 531 bp, Unknown
  Obtained from environmental sample
  misc_feature (1)..(531): n is a, c, g, or t
atgaaaggggtttactcattgtcaggaaaagagccactcattggcaaggacgtgttcatagctccgggtgctcgtgttataggcgaggtggaactctcggatgatgtttccatttttcacaatgcagttttgcggggagatataaatagcataaaagttggaaaaaactcaaatattcaagacaattcaacggtgcatttggcaagcgataaaggcgttgttataggcgtgggggttaccgttgggcataatgccattatccacgcttgcatagttgaggattactgtattattggcatgggagcttgcgttatggatggtgccgtaatcggtcaccacagcattgttggtgcctgcgcccttgtcaccagcggcaaggaatttccgccttattcccttataaccggaagcccagcacggagggttagggatttgacaaaagaggaagtagagcactgcgagtggagcgcgaaaaagtatgtggaagttaagaatatgttcttagcagattactatattaccccacagtga

SEQ ID NO: 36330 - protein, 176 aa, Unknown
  Obtained from environmental sample
  misc_feature (1)..(176): Xaa is any amino acid
MKGVYSLSGKEPLIGKDVFIAPGARVIGEVELSDDVSIFHNAVLRGDINSIKVGKNSNIQDNSTVHLASDKGVVIGVGVTVGHNAIIHACIVEDYCIIGMGACVMDGAVIGHHSIVGACALVTSGKEFPPYSLITGSPARRVRDLTKEEVEHCEWSAKKYVEVKNMFLADYYITPQ

SEQ ID NO: 36331 - DNA, 1218 bp, Unknown
  Obtained from environmental sample
  misc_feature (1)..(1218): n is a, c, g, or t
atgacagaatcggccgagccgcttttatgtggcaggctccaggggaaaggatctgtaaccggaatgatcgcggctattctagaagcggcgggtataaaaaccgccagttacgcctcgccccatgtaagcgatttcagagaaaggatcacggttgggggcaattttttagatgaagaaatttacgctaacgccggaaaggagttaatggagcttgcgggtcaagtcaaattaaagaacggcgaacagatgagctatttcgagcttttaaccatgtggttctttctctgtgctcgcctttccaattgcagcgcaatggcggtagaaaccggaatgggcgggaggcttgatgctacaaatatacttgatccacttgtatcagtgataaccattatcgagctggaacacaccgagtacctgggaaataccatagccgccatcgccgctgaaaaagcgggaataataaaacaaggccgcccccttgtccttgcagaacaatccgttcaggctctggatgttttctgggaacatgcgaaacgtcgcgccagcccttttttttattttcccgactgcggagaggtaaaaaacacccacgtggaaaaaagcggcacttcctttgacctggttttaaaaagcgaaactatccccggcctttttgtaccgatacccggtgaggtccaggcaaaaaacgcaggcctcgcggtgctggctgttagaaccgctttccacgatattcaaaacgattgcctttacaaagggcttagcgctttctcgcttcccgcacgctttgaaaatttcttcccgccgctttttgttattgacggcgctcacaccaaaaccagcgtaaaaacctgccttgacacattcacctcgctttacggcgaaggggacatcctccttttcggctgcgcggaaggaaaggacgtcctttccatggctgagctttgcgttccccgcttttcgcggatcattattacaaggccgggcacatttaaaaaaagcaatgccgaagaaattcacgccgcttttatccaagcggcggaaactcaaaaagccaacctggaaattatttttttaccggatacagatgaagcaattgatttggcaatacaacttgctgttaagcatgggcttccggtgcttggcactggctccttttatctcgccggagagatacgaggaaatattaaaaatggattaataaccacgaaccaacactaa

SEQ ID NO: 36332 - protein, 405 aa, Unknown
  Obtained from environmental sample
  DOMAIN (15)...(237): Mur ligase middle domain
  misc_feature (1)..(405): Xaa is any amino acid
MTESAEPLLCGRLQGKGSVTGMIAAILEAAGIKTASYASPHVSDFRERITVGGNFLDEEIYANAGKELMELAGQVKLKNGEQMSYFELLTMWFFLCARLSNCSAMAVETGMGGRLDATNILDPLVSVITIIELEHTEYLGNTIAAIAAEKAGIIKQGRPLVLAEQSVQALDVFWEHAKRRASPFFYFPDCGEVKNTHVEKSGTSFDLVLKSETIPGLFVPIPGEVQAKNAGLAVLAVRTAFHDIQNDCLYKGLSAFSLPARFENFFPPLFVIDGAHTKTSVKTCLDTFTSLYGEGDILLFGCAEGKDVLSMAELCVPRFSRIIITRPGTFKKSNAEEIHAAFIQAAETQKANLEIIFLPDTDEAIDLAIQLAVKHGLPVLGTGSFYLAGEIRGNIKNGLITTNQH

SEQ ID NO: 36333 - DNA, 771 bp, Unknown
  Obtained from environmental sample
  misc_feature (1)..(771): n is a, c, g, or t
gtgaagaagaacgcagagagtttatggaaaaagagaggaaggacgaaggaaatgaataaaccagtcatcactgtacagaacctgaccaaacggtacaaaggcgcgggaaaacctgcggtggatagcatcagtttttctgtgggcgaaggggagttcttcgcgttcctcgggcccaacggcgccgggaaaaccacgactatctcaatcctgaccacaacgctttccaaaacttccggggaactgtgcatcgccggatttgatgtggacacccatgcgcggcaggtacgcgaagaaatcgggatcatcttccagcgaccaagccttgacgagaacctcagcgtcgaagaaaacattcgcttccacgcctgcctctacggcatgtgcggctaccgcccctcttttaagctgatgccgacggtttaccgcaaaagggtactggaactagccgacatggttggcctcgccgatgtattgggaaagcccgttaaaaaactttctggcggcatgcggcgcaagctggaaattatccgcagcctgatccacacaccacgggtactcttccttgatgagccgactcaggggctggacgcagtaagtcgccggggactgtgggactacattaacacggtacgccgccaatacgggacaacagtattcctaaccacccactatattgacgaggcggaaaacactgacacggtatgcgtaattaatcacggtaagatcgtctttatggattcccctgaggagatgaagcggaatttgctntaa

SEQ ID NO: 36334 - protein, 256 aa, Unknown
  Obtained from environmental sample
  DOMAIN (50)...(240): ABC transporter
  misc_feature (1)..(256): Xaa is any amino acid
MKKNAESLWKKRGRTKEMNKPVITVQNLTKRYKGAGKPAVDSISFSVGEGEFFAFLGPNGAGKTTTISILTTTLSKTSGELCIAGFDVDTHARQVREEIGIIFQRPSLDENLSVEENIRFHACLYGMCGYRPSFKLMPTVYRKRVLELADMVGLADVLGKPVKKLSGGMRRKLEIIRSLIHTPRVLFLDEPTQGLDAVSRRGLWDYINTVRRQYGTTVFLTTHYIDEAENTDTVCVINHGKIVFMDSPEEMKRNLL

SEQ ID NO: 36335 - DNA, 441 bp, Unknown
  Obtained from environmental sample
  misc_feature (1)..(441): n is a, c, g, or t
gtgttctatcaatttacccgtgtaaataatttgatcaacccgatagaaaatatttcagcgtggctttaccgcaccgcccaaaacagaatcatcgatcattataaaaaaaagaaagatgaaccattacccgtatcttacgatgaagaaaatgacgaatatatttttgacgagataagcgatattatttacggcgaagaagcaacgccggaaattgaaatgctgcgttcattggttttggaggaaattcaaaacacccttaccgatttgccaaaagaacagcgcgatgtttttgagctgaccgaattgctggattattccgtaaaagaggtcgcggaaaaaaccaatgcacctgttaatacagttctttcgcgtaaacattacgctgtaaaatttttacgaaaaagactacaggaactatatgacgatgttatttgcaaataa

SEQ ID NO: 36336 - protein, 146 aa, Unknown
  Obtained from environmental sample
  DOMAIN (85)...(134): Sigma-70, region 4
  misc_feature (1)..(146): Xaa is any amino acid
MFYQFTRVNNLINPIENISAWLYRTAQNRIIDHYKKKKDEPLPVSYDEENDEYIFDEISDIIYGEEATPEIEMLRSLVLEEIQNTLTDLPKEQRDVFELTELLDYSVKEVAEKTNAPVNTVLSRKHYAVKFLRKRLQELYDDVICK

SEQ ID NO: 36337 - DNA, 690 bp, Unknown
  Obtained from environmental sample
  misc_feature (1)..(690): n is a, c, g, or t
atgattcaggggatatttgagctttcggatacatccgtaaaggaagttatggttcccaggatcgatgtagagttcatttccaacaagttaagccgggaagagctgcttgcaagaatagttgaaagcagtcattcccgctttccggtttacgaagaaacaatagataaagtcatcggtattctctatgtaaaagacgtactaaagagcctggttaaaaccgataagggtatgttagacataaaggatctggtacacaagcccttctttgttccggaatcaaaacgcattgacgaccttctaagggagctgcgccgccgcaaggtgcatatcgcggttgtcgtggatgaatacggcggagtttcaggcatagtttgcatggaaaatattttagaagaaatcattggggatattcaggatgagttcgataatgaaagtgaggatgttttggaacttggcggcggagcgtggctctgcgaaacaagggtcaatctggaggatctttcagaacgcatcgggataaaatttccggtagagaaattcgatacccttggaggctttgtctttgaccttttcgggaaaatacctgtaaaatatgaaaaaattgattataaagattacagttttataattcaggaaatggacgggcataaaattaattcaataaaaattgttacacagaagaaagaatag

SEQ ID NO: 36338 - protein, 229 aa, Unknown
  Obtained from environmental sample
  DOMAIN (149)...(227): Transporter associated domain
  misc_feature (1)..(229): Xaa is any amino acid
MIQGIFELSDTSVKEVMVPRIDVEFISNKLSREELLARIVESSHSRFPVYEETIDKVIGILYVKDVLKSLVKTDKGMLDIKDLVHKPFFVPESKRIDDLLRELRRRKVHIAVVVDEYGGVSGIVCMENILEEIIGDIQDEFDNESEDVLELGGGAWLCETRVNLEDLSERIGIKFPVEKFDTLGGFVFDLFGKIPVKYEKIDYKDYSFIIQEMDGHKINSIKIVTQKKE

SEQ ID NO: 36339 - DNA, 357 bp, Unknown
  Obtained from environmental sample
  misc_feature (1)..(357): n is a, c, g, or t
atgcttccgtataatcgtgaactgaaatcgcggacacaggaattgcggaaaaaggcgacaccccaggaaaacaagctatggtatcgctttttgcgcaaacatcctggacattttacaaggcagaaaacgataggcaattatattgtggattttttgtgcccatcaaaaaaactggttgttgagattgatggaagtcggcattataccgacgacgggcttgcatacgaccgagtaaggagcgagtttttggagagtttgggcttgcatgtattacggtttacaaacaaggaagtcgattcttcttttgacagcgtatgcagggctatacaggacgatctggatttacatggcgagtag

SEQ ID NO: 36340 - protein, 118 aa, Unknown
  Obtained from environmental sample
  DOMAIN (6)...(114): Protein of unknown function (DUF559)
  misc_feature (1)..(118): Xaa is any amino acid
MLPYNRELKSRTQELRKKATPQENKLWYRFLRKHPGHFTRQKTIGNYIVDFLCPSKKLVVEIDGSRHYTDDGLAYDRVRSEFLESLGLHVLRFTNKEVDSSFDSVCRAIQDDLDLHGE

SEQ ID NO: 36341 - DNA, 594 bp, Unknown
  Obtained from environmental sample
  misc_feature (1)..(594): n is a, c, g, or t
gtgatcttcgcgtggtatcccggcgagttaggcggcaaagccgttgctgacgttatctttggcgatacggttccgtccggaaaactccccatcaccttcccggcttcgacggcgcagcttcccccttacgatgattactccatgaagggccggacttaccgctacatgagagaaaagcccctgtatccatttggcttcgggctttcctataccggtttccgttttgattcgcttacgctttccgcgccgtcaatttcggcggcagcgacggtaaaggcgaaggtaacgctgagcaatactggcaagcgggacgctgaaaatgtggtgcagatctacgtttcaaaagatgagcgaggagctgacgatcctgagttttcgctgcgcgctttccgccgcgtttctgtcccggcgggcaaggctataacaacggaattcgcccttcccgccgcggcctttgaaacggtgaatgccgaaggggattccgtgctgctgccaggttcctacacggtaattgccgcagactcagctccattgcctgttgctgtagaaaagggagcctctgttccggtaaaggccaaaataacagtgggctaa

SEQ ID NO: 36342 - protein, 197 aa, Unknown
  Obtained from environmental sample
  DOMAIN (1)...(72): Glycosyl hydrolase family 3 C terminal domain
  misc_feature (1)..(197): Xaa is any amino acid
MIFAWYPGELGGKAVADVIFGDTVPSGKLPITFPASTAQLPPYDDYSMKGRTYRYMREKPLYPFGFGLSYTGFRFDSLTLSAPSISAAATVKAKVTLSNTGKRDAENVVQIYVSKDERGADDPEFSLRAFRRVSVPAGKAITTEFALPAAAFETVNAEGDSVLLPGSYTVIAADSAPLPVAVEKGASVPVKAKITVG

SEQ ID NO: 36343 - DNA, 795 bp, Unknown
  Obtained from environmental sample
  misc_feature (1)..(795): n is a, c, g, or t
ttgagggacatacttcgcggcaagtggggctttaagggccatgtggtttcggactgctgggctatacgcgacttccacgaacaccacaagataacggaaacgcccgaagaatctgcggcccttgccctgaactcaggatgcgaccttaactgcggctgtacctacccgatgcttaccgcttccctaaaaaaaggcctggtaaccgaggaggcgatcaacaccgccctaagccgggttttgcgtacccgcttcaagctgggaatgtttgatactgcgggaaagggtaaatacgacgagctcgaccgcaaggtgatcaactgcgagaaacaccggcaacttgccctaaaagcggcggagaaatccatagtcctcctaaagaacgacaagggccttttgcctctggattccagcgctaaaaagatcaccgttgtcggcccgggcgcggccaatgcccatacgctgttcggcaattattacggggtaagttcccgttttgttaccgttcttgaggggttgggggaaaaggtaaaggacaagtacgggatcaatctggaataccgccagggctgtcttatgtacggcgcgaacaacatgtcaaacgccgaattcggccaggcaaacgccgcagacatcattatcgccgtcatgggcctggacggggctattgagggggaggagggcgatgccattgcttcggactccaacggcgaccggacttacattgagcttccaccctggcagataaactttttacagaaagtccgcaaagcgggcaaaccagtattctggtactga

SEQ ID NO: 36344 - protein, 264 aa, Unknown
  Obtained from environmental sample
  DOMAIN (122)...(264): Glycosyl hydrolase family 3 C terminal domain
  misc_feature (1)..(264): Xaa is any amino acid
MRDILRGKWGFKGHVVSDCWAIRDFHEHHKITETPEESAALALNSGCDLNCGCTYPMLTASLKKGLVTEEAINTALSRVLRTRFKLGMFDTAGKGKYDELDRKVINCEKHRQLALKAAEKSIVLLKNDKGLLPLDSSAKKITVVGPGAANAHTLFGNYYGVSSRFVTVLEGLGEKVKDKYGINLEYRQGCLMYGANNMSNAEFGQANAADIIIAVMGLDGAIEGEEGDAIASDSNGDRTYIELPPWQINFLQKVRKAGKPVFWY

SEQ ID NO: 36345 - DNA, 666 bp, Unknown
  Obtained from environmental sample
  misc_feature (1)..(666): n is a, c, g, or t
atggataatgaagcgaagatcaacgagttaatttctcaaatgacgattgaggagaaggtctcgcagttgagctacacgagcgcggcgataccgcggcttggaatacctgaatataactggtggaacgagtgtctgcacggggttgcgcgcgcgggtaacgccacggtgtttccgcaggccattgcgttggcggcgacttttgacgaagcttttatcgaagaagtcgcatcggcgatttccgacgaagcgcgagccaaatacaacgaggcgatcaagcaggggaaccggggccagtactggggcctgaccttctggacgccgaatatcaatattttccgcgacccgcgctggggccgcggtcaggaaacctacggcgaggatccttaccttaccggccgcatcggcaccgcgtttgtgaagggcttgcagggcaatgatcctgaaaacatgaaaaccgctgcctgcgccaagcactatgccgtccattcgggccctgaaaaattccgccatacctttgatgcggttgtttccaaaaaagacctttttgaaacctacctgcccgctttcaaggcgctggtcgatgcgggagttgaatcggtaatgggggcgtataaccgcaccctgggcgagccctgctgcggcagtccctatctgtttcggccataa

SEQ ID NO: 36346 - protein, 221 aa, Unknown
  Obtained from environmental sample
  DOMAIN (27)...(221): Glycosyl hydrolase family 3 N terminal domain
  misc_feature (1)..(221): Xaa is any amino acid
MDNEAKINELISQMTIEEKVSQLSYTSAAIPRLGIPEYNWWNECLHGVARAGNATVFPQAIALAATFDEAFIEEVASAISDEARAKYNEAIKQGNRGQYWGLTFWTPNINIFRDPRWGRGQETYGEDPYLTGRIGTAFVKGLQGNDPENMKTAACAKHYAVHSGPEKFRHTFDAVVSKKDLFETYLPAFKALVDAGVESVMGAYNRTLGEPCCGSPYLFRP

SEQ ID NO: 36347 - DNA, 861 bp, Unknown
  Obtained from environmental sample
  misc_feature (1)..(861): n is a, c, g, or t
gtgctgaccgaggacggcagcacgggctactgtttctcataccggctcagagtgtttgagtatggcggcggggagtttgccgcttccgcgcccgtagtcaatgaaaaagccgacgatcctgttttggacgcgctgttgtcaaaaacatggtcgcctgaatcgtatttaacgatgattaactccaaaacaatcaatcttgaagatttgtcccgtaaatggcgctttgatccgggacaggagaccggccttgccagaatttttgtacccgatattgataaaagctattcgtataccggcatccgccctgacgggaatcgcgtctggcgttttgagggaaccaacctttcaatgcagcttagatccgatacgactctggccgtgcagtttctggaagggagcggcagtacaaggactttgctctttgtctcgctgcctgtcagcgtggacgatttaatcttacaggaaaccgcccgccgcgagagactgtacaacaagatttacagccaggggccggtttataccagcaacaactacggaaccatcacgtttaagggaggcgggagtttttcatggcggaattttgatctcctggtaccccattacatccccgaagacatcgagggtgacgggacagttttgttagaccttttccttgattctacgcttgaggatcgctacgacggggcatttaccttccgttttgcagctaaaaaggctgagttgtactgtatgtactcgcttgacaatgaggggttcaggatagagatagtcccggattcgagcatcgaggaagtcaccattaccaaccggggggcctcgccaatggttctgtattttttccgggatacagagcctcaataa

SEQ ID NO: 36348 - protein, 286 aa, Unknown
  Obtained from environmental sample
  misc_feature (1)..(286): Xaa is any amino acid
MLTEDGSTGYCFSYRLRVFEYGGGEFAASAPVVNEKADDPVLDALLSKTWSPESYLTMINSKTINLEDLSRKWRFDPGQETGLARIFVPDIDKSYSYTGIRPDGNRVWRFEGTNLSMQLRSDTTLAVQFLEGSGSTRTLLFVSLPVSVDDLILQETARRERLYNKIYSQGPVYTSNNYGTITFKGGGSFSWRNFDLLVPHYIPEDIEGDGTVLLDLFLDSTLEDRYDGAFTFRFAAKKAELYCMYSLDNEGFRIEIVPDSSIEEVTITNRGASPMVLYFFRDTEPQ

SEQ ID NO: 36349 - DNA, 828 bp, Unknown
  Obtained from environmental sample
  misc_feature (1)..(828): n is a, c, g, or t
gtgtctgatgatcagattatctttgtcaatctggaagatgaggatttatctgagcttttggatcacaagaagctgcacgaatatataaaggcccgcatcatgaaagacaaatggatgtatatttttattgatgaaatccaaaactgcaaaaattatgaaaaaacggtttcgagcctttacctcaaaaaaaacctggatatatatctcaccggatcaaacgcctatattctctcaggcgaacttgctaccaaactcaccgcccgttacattgagattgatattcttccgttttcttttgaggaatacagtgaagcggtaaaaaactccgacaagcgggaacgttttaaccagtatatgaacaggggcgcgttcccttatgcaacccgctttacggacaattcactggcgcacagccagtatttggaagggatttataacaccgtcctggtcaaagatgttatgacaaataaaaatttgaaagatataaccctgcttaaatcaatagcggcttttttggccagcaatgtggggagtccggtttccgcgaagaaaatcgcaaatacgctaagctccgcaggccgccctacaggttccgccacggtcgatacttatttggaagcgctctgtgacgcgtaccttttctataaagtcaaccggtatgacattaaagggaagatgcacctcaaatccgaaagcaagtattatatttgcgacacgggtctgcgaaatatgatactgggaacaacnaaacaagatatagggcaccagatagaaaacatcgtttttttggaacttttgaggcgcggatataccgtcaatatcgggtaa

SEQ ID NO: 36350 - protein, 275 aa, Unknown
  Obtained from environmental sample
  misc_feature (1)..(275): Xaa is any amino acid
MSDDQIIFVNLEDEDLSELLDHKKLHEYIKARIMKDKWMYIFIDEIQNCKNYEKTVSSLYLKKNLDIYLTGSNAYILSGELATKLTARYIEIDILPFSFEEYSEAVKNSDKRERFNQYMNRGAFPYATRFTDNSLAHSQYLEGIYNTVLVKDVMTNKNLKDITLLKSIAAFLASNVGSPVSAKKIANTLSSAGRPTGSATVDTYLEALCDAYLFYKVNRYDIKGKMHLKSESKYYICDTGLRNMILGTTKQDIGHQIENIVFLELLRRGYTVNIG

SEQ ID NO: 36351 - DNA, 663 bp, Unknown
  Obtained from environmental sample
  misc_feature (1)..(663): n is a, c, g, or t
ttgcagaaaacggcacatagagaggcaaattcacgaaatatgaaaatacaagagtttatatccgggcgattggtacaacaataccactataaatgtttcagccctactaccgttaatcacgcgtggttggttgatgatgagcaacttagttatttattaagcagggcgaatatcattttgggcgagttgaacgcgttttccacgcttattcccaacgtggatttttttataaaaatgcacgtcaaaaaagaggctgccaatagtagcggcattgaggggacgcaaaccaatgtcgaggagtcgttgcaaaaagcgcaaaatctcgccccagaaaaaagaaacgactggcaggaagtcgaaaactatgttacggcgatgaatacggctatagatgaattgacccgtttacccctatgtaacagattgttgaaacaaacgcacgccgtcttgcttgagcgtgtaagaggcgaacacaagcgacccggcgaatttcgtacaacccaaaattggatcggcggaacgagtataaacgacgcggtttttattcctccgcatcctgccgatgttatggatctaatgagcgatttggaacaatttctccaaaacaaaagtattttcgttccggatctgttaagattgccatcgcccctcggccgattctga

SEQ ID NO: 36352 - protein, 220 aa, Unknown
  Obtained from environmental sample
  misc_feature (1)..(220): Xaa is any amino acid
MQKTAHREANSRNMKIQEFISGRLVQQYHYKCFSPTTVNHAWLVDDEQLSYLLSRANIILGELNAFSTLIPNVDFFIKMHVKKEAANSSGIEGTQTNVEESLQKAQNLAPEKRNDWQEVENYVTAMNTAIDELTRLPLCNRLLKQTHAVLLERVRGEHKRPGEFRTTQNWIGGTSINDAVFIPPHPADVMDLMSDLEQFLQNKSIFVPDLLRLPSPLGRF

SEQ ID NO: 36353 - DNA, 522 bp, Unknown
  Obtained from environmental sample
  misc_feature (1)..(522): n is a, c, g, or t
ttgaataaatcaaatccggtattatttgaatggcttaaatcgcttattatatattataaagatcaattctgttttaatattttagaacaaatatctgaagattatttctcgccaatatcgtcaatatatcattatttgcacatggcaaacgggaattacaggcaatatttaatggggaatgaagtaaaaaccaagaaatatttttatgtgttacggcctattatagcctgtatgtggatagaaaaatataaacagtctcccccaatggaatttgagaaattgttaacactaatagataacaaagaattaatagaaaatattaatggattattgacaaggaaaaaatccggaatagaaatgggaattgaacagaaaataccggtaattaatatttttatagaacaggaattaaaacattttgaggatgctgtaaatttatttgatcctaaaaagaaacctaaacaggataaactggaagaagcctttattaaaatattagaatatgccgaaaaaccctgttag

SEQ ID NO: 36354 - protein, 173 aa, Unknown
  Obtained from environmental sample
  misc_feature (1)..(173): Xaa is any amino acid
MNKSNPVLFEWLKSLIIYYKDQFCFNILEQISEDYFSPISSIYHYLHMANGNYRQYLMGNEVKTKKYFYVLRPIIACMWIEKYKQSPPMEFEKLLTLIDNKELIENINGLLTRKKSGIEMGIEQKIPVINIFIEQELKHFEDAVNLFDPKKKPKQDKLEEAFIKILEYAEKPC

SEQ ID NO: 36355 - DNA, 867 bp, Unknown
  Obtained from environmental sample
  misc_feature (1)..(867): n is a, c, g, or t
atggacaggataaaagccggatatgttgaaggcgccgtatcggtaattgttaatatcgctctttttgtccttaaattatgggcaagcgtaataacaggctcaatcgctcttgccgcggacgcgtggcacacactttccgacacattaagttctattgttgttattattgccgcaaaactggcgtctaaaaaagcggacaaagaacaccccttcggccacggccgctgggagcaaatagcctcgatatttatagcctttattctgggtttaatagcttttatgtttatggaagaatctgtccgggaatttattaataaggacaaaagcgtagaattcggaaaaatcgcaatcatagttacggcggtctcgattgttgtgaaagagttattggcccaatacgcgttttacattggacgaaaaacgcacaataccagcgtaaaagccgacggctggcatcacagatcggacgctctttcttcggtagttgtattagtaggcataatcttcgcaaaaaaattctggtggatggacagtttgcttggcgttattatcgccctgatgttattccacgccgcttttgaaatcatgaaagaggcggttacaaaaattctgggcgaagaacccaaacaaaaactaattgacgacataacagccgagattaagaatatttacaaagaagatttgcatgttcatcattttcacattcacaattatatttcccacaaggaaataacttttcatatccggttaaacaaggaaatctcgataggaaccgggcatcatgtagcttcggctattgaagatatgattttggagaaatttaaaatggcagcgactattcatgttgagccgctggaggatcagtag

SEQ ID NO: 36356 - protein, 288 aa, Unknown
  Obtained from environmental sample
  DOMAIN (11)...(287): Cation efflux family
  misc_feature (1)..(288): Xaa is any amino acid
MDRIKAGYVEGAVSVIVNIALFVLKLWASVITGSIALAADAWHTLSDTLSSIVVIIAAKLASKKADKEHPFGHGRWEQIASIFIAFILGLIAFMFMEESVREFINKDKSVEFGKIAIIVTAVSIVVKELLAQYAFYIGRKTHNTSVKADGWHHRSDALSSVVVLVGIIFAKKFWWMDSLLGVIIALMLFHAAFEIMKEAVTKILGEEPKQKLIDDITAEIKNIYKEDLHVHHFHIHNYISHKEITFHIRLNKEISIGTGHHVASAIEDMILEKFKMAATIHVEPLEDQ

SEQ ID NO: 36357 - DNA, 336 bp, Unknown
  Obtained from environmental sample
  misc_feature (1)..(336): n is a, c, g, or t
ttgttacgcgacaaggccgtagctcttgccgaagaaaaaggctttataaaggaattaaacctttaccgacttattgaaaagctcacgccggatgtttttaagaaggtaaaagactcggacaaggaaatttgcaccaacgtagatttttattcaggctttgtctacaaaatgcttggaatcccgcctgagcttaacaccccgattttcgcggtaagccgcgcggccggctggtgcgcccaccgtcttgaagaaataatcgccggcggaagaatcatccgccccgcgtacaagtgcattcagttacgccgcctgtacacggaaatagacaagcgttag

SEQ ID NO: 36358 - protein, 111 aa, Unknown
  Obtained from environmental sample
  misc_feature (1)..(111): Xaa is any amino acid
MLRDKAVALAEEKGFIKELNLYRLIEKLTPDVFKKVKDSDKEICTNVDFYSGFVYKMLGIPPELNTPIFAVSRAAGWCAHRLEEIIAGGRIIRPAYKCIQLRRLYTEIDKR

SEQ ID NO: 36359 - DNA, 483 bp, Unknown
  Obtained from environmental sample
  misc_feature (1)..(483): n is a, c, g, or t
ttgtatctttgcagaaaaaacaatatgcaagacattgtatgcaaaaaatgtagtagtagccactgtgtaaagagtggttatattcgaggcaaccagcgatataaatgcaatagctgtggttgtaattttaagctgggtgacagccgtggaaaaattaaacccgaagcaaaagcgttagggttactgatgtacggaagtggaaaggccagctatggaatgattgctcgcttgtttaacgtaagccgttcggctgttttgtattggattcgcagccttggctcaaagctacctgaacctgttatagacacagagattgaggaggttagcattgatgagatgtggcattttctcagtaaaaaaaacgaaaaatttggatatggcgggccgtggatcgcagtaacaacaagaccatcggatgggttattggccatcgtaatgctaaaacatttaggcggctgtacgaaaaaacaagaggctttgtga

SEQ ID NO: 36360 - protein, 160 aa, Unknown
  Obtained from environmental sample
  misc_feature (1)..(160): Xaa is any amino acid
MYLCRKNNMQDIVCKKCSSSHCVKSGYIRGNQRYKCNSCGCNFKLGDSRGKIKPEAKALGLLMYGSGKASYGMIARLFNVSRSAVLYWIRSLGSKLPEPVIDTEIEEVSIDEMWHFLSKKNEKFGYGGPWIAVTTRPSDGLLAIVMLKHLGGCTKKQEAL

SEQ ID NO: 36361 - DNA, 528 bp, Unknown
  Obtained from environmental sample
  misc_feature (1)..(528): n is a, c, g, or t
atgccgaccgtgctgatcggcgtcgcgacgtccatatacatttctttcccgatccttaccgggcccgtgcgcgtggcgctggaccaggcgccgccgtggtcgctgtaccgcatgttcaccggggtgtcgtggctgatgtcgctcgccgcgctggtcgaatcgggcacgccgatagccaaggccatgtattcgctgagggcgaacgcctcggcctatctgcgcgaacgcatcgacagcgcgctcgcgttcatgaagaacggcgacaacctcggggcctcgctcaagaagtccgggatgcgctttccggacgacgagcttatcggcgatctcgagatatactccgagctcgacaacttcgaggaggccctcaaccaggtttcgaacgaatacctcaacagcagcatcgaaaagatcggcaaggaggcggcgatgctgaactcgatcgcgctgatgctggtatcgggcatcatagcctgggtgcttctgggcgtgttcgagatgcaaaaccaggtacagaacgcgatgtaa

SEQ ID NO: 36362 - protein, 175 aa, Unknown
  Obtained from environmental sample
  DOMAIN (44)...(167): Bacterial type II secretion system protein F domain
  misc_feature (1)..(175): Xaa is any amino acid
MPTVLIGVATSIYISFPILTGPVRVALDQAPPWSLYRMFTGVSWLMSLAALVESGTPIAKAMYSLRANASAYLRERIDSALAFMKNGDNLGASLKKSGMRFPDDELIGDLEIYSELDNFEEALNQVSNEYLNSSIEKIGKEAAMLNSIALMLVSGIIAWVLLGVFEMQNQVQNAM

SEQ ID NO: 36363 - DNA, 747 bp, Unknown
  Obtained from environmental sample
  misc_feature (1)..(747): n is a, c, g, or t
ttgtctacgcctacgtctaaatctgagtctacgccaacgcgtacgaacgtcccggcgcacataggcataatcatggacgggaacgggcgttgggcgcgcgggcgcgggcaaccgcgtacggcggggcaccgcgcggggacggacgccacgcgggagatcgtgcgggcctgcggggagcttggggtctcctacctgaccgtctacgtgttctcagccgagaactgggggcggccggccatagaggtctccatgctaatggatctgctcgtggagatgactcggcgcgaaatcaagagtttgtgcgagaacaatgtgaggctcatggccatcggcgcgttggacaaactgccgccaaagacgcgggcggcgctccttaaggggatcgaggataccagcggcaacacagggcttacgctgattttggcaataagctacggcgggcgctcggagatcgtgaacgcggcgcgcaccttcgctagggcggcagttgagaatccggaacttatcgacacgcttgacgagagcgcgtttggcgggtatatgtacacgcggggcatccccgacccggaactgatcatacgcacggggggcgaccggcggataagcaactttttgctgtggcaatccgcatacgcggaactgtatatcacagacactctttggccggacttcgacaaggcggcgctgatcgcggcgatagaggactttaacaggcgcgacaggcgcttcggaagggtcaaggaatga

SEQ ID NO: 36364 - protein, 248 aa, Unknown
  Obtained from environmental sample
  DOMAIN (24)...(245): Putative undecaprenyl diphosphate synthase
  misc_feature (1)..(248): Xaa is any amino acid
MSTPTSKSESTPTRTNVPAHIGIIMDGNGRWARGRGQPRTAGHRAGTDATREIVRACGELGVSYLTVYVFSAENWGRPAIEVSMLMDLLVEMTRREIKSLCENNVRLMAIGALDKLPPKTRAALLKGIEDTSGNTGLTLILAISYGGRSEIVNAARTFARAAVENPELIDTLDESAFGGYMYTRGIPDPELIIRTGGDRRISNFLLWQSAYAELYITDTLWPDFDKAALIAAIEDFNRRDRRFGRVKE

SEQ ID NO: 36365 - DNA, 684 bp, Unknown
  Obtained from environmental sample
  misc_feature (1)..(684): n is a, c, g, or t
gtgttaaaggtgatacaattatttgaaattattgaaaaatatttgataattgtagtcagttttaacttgggaggggaaaaactgaaatcatcgcggttatatgtaggcgtctgttttggcgtcttgcttttttttataggcttttttggcgttctaacccctttgttccctcaaaccgcatcggttgacgagtcttcgataatccttggcgaagctccggcttcacaggcaacggaaagcgcttcttccatattgattatgctaaggatggttcttgttcttgctttaaccgccctggcgatttacggcgttgtttttttcataaggcgcattacaaggcaacgtgagaaccctgatcccaaccttaaagtccttgcgcgtgtcccgctttcaagcgattctttcgctgcggtaatttcgcttggggcaaaagcgtggctggtaggcggcggttcaggcggcatcaatcttatttccgaagttgaagacgccgaatcgcttgaaaccntgctgctggaagacgccagaaaaaacgcagagccaaggcgctattttgattttcgatcccttntgcgttttggccgcggtgagaaaaagctttcatcgcaggatagttctattacagaaaacggctaccctttggatagcctgcgcaagcagcgggaaaggcttaaggggctgtaa

SEQ ID NO: 36366 - protein, 227 aa, Unknown
  Obtained from environmental sample
  misc_feature (1)..(227): Xaa is any amino acid
MLKVIQLFEIIEKYLIIVVSFNLGGEKLKSSRLYVGVCFGVLLFFIGFFGVLTPLFPQTASVDESSIILGEAPASQATESASSILIMLRMVLVLALTALAIYGVVFFIRRITRQRENPDPNLKVLARVPLSSDSFAAVISLGAKAWLVGGGSGGINLISEVEDAESLETXLLEDARKNAEPRRYFDFRSLXRFGRGEKKLSSQDSSITENGYPLDSLRKQRERLKGL

SEQ ID NO: 36367 - DNA, 363 bp, Unknown
  Obtained from environmental sample
  misc_feature (1)..(363): n is a, c, g, or t
atgggcatgggaatgggtatgncaatgcaaggcatgggcgctccgacaaatgtccagaatgttcagtttccaaatttgatgccgcacaatatgccccaggaagccggcaatatcagcctgataatggacgtctacatggagatgaccgttgaattgggccgtaccaaaaaactcatcaaggaaattctgagcatgggagaagggacgatcatcgagctggacaagctggccggtgagccggtcgacattttggttaaccataaactcatagcaaagggcgaagttgtagtcattgatgaaaatttcggcgtccgtgttaccgagattgttcctccgcatgaaagaatgaatgacatgggttga

SEQ ID NO: 36368 - protein, 120 aa, Unknown
  Obtained from environmental sample
  DOMAIN (37)...(113): Surface presentation of antigens (SPOA) protein
  misc_feature (1)..(120): Xaa is any amino acid
MGMGMGMXMQGMGAPTNVQNVQFPNLMPHNMPQEAGNISLIMDVYMEMTVELGRTKKLIKEILSMGEGTIIELDKLAGEPVDILVNHKLIAKGEVVVIDENFGVRVTEIVPPHERMNDMG

SEQ ID NO: 36369 - DNA, 738 bp, Unknown
  Obtained from environmental sample
  misc_feature (1)..(738): n is a, c, g, or t
atggctgcaaagaatctttttaacaatcaagctctggtaggaacgaccccgacagaccccaagcatcttgtcactatggaatgggtgcaaaactacgttataggcaaggtcaaggctccggtacgcgccgtcagcacgacaaatctcaccggaacctacgcgccaggagtcgctcctgaccctgtaaccaagggtacgtttaccctcggcatgaccggcgcacttgtaattgacggcgttactctcgctgtaggcgacagggtattaattgccggtcagacagacggcacgcagaacggcatctatgaagtaacggttgctggtgatgctttcacaaatgccgtactcatacgggccgacgattgggacaccaacgatcagctcttcaccggtgtgaggataaacgtgcaagagggtacgctttacgctcgtacaacgtggagccttgtaaccacgggaacgctactgatcgacagcaccgcaatggtgtttgtgcaaatctccgccagcacaggcgcgtcgaaatatgccgaaaccattacgggcgataatcttgcgacgacattcctcattgaacatggcttcggaacaacggacgtggtcgtgaaggtttatagccttgttacgcaagcggaagtcggcacggacgtcgttatctacgacaacgacaatgtaattatcggctttgactccgcgcccagcaccgcgcaaagcttccgtgtcgttgttatcggataa

SEQ ID NO: 36370 - protein, 245 aa, Unknown
  Obtained from environmental sample
  misc_feature (1)..(245): Xaa is any amino acid
MAAKNLFNNQALVGTTPTDPKHLVTMEWVQNYVIGKVKAPVRAVSTTNLTGTYAPGVAPDPVTKGTFTLGMTGALVIDGVTLAVGDRVLIAGQTDGTQNGIYEVTVAGDAFTNAVLIRADDWDTNDQLFTGVRINVQEGTLYARTTWSLVTTGTLLIDSTAMVFVQISASTGASKYAETITGDNLATTFLIEHGFGTTDVVVKVYSLVTQAEVGTDVVIYDNDNVIIGFDSAPSTAQSFRVVVIG

SEQ ID NO: 36371 - DNA, 588 bp, Unknown
  Obtained from environmental sample
  misc_feature (1)..(588): n is a, c, g, or t
gtggaaatttacgatcgctgggccagccgaaggggagtgccggaagatgaaaggaacaaatacaaggacagtttcaggattgcttccatgctgcatgacgcgggcaaggttgccattccggacataatcttaaaaaagcctgccaagtttacgcccgaagagtaccagattatgcaaaaccatacggtttacggttcggcgctttttgacgatccccaatccccgcttgatgttttggcccgtgatatagcttttacccatcatgaaaactgggacggtaccggctaccccggctgggtggacccgctaacgggagccccaattaaaactggagaagacggcaagcccgtcgggaaaaagggcgaagagatacccctttccgggcggattgtaagccttgccgatgtttttgacgccctttgttccaaacgggtttataaggagccatggaccgaggaagacgtgctttttgaaataaaaaaattgtccggtacaaaattcgatcccgatctggtagaggttttctttgagatacttccctctatcaagcaaattcagcagctataccccgacggcggctctctttaa

SEQ ID NO: 36372 - protein, 195 aa, Unknown
  Obtained from environmental sample
  DOMAIN (10)...(140): HD domain
  misc_feature (1)..(195): Xaa is any amino acid
MEIYDRWASRRGVPEDERNKYKDSFRIASMLHDAGKVAIPDIILKKPAKFTPEEYQIMQNHTVYGSALFDDPQSPLDVLARDIAFTHHENWDGTGYPGWVDPLTGAPIKTGEDGKPVGKKGEEIPLSGRIVSLADVFDALCSKRVYKEPWTEEDVLFEIKKLSGTKFDPDLVEVFFEILPSIKQIQQLYPDGGSL

SEQ ID NO: 36373 - DNA, 492 bp, Unknown
  Obtained from environmental sample
  misc_feature (1)..(492): n is a, c, g, or t
atgcaaattcttgtagacgcagattcatgtccccgccaggcacgggaaatgatactgcgtttttcatccaggctgggtattaaaagcgtcttcgccgccaaccgccctattcccggacttccagactctcatgggccaatcgaaggccaaaagcagactgcgtttttcgagctttgccctcctggcgaaggggaggcggacaggcgcattttggcgctggccaaaagcggagaccttgtcattacgcgggacctgcccctggccgaacagcttgtcgaggctggcatagcggttttggacgacaggggcagggcctttacaaaagaaaacattcgcgaacaacgttcaataagggactttacagtcgatctggcaaatagcggccttgattttgaaagaaccccgtcctacgggaaaaaagaattgtcttcgcttgccaacagcctggatcgggaactgaccagattaaagagagccgccgtcggggtatag

SEQ ID NO: 36374 - protein, 163 aa, Unknown
  Obtained from environmental sample
  DOMAIN (1)...(155): Uncharacterized BCR, YaiI/YqxD family COG1671
  misc_feature (1)..(163): Xaa is any amino acid
MQILVDADSCPRQAREMILRFSSRLGIKSVFAANRPIPGLPDSHGPIEGQKQTAFFELCPPGEGEADRRILALAKSGDLVITRDLPLAEQLVEAGIAVLDDRGRAFTKENIREQRSIRDFTVDLANSGLDFERTPSYGKKELSSLANSLDRELTRLKRAAVGV

SEQ ID NO: 36375 - DNA, 360 bp, Unknown
  Obtained from environmental sample
  misc_feature (1)..(360): n is a, c, g, or t
atgtcaagagcaatagacggttccaaacgcaagaaccatcgcaagaagatattaaaactggcaaaaggctactggggccgcaggcactcaaattttaaaactgccaaggatgcggtaaccaagagtcttgcatacgcatatcgggacaggaaggacaggaaaggggattttcgcaggctatggattatccggattaacgccgcctgcagggccgaaggtctttcctattcaaagtttattgacggcctcggtaaagcggggataagcatcaatagaaaggcccttgcttccctggcgattgatgaccaaaacgcctttaaggaggttgttttaaaggcaaagaccgcactggaggcatag

SEQ ID NO: 36376 - protein, 119 aa, Unknown
  Obtained from environmental sample
  DOMAIN (2)...(109): Ribosomal protein L20
  misc_feature (1)..(119): Xaa is any amino acid
MSRAIDGSKRKNHRKKILKLAKGYWGRRHSNFKTAKDAVTKSLAYAYRDRKDRKGDFRRLWIIRINAACRAEGLSYSKFIDGLGKAGISINRKALASLAIDDQNAFKEVVLKAKTALEA

SEQ ID NO: 36377 - DNA, 411 bp, Unknown
  Obtained from environmental sample
  misc_feature (1)..(411): n is a, c, g, or t
atggtaagcctggaacaggtcaaacagctggaatcgaaggttacaaacgtaattgattatgtaaaaaaagtaaccgatgaaaactccaagttaaaggaaaagcttaattcatatcaaaaacggattgaggatcttgaagttctggtacagcagttcaaggagaaccagggccggattgaggatggaattctttcggctctggacaggcttaatcagtttgaggacgcgttagaaagcaagctttctattgaaagtaagccatccgtagatagtttaccagctattgaaagcaagcctgaaaataagccgcctgttaaaagcgtaccatcaagagaaacaaaaacgcctgacaaagccgcagatgaggaaaagacctccgacacagccaaagaagagcttgatatcttttga

SEQ ID NO: 36378 - protein, 136 aa, Unknown
  Obtained from environmental sample
  misc_feature (1)..(136): Xaa is any amino acid
MVSLEQVKQLESKVTNVIDYVKKVTDENSKLKEKLNSYQKRIEDLEVLVQQFKENQGRIEDGILSALDRLNQFEDALESKLSIESKPSVDSLPAIESKPENKPPVKSVPSRETKTPDKAADEEKTSDTAKEELDIF

SEQ ID NO: 36379 - DNA, 684 bp, Unknown
  Obtained from environmental sample
  misc_feature (1)..(684): n is a, c, g, or t
atggcaaagagcgatcttaatatagagattttaggaacaaacttaaccatatccgccgaagagacgcctgagtatcttaatatgctcctggacaagtaccggcggacgatcgagaacgtgcagcggacaacaggcctgaaagatcctcttaaaaccgcagttctgacaggatttttgctttgcgatgatcttgagaaagcgggaagcgcagccaatgcggtaaaaattgaagatgaagagcaaggggaggcagagcggctcaccgagggcatgatctcaagacttagcgaaataataccaaatgcccaggaaagggatgattattcagaagaactagccgcaaatcctcccgtttataaacttaaaaacacaataaagaattatgactggggttcagcagactggatcccggcgcttttggggcagaaaaacataagccgcgtccctcaggcggagctttggatgggtgttaacccctccgctccctcccgcgcggtacttcctgacggggaaagcgggccgccattgtctgagttgatagagaaggaaaaaganacttttttgggaaaggaaatcgcggaaaaatacggtaccctgccttttctttttaaagttctggccgcagaaaagcctctgtctattcaggcgcaccctaacctcaagcagggccgtgacggtttttga

SEQ ID NO: 36380 - protein, 227 aa, Unknown
  Obtained from environmental sample
  misc_feature (1)..(227): Xaa is any amino acid
MAKSDLNIEILGTNLTISAEETPEYLNMLLDKYRRTIENVQRTTGLKDPLKTAVLTGFLLCDDLEKAGSAANAVKIEDEEQGEAERLTEGMISRLSEIIPNAQERDDYSEELAANPPVYKLKNTIKNYDWGSADWIPALLGQKNISRVPQAELWMGVNPSAPSRAVLPDGESGPPLSELIEKEKXTFLGKEIAEKYGTLPFLFKVLAAEKPLSIQAHPNLKQGRDGF

SEQ ID NO: 36381 - DNA, 888 bp, Unknown
  Obtained from environmental sample
  misc_feature (1)..(888): n is a, c, g, or t
ttgccgtattttccccctgtatgccaagcggcggaatttgacgaaaccggacacggggaatacaacgttacaatggccgccctgaagaaatatttaaaggatcagaatgtcgatctttcttacatcaaacaagaagtggaatataccggaatacttgccgaacgggcggttcagttttccagccccggcggtttgcttgacactgccgagcgctttgtgccgggcatacggcggaatacccgcaagatcgagggattgcccaacatatacccctaccttacggaaattgccgaattattatcgaaagactcggacgtggaattcccgcttctgatagactgtctgaactgtgagaagggctgtaacggcggttccggaacaggcaaccactccgtgcctttggacagactggaaggacccatccgcaaacgcagcgcggaacatgagaagaagatcgcctcgctgaaaaagaaaaattatgaaaaataccacgaacagttgaaccggttctggaaacgcggcctgtatgaccgcagttaccgcaacctttcgggaaatcttcatttgcgccatccaagcgaggccgaattaaccgaaatttaccgtaaaatgaaaaaattcgacaaatcccatttgtacgattgcggggcctgcggttacggaagctgcaagggaatgagcacggcgatttttaacggcattaacaggccggaaaattgcgcccactataccctcgccgtgctcaaggaaaaaaaggatacggaagaactaaaccggctgcttcatgagcacatcggctacgcgaccggcatccttgagggaataaactcgctggtggatgaactgcataccgttattattgcaggcgaagcggctcggccgatctga

SEQ ID NO: 36382 - protein, 295 aa, Unknown
  Obtained from environmental sample
  misc_feature (1)..(295): Xaa is any amino acid
MPYFPPVCQAAEFDETGHGEYNVTMAALKKYLKDQNVDLSYIKQEVEYTGILAERAVQFSSPGGLLDTAERFVPGIRRNTRKIEGLPNIYPYLTEIAELLSKDSDVEFPLLIDCLNCEKGCNGGSGTGNHSVPLDRLEGPIRKRSAEHEKKIASLKKKNYEKYHEQLNRFWKRGLYDRSYRNLSGNLHLRHPSEAELTEIYRKMKKFDKSHLYDCGACGYGSCKGMSTAIFNGINRPENCAHYTLAVLKEKKDTEELNRLLHEHIGYATGILEGINSLVDELHTVIIAGEAARPI

SEQ ID NO: 36383 - DNA, 894 bp, Unknown
  Obtained from environmental sample
  misc_feature (1)..(894): n is a, c, g, or t
atgcgaagccgcagctttactggcggcccggacggatcaactggtcatgaccaaagtcaaaagccctctggccaccatggccgcggcggtcggcgcgccgccccgggccgggctttccggctggccctcatcgacctgggttccggaggggtcgagggcctgaccctggccgcccgaaaaagcctcaaggccgccgaagcggtctatggctacggcctgtacctggaccaagccgcccccctgatccaaaaggccgaaatacaccgcagcggcatgaccgccgaaatgaaacgggccggggccgccttggacagcgccctgagcggccgccgcacggtcgtggtctccggcggggacgcgggcgtttacggcatggccggggcggtttttgaagtggccgccgcccggggcctggacctggggcctggaccgggccagctttccatcgaagtcctggccggggtgccggccgcagtggccggcgcggcccttttgggcgcgcctctgacccacgacttctgcctcatttccctctccgaccgcctcacgccctgggaactcattgaaaaacgcctgaagctggccgcccggggggatttcgtcattgtcctctacaaccccaaaagccggggccgggactggcagttgggccgggccctggaaatcctggcccggagcctggcccctcgcaccccggccggcgtggtcaggcgggccggccgggctggccagttcaccctggtcaccaccctggaggaactggacacggctccggtggatatgcagaccctggtcatcatcggcaacagccgcaccttcatccaccggggctttttgataaccccccgcggctatgtcgataaatacggcccggtagaggcaggtcagccatga

SEQ ID NO: 36384 - protein, 297 aa, Unknown
  Obtained from environmental sample
  DOMAIN (40)...(255): Tetrapyrrole (Corrin/Porphyrin) Methylases
  misc_feature (1)..(297): Xaa is any amino acid
MRSRSFTGGPDGSTGHDQSQKPSGHHGRGGRRAAPGRAFRLALIDLGSGGVEGLTLAARKSLKAAEAVYGYGLYLDQAAPLIQKAEIHRSGMTAEMKRAGAALDSALSGRRTVVVSGGDAGVYGMAGAVFEVAAARGLDLGPGPGQLSIEVLAGVPAAVAGAALLGAPLTHDFCLISLSDRLTPWELIEKRLKLAARGDFVIVLYNPKSRGRDWQLGRALEILARSLAPRTPAGVVRRAGRAGQFTLVTTLEELDTAPVDMQTLVIIGNSRTFIHRGFLITPRGYVDKYGPVEAGQP

SEQ ID NO: 36385 - DNA, 360 bp, Unknown
  Obtained from environmental sample
  misc_feature (1)..(360): n is a, c, g, or t
ttgcctaaaaaatttaaaaaattaggctattcctttaaccgcattgctacttataaatttgcggaaggtgtctacgcccaaattgatggtatgttagaaaacggcgcacaggcggttgcagtagaagtaaaaacaacccttcggcaagcagatatagacgaacaccttgcacgcatggaaaaaatacgaaaacacgctgatgagtatggcgataaaaggcagttcatgggagcaatggcagctacgataacagacgaaagcacaagaaactatgccctaaaacaggggctttttgtcatagagccaagcggcgaaaatgtcaaagttacaaaacctgcgacagaaccacgtatttggtaa

SEQ ID NO: 36386 - protein, 119 aa, Unknown
  Obtained from environmental sample
  misc_feature (1)..(119): Xaa is any amino acid
MPKKFKKLGYSFNRIATYKFAEGVYAQIDGMLENGAQAVAVEVKTTLRQADIDEHLARMEKIRKHADEYGDKRQFMGAMAATITDESTRNYALKQGLFVIEPSGENVKVTKPATEPRIW

SEQ ID NO: 36387 - DNA, 609 bp, Unknown
  Obtained from environmental sample
  misc_feature (1)..(609): n is a, c, g, or t
atgaccgagaatgagatcatcagncgtgtgaaagaccttatggagatggtcggtcttttgaagtattaccgtaaccgttatccgcacgagtcttccggcggtcagagacagcgtatcggcattgcccgcgctctggcgttgaagccccaactgatcctcgccgatgagccgatttctgcccttgacgtttccattcaggcgcagatattgaaccttttcaaagacatacaaaaggagatggggctttcctatctttttattgcccacgatctttcagttattgagtacatctctgaccgcgtggcggtaatgtaccttggaaagatcatggagataagcaacaacgacgatctttacaacaatccgcgccacccttacacccaggcgctcttgtcggcggccccgatccccgaccctaaggttgaagcccagcgcaagcgcatcatcctgacgggggatgttccctctccgaacgttcaaaggccgggctgctatttctacgaccgctgtcagcaccgcatggacaaatgcaagctaactcaaccggaactaaagaccggaaaggatgggaatgaggaacataaggtcgcttgctttctttgtgagtag

SEQ ID NO: 36388 - protein, 202 aa, Unknown
  Obtained from environmental sample
  DOMAIN (1)...(107): ABC transporter
  misc_feature (1)..(202): Xaa is any amino acid
MTENEIIXRVKDLMEMVGLLKYYRNRYPHESSGGQRQRIGIARALALKPQLILADEPISALDVSIQAQILNLFKDIQKEMGLSYLFIAHDLSVIEYISDRVAVMYLGKIMEISNNDDLYNNPRHPYTQALLSAAPIPDPKVEAQRKRIILTGDVPSPNVQRPGCYFYDRCQHRMDKCKLTQPELKTGKDGNEEHKVACFLCE

SEQ ID NO: 36389 - DNA, 375 bp, Unknown
  Obtained from environmental sample
  misc_feature (1)..(375): n is a, c, g, or t
gtgtcagacagcgaaattgcaagccctttggttacaaaaccggactccgtactggttatgaacagcgattctctgccggtttgtgaggaaattctcaaggaaaaaggtctaatgttaataaactccagccttgttaaagaaaatcccaaacggaacgacataaaaattgtcaaaattgaggcgacaaacatcgcggagcagaaaggaaacgctcgttttgccaatatggtggcgcttggcgcaatggcaaagctaaccggagcgttttccctggataatatcgaggaaatactgcggaattttttcaccccggacaagcaccacttcattccattaaatgtccaggccataaaggcagggtatggcgctgtataa

SEQ ID NO: 36390 - protein, 124 aa, Unknown
  Obtained from environmental sample
  DOMAIN (1)...(122): Pyruvate ferredoxin/flavodoxin oxidoreductase
  misc_feature (1)..(124): Xaa is any amino acid
MSDSEIASPLVTKPDSVLVMNSDSLPVCEEILKEKGLMLINSSLVKENPKRNDIKIVKIEATNIAEQKGNARFANMVALGAMAKLTGAFSLDNIEEILRNFFTPDKHHFIPLNVQAIKAGYGAV

SEQ ID NO: 36391 - DNA, 405 bp, Unknown
  Obtained from environmental sample
  misc_feature (1)..(405): n is a, c, g, or t
ttggcatatcaaaacgcagtatccacttataaagagaccaagataaagacggccggtcaagggcagcttattatcatgctgtatgatacagcgataaggcagcttgacgaggcgctgtttttattgcaggcaaacaacaccggcaagaaagatccgggcaagatcgaaaaaatcggcaaggccgtggttaaaacacaggaaatcatatccgaactgatggtttccctggattttgagcagggcggtgaaattgccgttaacctcttttctttatatacctggttcaaccgggaacttatggaagccaacatcagccgggaacgcgagacgcatattgattgtaaaaaaccatatcgaaagcctccgcaacgcgtggcaggaagtcgtgtcttcagcctcttttga

SEQ ID NO: 36392 - protein, 134 aa, Unknown
  Obtained from environmental sample
  DOMAIN (3)...(121): Flagellar protein FliS
  misc_feature (1)..(134): Xaa is any amino acid
MAYQNAVSTYKETKIKTAGQGQLIIMLYDTAIRQLDEALFLLQANNTGKKDPGKIEKIGKAVVKTQEIISELMVSLDFEQGGEIAVNLFSLYTWFNRELMEANISRERETHIDCKKPYRKPPQRVAGSRVFSLF

SEQ ID NO: 36393 - DNA, 432 bp, Unknown
  Obtained from environmental sample
  misc_feature (1)..(432): n is a, c, g, or t
atgacgcaaacattaacggaaacaaaaacatcaatcagcgaaggagagcttacccagcgcatggccgtcgtcaagcggttcaaggagcttcttgagcagcagcgcgatcgttttcgcagttatcttgacgaactggacaggcagaagctcgccatcggcacaggcagcgcggatgagataacggcccatgtcgaactggaagagcggatagtcgaggatattttctccatccaaagagtgattgagcccctggaaataatgtacaacgccgccggcccgtatcttccggcaaatgacgtgtcctcgttaaaagccgcgctgaaagacctgaaaacccaggccgcggnctcatcggagcaaaacaaggatcttctttcccgccgcatggncggatgtaattctgaaatacaggcgataaaaaataccggttaa

SEQ ID NO: 36394 - protein, 143 aa, Unknown
  Obtained from environmental sample
  misc_feature (1)..(143): Xaa is any amino acid
MTQTLTETKTSISEGELTQRMAVVKRFKELLEQQRDRFRSYLDELDRQKLAIGTGSADEITAHVELEERIVEDIFSIQRVIEPLEIMYNAAGPYLPANDVSSLKAALKDLKTQAAXSSEQNKDLLSRRMXGCNSEIQAIKNTG

SEQ ID NO: 36395 - DNA, 759 bp, Unknown
  Obtained from environmental sample
  misc_feature (1)..(759): n is a, c, g, or t
atggaatcgggggtgcgtaatcttgaacgcgaaacggcgcggtgtatcaggcgcatagcaagggacgctgtaaacaaaggttacggaaaagacaaggctgtatcggaattcaataaaattataacgcccgctaacttggaaaaattactcggcaagaaaaaatacaaacgggacgttgtttacagggaagctagagtcggcgtaacttacgggcttgcgtggacggaaacaggcggaacaatcctccctgtcgaaacaatccgttacgccggaagcggggaactgcttataaccggaaacctcggcgatgtaatgaaagaaagcgcgcgtatcgctctttcatacttgcgcagtaccggaaacaaatacaattttatcgccaaagatttgctaaaatccgacttccacatacacgttcccgaaggcgcaatccccaaagacggaccttccgccggcgttactctcgcctcgtctctgctctctaccctctgcaaagttccgccgcgtccgtgcatcgccatgacaggcgagcttaccctcacaggcagaattcttcccatcggcggattaaaagaaaaagtgcttgccgctatcagaaacggtatggaaacggtacttcttcccaaagacaacacagaggactggaacgagcttgataaggatattcgctcatgtataaaagttgagtttgccgagacagccgccgatgtgtttgatcttttatttgacacanaanaaataaaaaagtcttcgaaataa

SEQ ID NO: 36396 - protein, 252 aa, Unknown
  Obtained from environmental sample
  DOMAIN (40)...(244): Lon protease (S16) C-terminal proteolytic domain
  misc_feature (1)..(252): Xaa is any amino acid
MESGVRNLERETARCIRRIARDAVNKGYGKDKAVSEFNKIITPANLEKLLGKKKYKRDVVYREARVGVTYGLAWTETGGTILPVETIRYAGSGELLITGNLGDVMKESARIALSYLRSTGNKYNFIAKDLLKSDFHIHVPEGAIPKDGPSAGVTLASSLLSTLCKVPPRPCIAMTGELTLTGRILPIGGLKEKVLAAIRNGMETVLLPKDNTEDWNELDKDIRSCIKVEFAETAADVFDLLFDTXXIKKSSK

SEQ ID NO: 36397 - DNA, 468 bp, Unknown
  Obtained from environmental sample
  misc_feature (1)..(468): n is a, c, g, or t
gtgtcaaataaaagatcaaacacatcggcggctgtctcggcaaactcaacttttatacatgagcgaatatccttatcaagctcgttccagtcctctgtgttgtctttgggaagaagtaccgtttccataccgtttctgatagcggcaagcactttttcttttaatccgccgatgggaagaattctgcctgtgagggtaagctcgcctgtcatggcgatgcacggacgcggcggaactttgcagagggtagagagcagagacgaggcgagagtaacgccggcggaaggtccgtctttggggattgcgccttcgggaacgtgtatgtggaagtcggattttagcaaatctttggcgataaaattgtatttgtttccggtactgcgcaagtatgaaagagcgatacgcgcgctttctttcattacatcgccgaggtttccggttataagcagttccccgcttccggcgtaa

SEQ ID NO: 36398 - protein, 155 aa, Unknown
  Obtained from environmental sample
  misc_feature (1)..(155): Xaa is any amino acid
MSNKRSNTSAAVSANSTFIHERISLSSSFQSSVLSLGRSTVSIPFLIAASTFSFNPPMGRILPVRVSSPVMAMHGRGGTLQRVESRDEARVTPAEGPSLGIAPSGTCMWKSDFSKSLAIKLYLFPVLRKYERAIRALSFITSPRFPVISSSPLPA

SEQ ID NO: 36399 - DNA, 498 bp, Unknown
  Obtained from environmental sample
  misc_feature (1)..(498): n is a, c, g, or t
atgaacgcaatcagctccaattcaaggtataaagcagaggcgctcaagctcctggaattggtcaacaccgatcataaactgcgggacatgctggcctttggaatcgaaggggtaaacttctcctatgtcaaacccaatgtggtacgcctcctcaccgccgatcaatggaacctcgccaggtaccagcagggaaccttcttccagatgtccaccatcgagggagatcccgagaacgcctgggatcaggtacgccatcaaaacgaacaggccgagtcatccgtactgcttggtttcatctttgacaacaagggcgtaatcaacgaggtcgcgaactgcaaggctgtctttgacaagtataaaaacgagctcctcaccggcgcttccaatccggatgtggctgttcccgccatgatgcgcgatcttaacgcggcaggcttccagaaaataatggacgaagcccagcgacaggtaaacgcttttaagagcaggagtatgtaa

SEQ ID NO: 36400 - protein, 165 aa, Unknown
  Obtained from environmental sample
  misc_feature (1)..(165): Xaa is any amino acid
MNAISSNSRYKAEALKLLELVNTDHKLRDMLAFGIEGVNFSYVKPNVVRLLTADQWNLARYQQGTFFQMSTIEGDPENAWDQVRHQNEQAESSVLLGFIFDNKGVINEVANCKAVFDKYKNELLTGASNPDVAVPAMMRDLNAAGFQKIMDEAQRQVNAFKSRSM

SEQ ID NO: 36401 - DNA, 720 bp, Unknown
  Obtained from environmental sample
  misc_feature (1)..(720): n is a, c, g, or t
atgaggcgtaattattcctatgcggatcaaaaatcacagcgttacagatcgcgcggggcattatttatagttctggtttttgtcgtgctttatgttttttttacctctgtgtttttttccatgagggttttggaaaacgataccatggctcctaaccttcgcaagggagagagatttatctttttttcctatggcttatacacgcttataccggggctggatttggagaagggtccaatgtccctgcgtcgcggtaacatcgttcttatggatatgttcagggaaaaaccgccgggagttttctatagaaccctggatggtatctcccgtttctttacggcgcagcgcttcagcctgcttgacagggaagagcacctttttgttaaaagggttattgggcttccgggcgatgaaattacaatgaccaattttgtgatccgcgttaaggccaagggaagcgcctacagccttaccgaattcgaagttaccgatgtcgattatacaccgagcatacccaatataccggccctttgggattcgtccctgccgttttcgggaaatatggaaaaggtcgtattgggggaggatgagtgctttgtcctgtccgacgacagaagcagtaccaacgattcccgcacctggggccccgttccgataagcaacatcacaggcaaggcactgttccgctactggcctttcacccgcatcggccgcatttaa

SEQ ID NO: 36402 - protein, 239 aa, Unknown
  Obtained from environmental sample
  misc_feature (1)..(239): Xaa is any amino acid
MRRNYSYADQKSQRYRSRGALFIVLVFVVLYVFFTSVFFSMRVLENDTMAPNLRKGERFIFFSYGLYTLIPGLDLEKGPMSLRRGNIVLMDMFREKPPGVFYRTLDGISRFFTAQRFSLLDREEHLFVKRVIGLPGDEITMTNFVIRVKAKGSAYSLTEFEVTDVDYTPSIPNIPALWDSSLPFSGNMEKVVLGEDECFVLSDDRSSTNDSRTWGPVPISNITGKALFRYWPFTRIGRI

SEQ ID NO: 36403 - DNA, 735 bp, Unknown
  Obtained from environmental sample
  misc_feature (1)..(735): n is a, c, g, or t
atgaacataatgtttctgatgggcggcgtccgcgctgacaccaataaagaagactacccattttatcttgccgaaatcaacgagctgacaattttggagcagcaagtaaaatatgtcaaagtacttcagccgcggcgcttgttgttctgcatgaaggaatcggaaataaagcagttccacacggattccgtgataaggcagctagatccatccgccaccataattccgataatagcgcaaacaaggggcgctgtttgcagcgcattgcttggcgtggaatacatagacaatgacgaggaactgattttaatggctattgacgacttcatggacgaaaacagcgccgagattatcgatcagttccgcagggcaaacgccgacgccggggttgtctctttcaattccgtacatccgcgctattcgttcgcaaaaacagacgaacgcggcgtgccggttgaattcgccgaaaagacgccgatcagcaaaaacgcgctggtgtcgttttattatttccggcacggcagcgattttgtggaatgcgccaaggaagttatccgcaaggacaatccggtgaacggcaggttctatatttcgcagacactgaacgaaattattttgaagcagaaacggattgccatgcgtaagattacaaacgacaggttccacccgctcaaaacagaaatgcagatggctgagtacatagctgaattaaacgaaaagaggaacagcaaatga

SEQ ID NO: 36404 - protein, 244 aa, Unknown
  Obtained from environmental sample
  misc_feature (1)..(244): Xaa is any amino acid
MNIMFLMGGVRADTNKEDYPFYLAEINELTILEQQVKYVKVLQPRRLLFCMKESEIKQFHTDSVIRQLDPSATIIPIIAQTRGAVCSALLGVEYIDNDEELILMAIDDFMDENSAEIIDQFRRANADAGVVSFNSVHPRYSFAKTDERGVPVEFAEKTPISKNALVSFYYFRHGSDFVECAKEVIRKDNPVNGRFYISQTLNEIILKQKRIAMRKITNDRFHPLKTEMQMAEYIAELNEKRNSK

SEQ ID NO: 36405 - DNA, 1050 bp, Unknown
  Obtained from environmental sample
  misc_feature (1)..(1050): n is a, c, g, or t
ttgaacatttatgaaacgggcgctcttgtgcgtgaagctttctgcggtccgtgcttcggagcgggagatacgccggcgaataacgaactttctatccgccacgttacgcgaaatttccctaaccgtgaaggctcgaagcccaatgacggacagattgcgtctgtcgctcttatggacgcccgttcaatagcggcgacggcggtcaacggcggaaaaattaccgccgcaacggaaataaatgtaaaatacggcaaatacaagttcttttttgacaaaaccatttacgataagcgcgtgtacaacggcgcaggaagctcaaacacgcaagcggaattgacattcggtccaaatataaaagactggcccaagatgcccgctttgcctgaaaaccttttaataaaagtggtaagttttataacggacgccgttaccaccaccgatgaacttattccttcgggggaaacttcatcgtaccgctcanatccgctgaagctggcggaatttactttaagccgaanagacccctcctatgttaagcgggcaaaagaggtacaggctattgaggagcanagaggaaagggaactgcggacggcgaattggaaaaaatactgcgaanaatacagagcattgcaggctgttcggagctgggggctgcgaaatatcgcatcggcagcgctgtttttgcccgcaaacccggcgacggttccgcccgcgagcaggcagcgtcctgtcagcgcgtgcttggcgcgtcggcgaatttcgccctggaatacgcgaccaagcgctaccgttccaacctcattaactggggcatactcccctttattatcaccgatgaaacggccattggccttaacagttgggtttttttcccgaaccttcaaaaacaggtgcgagaaaaagccccggccatcaaaggttatgtgttaggcgacaaaccgtccgaaatagccgttactttgggcgatctgaccgataccgaacgtcggatactgctggacgggtgcttgattaacttctacaggggagaggtaataggtaacaggtaa

SEQ ID NO: 36406 - protein, 349 aa, Unknown
  Obtained from environmental sample
  misc_feature (1)..(349): Xaa is any amino acid
MNIYETGALVREAFCGPCFGAGDTPANNELSIRHVTRNFPNREGSKPNDGQIASVALMDARSIAATAVNGGKITAATEINVKYGKYKFFFDKTIYDKRVYNGAGSSNTQAELTFGPNIKDWPKMPALPENLLIKVVSFITDAVTTTDELIPSGETSSYRSXPLKLAEFTLSRXDPSYVKRAKEVQAIEEXRGKGTADGELEKILRXIQSIAGCSELGAAKYRIGSAVFARKPGDGSAREQAASCQRVLGASANFALEYATKRYRSNLINWGILPFIITDETAIGLNSWVFFPNLQKQVREKAPAIKGYVLGDKPSEIAVTLGDLTDTERRILLDGCLINFYRGEVIGNR

SEQ ID NO: 36407 - DNA, 1056 bp, Unknown
  Obtained from environmental sample
  misc_feature (1)..(1056): n is a, c, g, or t
atgnttaacccatgggggactttttccattccgactaacggggatcatggttcttcccttttgggaaccgccattcaaataggaatcccgcgcgaaaccgccgaaagctcggaagtcggaaaagaattggaagaagaaaccgttcaggaagaaccaaccgaagctgaccataccccgaaccctacaagggagaaattcagggccatgctcagggagggaaaacttgaggacaaaaccgttgaaataataattaaccagagtccgcagttcccttcaattgaaatgatgggcggaagtatggaagatttggaatccagcctttccggcattgccggattcttcggcgggggcaaaaagaaaaagcgtgtcactgtcagccgcgcaagagaaattctttttagcgaggaatcggaaaagctgattgacagggatcgcgtaagcgacgaagcccgccaaagggtcgaggaaacgggaattgtttttattgacgagattgacaagatagccgttaaaggcgacaggggcggagggccggacgtttccagggagggggttcaaagggacatactgcccatcgttgagggcgctacggtgaacaccaagtggggcgctgtaaataccgaacacatcctttttattgccgccggggcctttaacattgccaagccttcggatctgatccccgaactgcaaggccgttttccccttagggttgagcttgattcgctcggaaaagacgatttccttagaatcctgaccgaaccaaaaaatgcccttaccaagcagtatacggagcttatggccaccgagaacgtggaaatagaatttacccccgaagctattgagcgccttgccgccctggccgccgaggttaattcaaagcttgaaaacataggcgcccgcaggctccatacgataatggaggcccttctggaggagctttcctttgaagcgccggacatagggcccgccaaggtgcctattaccgtggattatgtgaacgaaaagctcgtcaacctggtaaacgatcaagatttaggacggtacatcctatga

SEQ ID NO: 36408 - protein, 351 aa, Unknown
  Obtained from environmental sample
  DOMAIN (77)...(237): ATPase family associated with various cellular activities (AAA)
  misc_feature (1)..(351): Xaa is any amino acid
MXNPWGTFSIPTNGDHGSSLLGTAIQIGIPRETAESSEVGKELEEETVQEEPTEADHTPNPTREKFRAMLREGKLEDKTVEIIINQSPQFPSIEMMGGSMEDLESSLSGIAGFFGGGKKKKRVTVSRAREILFSEESEKLIDRDRVSDEARQRVEETGIVFIDEIDKIAVKGDRGGGPDVSREGVQRDILPIVEGATVNTKWGAVNTEHILFIAAGAFNIAKPSDLIPELQGRFPLRVELDSLGKDDFLRILTEPKNALTKQYTELMATENVEIEFTPEAIERLAALAAEVNSKLENIGARRLHTIMEALLEELSFEAPDIGPAKVPITVDYVNEKLVNLVNDQDLGRYIL

SEQ ID NO: 36409 - DNA, 420 bp, Unknown
  Obtained from environmental sample
  misc_feature (1)..(420): n is a, c, g, or t
ttggcgggccctatgtccggcgcttcaaaggaaagctcctccagaagggcctccattatcgtatggagcctgcgggcgcctatgttttcaagctttgaattaacctcggcggccagggcggcaaggcgctcaatagcttcgggggtaaattctatttccacgttctcggtggccataagctccgtatactgcttggtaagggcattttttggttcggtcaggattctaaggaaatcgtcttttccgagcgaatcaagctcaaccctaaggggaaaacggccttgcagttcggggatcagatccgaaggcttggcaatgttaaaggccccggcggcaataaaaaggatgtgttcggtatttacagcgccccacttggtgttcaccgtagcgccctcaacgatgggcagtatgtccctttga

SEQ ID NO: 36410 - protein, 139 aa, Unknown
  Obtained from environmental sample
  misc_feature (1)..(139): Xaa is any amino acid
MAGPMSGASKESSSRRASIIVWSLRAPMFSSFELTSAARAARRSIASGVNSISTFSVAISSVYCLVRAFFGSVRILRKSSFPSESSSTLRGKRPCSSGIRSEGLAMLKAPAAIKRMCSVFTAPHLVFTVAPSTMGSMSL

SEQ ID NO: 36411 - DNA, 450 bp, Unknown
  Obtained from environmental sample
  misc_feature (1)..(450): n is a, c, g, or t
ttgataccaaagttccaaagcgcactgtcaaacattctgcgcctcaaggcagagaattcggttgaccccgcaaaacgagtcccggctctgtgcaacttgcaggaactcgctccatttacggatgccctaaagtctctcgccaaattggagtccgtgacattccaacatggcgacctgtcttcgccttcaagagccatagctatcatcgagggcggcatggtggccctcgaattggccggagtcaaagacaccgccgctgaaaaagcaaaattagagaaagagcgcgacaagctgtcgcaggagcttaaggccatcaaggcgcgattaaataacccagattttctcgcaaaagccgcgcagaaggccatcgaagcccaacaatcgctagcggaggaaaaagaagccaggctagccgccgtccttagcgttttgcaggggtctggggagtaa

SEQ ID NO: 36412 - protein, 149 aa, Unknown
  Obtained from environmental sample
  misc_feature (1)..(149): Xaa is any amino acid
MIPKFQSALSNILRLKAENSVDPAKRVPALCNLQELAPFTDALKSLAKLESVTFQHGDLSSPSRAIAIIEGGMVALELAGVKDTAAEKAKLEKERDKLSQELKAIKARLNNPDFLAKAAQKAIEAQQSLAEEKEARLAAVLSVLQGSGE

SEQ ID NO: 36413 - DNA, 813 bp, Unknown
  Obtained from environmental sample
  misc_feature (1)..(813): n is a, c, g, or t
atgatttcctccggctattcagataacaacggcattaacgcgtcaagcccgtttgacacaaccggagtaaatacatttgatattcaatttgccgtgcagggcggaaaatccatacgggcgcttcccgtcggagaagtaacgcaggcgcatattcaggccgattggccatcgccgtcgtttcagggaggatttttgcccacaacctatacgctctccgaaaacggttttgatgccgaatgggaaatcagttatttaagcaggtcaattccgcttttttggtttaccgatgaacgcggcggcgaccatgacagtaaaatgaatttaagaggcgaactcttcggcgttgattttttcaaacctcttgatcattacgcgcttaatgaacgcgcggtaaaatacgccgttttatttttggttataccgtttttaacgttgttttttctggaagtgttttcacaaaaatcaattcatcccgcacaatatttgctctcaggtttggcaaacatcattttttaccttttgcttttatcaatttcggaacatctttctttttccgccgcatatctcatcgccgccgcagcgcttaccgccatgatgacgctgtacgcgcgttcattggtcgaaacatggacgcgcagcgcgtatatggggcttgtcatggctctcttgtatttaattatgtaccttacgctcaatgccgaggactgggctttgctgattggctcaatcgcgtcttttgtaataaccggcgttgtaatgttcctgacacgcagactggattggtccagtttgaatataaggagagataaataa

SEQ ID NO: 36414 - protein, 270 aa, Unknown
  Obtained from environmental sample
  DOMAIN (2)...(269): Inner membrane protein CreD
  misc_feature (1)..(270): Xaa is any amino acid
MISSGYSDNNGINASSPFDTTGVNTFDIQFAVQGGKSIRALPVGEVTQAHIQADWPSPSFQGGFLPTTYTLSENGFDAEWEISYLSRSIPLFWFTDERGGDHDSKMNLRGELFGVDFFKPLDHYALNERAVKYAVLFLVIPFLTLFFLEVFSQKSIHPAQYLLSGLANIIFYLLLLSISEHLSFSAAYLIAAAALTAMMTLYARSLVETWTRSAYMGLVMALLYLIMYLTLNAEDWALLIGSIASFVITGVVMFLTRRLDWSSLNIRRDK

SEQ ID NO: 36415 - DNA, 858 bp, Unknown
  Obtained from environmental sample
  misc_feature (1)..(858): n is a, c, g, or t
atgggcttgaccgcccgggccggcctgtttaacatcgacgccgaaggacagtttatcgccggtctgaccgccgcccagtttatcgccctctttttcccgcggattcccgtactgcactgggtaatcgcggtaaccggggcaattgccgccggcgccgcatggggaggcattgtcggcttcttcaaagcgcgtttcaaagtttccgaagtcgtggcaactattatgatgaactacatcgccctgtactttcaccgcattttcaccctgaggattcccggcagcaatacctacaaaacgccggactttcccgcgacggccaccctggcaagccccctgcttgcctcgatgaccaacggttcccgcctgaactacagcctgtggctgaccctggcggctattgtgttttactgggtcattatggaaaagacgcggctgggctattcgctgcgggctaccggactgaaccgggacgccgccctgtacggcgggatcaatgtgaatgtcagcatcaccgcggctatgggtatcgccggggcttttgccgggcttgccggcgcggcggtttcactgggtattttttcttacgggagggtattgtccggcatggaaggttacggttttgacggcattgccgtagcgctggtgggcaacagcaccgcgtggggaaccgcccttgccggcctgctgttcggaatgctcaaatccgcccagtcattaatgcagaaccggcagatacccaaagaaatcaccgctatcatcatgggtttggtggtggtcttcatctccctgcgggcgggagtgaaactgctgatcgactggcaattaaaagaaaaagcccgccgcccgaggagcgaataa

SEQ ID NO: 36416 - protein, 285 aa, Unknown
  Obtained from environmental sample
  DOMAIN (1)...(262): Branched-chain amino acid transport system / permease component
  misc_feature (1)..(285): Xaa is any amino acid
MGLTARAGLFNIDAEGQFIAGLTAAQFIALFFPRIPVLHWVIAVTGAIAAGAAWGGIVGFFKARFKVSEVVATIMMNYIALYFHRIFTLRIPGSNTYKTPDFPATATLASPLLASMTNGSRLNYSLWLTLAAIVFYWVIMEKTRLGYSLRATGLNRDAALYGGINVNVSITAAMGIAGAFAGLAGAAVSLGIFSYGRVLSGMEGYGFDGIAVALVGNSTAWGTALAGLLFGMLKSAQSLMQNRQIPKEITAIIMGLVVVFISLRAGVKLLIDWQLKEKARRPRSE

SEQ ID NO: 36417 - DNA, 723 bp, Unknown
  Obtained from environmental sample
  misc_feature (1)..(723): n is a, c, g, or t
gtgtcgtttgacaggtattctttcggacggcttgtcccgtacattttttttcctacgctgctgatggctttttccgaaacgccctacgcggcgctgcttaaaaggtttcttgtcgcgcttccgttctgtttgttagcgggggccgccaacgtaattttagacaaggcgccggctttgataattaacggcgcggcagtcagttacggcgttgtttctctttttaccattttgctcagagtttatttgtgcgttatggccgttttggtactcgtagcaataacgccgttttctgaaattgcccattcaatgcgccggttaaaaattccgcatatttttgttatcgtgtttgaaatgacgtaccgttacatcggcgtattggttgaagaggcgtattccatgtatattgcctatacggtgagaagccccaacgcgaaaggaatcaggatgagggatatgggcactattacaggccagcttctcgtccgcagcgttgaccgcgcggatcgcgtctataccgccatgaagtgcaggggttacgcgctccaacccatgttgaaaaacggtaaaaaaccaaaagtaaacgacatcgtttttcttgccgtcacctgtctcctgtgcgtactgtttcgtgttgtcaatataaaaccggttgtttgcactattattcggaaggtatatttaatgctcaaattgcagaacgtaaccgttatatatccccgataa

SEQ ID NO: 36418 - protein, 240 aa, Unknown
  Obtained from environmental sample
  DOMAIN (5)...(185): Cobalt transport protein
  misc_feature (1)..(240): Xaa is any amino acid
MSFDRYSFGRLVPYIFFPTLLMAFSETPYAALLKRFLVALPFCLLAGAANVILDKAPALIINGAAVSYGVVSLFTILLRVYLCVMAVLVLVAITPFSEIAHSMRRLKIPHIFVIVFEMTYRYIGVLVEEAYSMYIAYTVRSPNAKGIRMRDMGTITGQLLVRSVDRADRVYTAMKCRGYALQPMLKNGKKPKVNDIVFLAVTCLLCVLFRVVNIKPVVCTIIRKVYLMLKLQNVTVIYPR

SEQ ID NO: 36419 - DNA, 729 bp, Unknown
  Obtained from environmental sample
  misc_feature (1)..(729): n is a, c, g, or t
gtgaaacctgacgcttccgccgccgagataaaaaaggcgttccgtgaaaagcaaaaaaaactgcaccctgatattgcgggcgagtccgcaggggcgcagatgcgcaagatccttaccgcttacgagacactttccaacgggcagaggcgctatgagtatgaccgcgcctattcccgcttcatggcaaacccgggctttgattacaggacatggctgcgtgagcgggaggacgatccggaaagccaggccaagctgatattttttgaactcctgcaccttgaggaggatgaagcaatccggctatggcgtaaaaacggcgggatttatttccggatggaaaagtacatgaacagggatgactggatggactgctgttttatactcgccgaggaacttgaccggaggggaaacagctatgaggcgttccgccttcttgagtatattatacgggaggaacggcggaaaccgtattttggcatcttcacgcccgaacttgaaagatacacaagggagatagtccgccagcgcctgaagagccaggtggatgacgagacatggattgaatgtatggaaaccctgctggatctgggcttccccgcgcgggacacggctttctggctgcgatcactggcgcaggctcttcttaaaataggcgattacgccggctcccagcaggttttgaaggaagcgaaaaaaatgagcggcaagcaatgtatgaggcttaaatga

SEQ ID NO: 36420 - protein, 242 aa, Unknown
  Obtained from environmental sample
  DOMAIN (2)...(54): DnaJ domain
  misc_feature (1)..(242): Xaa is any amino acid
MKPDASAAEIKKAFREKQKKLHPDIAGESAGAQMRKILTAYETLSNGQRRYEYDRAYSRFMANPGFDYRTWLREREDDPESQAKLIFFELLHLEEDEAIRLWRKNGGIYFRMEKYMNRDDWMDCCFILAEELDRRGNSYEAFRLLEYIIREERRKPYFGIFTPELERYTREIVRQRLKSQVDDETWIECMETLLDLGFPARDTAFWLRSLAQALLKIGDYAGSQQVLKEAKKMSGKQCMRLK

SEQ ID NO: 36421 - DNA, 306 bp, Unknown
  Obtained from environmental sample
  misc_feature (1)..(306): n is a, c, g, or t
atgatggtcgcgccaaaggcctcggtgccgcagatttttgccgcaggcgcgtccgcaggcatgacgatcgtcgcgggtatgccgagcatggcgcaggcggccgcaacaccttgggcatggttgccggacgaccaggcgaccaccccgccccttctctgctccggcgtcagttgcaaggcgcggttgcacgctccccggaacttgaaggaacccgtccgttgcagcgcctcatttttgatcagcacgcgcgcgcccaacagatcgttcagggccggatgttcccagcagggcgtgtacacggcgtaa

SEQ ID NO: 36422 - protein, 101 aa, Unknown
  Obtained from environmental sample
  misc_feature (1)..(101): Xaa is any amino acid
MMVAPKASVPQIFAAGASAGMTIVAGMPSMAQAAATPWAWLPDDQATTPPLLCSGVSCKARLHAPRNLKEPVRCSASFLISTRAPNRSFRAGCSQQGVYTA

SEQ ID NO: 36423 - DNA, 402 bp, Unknown
  Obtained from environmental sample
  misc_feature (1)..(402): n is a, c, g, or t
ttgaacgagcctgcttcccttgacttttcatttagcggtttaaaaaccgcagttagccgttatgttcaaacaaaaggcaaagaatttgtggaaaagaacattgcaaacatctgtgcaagccttcaagaagcaatagcggatattttgtctttgaaagcggtaaatgcggctaaaaaaaacaatgtggaaaatctcatcttatgcggcggtgttagcgcaaacagcaggctcagagaacttttaaccgagcgaacatcaaaaaatggaataaacttaatttgcccaccgccagctttatgcacagataacggtgcgatgattgctgctgctgctatttttagaaagcgggttggaatgcttgtggaaaatagagaggttaaggcttggaatgagttgttttaa

SEQ ID NO: 36424 - protein, 133 aa, Unknown
  Obtained from environmental sample
  misc_feature (1)..(133): Xaa is any amino acid
MNEPASLDFSFSGLKTAVSRYVQTKGKEFVEKNIANICASLQEAIADILSLKAVNAAKKNNVENLILCGGVSANSRLRELLTERTSKNGINLICPPPALCTDNGAMIAAAAIFRKRVGMLVENREVKAWNELF

SEQ ID NO: 36425 - DNA, 357 bp, Unknown
  Obtained from environmental sample
  misc_feature (1)..(357): n is a, c, g, or t
ttgcggggcagggtagggcgtgaaccgagcgggctgggtgcattttgctgtgcgaagaagacaaccccagcttatgagagattattgaaattttcaaagacaaatgatggctttgaaatagcagaactggatttgcaaaataggggagcgggaaatttagaaggctcgcagcaaagcggagcttggattttgcggcactttgactggatgcacgatttaccgctgatagaaaaaactataaacacagcaaacgatattctagacaacaaggcaaatttttcgcctgatgtacagcaaaaagttcagaattggtataatgataaaaaatttgagaagattgaggacggggtgcattaa

SEQ ID NO: 36426 - protein, 118 aa, Unknown
  Obtained from environmental sample
  misc_feature (1)..(118): Xaa is any amino acid
MRGRVGREPSGLGAFCCAKKTTPAYERLLKFSKTNDGFEIAELDLQNRGAGNLEGSQQSGAWILRHFDWMHDLPLIEKTINTANDILDNKANFSPDVQQKVQNWYNDKKFEKIEDGVH

SEQ ID NO: 36427 - DNA, 696 bp, Unknown
  Obtained from environmental sample
  misc_feature (1)..(696): n is a, c, g, or t
ttgttccacgcaggtcttgaatgcggcgtagaaattgaactggtaaaaattgattcgtcaaaacttgaggaaacggaaaacactaacgcgattttaggccgcggcgactccgctaaaaactgtatgtttcaagttgacggcattttggttcccggtggatttggtgagaggggaatcggcggcatggtaaaagcggcggcttgggcaaggacaaacaaagttccgtatttgggaatttgtcttggtatgcaaataatggttattgactgggcgcgcaatgtgctgaattggactgacgccgattcaagcgagtttaaccgtgactccaaacatcccgttgtgagtcttcttgaagaacaggtcaatgtaaaaaattatggcggtaccatgcgtcttggcgctatggaaaccgtaagcgaagacggtactcatatattagcggcttatggcgaaaagcgcataatggagcgccaccgccatcgctatgaatttaccaatcagtaccgtgaagaaatgacaaagaccggccttatacttgccgcttttaattccgacggctctttggttgaatgcgttgaatggcccgatcatccgtggggtgtagccgttcaattccaccctgaatttaaatccaaacctacttcttctgctccactgtttagggattttatcgcagcggttaagaagtgcaaatga

SEQ ID NO: 36428 - protein, 231 aa, Unknown
  Obtained from environmental sample
  DOMAIN (5)...(208): Peptidase C26
  misc_feature (1)..(231): Xaa is any amino acid
MFHAGLECGVEIELVKIDSSKLEETENTNAILGRGDSAKNCMFQVDGILVPGGFGERGIGGMVKAAAWARTNKVPYLGICLGMQIMVIDWARNVLNWTDADSSEFNRDSKHPVVSLLEEQVNVKNYGGTMRLGAMETVSEDGTHILAAYGEKRIMERHRHRYEFTNQYREEMTKTGLILAAFNSDGSLVECVEWPDHPWGVAVQFHPEFKSKPTSSAPLFRDFIAAVKKCK

SEQ ID NO: 36429 - DNA, 558 bp, Unknown
  Obtained from environmental sample
  misc_feature (1)..(558): n is a, c, g, or t
ttggcaaacccctatcctgtcgaccctgagaaagcccattcgctgcttaaggaggctggttacggcgagggcggaaaaaaacttaccctggaaataaccgtaacctcaatttataccatgcatgttgacaccgcccaggtaatagccgatcagcttgccaaaatcggaatcgacgtcactataaaacttgtcgagtgggcggcatggctttcagacgtatacttaggacggaagtaccaggcgacgattatctcactggacagccccgttgtctcgccgaggagttttctttcccgttaccgttcgggtgacaacagtaactttatcaattattccagcggtaattttgaccgggtctttgacgcggttctcgttgaaccaagcgaagacaagcgtatcgccctgtacaaggaagcccagcgtattatttccgccgacgcggccagcgtctacatccaggacatactgggttttcgcgccttacgcgcgggcgcctttggcggagtgctgaactaccccttgtacgtcaatgattttgcggcaatgcatgcaaaatag

SEQ ID NO: 36430 - protein, 185 aa, Unknown
  Obtained from environmental sample
  misc_feature (1)..(185): Xaa is any amino acid
MANPYPVDPEKAHSLLKEAGYGEGGKKLTLEITVTSIYTMHVDTAQVIADQLAKIGIDVTIKLVEWAAWLSDVYLGRKYQATIISLDSPVVSPRSFLSRYRSGDNSNFINYSSGNFDRVFDAVLVEPSEDKRIALYKEAQRIISADAASVYIQDILGFRALRAGAFGGVLNYPLYVNDFAAMHAK

SEQ ID NO: 36431 - DNA, 564 bp, Unknown
  Obtained from environmental sample
  misc_feature (1)..(564): n is a, c, g, or t
atgctcttatccgatgtggtgattgttctttcacggcctgaaagggcgggaaatgtgggggccgtttgccgtgcaatgaagaacatgggactttcccgcctgcgccttgccgcgcctggtttttcggcggcggacaccgacagtgctttttcgctttcggaagccggactcggtttcgggggggatctggccgttatccgcgcaagggccattcacgctgttgatgtgtgggaaaaagcggaaaccttcgacacccttgctgccgctgtaaatgactgcgccctagtcattggcacaacccgccgcagggggcgccatcgcaagcaggttaccatgacgccttcggaaaccgccgcctttctganaacccatcccggccccgcggccctggtttttggcaacgaacgtaccggccttgaggacgaagagcttgaactctgcaattttgcctcccacataccggcggatgaaactttcccttccccttacctttcgcacgctgttcagatttacgcttacgagcttttagagccctcacctgtccccgtgcggaagatgccgtag

SEQ ID NO: 36432 - protein, 187 aa, Unknown
  Obtained from environmental sample
  DOMAIN (5)...(173): SpoU rRNA Methylase family
  misc_feature (1)..(187): Xaa is any amino acid
MLLSDVVIVLSRPERAGNVGAVCRAMKNMGLSRLRLAAPGFSAADTDSAFSLSEAGLGFGGDLAVIRARAIHAVDVWEKAETFDTLAAAVNDCALVIGTTRRRGRHRKQVTMTPSETAAFLXTHPGPAALVFGNERTGLEDEELELCNFASHIPADETFPSPYLSHAVQIYAYELLEPSPVPVRKMP

SEQ ID NO: 36433 - DNA, 921 bp, Unknown
  Obtained from environmental sample
  misc_feature (1)..(921): n is a, c, g, or t
atggaagttggaatattggtttccccaaatccctcttccgttacagcccaacttgcagcagaccgtacccttactattagcggaaacggcaagatgaaagatttcactgccgataccgaggcgtcaggagccgcaccatggcatctgtggcgaaattacattaccaacgtagtcattagcgaagacgtcagcagcataggcagttatgcttttcaaaattttggcaaaataacttccataaccattcccaatacagtaacttccatcgggaacgatgctttttccggttgtagtacattgaataatgtaacttttagtggcaattcagttttatcgattggcaattctgcttttgccaattgtagcgctttgacgtccattaccattcccaattcagtaatttccatcgaaaataatgcttttgccaattgtggtgctttgactaccgcaactattggcacttcggttgaatcgattggcacttcggcttttgccaattgtagcgctttgcagtccgttactattcccaattcggtaatttccatcgaaaataatgtttttgttaattgccgagctttgactaccgcaactattggcacttcggttgaatcgattggcaattctgctttttccggttgtagcgctttggctaccgtaactattggcaattcagttgcatccattggcaattctgcttttttcggtagtggtttaactactgttaccattcccacttcggttacatccattggcaattctgctttttccaattgtaacagtttggcgtccgttaattttaatgccactaattgtagcgtgatggggaatttaaccaatcctgtttttggcaattgccctgcattgacaggcattaacatcggaagcaatgttctgacgatacccgactctcggccgatctga

SEQ ID NO: 36434 - protein, 306 aa, Unknown
  Obtained from environmental sample
  misc_feature (1)..(306): Xaa is any amino acid
MEVGILVSPNPSSVTAQLAADRTLTISGNGKMKDFTADTEASGAAPWHLWRNYITNVVISEDVSSIGSYAFQNFGKITSITIPNTVTSIGNDAFSGCSTLNNVTFSGNSVLSIGNSAFANCSALTSITIPNSVISIENNAFANCGALTTATIGTSVESIGTSAFANCSALQSVTIPNSVISIENNVFVNCRALTTATIGTSVESIGNSAFSGCSALATVTIGNSVASIGNSAFFGSGLTTVTIPTSVTSIGNSAFSNCNSLASVNFNATNCSVMGNLTNPVFGNCPALTGINIGSNVLTIPDSRPI

SEQ ID NO: 36435 - DNA, 453 bp, Unknown
  Obtained from environmental sample
  misc_feature (1)..(453): n is a, c, g, or t
atggaaaaaacattcgctatggtaaaacccaatgcggttaaatctgggcttattgggcacataatcgctcgctacgaatctgcaaggctatctgttgtggcacttcgctttaagcaaatgacacaggcagatgcagagggtttttatgcagaacacgttggcaaaggatttttcgcagaacttgccaaattcatgacatctggtccttctgttcagcttgttcttgcaggcgaaaacgccattgcaaaagtccgtgccattaacggagcaacaaatccagaaaaggcagaacccggcaccatacgctacgactgggcaacatccatgacagaaaatgcagtgcattcctccgatggtccagaaagcgcagcacgagaaatagccttctggttcaagcccgaagaaatttttgaatacggtgcaacggatcagagagcaaagtctgtactctaa

SEQ ID NO: 36436 - protein, 150 aa, Unknown
  Obtained from environmental sample
  DOMAIN (2)...(136): Nucleoside diphosphate kinase
  misc_feature (1)..(150): Xaa is any amino acid
MEKTFAMVKPNAVKSGLIGHIIARYESARLSVVALRFKQMTQADAEGFYAEHVGKGFFAELAKFMTSGPSVQLVLAGENAIAKVRAINGATNPEKAEPGTIRYDWATSMTENAVHSSDGPESAAREIAFWFKPEEIFEYGATDQRAKSVL

SEQ ID NO: 36437 - DNA, 789 bp, Unknown
  Obtained from environmental sample
  misc_feature (1)..(789): n is a, c, g, or t
gtgctatcgcaaagcagcggcgagggaaaagccacattcgatttattgatcgtaagggaattaacaggcggcctttacttcggcaagcgcggtcgaattgacgacttttcaaacgggcacagccccggttccgcctttgatacagaaacttattcatggatggaaattgaaagggtgctccgcgcaggctacgaagcggcgctagtacgcagaaaaaaactctgcgtggtggacaaggccaatgtgcttgagtcatcacgtttctggcgcgaagtcgccgcagttgtttcaaaggactatcctgatgtagaaacaagttacctctacgttgacaacgcggcaatgcagctgatcagggctccgggacaattcgacgttattgttacgtctaaccttttcggggacatactttccgatgaagcgtccgtgcttacaggttctatcggtatgcttgcatccgcgagtcttggcgcggttacgcagacaggaaaaaggcccggaatgtacgagcctattcacggctccgccccggacatcgcggggaaggacatcgcgaatccgcttgcgacaatactttccgccgcgatgatgctccgttattcattcaatcttgagaaggaagccaagtccattgaaaccgctgtcaacgatgtgctggatcaggggctgaggacaggtgatatagcaagccgaagcgcggtctcaagcggaggcgcggcaagcagcgaaaaaattgtgggtaccaaagagatgggagatgcggtactcaaagcattggagaaattatga

SEQ ID NO: 36438 - protein, 262 aa, Unknown
  Obtained from environmental sample
  DOMAIN (1)...(255): Isocitrate/isopropylmalate dehydrogenase
  misc_feature (1)..(262): Xaa is any amino acid
MLSQSSGEGKATFDLLIVRELTGGLYFGKRGRIDDFSNGHSPGSAFDTETYSWMEIERVLRAGYEAALVRRKKLCVVDKANVLESSRFWREVAAVVSKDYPDVETSYLYVDNAAMQLIRAPGQFDVIVTSNLFGDILSDEASVLTGSIGMLASASLGAVTQTGKRPGMYEPIHGSAPDIAGKDIANPLATILSAAMMLRYSFNLEKEAKSIETAVNDVLDQGLRTGDIASRSAVSSGGAASSEKIVGTKEMGDAVLKALEKL

SEQ ID NO: 36439 - DNA, 933 bp, Unknown
  Obtained from environmental sample
  misc_feature (1)..(933): n is a, c, g, or t
atgggaattgactatgagatagagcaaattgctgccgagttgctaaacgatttccaaaaaaaacgcgaaattaccaaacaaccagcaaagccggtgataattgagataattggcaaactgcaacacctactctttcctggaatttttgaaagcgttttaacagacggttcggtaaaaaataaactcaacgttatgttagaagaagtttcccacaatttagccaagcaaacaaaattggctctgcgctatgatttgcgctacaaagaagcaacgcaagaagatgttgacaaaacggcttgggaaaaaacgcgacaatttattttaaaaattcctctcataaaagattttttggaaaaagatatagaagctgcatatagtggcgacccttctgcatatagcaaggcagaaattgtaatatcttacccaggcatttatgccataatggtttaccgaatagcacacgaattgtatttgctctctgtgccgcttatccccagaattatgagcgaatacgcgcacagcgcaacaggcatagacatccatccgggcgcggtgataggcaagtatttttttatagaccacggcacgggcattgtaataggagaaaccgccgttatcggaaacaacgtcaaattgtatcagggagtaacgcttggagccttgtccacaaagggaggacagggcataaagggcgttaagcgccatcctactatatgcgataatgtcacgatatactcgggcgcaagcatattaggaggggacaccatcataggcgaaggcgttgtaataggcggaaacgcttttgtaatacggtcagtcccggaaaaaacccgcgtaagcgtaaaaaacccggaattgcagtttaagtcaagcggcaatatttcctcccacattgagttggatcagattgatttctggcattatgatatttaa

SEQ ID NO: 36440 - protein, 310 aa, Unknown
  Obtained from environmental sample
  misc_feature (1)..(310): Xaa is any amino acid
MGIDYEIEQIAAELLNDFQKKREITKQPAKPVIIEIIGKLQHLLFPGIFESVLTDGSVKNKLNVMLEEVSHNLAKQTKLALRYDLRYKEATQEDVDKTAWEKTRQFILKIPLIKDFLEKDIEAAYSGDPSAYSKAEIVISYPGIYAIMVYRIAHELYLLSVPLIPRIMSEYAHSATGIDIHPGAVIGKYFFIDHGTGIVIGETAVIGNNVKLYQGVTLGALSTKGGQGIKGVKRHPTICDNVTIYSGASILGGDTIIGEGVVIGGNAFVIRSVPEKTRVSVKNPELQFKSSGNISSHIELDQIDFWHYDI

SEQ ID NO: 36441 - DNA, 1335 bp, Unknown
  Obtained from environmental sample
  misc_feature (1)..(1335): n is a, c, g, or t
gtgagttgcgaagttttgcagccaaaaggcgaaagcggcttgatagcgtatttggcaagcggaatttttgcaggcattggcgaaaagaccgcggaaaaattggtagcgatttttggcgaggatttgccgaatgttttggacagagacccagacaggttgaaaggagcggttagagggcttagcggaaaaagattggaaaaatttatagacgattggagcttgcagcaagaaagcagacgcgctctgttattcctttacaaactgggtttcacaggtgcaaaagcgatgctcgtttggaatttatataaaatggaaacggagagcattgtcaacgaaaatccctacgccctgtgcgaagaaccttttgcctatccatttgaaatagccgacaacgccgcaaaaaaactcggctttgatgaaacggctggcttaaggctccgtgcttcggtgctgcaagtcttgcgagaagctaaatacgatggcggtcacgcctttatgccaaccgaaaatttattgcaaaactctctcaattttttgagaataattccaaccttccccgatgatgatatctatgattatctgtattccgctttggcggatttgaaaaaagcaaaaaaggtaattatacaaggggaaagggtttggcttcccgaactttacgaggcggagcagtatattggaatgtttgtgcgaagggctttgaacttggattttttggaaagctcgcacagcgatgcggagataaacacagcagcgagtagccttgaaatctcttatagcgatgagcaactgaaagccattaaagacgcggtttcaaatatgttttttgtaatcacaggcggccccggtactgggaaaaccaccattctaaaaggtatattgcacattttgaatttgcaaaaaagaaaggtgatgttagccgcgcccacagggcgggcggcacgtcgtatggcggagctttgccgctttaaggcgagcacaatacacaagatgctggagatagaccctatctccggacttttttacagagacgaaggcaaccctttggacgcggacagcgttataatagacgaaagttcaatgatagacgatgagcttgccgcagacttaatgcgggctttgaaacccaacgcccaattgattttaatcggcgatgcagaccagttgccaagcgtgggacctggcaacgtgctgagggaaattctctcttgccctgaagttccaaaagctatactctcaaaaatctacagacaaggcgaagcaagcgacatcgcggaaaacgcgcatcgcattttagcgggcaaaatgccctcggccgaaatctgtcaatgttga

SEQ ID NO: 36442 - protein, 444 aa, Unknown
  Obtained from environmental sample
  misc_feature (1)..(444): Xaa is any amino acid
MSCEVLQPKGESGLIAYLASGIFAGIGEKTAEKLVAIFGEDLPNVLDRDPDRLKGAVRGLSGKRLEKFIDDWSLQQESRRALLFLYKLGFTGAKAMLVWNLYKMETESIVNENPYALCEEPFAYPFEIADNAAKKLGFDETAGLRLRASVLQVLREAKYDGGHAFMPTENLLQNSLNFLRIIPTFPDDDIYDYLYSALADLKKAKKVIIQGERVWLPELYEAEQYIGMFVRRALNLDFLESSHSDAEINTAASSLEISYSDEQLKAIKDAVSNMFFVITGGPGTGKTTILKGILHILNLQKRKVMLAAPTGRAARRMAELCRFKASTIHKMLEIDPISGLFYRDEGNPLDADSVIIDESSMIDDELAADLMRALKPNAQLILIGDADQLPSVGPGNVLREILSCPEVPKAILSKIYRQGEASDIAENAHRILAGKMPSAEICQC

SEQ ID NO: 36443 - DNA, 372 bp, Unknown
  Obtained from environmental sample
  misc_feature (1)..(372): n is a, c, g, or t
atggagaaaataatgaaaatttgtgaagtgtgcagaggatatgaatacgagggacctcgatttataaaattaggtccattttcaggtgaagaattcagagaaaaacatctttctaattggctgaatactttaaatgatcaggaaaaggcaattattgattttgaagggacaagaatgtattccccgtcttttcttgaagaaagttttggaggggttattcgaaatgcaaagtcagaaaatgaagctgaaataaataggaaaaaactgaagcttgctgaatttattaatattgatcctgattggaaaaaaaaattggatagttacattgaaaaagcaaaatatacagcaaaagtaagtaacactgcaaaatga

SEQ ID NO: 36444 - protein, 123 aa, Unknown
  Obtained from environmental sample
  misc_feature (1)..(123): Xaa is any amino acid
MEKIMKICEVCRGYEYEGPRFIKLGPFSGEEFREKHLSNWLNTLNDQEKAIIDFEGTRMYSPSFLEESFGGVIRNAKSENEAEINRKKLKLAEFINIDPDWKKKLDSYIEKAKYTAKVSNTAK

SEQ ID NO: 36445 - DNA, 966 bp, Unknown
  Obtained from environmental sample
  misc_feature (1)..(966): n is a, c, g, or t
atgataggcggcagatttattaccctgcctgtaatgatgtatcaggaagtaatcgggcttttgaatttcagccgaggcagtgtaataggctcttttctcctaattccggcgatagtcgcttttgtatttgaccttttaaaccgagacagggctaatcaaaattttatcattaatgaaaaaacaaagacaaaaaacaaactgcgggacgccgccgcagcgtgttatgtgatatttatatgtttgattatcgccctgccggtattggtttttgcttttctcacattttttaaaagttatcctgttgatatgactttgtcgttaaataacattgtcaaaacaatgaacatgggcgcgggactatacttgcgcaattctcttataatcgccgtttttgtttcaattttaggaactgttttttcctggattaccgcatattttaccgcccgtaccgcaggtaaatcgtcacgtatgcttcatcttatatccattacatcgctggcaattcccggattggtgcttggtctttcatacgtgctttttttcaaaggcagctttatttacggaagccttgccatgctgatacttgtcaatactattcactttttggcttctccgtatcttatggcgtacaactcattgggaaagatcaatattaatcttgaagatgtcggcagaacattgggcgtaggacgtttccgcattattcgcgatgtgttaattcctcagactaaactgacaattttggaaatgttttcttacttttttgtaaattcaatgatgacaatttcagccgtatcattcttaagcacggtgcgaagccgacctgtttctctcatgattaaccagtttgaagctcagcttttccttgagggggcggcttttgtttcaattcttattctcggcagcaatttgattataaaatgcgccgtatatgttattaccaaaatattaaagaaaaaaggctga

SEQ ID NO: 36446 - protein, 321 aa, Unknown
  Obtained from environmental sample
  DOMAIN (122)...(319): Binding-protein-dependent transport system inner membrane component
  misc_feature (1)..(321): Xaa is any amino acid
MIGGRFITLPVMMYQEVIGLLNFSRGSVIGSFLLIPAIVAFVFDLLNRDRANQNFIINEKTKTKNKLRDAAAACYVIFICLIIALPVLVFAFLTFFKSYPVDMTLSLNNIVKTMNMGAGLYLRNSLIIAVFVSILGTVFSWITAYFTARTAGKSSRMLHLISITSLAIPGLVLGLSYVLFFKGSFIYGSLAMLILVNTIHFLASPYLMAYNSLGKININLEDVGRTLGVGRFRIIRDVLIPQTKLTILEMFSYFFVNSMMTISAVSFLSTVRSRPVSLMINQFEAQLFLEGAAFVSILILGSNLIIKCAVYVITKILKKKG

SEQ ID NO: 36447 - DNA, 429 bp, Unknown
  Obtained from environmental sample
  misc_feature (1)..(429): n is a, c, g, or t
atgctgcgttacctcaaaaaacaggggttcacgcttattgagctgatggtcgttattgtgatcattggagtattggcgtcgttggcgattccgaggtttacggaagcgtcggttaaggcgaaggttgcggaggcgccgcggattatcgcgtcgtatgagtcggcttatttgacggccgtttcggaaagcgggactgttgccaacgagagcgacctagtttttacaagtccgacgtcgaaagattcaaagtggtggacgtatacattcacaagtagcgcagctgtttataccgctacggcgaactcggatcaaatgaaaaaatccggttcgttggtaacgacctattcttctgatgcatttgttcactccggaacaggggatttgtacagcaagaagtacgtcccgaatttcatgccaaagcagccttga

SEQ ID NO: 36448 - protein, 142 aa, Unknown
  Obtained from environmental sample
  DOMAIN (8)...(31): Prokaryotic N-terminal methylation motif
  misc_feature (1)..(142): Xaa is any amino acid
MLRYLKKQGFTLIELMVVIVIIGVLASLAIPRFTEASVKAKVAEAPRIIASYESAYLTAVSESGTVANESDLVFTSPTSKDSKWWTYTFTSSAAVYTATANSDQMKKSGSLVTTYSSDAFVHSGTGDLYSKKYVPNFMPKQP

SEQ ID NO: 36449 - DNA, 915 bp, Unknown
  Obtained from environmental sample
  misc_feature (1)..(915): n is a, c, g, or t
ttggccgagacgaatccttacagcgaaattaacggtagtgacgcgatcatttccggcagaaccgatacggctgtcaaaatttcacacacattcggcgaaacgctgaaaaaagaggtttcaaaaatagagatcaattcacagcccgtgaaaacgatatatacccacgacgatacgcttaatctgtcagggctttccgtaaaactgacatacaacgacaatacaagcgaaattttcaaccttaaagattttggcgacattattaccggaaaccccgcgcacaacagtacgctttcccatacagatcacaacaataaacctgttatagtgtctataggcattcatgatgtaaacacttctattcctctaacggtcaataaagcaaaaccaacaataacctttccaaaagcggagcctataacctacgaaatgacgctttcaaaatcagcgtttataggcggcagcactacgtatggttcgtttgactggcaagacggcgcgaccgttccaacagttaccaacatcgggtatcctgtggagtttaccccatttaatacgaaagattatgattattcaggcgtaagcggctggaacagcggcgccggcaaggcggtgcaatccgttccgattaccgtcagcaaagccgcgggctactccgttgacgcgccgaccggtaccggaaacgccgcttcgcttgaaattaccgttgccaccgtacctccgcccggcaacagtcaaaccgttgaatacgccataaatacaacaaacaccgtcccctcgtcaggctggcaggctggaatgacatttagcgatctttctatcgataagacgtactacattttcgcccgttcaaaaggaaacgctaattacgaaacaggaacgcccagcgaaagccttcaggtaacaacgccggggtaa

SEQ ID NO: 36450 - protein, 304 aa, Unknown
  Obtained from environmental sample
  misc_feature (1)..(304): Xaa is any amino acid
MAETNPYSEINGSDAIISGRTDTAVKISHTFGETLKKEVSKIEINSQPVKTIYTHDDTLNLSGLSVKLTYNDNTSEIFNLKDFGDIITGNPAHNSTLSHTDHNNKPVIVSIGIHDVNTSIPLTVNKAKPTITFPKAEPITYEMTLSKSAFIGGSTTYGSFDWQDGATVPTVTNIGYPVEFTPFNTKDYDYSGVSGWNSGAGKAVQSVPITVSKAAGYSVDAPTGTGNAASLEITVATVPPPGNSQTVEYAINTTNTVPSSGWQAGMTFSDLSIDKTYYIFARSKGNANYETGTPSESLQVTTPG

SEQ ID NO: 36451 - DNA, 879 bp, Unknown
  Obtained from environmental sample
  misc_feature (1)..(879): n is a, c, g, or t
gtgcacggctacatcatggacgagggtgagaaggtccccgtcgccggaaggctgcgctaccgcggcatcgacgtggtggacattgtcgagggattccagcgggacaagcgcttcggttacaacgaggtggcctacctcctcctcttcggcagcctgccgcaggagggacagcttaagcacttcaggggtatgctcgacgcctgtcgcgaactgccggaagggttcatggagaacatgatcctaaaggcccccacgcccaatataatgaatagtttggcgcgttcggtgctcgccagctactcctacgacctcgatccggattccattgacataaggaacgttttgcgccagtgcatagagctgatatcgcgcttcacgacgttcgtagcctacgggtatcaggctaaaggccacttttacgacaataagagcctcgtaatccacaaacctcaagccggcatgagcacggctgagaactttctgtacatgatacgccccgactccgcctttacgccgcttgaggccgagacgcttgatctggctctggtgctccacgccgagcacggcggcggcaacaacagcgctttcgcgttgcacgtcgtcacctcctccgacaccgatacctactcggctatggcggcggcggtcggttcgctaaaggggcccaagcacggcggggcgaacatcaaggtctccggcatgattgaagacatcaaggccggcgtgaaagattggaacgacgacgacgagatatccgactacttaggtaagataatccgcaaagaggctttcgacggggccgggctaatctacggcatggggcacgccgtgtacacatacagcgacccgcgcgccatcatttgccaacaaccgcgataa

SEQ ID NO: 36452 - protein, 292 aa, Unknown
  Obtained from environmental sample
  DOMAIN (1)...(287): Citrate synthase
  misc_feature (1)..(292): Xaa is any amino acid
MHGYIMDEGEKVPVAGRLRYRGIDVVDIVEGFQRDKRFGYNEVAYLLLFGSLPQEGQLKHFRGMLDACRELPEGFMENMILKAPTPNIMNSLARSVLASYSYDLDPDSIDIRNVLRQCIELISRFTTFVAYGYQAKGHFYDNKSLVIHKPQAGMSTAENFLYMIRPDSAFTPLEAETLDLALVLHAEHGGGNNSAFALHVVTSSDTDTYSAMAAAVGSLKGPKHGGANIKVSGMIEDIKAGVKDWNDDDEISDYLGKIIRKEAFDGAGLIYGMGHAVYTYSDPRAIICQQPR

SEQ ID NO: 36453 - DNA, 1446 bp, Unknown
  Obtained from environmental sample
  misc_feature (1)..(1446): n is a, c, g, or t
gtggagatagaggagacggagctgaacggcccggtcagggaggccttccaaacgtatatgagcgcccgcgggtatgtctacggcgacggcgcggacgctcgcgacctctctttgatggacatcgcccttatgggtatgcgggaactgcgtaaaaaggggttgcttgaagatttggacgcctccgacgaggtgaacgcttgtagcatcgtggtgccggcggttgtggacggcgaggcggaggattggcttgtgatgttcaagaacgagacgcacaaccatcccaccgagatagagcctttgggcggcgcggccacctgtttgggcggcgcgatccgcgacccgctttcggggcgctcatacgtttatcaggcgatgcgcgtgaccggcgccggcgacccccgcgccgcggtcggcgatacgctgccgggcaagctgccgcagcggaagatcacgaccttggccgcgcaggggtacagctcctacggaaatcagataggccttgccgcgggcgtcgtctccgagatataccacaatggttacatcgccaagcgtatggagataggcgcggtggtcggcgccgttcccaaatcgcacgtggcgcgccgcgttcccgaagcgggcgacgtcgtggtgcttctcggcggcaggaccgggcgcgacgggtgcggcggggccacggggtcgtccaaggagcacaccgaagagtccatacagacctgcggcgcggaggtgcagaagggcaacgcccccaccgagcgcaagatacagcggctcttccgggatccggaggtcggcaggatgatccgccgttgcaacgatttcggcgcgggcggggtggccgtggctgtcggcgaattggccgccgggctcgacatctacttagacgccgtcccaaaaaagtacgaggggctcgacgggacggaactcgctatctccgaatctcaggagcgtatggccgtggtgatcagccagtcggatttaaaaacctttcaggagaaggcggagtgtgagaatttggagaccgccgtcgtcgcgactgtgacggacgccaaccgcctaaagatgttttggcgcgggagggcgatagtcgacataagccgcgacttcatagacacaaacggcgtattgcagaaagcggaggtctttgtcaagtccccgaaggcgctctacttgccgaacgtcttgtccatgacgtcgagatgcagggacgacgccggcgacgccgcgggcgcctttttcgatacgatgacggacatcaacgcctgcagccagcgcggtttgaaggagatgttcgacagttccataggggccaacaccgtgctaatgcccttcggcgggaggtaccaacggacgccggcggaggcgatggtcgcgaagctgccggcggcaagcggcgaaacggttaccggaacggcgatgagctacggcttgaccctctcgcgataa

SEQ ID NO: 36454 - protein, 481 aa, Unknown
  Obtained from environmental sample
  DOMAIN (205)...(358): AIR synthase related protein, C-terminal domain
  misc_feature (1)..(481): Xaa is any amino acid
MEIEETELNGPVREAFQTYMSARGYVYGDGADARDLSLMDIALMGMRELRKKGLLEDLDASDEVNACSIVVPAVVDGEAEDWLVMFKNETHNHPTEIEPLGGAATCLGGAIRDPLSGRSYVYQAMRVTGAGDPRAAVGDTLPGKLPQRKITTLAAQGYSSYGNQIGLAAGVVSEIYHNGYIAKRMEIGAVVGAVPKSHVARRVPEAGDVVVLLGGRTGRDGCGGATGSSKEHTEESIQTCGAEVQKGNAPTERKIQRLFRDPEVGRMIRRCNDFGAGGVAVAVGELAAGLDIYLDAVPKKYEGLDGTELAISESQERMAVVISQSDLKTFQEKAECENLETAVVATVTDANRLKMFWRGRAIVDISRDFIDTNGVLQKAEVFVKSPKALYLPNVLSMTSRCRDDAGDAAGAFFDTMTDINACSQRGLKEMFDSSIGANTVLMPFGGRYQRTPAEAMVAKLPAASGETVTGTAMSYGLTLSR

SEQ ID NO: 36455 - DNA, 768 bp, Unknown
  Obtained from environmental sample
  misc_feature (1)..(768): n is a, c, g, or t
ttggcttgtgatgttcaagaacgagacgcacaaccatcccaccgagatagagcctttgggcggcgcggccacctgtttgggcggcgcgatccgcgacccgctttcggggcgctcatacgtttatcaggcgatgcgcgtgaccggcgccggcgacccccgcgccgcggtcggcgatacgctgccgggcaagctgccgcagcggaagatcacgaccttggccgcgcaggggtacagctcctacggaaatcagataggccttgccgcgggcgtcgtctccgagatataccacaatggttacatcgccaagcgtatggagataggcgcggtggtcggcgccgttcccaaatcgcacgtggcgcgccgcgttcccgaagcgggcgacgtcgtggtgcttctcggcggcaggaccgggcgcgacgggtgcggcggggccacggggtcgtccaaggagcacaccgaagagtccatacagacctgcggcgcggaggtgcagaagggcaacgcccccaccgagcgcaagatacagcggctcttccgggatccggaggtcggcaggatgatccgccgttgcaacgatttcggcgcgggcggggtggccgtggctgtcggcgaattggccgccgggctcgacatctacttagacgccgtcccaaaaaagtacgaggggctcgacgggacggaactcgctatctccgaatctcaggagcgtatggccgtggtgatcagccagtcggatttaaaaacctttcaggagaaggcggagtgtga

SEQ ID NO: 36456 - protein, 255 aa, Unknown
  Obtained from environmental sample
  misc_feature (1)..(255): Xaa is any amino acid
MACDVQERDAQPSHRDRAFGRRGHLFGRRDPRPAFGALIRLSGDARDRRRRPPRRGRRYAAGQAAAAEDHDLGRAGVQLLRKSDRPCRGRRLRDIPQWLHRQAYGDRRGGRRRSQIARGAPRSRSGRRRGASRRQDRARRVRRGHGVVQGAHRRVHTDLRRGGAEGQRPHRAQDTAALPGSGGRQDDPPLQRFRRGRGGRGCRRIGRRARHLLRRRPKKVRGARRDGTRYLRISGAYGRGDQPVGFKNLSGEGGV

SEQ ID NO: 36457 - DNA, 447 bp, Unknown
  Obtained from environmental sample
  misc_feature (1)..(447): n is a, c, g, or t
ttgggacggcgtctaagtagatgtcgagcccggcggccaattcgccgacagccacggccaccccgcccgcgccgaaatcgttgcaacggcggatcatcctgccgacctccggatcccggaagagccgctgtatcttgcgctcggtgggggcgttgcccttctgcacctccgcgccgcaggtctgtatggactcttcggtgtgctccttggacgaccccgtggccccgccgcacccgtcgcgcccggtcctgccgccgagaagcaccacgacgtcgcccgcttcgggaacgcggcgcgccacgtgcgatttgggaacggcgccgaccaccgcgcctatctccatacgcttggcgatgtaaccattgtggtatatctcggagacgacgcccgcggcaaggcctatctgatttccgtaggagctgtacccctgcgcggccaaggtcgtga

SEQ ID NO: 36458 - protein, 148 aa, Unknown
  Obtained from environmental sample
  misc_feature (1)..(148): Xaa is any amino acid
MGRRLSRCRARRPIRRQPRPPRPRRNRCNGGSSCRPPDPGRAAVSCARWGRCPSAPPRRRSVWTLRCAPWTTPWPRRTRRARSCRREAPRRRPLRERGAPRAIWERRRPPRLSPYAWRCNHCGISRRRRPRQGLSDFRRSCTPARPRS

SEQ ID NO: 36459 - DNA, 879 bp, Unknown
  Obtained from environmental sample
  misc_feature (1)..(879): n is a, c, g, or t
gtgatatatcctaaaaccaacgaccccgttaataaagacggaagaatgtgcctttacgcgccggatgtaacgctcggaccggacggcaggtattatttgttttatgtgcttgataaagtagatgtcgtgtccgtggcggtctgcggcactccggccggagaatttaaattccacggctatgtgcattatcctgacggaaccatgcttggcaagcgggaaggggaccagcctcagtttgatccgggcgttttaactgaaggtgataaaacatatctctttacaggtttttgcggatatgacaataagaccagaataggagctacggcggtaacgctgggacccgatatgctgactgtgcttgacgagccggttcttgtcgttcccggagtgcataacagtaaaaacacaagttttgaaggctgtgaattttttgaagctccgtccataagaaagcgcggcgacacatattattttatctattcatcaattgcgtctaacgaactttgttacgcgaccagcaaaaatcccataaaggattatgtttatggcggcgttattatcagcaacgccgatgtccgtatcggcacgtataaaccggctgataaacccatgaactgcggcggcaataatcacggaagcatcatagaaataaaaaataaatggtatatcttttaccacaggcataccaacgggaacgagttcagccgtcagggatgtcttgagccgatagaaataaaggcggatggttctattccgcaggtagagatgacttcgtgcggcccgaacggcaggccgcttgacggcaaaggtgaatttccggcatatattgcgtgtaacatattttccgtggaaaacggcaatcaacctcggccaatctga

SEQ ID NO: 36460 - protein, 292 aa, Unknown
  Obtained from environmental sample
  misc_feature (1)..(292): Xaa is any amino acid
MIYPKTNDPVNKDGRMCLYAPDVTLGPDGRYYLFYVLDKVDVVSVAVCGTPAGEFKFHGYVHYPDGTMLGKREGDQPQFDPGVLTEGDKTYLFTGFCGYDNKTRIGATAVTLGPDMLTVLDEPVLVVPGVHNSKNTSFEGCEFFEAPSIRKRGDTYYFIYSSIASNELCYATSKNPIKDYVYGGVIISNADVRIGTYKPADKPMNCGGNNHGSIIEIKNKWYIFYHRHTNGNEFSRQGCLEPIEIKADGSIPQVEMTSCGPNGRPLDGKGEFPAYIACNIFSVENGNQPRPI

SEQ ID NO: 36461 - DNA, 1071 bp, Unknown
  Obtained from environmental sample
  misc_feature (1)..(1071): n is a, c, g, or t
atgagaaggaaaataccattcatcgccgcgtcgctactggcgctcgccatcacattcgtcacctgcggcgggggcggcaacaagaacaaggatgacggcggcaacaatactggtggtcagacggtctatgttgcgggtgtcgtggggaatgatttggatagtctgcgcaccacactctggaaagacggggttccccagcagcttggcactaacaattactcaggtgcctattcagtctacgtttccggcagcgatgtgtacgttgctggataccaatctattagtccagatgatagacgcgctgtgctgtggaagaacggcacccgccagcagctcagcagcatatggtcagaggccctttctgtctatgtttctggcagcgatgtgtacgttgctggatacgaaaatgacatttacttcgatgatcaaaacattggtcacttcaacttccgggctgtgctgtggaaaaacggaatccgccaacagctcagcagcatagactcatgggccaattccgtctatgtttctggcagcgatgtgtacgtagttgggggtgccatgctatggaagaacggaatccgccaacagctcggcaataatagctcatcgtcagaggccagttccgtctttgtttcaggcggtgatgtgtacgttgctggattcgaagttattggtggatattatgatgaaaatcgccgcgctgtgctttggaagaacggaatccgccaacagctcggcaataatagctcatggtcagaggccacttccgtctatgtttctggtagcgatgtgtacgttgctggatacgaatttattggtggatattatgatgatgaaaatcgccgcgctgtgctttggaagaacggcacccgtcagcagctcagcggcaatgcttcatatgccagatccgtctttgtttcaggcggtgatgtgtacgttgctggatccgaagttattggtggatattatgatgaaaatcgccgcgctgtgctttggaagaacggcacccgtcagcagctcagcactggcaattactcatttggtgctgcctcttccgtatttgtgaagtag

SEQ ID NO: 36462 - protein, 356 aa, Unknown
  Obtained from environmental sample
  SIGNAL (1)...(23)
  misc_feature (1)..(356): Xaa is any amino acid
MRRKIPFIAASLLALAITFVTCGGGGNKNKDDGGNNTGGQTVYVAGVVGNDLDSLRTTLWKDGVPQQLGTNNYSGAYSVYVSGSDVYVAGYQSISPDDRRAVLWKNGTRQQLSSIWSEALSVYVSGSDVYVAGYENDIYFDDQNIGHFNFRAVLWKNGIRQQLSSIDSWANSVYVSGSDVYVVGGAMLWKNGIRQQLGNNSSSSEASSVFVSGGDVYVAGFEVIGGYYDENRRAVLWKNGIRQQLGNNSSWSEATSVYVSGSDVYVAGYEFIGGYYDDENRRAVLWKNGTRQQLSGNASYARSVFVSGGDVYVAGSEVIGGYYDENRRAVLWKNGTRQQLSTGNYSFGAASSVFVK

SEQ ID NO: 36463 - DNA, 789 bp, Unknown
  Obtained from environmental sample
  misc_feature (1)..(789): n is a, c, g, or t
gtgtcaggcactaaattttactatcttaaaaatgaaggcgtgtatcttgaacttggtcttatccgttatgcgcttgatattctgcaaaaaaaaggattcactccctttattactcccgacatcgcccgtgaagaaatacttgaaggcattgggtttaatccgagaggagcggaatccaatgtgtacactcttgaaggcgaggaaacctgtcttgtaggcacggcggaaattactctaggcggctattactccgacacgattttgccgaaagaaaaacttcctctgcggatggcggggctttcccactgtttccgccgagaagcgggagccgccggtcaattttccaaaggactctaccgcgttcatcagtttacaaaacttgaaatgtttgtttactgtctgcccgaagagtcggggcttttccatgaagaattgcgcttaatcgaagaagaaatttttaagggtcttaacatacctttccgcgtggtggatacatgcacaggcgacttgggcgctcccgcctaccgcaaatgggacttggaagcgtggatgcccgggcgcaacggcggcgaatggggcgaagtaacatcgacatcaaactgcacggattatcaggcgcgcagactcaacattcgttttaaagacgacgacggtaaaaataaatttgttcatatgctgaacggaacggcaatcgctatttcccgcgcaatcatcgccgtcttggaaacttccagcaagcggacggaaccgtgcgtctccaaaagcgttagttccctactgcgggtttga

SEQ ID NO: 36464 - protein, 262 aa, Unknown
  Obtained from environmental sample
  DOMAIN (16)...(187): tRNA synthetase class II core domain (G, H, P, S and T)
  misc_feature (1)..(262): Xaa is any amino acid
MSGTKFYYLKNEGVYLELGLIRYALDILQKKGFTPFITPDIAREEILEGIGFNPRGAESNVYTLEGEETCLVGTAEITLGGYYSDTILPKEKLPLRMAGLSHCFRREAGAAGQFSKGLYRVHQFTKLEMFVYCLPEESGLFHEELRLIEEEIFKGLNIPFRVVDTCTGDLGAPAYRKWDLEAWMPGRNGGEWGEVTSTSNCTDYQARRLNIRFKDDDGKNKFVHMLNGTAIAISRAIIAVLETSSKRTEPCVSKSVSSLLRV

SEQ ID NO: 36465 - DNA, 885 bp, Unknown
  Obtained from environmental sample
  misc_feature (1)..(885): n is a, c, g, or t
gtgggctgtctttgcgtcatagacgcaatacagccgatggtaatggataccgtaaaagccagggaagaaatttccgcgatggcaatttactcaagcaacgggtttattgttggaagctatattcctgatcgcgtaggtaaggcaatgaaagacgtagatactgcctacgctcaatacatggatgaagccgttaaggccgttcaaaacggcgactcttttgcttgcaatagttatgctccggctttgaaatcaaacatagaaattaccatacagtctttccctatgggcaattcgggcaggtcatggagtgtaatgattgcggcgacggaatcgtacattttaaaagaagtaaattttctgaccaagattacgcttattattgcggcaatagccattgtaatagcggcggtaattatttactttgtccttcaaagcaccacaaatccaattgtcaaagtggcggatacgctcagagacatttccgaaggcgaaggcgatcttacgcgaaccatagccgtcagttccaaagacgagataggcgaccttgccaagtacttcaataaaacgctcgataaaatcaaaaaccttgtgcttcttataaaaaaacaggcggggttattgaaagacataggcaacgaccttgcgagcaatatgaccgaaacggccgcggcggtaaaccaaatcaccgccaacattcagagcgtcaagggcagggtcataaaccagagcgcgagcgtgaccgaaaccaacgcgaccatggagcaggttatcaccaacatcaacaagcttaacggccacgtggaaaaccagagcagaaacgtttcccaggcgtcatccgccattgaggaaatggttgccaacatcggttccgtaacaacacgctga

SEQ ID NO: 36466 - protein, 294 aa, Unknown
  Obtained from environmental sample
  DOMAIN (124)...(195): HAMP domain
  misc_feature (1)..(294): Xaa is any amino acid
MGCLCVIDAIQPMVMDTVKAREEISAMAIYSSNGFIVGSYIPDRVGKAMKDVDTAYAQYMDEAVKAVQNGDSFACNSYAPALKSNIEITIQSFPMGNSGRSWSVMIAATESYILKEVNFLTKITLIIAAIAIVIAAVIIYFVLQSTTNPIVKVADTLRDISEGEGDLTRTIAVSSKDEIGDLAKYFNKTLDKIKNLVLLIKKQAGLLKDIGNDLASNMTETAAAVNQITANIQSVKGRVINQSASVTETNATMEQVITNINKLNGHVENQSRNVSQASSAIEEMVANIGSVTTR

SEQ ID NO: 36467 - DNA, 1290 bp, Unknown
  Obtained from environmental sample
  misc_feature (1)..(1290): n is a, c, g, or t
gtgcaaatcatcgtcctgcacgcggacgcgaatttcagaacattggcgggcgtttttccgggggatgccgtatggtacgcggacaacggaataagcgctcaaggatttctggaagccgaggtgcccgcctccgcgaggatcaggatagtggaatggaggcccggcctgaatgtctatggggacataatccttgagcttgtccgcgaaagcgcggatttcatcaaacgcctggaggccggccgcaggacggacgctttcttcgggaaaagatggacgcgtaattttttccgcaaccttgccctgttccaaaatacgctgatgtacagaaaaatggatatgcccgtggtgattaccggctccggccccagccttgaagctgtacttccgcggcttctcgctctaagggacaatatatttatcattgccgcttcctcatctctgccggctctggcggctgcgggcattacgcctgacatggtgatcggcacggacggcggcggatgggccctcacccacctgtacggttttttccgccccttaacgccaaagccgaagccggcaaaaccggcaattctggccctgtccctttgcgcggccgtcccctcgcagtgttcggcatttcccctgctgcccatgaacgacggcagtctttggcagggcattgcgttacgcgcaattaacttcccctctgtattgatcccccagcgggggaccgttactgcttccgcgctggaactcgcgctggaactgagcggcgacaatatatttcttgccggcatggacctgtcggtctgcggcataaaaagccacgcgcggcccaacggctttgatcacctgttctttggcagcgccacgcgcttgcggcctgtgtacgcgcagtattttatccgctcgggcttaattaaagccggagggagccttgacgtgtatgccgcctggtttaagagccgcattgcctcgttcccccaacgggttttttccctgggcagcaaccatgaggtttttaacggtatcgcgcggattgcccccacggagcacgccggaagcggacgggcgcgggggagggagcattttgaacctgtacgtcagggcgggagtcccaaaggccgggtcaggcgggcggcggacgcgatatgcgccgcgttaggcgatctgcgctatgccagggagttgaaagccgaacttgccccactgctgttcccttcacaaacagacgtcccgtcggaaagaatttccgttgacgaaattacccatgccctgcgtgacattgccaagcgatatgagcaatga

SEQ ID NO: 36468 - protein, 429 aa, Unknown
  Obtained from environmental sample
  DOMAIN (94)...(262): Protein of unknown function DUF115
  misc_feature (1)..(429): Xaa is any amino acid
MQIIVLHADANFRTLAGVFPGDAVWYADNGISAQGFLEAEVPASARIRIVEWRPGLNVYGDIILELVRESADFIKRLEAGRRTDAFFGKRWTRNFFRNLALFQNTLMYRKMDMPVVITGSGPSLEAVLPRLLALRDNIFIIAASSSLPALAAAGITPDMVIGTDGGGWALTHLYGFFRPLTPKPKPAKPAILALSLCAAVPSQCSAFPLLPMNDGSLWQGIALRAINFPSVLIPQRGTVTASALELALELSGDNIFLAGMDLSVCGIKSHARPNGFDHLFFGSATRLRPVYAQYFIRSGLIKAGGSLDVYAAWFKSRIASFPQRVFSLGSNHEVFNGIARIAPTEHAGSGRARGREHFEPVRQGGSPKGRVRRAADAICAALGDLRYARELKAELAPLLFPSQTDVPSERISVDEITHALRDIAKRYEQ

SEQ ID NO: 36469 - DNA, 627 bp, Unknown
  Obtained from environmental sample
  misc_feature (1)..(627): n is a, c, g, or t
gtgctcggcgccacattcaccaacaagggcaaattgtttgaagcctttttattttccggcggttccggccatgcaagccattacaaccgcaagggagagagcctgcgcaaggtgctgctcaaggcgccgctggcctttacccgcattacctccgggtatagcaagggacgtgtgcatcctatttttcatgatgtgcgtccgcatgaaggcgttgattacgccgcgcccgccggtacgcccgtcaaggccgtgggcaacggcgtcatcagccggcaaggctggctggacggctacggcaagacgatttccatacgccacggcgccggtctggagtcgcagtatgcgcatctgtcgggctatgccaggggcatggcaacgggcgtccgtgtgcatcagggccaggtcatcggctttgtgggcatgaccggctgggccaccggcccgcatctggatttccgcctcaagcagcacggacgttttatcaatcctgtcaaagccgtcaatccccgcgaggagagcatcgccccggggcgcatgaaagcgtttgaggcgcgcaaaacacagatccgcaattttgttgccggcgtgacccccctggacgcctatacccctgacgcgttcctgtag

SEQ ID NO: 36470 - protein, 208 aa, Unknown
  Obtained from environmental sample
  DOMAIN (66)...(163): Peptidase family M23
  misc_feature (1)..(208): Xaa is any amino acid
MLGATFTNKGKLFEAFLFSGGSGHASHYNRKGESLRKVLLKAPLAFTRITSGYSKGRVHPIFHDVRPHEGVDYAAPAGTPVKAVGNGVISRQGWLDGYGKTISIRHGAGLESQYAHLSGYARGMATGVRVHQGQVIGFVGMTGWATGPHLDFRLKQHGRFINPVKAVNPREESIAPGRMKAFEARKTQIRNFVAGVTPLDAYTPDAFL

SEQ ID NO: 36471 - DNA, 651 bp, Unknown
  Obtained from environmental sample
  misc_feature (1)..(651): n is a, c, g, or t
atgagggagctttccgcgctgggcgtaactttcccggtcaggatcgatcactatatcgccggttccagccagacggcccttgacaccgcgaccattctaaagcagatgtttaccgactatatgggggacgattttatggtgttgcagatcaatacctatgtttccagcttaaggcaggaagttgtcaatccaagccttcagtcaatagcgatgaacggctggggcgcggactacggcgatccgcagaactacctgggacaggaagtatacggcgatgataacgcgtattattcggcggtctattcaaacatcaacaggataacccaggaaacaccgcaaaacagggatctgctcgccatttacagagagtacaccaggctggtcaaagcggcggacaccatcaccaccgatctggatgcccgttacaaggccttcgccaaggccgaagcctacatgctggataacgccttagtcgtcccgtatgcttacagccagggcatgtctttgggaaagattgacaatacctcaaggcacagagccatgtacggcatccagaacatgaagttcaagaactggagaacaaatgtaaacggcataacaactgcggaagctgcggtcaatgcggcaaagtatgcggaaggcaaaaagtag

SEQ ID NO: 36472 - protein, 216 aa, Unknown
  Obtained from environmental sample
  misc_feature (1)..(216): Xaa is any amino acid
MRELSALGVTFPVRIDHYIAGSSQTALDTATILKQMFTDYMGDDFMVLQINTYVSSLRQEVVNPSLQSIAMNGWGADYGDPQNYLGQEVYGDDNAYYSAVYSNINRITQETPQNRDLLAIYREYTRLVKAADTITTDLDARYKAFAKAEAYMLDNALVVPYAYSQGMSLGKIDNTSRHRAMYGIQNMKFKNWRTNVNGITTAEAAVNAAKYAEGKK

SEQ ID NO: 36473 - DNA, 660 bp, Unknown
  Obtained from environmental sample
  misc_feature (1)..(660): n is a, c, g, or t
atgcagtcggccctgcttgaggcaatggaagaaaggcaggttaccataggcgagacaagctacgcccttcccgatccattcttcgtgcttgccacggagaaccccattgagcatgagggaacctattccctgccggaggcggagcttgaccgtttcctgctaaagctgcttgtgacctaccctgagccggaagaagagatcggcattgtcagacgaagcccggagctgtcttccgtctttaccccgactgagcccctctcacccattttggacagggcggctatagcccggttaagaacagccgcggacatgattcatatggacgagaaaataaccgaatacatcgtatcgatagtgaccgccacaaggcccgcgattgagcggcattccggcgcggcaaaagccgccgctaaaaacgccgaaggggtgtaccgttatgtgtcattcggggcgtcgccccgcgcgtccatcgccctttaccgctgttcgaggattctggccctgttcgccggcagggaattcgtcagccccgacgacgtgaaagcggcggcctaccccgccctccggcacagaatcgtgctgtcttacgaggcggaggcggacgggctggacgccgacacggtaattacccgcattctctcccatgtccccatcccgtaa

SEQ ID NO: 36474 - protein, 219 aa, Unknown
  Obtained from environmental sample
  DOMAIN (1)...(54): ATPase family associated with various cellular activities (AAA)
  misc_feature (1)..(219): Xaa is any amino acid
MQSALLEAMEERQVTIGETSYALPDPFFVLATENPIEHEGTYSLPEAELDRFLLKLLVTYPEPEEEIGIVRRSPELSSVFTPTEPLSPILDRAAIARLRTAADMIHMDEKITEYIVSIVTATRPAIERHSGAAKAAAKNAEGVYRYVSFGASPRASIALYRCSRILALFAGREFVSPDDVKAAAYPALRHRIVLSYEAEADGLDADTVITRILSHVPIP

SEQ ID NO: 36475 - DNA, 930 bp, Unknown
  Obtained from environmental sample
  misc_feature (1)..(930): n is a, c, g, or t
atggacacccgtgagcttctgggcaggataacaaggcttcccatcgtggcggacgcgctggcggaagaaatgctttccggcaatttccgttcggtattcaaaggacagggcatggaattcgaggaagcgcgccattaccagtggggcgatgacgcgaaggccatagactggaacgcaagcgcgcgccttggcacgccctttatcaaggttttccgcgaggaacgggagcttacaatactgctgcttttggacgcctccgcctcaatgagaagcgggatagcgaacctatgggggaactcccggggcttaagcccggcctctaaacccggattaaacccctacgagcaggccctgattaccgcggcgttaatcgctttttcatccgagcggagcgggcagcgggtcggggctttcctctttgacagcaagattgacagggtattcccgccgcgcaagggaaggcgcaatatactcgcgtttgtgtcgggggcgctttactatcacaaaacaaaagcggagccgggaaaaagcagcaatctgggcattgcccttgccggcgccgggcgtctgcttaaacggcggagcatggtggtgcttatatctgattttctgagcgcggactgggaaaaagagttatgcgatctgagccgcaggcatgacgttatcgcggtcagagtctatgatccaaaaaacacggaccttccaaaactgggccttcttgatatgcaggatccggaaacgggcctgcggattgcggttccctcaaattcagtttcgttcaggaacgcctgggccggatggcacaaggatcgcgcggataactggcttaaggtatgccgcagggcgggagcgtcccatcttgaactccctgtcgatgaagatcccgcgaaggtactgtcccgtttcttcacaggcaggagcggccagtaa

SEQ ID NO: 36476 - protein, 309 aa, Unknown
  Obtained from environmental sample
  misc_feature (1)..(309): Xaa is any amino acid
MDTRELLGRITRLPIVADALAEEMLSGNFRSVFKGQGMEFEEARHYQWGDDAKAIDWNASARLGTPFIKVFREERELTILLLLDASASMRSGIANLWGNSRGLSPASKPGLNPYEQALITAALIAFSSERSGQRVGAFLFDSKIDRVFPPRKGRRNILAFVSGALYYHKTKAEPGKSSNLGIALAGAGRLLKRRSMVVLISDFLSADWEKELCDLSRRHDVIAVRVYDPKNTDLPKLGLLDMQDPETGLRIAVPSNSVSFRNAWAGWHKDRADNWLKVCRRAGASHLELPVDEDPAKVLSRFFTGRSGQ

SEQ ID NO: 36477 - DNA, 1050 bp, Unknown
  Obtained from environmental sample
  misc_feature (1)..(1050): n is a, c, g, or t
atgtttactttgcagggtttcctgctgacgcacagaaaatataccattcttgaattcggcaattgctgtctgcccctggcgcccggcattgtttttctgcacgatatttactgtgaattttttccggaagactttgtcagcagaagggatagattttcaaggctttacagcagaattcaataccgttttatcgctcgtctcgcgaaaagaatcgcgactgtttccgaatacagtaaaaaagaaatcagcgagacatttaaaattgatccttcaaaaataaatgttatctatagcagcgcggatcatattcgcgatattgcttctgactcctctatatttgataaatttccggcgcttgcggaaaagccgttttatttttctcttgggagtctttcaaaacgaaaaaacatcaaatggattcttgaatacgccgtaaagcatcctgaattgaactttgccatttcaggaaccagtctttctaccgtaaaagttaatgaacttgacaacgggatccccaaaaacataatccttcttggctatcttgacgattccaaagtaaaagcgcttatgacccgatgtaaagcgtttattctgccttcgtattatgaaggtttcggacttaccccgcttgaagcattgttatgcggggcgcaaataattatcgcaagggcggcgagtcttcctgagatctacggaaatacggcccattatatcgatccgtttaacgccgatgttgatcttgacgcgcttcttcgtgaacctgttgaaaagccggatgctattttggcgaaatactcctatgacacttcggccgctatggtatataatctgattaagggaatnttcgcaatgatcgaaaacaaaaagacattatacctaggaatgcgtggtgatattgttcatcctggaataatcaacattatttacacaggaaaactgggtaacataaatacgttcagaattgccaatataggcaatataaaaccgcacgaaatgagaaggtttacggaagttcttaaaaattatcttgattctatcggatggatttag

SEQ ID NO: 36478 - protein, 349 aa, Unknown
  Obtained from environmental sample
  DOMAIN (109)...(269): Glycosyl transferases group 1
  misc_feature (1)..(349): Xaa is any amino acid
MFTLQGFLLTHRKYTILEFGNCCLPLAPGIVFLHDIYCEFFPEDFVSRRDRFSRLYSRIQYRFIARLAKRIATVSEYSKKEISETFKIDPSKINVIYSSADHIRDIASDSSIFDKFPALAEKPFYFSLGSLSKRKNIKWILEYAVKHPELNFAISGTSLSTVKVNELDNGIPKNIILLGYLDDSKVKALMTRCKAFILPSYYEGFGLTPLEALLCGAQIIIARAASLPEIYGNTAHYIDPFNADVDLDALLREPVEKPDAILAKYSYDTSAAMVYNLIKGXFAMIENKKTLYLGMRGDIVHPGIINIIYTGKLGNINTFRIANIGNIKPHEMRRFTEVLKNYLDSIGWI

SEQ ID NO: 36479 - DNA, 825 bp, Unknown
  Obtained from environmental sample
  misc_feature (1)..(825): n is a, c, g, or t
ttgatcttcaaggagcgcattatgagcgataacagcgcgcggcaatttgttgttattggcgcggggcctgccgggctgaccgcagcatacaaaatacttcaggatattcccaatgcgcgggttgatgtgtttgagtcgacggatcggattggcggcatctccacaacaattgaataccatggaaacaggatagacatcggaggacatcgatttttttcaaagatgcaggctgtcaatgatttttggtggaatatcatgccattgcagggggcgggatcaaaggatgataatattcttgggactgacaaggaatttgcgccggacggtcctgaccccgaaaaaacagatgtggttatgctcctgcgcaggcgtgtttccagaatattctatcgccggagattttttgattatcccatagcgctcaaagcgcagacattcataaatatgggttttttcaataccgtccttgccggaataagttttgtatattcatcaatcttcaagcgcaaagaaaattcacttgaggatttttatataaatcgttttggcaagcatctttatcgtatgtttttcgaagactacacggaaaaagtatggggagtgcatccctcaaaactctcggcatcctggggcgcgcagcgcgtgaaagaactttctgtcgcggcggtcattcgcgaggccatacgtaaggttttcaggaaaaattacaagaccgaccaaacgtctcttattgaacagtttttttatccaaaattgggtccaggggcaattgtggtctcttgtagccgaaaaggtacaggcggcaggtgggcgcatacattataa

SEQ ID NO: 36480 - protein, 274 aa, Unknown
  Obtained from environmental sample
  misc_feature (1)..(274): Xaa is any amino acid
MIFKERIMSDNSARQFVVIGAGPAGLTAAYKILQDIPNARVDVFESTDRIGGISTTIEYHGNRIDIGGHRFFSKMQAVNDFWWNIMPLQGAGSKDDNILGTDKEFAPDGPDPEKTDVVMLLRRRVSRIFYRRRFFDYPIALKAQTFINMGFFNTVLAGISFVYSSIFKRKENSLEDFYINRFGKHLYRMFFEDYTEKVWGVHPSKLSASWGAQRVKELSVAAVIREAIRKVFRKNYKTDQTSLIEQFFYPKLGPGAIVVSCSRKGTGGRWAHTL

SEQ ID NO: 36481 - DNA, 867 bp, Unknown
  Obtained from environmental sample
  misc_feature (1)..(867): n is a, c, g, or t
ttgaacagtttttttatccaaaattgggtccaggggcaattgtggtctcttgtagccgaaaaggtacaggcggcaggtgggcgcatacattataatcaaaaggtacatgaaattattcttgaaaacggcaggattactgcggttaaaacatccgggcaggataaacctttcgcttgtgatacggtactttcaacaatgcctgtacgggatcttgtttgcgcgatcaatcctgccgggcaagtgcctgaacccgtatacaaagcagccgcggcattgccgtacagggattttataactgttgggcttttactgaaacgactcaagcttgtgaataaaacaaatctcaaaactctccaaaacatcgttcctgattgctggatatacatacaggaacgcgatgttcgcatcgggagactgcaattattcaataactggtcaccatatatggtgaaagatgttgaaaacacaatatggatcgggctggaatatttctgtaccgaaggagacaatctgtggaatttaagcagtgaggattgtatccagtttgccataggggaactggtaaagattaacatcatcgacaaagaagatgtactcgacgcaacacacgttaaaatagaaaaggcgtatccggcatattttggcacctatagcgaaatggatagtatacaaaattacctgaatactattcccaacctgtattgtctcggcagaaatgggcagcataagtacaacaacatggatcactccatgcttacggcgatgcgcgcggttgaacttattaaggcaggcggcggcgataaaagtactgtctggaatgtgaacgccgaaaaagagtatcacgaagaaaaaaaggatcacacataa

SEQ ID NO: 36482 - protein, 288 aa, Unknown
  Obtained from environmental sample
  misc_feature (1)..(288): Xaa is any amino acid
MNSFFIQNWVQGQLWSLVAEKVQAAGGRIHYNQKVHEIILENGRITAVKTSGQDKPFACDTVLSTMPVRDLVCAINPAGQVPEPVYKAAAALPYRDFITVGLLLKRLKLVNKTNLKTLQNIVPDCWIYIQERDVRIGRLQLFNNWSPYMVKDVENTIWIGLEYFCTEGDNLWNLSSEDCIQFAIGELVKINIIDKEDVLDATHVKIEKAYPAYFGTYSEMDSIQNYLNTIPNLYCLGRNGQHKYNNMDHSMLTAMRAVELIKAGGGDKSTVWNVNAEKEYHEEKKDHT

SEQ ID NO: 36483 - DNA, 1401 bp, Unknown
  Obtained from environmental sample
  misc_feature (1)..(1401): n is a, c, g, or t
gtggagatttcggggtgggttaggacaaagagggatatgaaaaatcttgtctttgtggaagtgaatgacggttcctgctttgcgggtattcaatgtacctttgacaggggggcgggaattgacgctaggactgaagccgccattgcctctctttctaccggcgcttccgttaaaattaacggtaaattaataccttctcccgcttcagggcaggcggtggaaattgcagccgtatctttgcaggttttgggagatgcccccgctgaagcttccggtgatattcaggcttatccgcttcaaaagaaaagacactcaatggaattccttcgcgagattgcacacctcaggccgcgtacaaatacttttggagcggtggcccgccttagaagcaggttggcgttcgcgattcacaggtattttcaagaaagggactttcattaccttcacacgccgattatcacggccggggattgtgaaggcgcgggggcgatgtttcaggttactacgctcgatcttgaagcaatgaccaaacaatcttctgaaaaagacggtaatggaggcgttggggttattgatttttcaaaagatttttttggcaagaaaacatttttaacggtctcaggccagcttgaggctgagacctacgccacggcagtctcgcgcgtttatacatttggtcccactttccgcgcggaaaattccaacaccgtccgccaccttgccgaattttggatggtggagccggaaatcgcttttgctgaattgaaagacgacatggcgttagcggaagattttttaaaatttgtttttaacgccgcgttaaatgaatgtaccgatgaactggagttttttaacgctcatttggaaaagggaataattgaaaacctgcggcaggtcgctggagcgaaattttcgcatatcacttatacagacgcggttaaggaattggaaaaggctgttgctttaaaaagtgatctttttgaatttaaaccaagctggggctgtgatttgcaaagcgaacatgagaggttcttaactgaaaaagtcgcctgcggtccggtaatcgttacggattatccgaaagaaataaaagctttttatatgaagttaaatgacgacggcaagactgtacgcgccatggacgttctagttcctcggttaggtgaaattattggcggctcccaacgtgaagacaattatgataaacttatcaggcgtatggacgagcttggattaaaacatgaagattattcctggtatcttgaccttcgccgttatggttccatacctcattcaggtttcggtcttggttttgaacgccttattcaatatgtttccggcatggcgaatatccgtgacgttattccctatccccgcgcggtaggacaggctgagttttaa

SEQ ID NO: 36484 - protein, 466 aa, Unknown
  Obtained from environmental sample
  DOMAIN (1)...(83): OB-fold nucleic acid binding domain
  misc_feature (1)..(466): Xaa is any amino acid
MEISGWVRTKRDMKNLVFVEVNDGSCFAGIQCTFDRGAGIDARTEAAIASLSTGASVKINGKLIPSPASGQAVEIAAVSLQVLGDAPAEASGDIQAYPLQKKRHSMEFLREIAHLRPRTNTFGAVARLRSRLAFAIHRYFQERDFHYLHTPIITAGDCEGAGAMFQVTTLDLEAMTKQSSEKDGNGGVGVIDFSKDFFGKKTFLTVSGQLEAETYATAVSRVYTFGPTFRAENSNTVRHLAEFWMVEPEIAFAELKDDMALAEDFLKFVFNAALNECTDELEFFNAHLEKGIIENLRQVAGAKFSHITYTDAVKELEKAVALKSDLFEFKPSWGCDLQSEHERFLTEKVACGPVIVTDYPKEIKAFYMKLNDDGKTVRAMDVLVPRLGEIIGGSQREDNYDKLIRRMDELGLKHEDYSWYLDLRRYGSIPHSGFGLGFERLIQYVSGMANIRDVIPYPRAVGQAEF

SEQ ID NO: 36485 - DNA, 318 bp, Unknown
  Obtained from environmental sample
  misc_feature (1)..(318): n is a, c, g, or t
atgagcaatgacggcggtaacaacaaaaccagcggtagcaacagcagcgatattcaaaagagcgctatggaacaaagggcgcagaacaagcagcgccagacggagatacggcgtcttcagcggcaggaggccgaactgcttaacgttattgaggggcttgaaaacgaaaaatcccggctggaagcagaattgtcccttccggcagtatattcaaatggggaaaaggcaagaactgtaaaacaaaaactagacgaatgtattgacgtgcttaaagtcaagacctcggaatgggaaacggtggcagcgttaataaattag

SEQ ID NO: 36486 - protein, 105 aa, Unknown
  Obtained from environmental sample
  misc_feature (1)..(105): Xaa is any amino acid
MSNDGGNNKTSGSNSSDIQKSAMEQRAQNKQRQTEIRRLQRQEAELLNVIEGLENEKSRLEAELSLPAVYSNGEKARTVKQKLDECIDVLKVKTSEWETVAALIN

SEQ ID NO: 36487 - DNA, 915 bp, Unknown
  Obtained from environmental sample
  misc_feature (1)..(915): n is a, c, g, or t
atggctgcaaatataaatgcaatggcaagcggtgcaaagcaagcgagtactaacgcaagcgaagtagctggtgcggcagagcaaatgtctgcaaatatgaatacaatagcctctgcaattgaagaaatgagcacaagcataaaactgatctcaaacaacacagtggaagtaaataaaattgcagcagatgcaaaagataaggcgaccgatgctacaagtgttatgaacaaacttggcatagccgcaaaagaaatagggcaagttacagatgtaatcaaaaaaatcgcagacaaaacgaatttgcttgcactgaatgctacaatagaggcggcaagcgcaggaaaagcgggcaaaggttttgcggttgtagctggagaaatcaaggaactagccaaccaaagcgcagaaagtgcagacaacattgcaaggcgtataaaaagcattcaaagcgaaaccaatacggctgtgggagttatacaaaatgtaagcgacattattgttaaaataaatcatagcgttgaaacaatagcaggccatattgaccagcagactaacgcgagcaacgaaatagcaaacaatgtgtcacaggcaaatgccagcgcaaagcgtgtggcttctgccatcggtgaggtagcaagaggcaccaatgaaatagcaaacaacgtggcaaaggcaaactctagagcaaaacaggttacagatgccataaccgaagttgccaaaacagcaaccaatgtaagcggcaatgcaagcgaagctgcaaaaggcgcagacaacgtaagcaacaacacgctcagtatgaaccaagcagccaaagaaagcgcgcagggtgcaggccacgttaatcaaagttctagtgatttggcaaaaatagccgaagaactaaaacagacggttgctcaattcaaagtgtaa

SEQ ID NO: 36488 - protein, 304 aa, Unknown
  Obtained from environmental sample
  DOMAIN (20)...(263): Methyl-accepting chemotaxis protein (MCP) signaling domain
  misc_feature (1)..(304): Xaa is any amino acid
MAANINAMASGAKQASTNASEVAGAAEQMSANMNTIASAIEEMSTSIKLISNNTVEVNKIAADAKDKATDATSVMNKLGIAAKEIGQVTDVIKKIADKTNLLALNATIEAASAGKAGKGFAVVAGEIKELANQSAESADNIARRIKSIQSETNTAVGVIQNVSDIIVKINHSVETIAGHIDQQTNASNEIANNVSQANASAKRVASAIGEVARGTNEIANNVAKANSRAKQVTDAITEVAKTATNVSGNASEAAKGADNVSNNTLSMNQAAKESAQGAGHVNQSSSDLAKIAEELKQTVAQFKV

SEQ ID NO: 36489 - DNA, 867 bp, Unknown
  Obtained from environmental sample
  misc_feature (1)..(867): n is a, c, g, or t
gtgctggaaaatgagcgcaagggcggctatctgggcgggactgtgcaagttatcccccacatcaccgaaacgataaagcagttcatatacggcggtgccagcaagagcggcgcggacgtaatgatcaccgaagtaggtggcacggttggcgacatcgagggccagccattcctcgaagccataaggcaggttcccctagaaaaggggcgcgaaaactgcctgttcatccatttgacgctggtccccaaccttaagagttcgggcgagcaaaaaacaaagccaacacaacactcggtaaaagaactgctgtcaatgggcatttcgcctgacataatcatagcgagggcagatgtgcccctgagcatgggcaccaaggaaaaaatatcgcaattctgcaacgtcaagctagactgcgtcatcgaaaacacgacgatgccatcgctgtacgaagttcctctcatgctgcacaaaaatggccttgacgaagtggcatgccgcgaattgggcatcaatgccccgccgcctgatttgggcgagtggggggcgatggcggccaacatttcaaaaaggcaaaaagaggccagcatcgcaattgtgggcaaatacatacaactgcacgacgcctatctttcgatcatcgaaagcctaaaccacgctgggatagagacgggcgcaaacgtggacatccattggatagactgcgaggacgtgaatattgaaagtgcgcctgggctttttaatgggataaatggcatgattgtgcctggcggctttggagacaggggcatagagggcaaaatcgccgcctgccgctacgctagggaaaacatgtgccttttttgggcatctgcttgggtatgcagatag

SEQ ID NO: 36490 - protein, 288 aa, Unknown
  Obtained from environmental sample
  DOMAIN (2)...(180): CTP synthase N-terminus
  misc_feature (1)..(288): Xaa is any amino acid
MLENERKGGYLGGTVQVIPHITETIKQFIYGGASKSGADVMITEVGGTVGDIEGQPFLEAIRQVPLEKGRENCLFIHLTLVPNLKSSGEQKTKPTQHSVKELLSMGISPDIIIARADVPLSMGTKEKISQFCNVKLDCVIENTTMPSLYEVPLMLHKNGLDEVACRELGINAPPPDLGEWGAMAANISKRQKEASIAIVGKYIQLHDAYLSIIESLNHAGIETGANVDIHWIDCEDVNIESAPGLFNGINGMIVPGGFGDRGIEGKIAACRYARENMCLFWASAWVCR

SEQ ID NO: 36491 - DNA, 1587 bp, Unknown
  Obtained from environmental sample
  misc_feature (1)..(1587): n is a, c, g, or t
atgagagagtccgacatatgggacgtcagttccatcggtgtacaacaccaatcggaacaatcgaatggagaacgcgaagcggttgatattcaggagagatcaggggcagtggaaaatatacagggaaataccattcccaaaagaggagcttctcttatgatgttttcgtcgaagaagagagagattaaggaccctcaggaactcgcggagttccttgaatcgcgtcttaaggagattcagggggtcatcgacgcttcggataagttgtcggagcgtgtggcgtctatggagcggacggtggcgcgtgtcaccgggcaggagagcttcgtgagcaacctaagcgctaaggtggatgcgctgatacagaagctgaacgcgccgggcggggacaccgtgctcgacacactgaagcgggcggttgacctcgaggacaggcagaagctcgccgacacgcggctcgtcaagcttgaggagcagcttcgctcgtggacagaccagttcgacacggcgcagacgaagtggaccgagtccgacgccggcgccgacatcgtgcgcggcaaggtgagcgacatggagcaggagatcagccgcttccgcgtgatgcgcgaaaagctcgaaagcctcaacagcctttccgagtacgtgaagacaaagatctcctcgctcgagaagcagcgcatggtagtcgacaaggccaacgaggagtcgctcctgctcaacaagatgatctggcggatagacatagacataaagcagctgcagaccaagatcgcgtcgctcgagaagacggagaagaacatcaaccaaatcgacgagatgctcgagaaatcccaagagtcaataagcgagatacgcaacttcaaggagttgatgaaggagatgacgcagatggtggaggagacgcgccgtctcgacagccactttgagaatcggttgactgaggtgcagcagcacacgaaaaacatagacgccataaacgagcgggtgcgggaggtacattccgtcgcgaaaaacacggaagccacgctaaactccctgaagaagcacctgtcgattgccgaggggagcaggacgcaggtgatggagtacgagaaatcgcttgacaaggtcaaggtgaagattgacgaggtgagcaaggagtggcagaccgtggacgccataaccgcgcatatatccgggattgagtcgcagttgcgcgagttcgacgcgaagatcttggcgctcgccaagcaggagagggtggtcgccggtttcgaggcgaagattggcgaggtcaaagcgcttatagaagacgtaagcgccaacgaggagtcgatacggaagcaccgcgttgatatagagggcacgaacaacaagatacgagagtacttcaacagtttggagaagttggagaagaacgtgcagggcatgagtgtgtacgaggaacttatctttggaatcagcaaaaagatcgacggactcgaggcgctctccggcagaattgagggccgtataaaagccaccgaggacagggcgggcataatagacgaggtgcagagaaaaatagaggggctggggctaggtaagcgaggggcgcgatccgcataa

SEQ ID NO: 36492 - protein, 528 aa, Unknown
  Obtained from environmental sample
  misc_feature (1)..(528): Xaa is any amino acid
MRESDIWDVSSIGVQHQSEQSNGEREAVDIQERSGAVENIQGNTIPKRGASLMMFSSKKREIKDPQELAEFLESRLKEIQGVIDASDKLSERVASMERTVARVTGQESFVSNLSAKVDALIQKLNAPGGDTVLDTLKRAVDLEDRQKLADTRLVKLEEQLRSWTDQFDTAQTKWTESDAGADIVRGKVSDMEQEISRFRVMREKLESLNSLSEYVKTKISSLEKQRMVVDKANEESLLLNKMIWRIDIDIKQLQTKIASLEKTEKNINQIDEMLEKSQESISEIRNFKELMKEMTQMVEETRRLDSHFENRLTEVQQHTKNIDAINERVREVHSVAKNTEATLNSLKKHLSIAEGSRTQVMEYEKSLDKVKVKIDEVSKEWQTVDAITAHISGIESQLREFDAKILALAKQERVVAGFEAKIGEVKALIEDVSANEESIRKHRVDIEGTNNKIREYFNSLEKLEKNVQGMSVYEELIFGISKKIDGLEALSGRIEGRIKATEDRAGIIDEVQRKIEGLGLGKRGARSA

SEQ ID NO: 36493 - DNA, 1284 bp, Unknown
  Obtained from environmental sample
  misc_feature (1)..(1284): n is a, c, g, or t
atgcccgccctgtcctcggtggcttttatacggccctcaattctgccggagagcgcctcgagtccgtcgatctttttgctgattccaaagataagttcctcgtacacactcatgccctgcacgttcttctccaacttctccaaactgttgaagtactctcgtatcttgttgttcgtgccctctatatcaacgcggtgcttccgtatcgactcctcgttggcgcttacgtcttctataagcgctttgacctcgccaatcttcgcctcgaaaccggcgaccaccctctcctgcttggcgagcgccaagatcttcgcgtcgaactcgcgcaactgcgactcaatcccggatatatgcgcggttatggcgtccacggtctgccactccttgctcacctcgtcaatcttcaccttgaccttgtcaagcgatttctcgtactccatcacctgcgtcctgctcccctcggcaatcgacaggtgcttcttcagggagtttagcgtggcttccgtgtttttcgcgacggaatgtacctcccgcacccgctcgtttatggcgtctatgtttttcgtgtgctgctgcacctcagtcaaccgattctcaaagtggctgtcgagacggcgcgtctcctccaccatctgcgtcatctccttcatcaactccttgaagttgcgtatctcgcttattgactcttgggatttctcgagcatctcgtcgatttggttgatgttcttctccgtcttctcgagcgacgcgatcttggtctgcagctgctttatgtctatgtctatccgccagatcatcttgttgagcaggagcgactcctcgttggccttgtcgactaccatgcgctgcttctcgagcgaggagatctttgtcttcacgtactcggaaaggctgttgaggctttcgagcttttcgcgcatcacgcggaagcggctgatctcctgctccatgtcgctcaccttgccgcgcacgatgtcggcgccggcgtcggactcggtccacttcgtctgcgccgtgtcgaactggtctgtccacgagcgaagctgctcctcaagcttgacgagccgcgtgtcggcgagcttctgcctgtcctcgaggtcaaccgcccgcttcagtgtgtcgagcacggtgtccccgcccggcgcgttcagcttctgtatcagcgcatccaccttagcgcttaggttgctcacgaagctctcctgcccggtgacacgcgccaccgtccgctccatagacgccacacgctccgacaacttatccgaagcgtcgatgaccccctga

SEQ ID NO: 36494 - protein, 427 aa, Unknown
  Obtained from environmental sample
  misc_feature (1)..(427): Xaa is any amino acid
MPALSSVAFIRPSILPESASSPSIFLLIPKISSSYTLMPCTFFSNFSKLLKYSRILLFVPSISTRCFRIDSSLALTSSISALTSPIFASKPATTLSCLASAKIFASNSRNCDSIPDICAVMASTVCHSLLTSSIFTLTLSSDFSYSITCVLLPSAIDRCFFREFSVASVFFATECTSRTRSFMASMFFVCCCTSVNRFSKWLSRRRVSSTICVISFINSLKLRISLIDSWDFSSISSIWLMFFSVFSSDAILVCSCFMSMSIRQIILLSRSDSSLALSTTMRCFSSEEIFVFTYSERLLRLSSFSRITRKRLISCSMSLTLPRTMSAPASDSVHFVCAVSNWSVHERSCSSSLTSRVSASFCLSSRSTARFSVSSTVSPPGAFSFCISASTLALRLLTKLSCPVTRATVRSIDATRSDNLSEASMTP

SEQ ID NO: 36495 - DNA, 663 bp, Unknown
  Obtained from environmental sample
  misc_feature (1)..(663): n is a, c, g, or t
atgcagacggcgcggttgcagaggggcgggcgcggcggtttgttctcaaaggttagggactcgttcacggcggtatggttaacgcttttttacgggcgggagagggttcttcggcagtatgtgtctatatctccgtatggaaacaggatcgccggcgccccgtgcgcctcgcggcggtatttcagaaaaccggtacaggatctcagtttggcggagagcgcgctcttagtatcgataccgagggcgccggggcggatgaacctattcaacaaaaccggttttgccgccgcgcgttcccgcgcgctgtttattctcgggcgatgcgcgaagtacgggtggatagacagcacggagtacacgcagtcgacggcggagttgaaggaatttgccgttccgccgaaagatatcagggatgaggcgtcaatacacgcggcgcttaagtatacgagaatgctgcatagcgcggttggacgcggtagtatcaacggtaaggataacggtatcaacagcaaaaatatcaatggcaaaggtatcaataatgtaagtatcaacgatattgacgagacggatataggcgacagcgtcgccggccacggcctcgttgtttcatcaatagacatcgatctccagcggcacgcgcaacgcgagcttgccaccacttag

SEQ ID NO: 36496 - protein, 220 aa, Unknown
  Obtained from environmental sample
  DOMAIN (3)...(92): Transglycosylase
  misc_feature (1)..(220): Xaa is any amino acid
MQTARLQRGGRGGLFSKVRDSFTAVWLTLFYGRERVLRQYVSISPYGNRIAGAPCASRRYFRKPVQDLSLAESALLVSIPRAPGRMNLFNKTGFAAARSRALFILGRCAKYGWIDSTEYTQSTAELKEFAVPPKDIRDEASIHAALKYTRMLHSAVGRGSINGKDNGINSKNINGKGINNVSINDIDETDIGDSVAGHGLVVSSIDIDLQRHAQRELATT

SEQ ID NO: 36497 - DNA, 849 bp, Unknown
  Obtained from environmental sample
  misc_feature (1)..(849): n is a, c, g, or t
atgagtgcgggtaatagcgaacttttgggaaatcacacggttgaggtcggcggagaagttgaaggtgcgagtggcggcggaatttacgaacctgcaacggttgttactataactgcgggggcggcgcctgaaggtaagaaattccaaatgtggaggacacagagtgacggggtctcttttgctgacgcatataaaacaacaaccacatttagaatgcccaataacaatgtgaaagtgacggcagaatatatatggacgttcacggatagcagggacggtaaaaaatacggtaaggcagtcatagataacaaagtgtggatgactgagaatctaaactatgaaacagaaataggttcacagtgttatggaaaagaatccggaaattgtgaagtatacggacgcctttacgattgggtaacggcaatgaatatagatgatacttataaagagacaaaatatactggtaatactattaaacatcgtggtgtttgcgatgagggctggcatttaccggatactgcagaatgggtaaatttaatagcgttcgcgggttctaacaccaaagcgggtaaaaaattgaaagcggtaaatggttgggagtatagtggtataaccggtcctgaaatgaatggtacagacgattttggatttaaagccctaccgtatggttatgttcagggtgcaagtggtgtaagttttggattggatcaatatacttatatgtggatggctggtgatcaatcgaaagacaacgcgtatgctcagtatataacgagtacaattgattcgtatagacaaaattacagcaaaaaaacttggtatcgatacggtgtgtggcagataaattag

SEQ ID NO: 36498 - protein, 282 aa, Unknown
  Obtained from environmental sample
  misc_feature (1)..(282): Xaa is any amino acid
MSAGNSELLGNHTVEVGGEVEGASGGGIYEPATVVTITAGAAPEGKKFQMWRTQSDGVSFADAYKTTTTFRMPNNNVKVTAEYIWTFTDSRDGKKYGKAVIDNKVWMTENLNYETEIGSQCYGKESGNCEVYGRLYDWVTAMNIDDTYKETKYTGNTIKHRGVCDEGWHLPDTAEWVNLIAFAGSNTKAGKKLKAVNGWEYSGITGPEMNGTDDFGFKALPYGYVQGASGVSFGLDQYTYMWMAGDQSKDNAYAQYITSTIDSYRQNYSKKTWYRYGVWQIN

SEQ ID NO: 36499 - DNA, 624 bp, Unknown
  Obtained from environmental sample
  misc_feature (1)..(624): n is a, c, g, or t
atgaggcaggtgaattgtttttacattttatgcccgtcgcattgggggttttcaacagagcctttttcgttaacaaacggttcatgggtaagtgattttagtcttgttcactcagacaagaaaaaagtgcgcaagttggcaaaatcattggaagttggtttggataatggagtgttcgatgttgaacatggagcgtcagtattaatgccgtatatcaaaaaatattttccaaaagcggcggtagtggttgtcgcttacgcgggcgaggctcccgtgaatgttccaaagagtacaaaacttgcggacgctcttgaaaacgcttttgacaaaaaaggaaagcgtaaaaattttttgttaatatcaaccgatttttcccatcacggcgatttagaactgacagaaaaaagggatagcaattcgttacggtatttaacgaacccagctgatacttcatggtacatggtaggctgcgataacgctcccggaattttcgttcttgatcgtcttggtaaaaaaaacatggagtcttttatactttaccataccaattcatggaaaatatccaatgagtgggatcatgatgttacaagctatttttttgtatatatgggagataaaccttaa

SEQ ID NO: 36500 - protein, 207 aa, Unknown
  Obtained from environmental sample
  misc_feature (1)..(207): Xaa is any amino acid
MRQVNCFYILCPSHWGFSTEPFSLTNGSWVSDFSLVHSDKKKVRKLAKSLEVGLDNGVFDVEHGASVLMPYIKKYFPKAAVVVVAYAGEAPVNVPKSTKLADALENAFDKKGKRKNFLLISTDFSHHGDLELTEKRDSNSLRYLTNPADTSWYMVGCDNAPGIFVLDRLGKKNMESFILYHTNSWKISNEWDHDVTSYFFVYMGDKP

SEQ ID NO: 36501 - DNA, 912 bp, Unknown
  Obtained from environmental sample
  misc_feature (1)..(912): n is a, c, g, or t
ttgtacgggatcaaggataccaatgaagaaaacaggataaattccattttgtataaagataacggacgtttcaataatttttatcccgttacaggttacgataatatcagagaggacattcaaaatgaattgaaaacgaacggtttggtatttcaggaagtaagacagtcggaatataaactgaacgctgaagagccggacgatatgataagcctttacatgggaatggactctagaactcccatttttgttactactgatcttgccgcgcatacaaaccatcttgtgtttgacaaactgcttcagtattgtgaggaagaatattttttccccaagttagttaccgtaatagatgaatatattaatgtcattgaacagaaaaaagaacaaatacccgacgcagtgtatgatacaagtattctttatttccaaacggctaaagccttgcttgctttggctcccaaaagagttgtaaatggtgaatcctttgtgtacaagaaagttaattccgctaatgttctgagttattatcccggacaggtagtccaagaaatcgtacaaataaacaacgcgtcgggattcggtcaatcggctgttttccccggcatggatgaagattattctcaatataaggtaagaggtcattatacaaagaacggagtgctcggcgcgtacttccgcgcgcttatgtggtttggcagaatcaattttgttcttgatgatagaaaacttgcccctgtggctctttttattactgacataactgaaaactctcccgaaataaaaaaaatatggcagtcccttttcgatcctattacagagattataggcatatctgatgatattagtttttatgaacttgctcccgcttggaaaaaaatcaaaaggctctggtttttgcaagtggtataa

SEQ ID NO: 36502 - protein, 303 aa, Unknown
  Obtained from environmental sample
  misc_feature (1)..(303): Xaa is any amino acid
MYGIKDTNEENRINSILYKDNGRFNNFYPVTGYDNIREDIQNELKTNGLVFQEVRQSEYKLNAEEPDDMISLYMGMDSRTPIFVTTDLAAHTNHLVFDKLLQYCEEEYFFPKLVTVIDEYINVIEQKKEQIPDAVYDTSILYFQTAKALLALAPKRVVNGESFVYKKVNSANVLSYYPGQVVQEIVQINNASGFGQSAVFPGMDEDYSQYKVRGHYTKNGVLGAYFRALMWFGRINFVLDDRKLAPVALFITDITENSPEIKKIWQSLFDPITEIIGISDDISFYELAPAWKKIKRLWFLQVV

SEQ ID NO: 36503 - DNA, 1236 bp, Unknown
  Obtained from environmental sample
  misc_feature (1)..(1236): n is a, c, g, or t
ttgatttttcgtgggaagttacaggaaggtgacagtcaccatgaggggcctagtgcgcacggaaatcaattttcaaaaacaccgtctaatcacgataataactgtatggacaaaaccatcaggatcacggagtattttgcggatgttgagactaccaaagaacacaacggctatttntgcagcgtgggggaggcgctgaccgtcgtgatactcggttctttgtgcggcctaagaaacgtcagccaaatcagccaatgggcagccaacgagcgggttaaaggctttttagccgggcacttcggcatagaaagaataccgtgttattattggatgctgtgcctgctcgccctaattaagccaacgtctttaaaccaatgcctgaccagatgggcgcaatcgcttttgcctgaggggatgaaggcgatgaccgtttcatttgacggcaaaacggtatgttccaccggaaagatggatgcgtacgacagccctctgcacattataagcgcacaccttgcggaactggggataacccttgcggggcttaagacggacggaaagagcaatgagatacccgccgtgcgggaactgacaggcatgcttgaggttgccggctgcgttatcgttgccgatgcgatgcattgccagaaggaaacggcggcgcttattgtgggaaaacaggcggattaccttttaaacgtcaaagacaaccagcctgcgctgaaaaatgacatagaagagtacgtgcaggacggcggtttgagaaaaaccatggacactttcacggcatgcgagaaaaacggcgggaggattgagatacggagggggtttgtcacgcacgatattggctggctttacggcaaagacgaatggaaaaaccttgcgtgcattggggcgatacaccgacaattcacctacaaggacaaaacaaccgatgaatggcactactacatttccagccgggaacttaaggcggaaagcctgttaaagcacgcccgtttagaatggtcggtagaatcgatgcattggctgttggatgtgcattttggagaggaccgctgccgtgtcgaagacgaaagcgtgcagcaggtcctaaatgcggtacgcaaaatcgctataaacagcgttaggacctataaagcaaagaccggctcaaagctccctttgtcgaaaattatgtttggctgtctgctggattgccagaagctgatccccgtcttgttgtcaggtgaaaattga

SEQ ID NO: 36504 - protein, 411 aa, Unknown
  Obtained from environmental sample
  DOMAIN (143)...(374): Transposase DDE domain
  misc_feature (1)..(411): Xaa is any amino acid
MIFRGKLQEGDSHHEGPSAHGNQFSKTPSNHDNNCMDKTIRITEYFADVETTKEHNGYXCSVGEALTVVILGSLCGLRNVSQISQWAANERVKGFLAGHFGIERIPCYYWMLCLLALIKPTSLNQCLTRWAQSLLPEGMKAMTVSFDGKTVCSTGKMDAYDSPLHIISAHLAELGITLAGLKTDGKSNEIPAVRELTGMLEVAGCVIVADAMHCQKETAALIVGKQADYLLNVKDNQPALKNDIEEYVQDGGLRKTMDTFTACEKNGGRIEIRRGFVTHDIGWLYGKDEWKNLACIGAIHRQFTYKDKTTDEWHYYISSRELKAESLLKHARLEWSVESMHWLLDVHFGEDRCRVEDESVQQVLNAVRKIAINSVRTYKAKTGSKLPLSKIMFGCLLDCQKLIPVLLSGEN

SEQ ID NO: 36505 - DNA, 768 bp, Unknown
  Obtained from environmental sample
  misc_feature (1)..(768): n is a, c, g, or t
atgcctgacggaggggcgctttccggtactaccgcgccctatctgcggccctcggtgaagatagaattctctggggtagacgtgaaggacattgacgaccttacgattcgcattgttactgtaaataacattccggcggaacgcgctgtgtcccaaatgggactgcgcatactgccgcaggacgagtacgacagtattccgagtgttacggacaacggcctgcatacggcaaatctaaagttgtatgatattcaatttgaacaggggaaaaacctgttaaagggctatagcggcagcacatatgcggcgattccttatggtgtcacccatatagacggtgattccggtctgaaaaagaaaggcctgaccagcgtaaaaataccttcaagcattaccattatcgggaattctgtattttcttataaccttcttaccagtgtaactattccagacagcgttacttctattggcggtgaggcattttataataaccaactgacaagcatattcattggtaacactgttacttccattggcggtgaggcattttctagtaaccgactgactagcataaccattccggatagcgttacctctattgatggagttgcatttgcttctaataatgatctgaggaacattaccattggtgcaaatgttcgcttgaatggatcgtggtttttcaccagtagttacaataataacaaccgtatggcaggtacatatacctatcaaaatggtacatggagctacagtgctcgacggtag

SEQ ID NO: 36506 - protein, 255 aa, Unknown
  Obtained from environmental sample
  misc_feature (1)..(255): Xaa is any amino acid
MPDGGALSGTTAPYLRPSVKIEFSGVDVKDIDDLTIRIVTVNNIPAERAVSQMGLRILPQDEYDSIPSVTDNGLHTANLKLYDIQFEQGKNLLKGYSGSTYAAIPYGVTHIDGDSGLKKKGLTSVKIPSSITIIGNSVFSYNLLTSVTIPDSVTSIGGEAFYNNQLTSIFIGNTVTSIGGEAFSSNRLTSITIPDSVTSIDGVAFASNNDLRNITIGANVRLNGSWFFTSSYNNNNRMAGTYTYQNGTWSYSARR

SEQ ID NO: 36507 - DNA, 813 bp, Unknown
  Obtained from environmental sample
  misc_feature (1)..(813): n is a, c, g, or t
atgttagaaagaaatcccgctcccgatgattttcgcgtaatgaaaagccgttcggttcccatagcttacaagaccggcacttcaataggttttaaggacgcgtggtccatcgctatatttgaccgttatgtgctatgcgtatggcttggaaatttctcaggcgagggaaacagcgccttcataggcaggctgagcgccgcacccttgagtttcagcataatagacgcgatactggcggaaaaccccaacgataaactaatcgcgcgccgtcccctgccgccggaagtcaaagccgtgcaagtatgcgccgtctccggcgacattccttccgacgactgcccccgattaattgacactcttttcatccccggcgtctctccgattaaccgctgtcgcattcaccgaaagatctacatcgacaccagcaccggctaccgcacaaacgaaaccgaaggcaaatttatcagaagcgaagtccgcgaattctggccctcggacataatggaaatctttgaagccgcgggattaccgcgtttttcacctccgccctaccctcccgattcctcaagcggcgctccgtcaagcggttttccgccttcgattatttcgcctctcgagaataccaactacattatccgcccgggacttcaggcggacaatcgcagtaatcagatggttcttctcgcttccgcggatcaggacgcaagcgaattgttttggtttgccaacgcgagttttttagggagagcgaaaccgagggagcggtttgtgtggtcgccggagccgggggtgtgggattttcggtggggataa

SEQ ID NO: 36508 - protein, 270 aa, Unknown
  Obtained from environmental sample
  misc_feature (1)..(270): Xaa is any amino acid
MLERNPAPDDFRVMKSRSVPIAYKTGTSIGFKDAWSIAIFDRYVLCVWLGNFSGEGNSAFIGRLSAAPLSFSIIDAILAENPNDKLIARRPLPPEVKAVQVCAVSGDIPSDDCPRLIDTLFIPGVSPINRCRIHRKIYIDTSTGYRTNETEGKFIRSEVREFWPSDIMEIFEAAGLPRFSPPPYPPDSSSGAPSSGFPPSIISPLENTNYIIRPGLQADNRSNQMVLLASADQDASELFWFANASFLGRAKPRERFVWSPEPGVWDFRWG

SEQ ID NO: 36509 - DNA, 822 bp, Unknown
  Obtained from environmental sample
  misc_feature (1)..(822): n is a, c, g, or t
atgaaaaacaaattttttatatgttttttatttagtatattttcttttatttcctgcgatattttaagaacttctttatttgaagttgtttcgtgttctcccgaaagcgggtatcagtctgatccggaaaaaataaatatttctcttgatttttctaatgatcctgacagagcgagcgtagagaaaaatttttcattaacgggagacggaaaccgtgtaaaagggactttcagttggaatgacaaaaaaatgattttttctccgcttgctccattagaaataaataccgattacacgataactctttcggcggaggcgcatgatacaaaagggctttccatggacgaaccgtttaaccgctatttttcaacaagacccgatgatacccgtcctgttcttttatcgagttatcctgaaatgtattcggaaattacagacgcaagggcggaaataagtctggagttttctatacccgtcccgttaaaaactttgtatgaaaatgtttcgttttccccttcaatgatgggtatttggcgtttggaaaacgacgggaaactcgcaatttttacgcctgcggaaccttggacgcaaaagactcgttatgaggttcgattttccacttcattgacagataacaacggaatgaatatcgggaatgattttttatgcgtatttactacaaagatcgatcatgaaattccgtacctttgtaacgcaatgcggataacaaataanaatgaattaattactttatccactgacaaggggtatttcagcgccgctgaatcgccggtagaaaatcagactgggaaaagacgataa

SEQ ID NO: 36510 - protein, 273 aa, Unknown
  Obtained from environmental sample
  SIGNAL (1)...(18)
  misc_feature (1)..(273): Xaa is any amino acid
MKNKFFICFLFSIFSFISCDILRTSLFEVVSCSPESGYQSDPEKINISLDFSNDPDRASVEKNFSLTGDGNRVKGTFSWNDKKMIFSPLAPLEINTDYTITLSAEAHDTKGLSMDEPFNRYFSTRPDDTRPVLLSSYPEMYSEITDARAEISLEFSIPVPLKTLYENVSFSPSMMGIWRLENDGKLAIFTPAEPWTQKTRYEVRFSTSLTDNNGMNIGNDFLCVFTTKIDHEIPYLCNAMRITNXNELITLSTDKGYFSAAESPVENQTGKRR

SEQ ID NO: 36511 - DNA, 1563 bp, Unknown
  Obtained from environmental sample
  misc_feature (1)..(1563): n is a, c, g, or t
atggttatcatgatactggcggcggtaatattttccgctattttttccctctttaatatgcctgtcagcagattgccggtattttcagtgccaagagtaacggtagaaacattgtatccgggaatggccgctgatgaaattagaagcatggttacaattcctctggaagacggtctatccccaattaaagggcttgaaagaatgcgaagcgtatcacgcgacaacaggtctcttataagccttgattttcgttggggtactgacacaatggcggcttcagttcttgtccgcgaggcaattgacacggtttatcccggacttcctgaaagggtaaacaaacctacggtaacatcggctgacacggggaatgaggttcatgcggtggtagcggttagttcacataacgggaacggcgaatttgcacgtaaacttgcggagtacgaaatacaggcccgtctgcgaagaattgatggagtaggttccgttacgcttatcggcggtgaaattaacgaacaactgctttccattgacgtacagcgtcttgccgctcttggcgttgccccttctgattttacaaaccttgttatgcaggaaaccgctgatattcccgccggaaacgcgcgtgagggaaacatggaattagttgtcgtaagttccggaaaacctgattctatttcttcacttccacaaattattctttccacaaacggcggctcctttaagattgaagatactgcggagatttttaattccgcagcgcggcgggaaagcatatttgtttacaacggaaaagaagccgcaggcttggagatttaccgcagacccggctccgacccgctgcggctgtcaagagaaataaaaaaaacgcttgatgaggctaattctctcttttcccgtgacgcgaaaattgaacttgttacggattcatcgtcatcgctcataagcggcgtaacaggtttattaatttccgccgctctcggcgtaacggcggtagtaacggttcttttactttttatccgccgcattaaatacagcttgctcgcggcgctttcaattcccgtttcagccgcagcgggcatttgcgttctatccgttatgggaaaatctttaaacggcatgagccttggcggacttgcgatggggatagggttggtttccgacataagcgtaataattatcgatctgcttcatcaggctttcggagaaagggaaaccgttcccataccggaagaaataggaaacaaagcggcgtctatatcggggtcaaatatcgcttctaccattacaactgcgcttgtgttcattccgattatcatgctgccgggaccgttaggcggtcttttcggcgacattgctatcgcccttgttacatctgtagcggcgggctggctttacgctcaattttttcttccttctctttattctatgttcttcggcgatccattaaaaacagccaataaaaatagattgataaaaactaattcagtttttacaaatggcagtcttgaaaaaaaatattgcttttttctttcaaatgttcttcgtaattcgggtaagttttag

SEQ ID NO: 36512 - protein, 520 aa, Unknown
  Obtained from environmental sample
  SIGNAL (1)...(19)
  DOMAIN (1)...(519): AcrB/AcrD/AcrF family
  misc_feature (1)..(520): Xaa is any amino acid
MVIMILAAVIFSAIFSLFNMPVSRLPVFSVPRVTVETLYPGMAADEIRSMVTIPLEDGLSPIKGLERMRSVSRDNRSLISLDFRWGTDTMAASVLVREAIDTVYPGLPERVNKPTVTSADTGNEVHAVVAVSSHNGNGEFARKLAEYEIQARLRRIDGVGSVTLIGGEINEQLLSIDVQRLAALGVAPSDFTNLVMQETADIPAGNAREGNMELVVVSSGKPDSISSLPQIILSTNGGSFKIEDTAEIFNSAARRESIFVYNGKEAAGLEIYRRPGSDPLRLSREIKKTLDEANSLFSRDAKIELVTDSSSSLISGVTGLLISAALGVTAVVTVLLLFIRRIKYSLLAALSIPVSAAAGICVLSVMGKSLNGMSLGGLAMGIGLVSDISVIIIDLLHQAFGERETVPIPEEIGNKAASISGSNIASTITTALVFIPIIMLPGPLGGLFGDIAIALVTSVAAGWLYAQFFLPSLYSMFFGDPLKTANKNRLIKTNSVFTNGSLEKKYCFFLSNVLRNSGKF

SEQ ID NO: 36513 - DNA, 573 bp, Unknown
  Obtained from environmental sample
  misc_feature (1)..(573): n is a, c, g, or t
ttgcaacaggaaacttgcagagcggcggcggctcttgttgttgaagatttttttgaagaactgccgaaaatcagagtcattttaggaaaagatttggaagccgccgtgcgcggagaccccgccgcaaaaagcgccaacgaagtaattctttcctatcccggctttaagacgattaccgttcacaggatagcgaattttttctggacacggcaagttcccataataccaagaatgatgagcgaacttgttcacggctggacaggtatcgatattcacccgggcgcgcaaatagacgagtcattttttattgatcacggaaccggcgtcgtaatcggagagacttcggtaataggaaaaaatgttaaaatttatcaaggtgtaactctaggcgctctttccgtaagaaaagaagaaagcgaccataaacgccatcccactatagaagacgatgtaacaatctacgccaacgccacaatactgggcggcgaaaccgtaataggcagcggaagcgttatcggcggcagtgtgtggataacacagtccgtgccgccgggaagcaagatttacaagtaa

SEQ ID NO: 36514 - protein, 190 aa, Unknown
  Obtained from environmental sample
  misc_feature (1)..(190): Xaa is any amino acid
MQQETCRAAAALVVEDFFEELPKIRVILGKDLEAAVRGDPAAKSANEVILSYPGFKTITVHRIANFFWTRQVPIIPRMMSELVHGWTGIDIHPGAQIDESFFIDHGTGVVIGETSVIGKNVKIYQGVTLGALSVRKEESDHKRHPTIEDDVTIYANATILGGETVIGSGSVIGGSVWITQSVPPGSKIYK

SEQ ID NO: 36515 - DNA, 567 bp, Unknown
  Obtained from environmental sample
  misc_feature (1)..(567): n is a, c, g, or t
atggcgagtcttcccctgggcggtgcttgtttctacattatcagcctgaggacaaaagacgaagtaacccttactgcttccgaaaaacttcttgaaaaggcggcaacccccgcggaacttgtttcgttaagacaggataaaattgaaaaattgatttatcccgccggtttttacaggaacaaggccgcgtctctaaaaaaaatagccgccatactgcttaaacagtacaacggcaaagttccctcctcaatggaagttctgctctcccttcccggagtcggcagaaaaacggcaaacctcgtgcttaacgaagcgtttgatcttgacgctatttgcgtagacatacacgttcaccgtatttcaaaccggtgcggctggcttacaagcaaaaacccagaagaaaccgaaatgatcctaagggagattctaccgaaaaaattctggaaaaggatcaatcggcttcttgttctttacgggcagaaattatgccggcctgtaagcccgttctgttcgcggtgcgtaatcgcgaaattttgctcccggcgtgacgtaaatcacattaggtag

SEQ ID NO: 36516 - protein, 188 aa, Unknown
  Obtained from environmental sample
  DOMAIN (75)...(104): Helix-hairpin-helix motif
  misc_feature (1)..(188): Xaa is any amino acid
MASLPLGGACFYIISLRTKDEVTLTASEKLLEKAATPAELVSLRQDKIEKLIYPAGFYRNKAASLKKIAAILLKQYNGKVPSSMEVLLSLPGVGRKTANLVLNEAFDLDAICVDIHVHRISNRCGWLTSKNPEETEMILREILPKKFWKRINRLLVLYGQKLCRPVSPFCSRCVIAKFCSRRDVNHIR

SEQ ID NO: 36517 - DNA, 537 bp, Unknown
  Obtained from environmental sample
  misc_feature (1)..(537): n is a, c, g, or t
gtggacggcccgcaggaagaatttttgcagggacttaacgaaggttttaacggggacgcgcgggcgcttatgaacagttattacgacgcgcagcttgagatgatagcgcttggcggttttgaaattctgggacacgccgaccttatcaaaaaaaattgtataggaaaaaatttatggccgccggaagaagaaatttaccgccaaaaagaaatcgcgcacgccatcggcgatgccgtaggcgatgcggcggggaaaatgggcataatcgcggaagcaaacacggggggaattaacagaaataagattaacgaggtttatccttctgaaacttttttaagattttttcgcgaaaataatacgcctttaattattacggcggacgcccattgtgccgatgaaattataggtaattatgatacagcggtaaaaactcttttatcagccggtttttcggaacatataattattttccgaaaaagcggaaaaaagataaaatatataaaagaaaaactgttaaatttccttgccgatcaataa

SEQ ID NO: 36518 - protein, 178 aa, Unknown
  Obtained from environmental sample
  misc_feature (1)..(178): Xaa is any amino acid
MDGPQEEFLQGLNEGFNGDARALMNSYYDAQLEMIALGGFEILGHADLIKKNCIGKNLWPPEEEIYRQKEIAHAIGDAVGDAAGKMGIIAEANTGGINRNKINEVYPSETFLRFFRENNTPLIITADAHCADEIIGNYDTAVKTLLSAGFSEHIIIFRKSGKKIKYIKEKLLNFLADQ

SEQ ID NO: 36519 - DNA, 657 bp, Unknown
  Obtained from environmental sample
  misc_feature (1)..(657): n is a, c, g, or t
ttgtcgccgggaaganagatgtgcgctgaggccttgttgaccggaaaagttaccgttaaaggtgacgggtgggacgctgaggttgatttcggctatgaagagggtaagcacctccgtacactatccggtacgtcgctttggagtgacccctccgctgatcctatgcgtgatctcgataactggcgccgtgacacggtaaaacgttgcggtattgcgcctgatatatgcgttcttggaaatgatgcggcttgggcgataatggacaacgaaaaagtacaaaagcgcctcgacaatctccgtttcgagatgggccaaatcgagcccaggaacttgcccgagggtatcagctactacggtaggctacagttaccgtccgggatagtctcgctctactcgtatgacgagtggtggactgaccctgacagcggtgaagatatgccgctgatgggtagtaataaggtattgcttggtagtacgcaagcaagagccgaatttaactacggtctgatccaaaacctttacgccctccgagccttgccgcgcttccccctctcttggcaggagaaagacggatcagctcggttcgttcagttggagtcggcgccgatgcctaacctctaccaagttgacgcctttacggtggctacggtactgtaa

SEQ ID NO: 36520 - protein, 218 aa, Unknown
  Obtained from environmental sample
  misc_feature (1)..(218): Xaa is any amino acid
MSPGRXMCAEALLTGKVTVKGDGWDAEVDFGYEEGKHLRTLSGTSLWSDPSADPMRDLDNWRRDTVKRCGIAPDICVLGNDAAWAIMDNEKVQKRLDNLRFEMGQIEPRNLPEGISYYGRLQLPSGIVSLYSYDEWWTDPDSGEDMPLMGSNKVLLGSTQARAEFNYGLIQNLYALRALPRFPLSWQEKDGSARFVQLESAPMPNLYQVDAFTVATVL

SEQ ID NO: 36521 - DNA, 1296 bp, Unknown
  Obtained from environmental sample
  misc_feature (1)..(1296): n is a, c, g, or t
atgagctatgcgatagccattatgcgtgatacgataatggctccggtctaccaaatgcttaagataacaataggaataagcgctgcagtattattcctgttgattctggcggcgttattcctgtcccggtccatcagcaaaccaatcgtcaaggtggcaaacaacctaaaggatatcgccgagggtgaaggcgatttaacccataccatcccggtacattccaaagacgaggtgggcgaccttgccctgtatttcaacaagactttgttaaaaattaaaaatcttgttgtaaatgtgaaaagagaggccgctacgctgtcgggaatcggcaatgatcttgcgtcaaatatgaataagaccgcctcggcagtcaaccaaattaccgctaatatacagaatatcaaaggccgtgtcattaaccagagcgccagcgtcagtgaaacccatgcgactatggaacagattgtcacaaacatcaacaagcttaacgaccatgtggaaaaccaggctgacacaatatctaaacggtccgccttcattcaggcaatggtggacaacatcaattcggtaaatcagaccctgcataaaaatctggaaaatgtgcagaatctgaaagaagcctcggaagtgggccgcggcggattgcaggaagtggtggcggacattcaggaaatagcgcgcgagtccgaaggtctgatggagattaactcggtcatggagaacatcgccagccagaccaacctgctttcgatgaacgcggcgattgaagcggcgcacgcgggagaggcgggcaagggctttgccgtagtcgccgatgaaatccgcaaactggcggaaagctccagcgaacagtccaagaccatcggcaccgtgctgaagaaaataaaggagtcgatagacaagataaccaaatccaccgagaacgtactaacgagattcgaggcgatagactcaggcgtcaggacggtggcggatcaggaagcaaatatccgcaacgcgatggaagagcagggcgaaggaagcaagcaggtcctgcaaagcgtcagcggtttaaatgaacttacccagcaggtaaagagcggttccgaggaaatgctgaacggcagccaggaagtaatgcatgagagccagaaccttgaaaagatgacgcagganataaccggcggcatgaatgagatggcgagcggggcggatcagataaacgtagcggtacacaatgtcaatgatatgacccaacagaaccgccaggccattgacagtttgataaaagaagtttcacggtttaaggtagagtaa

SEQ ID NO: 36522 - protein, 431 aa, Unknown
  Obtained from environmental sample
  DOMAIN (167)...(387): Methyl-accepting chemotaxis protein (MCP) signaling domain
  misc_feature (1)..(431): Xaa is any amino acid
MSYAIAIMRDTIMAPVYQMLKITIGISAAVLFLLILAALFLSRSISKPIVKVANNLKDIAEGEGDLTHTIPVHSKDEVGDLALYFNKTLLKIKNLVVNVKREAATLSGIGNDLASNMNKTASAVNQITANIQNIKGRVINQSASVSETHATMEQIVTNINKLNDHVENQADTISKRSAFIQAMVDNINSVNQTLHKNLENVQNLKEASEVGRGGLQEVVADIQEIARESEGLMEINSVMENIASQTNLLSMNAAIEAAHAGEAGKGFAVVADEIRKLAESSSEQSKTIGTVLKKIKESIDKITKSTENVLTRFEAIDSGVRTVADQEANIRNAMEEQGEGSKQVLQSVSGLNELTQQVKSGSEEMLNGSQEVMHESQNLEKMTQXITGGMNEMASGADQINVAVHNVNDMTQQNRQAIDSLIKEVSRFKVE

SEQ ID NO: 36523 - DNA, 468 bp, Unknown
  Obtained from environmental sample
  misc_feature (1)..(468): n is a, c, g, or t
ttggccgaaatgggcaagccagccagaataataggcaaaatgaacagcctaaccgatatagattttataaaagcatttacccgcgcatccatagcaggcgtgaaagtgagcttaatagtgcgtggagtatgctgccttttgccgggattttcgggcaaaaccgagaacatagaaatcaaaagcataatagggcgttttttggaacacagtcgcatttacagttttggcagcaaagatcctgaaatttacatttccagcgcagatttaatgaccagaaacacagccaagcgcatagaaatagcaactccagtaattgacaaaaaaattagaactagaataagcaaaatgctagaaattatgctcgccgacaacgaaaaagcaagctatttaaccccaagcggcaaatacgagagaaagcagggacctggacaatctagccagagatatttttacgagaatgaggtttga

SEQ ID NO: 36524 - protein, 155 aa, Unknown
  Obtained from environmental sample
  misc_feature (1)..(155): Xaa is any amino acid
MAEMGKPARIIGKMNSLTDIDFIKAFTRASIAGVKVSLIVRGVCCLLPGFSGKTENIEIKSIIGRFLEHSRIYSFGSKDPEIYISSADLMTRNTAKRIEIATPVIDKKIRTRISKMLEIMLADNEKASYLTPSGKYERKQGPGQSSQRYFYENEV

SEQ ID NO: 36525 - DNA, 630 bp, Unknown
  Obtained from environmental sample
  misc_feature (1)..(630): n is a, c, g, or t
atgacacgccctgccccgtccgcgcctcaaggaattttttacgcggcgcggcccttggcgctggcttccgcctcgccgcgacgccgggattttctgcgcctgctcggtctggagtttgaaatcctcagccctgcggatgccgaaccgcagcccctgcccgatgaaaatccggcggattatgccttgcgcgcggcaaaagccaaagcccttgccggcgcgcgaacccgccccgatgcgtatgtgctgggagcggataccgttgtggcgcttgacggggaaattctgggcaaaccgcgcgacaggcggcatgcgctggacatgctgctgcggcttgccggaaaaagccatgtggtgatcagcgcctgctgttgctgtttgccggacggcacaacccggcatgcgacgggcgaggcccgcgtacattttttcccctggccgcgggaagcgctggcggcctatgcggccacagacgaagtactggacaaggccggcgcttatgccgtccagggaggcggagcttttctggcgcaagggatagaaggctcggtcagcgcggtggtgggattgcccgtggcgcagcttgtcctgctgctttcagaattgggagtcatacgcgcgcatgccggttaa

SEQ ID NO: 36526 - protein, 209 aa, Unknown
  Obtained from environmental sample
  DOMAIN (17)...(205): Maf-like protein
  misc_feature (1)..(209): Xaa is any amino acid
MTRPAPSAPQGIFYAARPLALASASPRRRDFLRLLGLEFEILSPADAEPQPLPDENPADYALRAAKAKALAGARTRPDAYVLGADTVVALDGEILGKPRDRRHALDMLLRLAGKSHVVISACCCCLPDGTTRHATGEARVHFFPWPREALAAYAATDEVLDKAGAYAVQGGGAFLAQGIEGSVSAVVGLPVAQLVLLLSELGVIRAHAG

SEQ ID NO: 36527 - DNA, 585 bp, Unknown
  Obtained from environmental sample
  misc_feature (1)..(585): n is a, c, g, or t
atgaacatatctgttgactggtcttttgttgaatcgcttgcggttcgttttgtcataaatatcatttttgcttatattttaataagctgcgtttatgcaaaagaacaccgaataagggaatattccttcaccttctttatctcaaatatcttgatatttttggtcacctcgttgctcgcttcggtcaaggttaaaacgggttttgcatttggtctctttgccattctctcaattttgcgctacagaacggagcaaattcagctaagagaaatgaccttcctctttgcctccataatcctcggcgttatgaattcgctggcaactgatgaactttccctttgggctgttctcttggcagatgctcttctgtgcctaagcattttcgttgcagaaaaagcattcataggcagcaccgaccaaatacttttattctacgataactccaagctcttggcaaaagacaagaaaaaagaactctacgaagacctaaagaaccgctttggctacgatgtgctaaaagttgtaattgtaagaatgaactacctaacagacagcgcagaaatcaaattggtgtacagaaggtaa

SEQ ID NO: 36528 - protein, 194 aa, Unknown
  Obtained from environmental sample
  misc_feature (1)..(194): Xaa is any amino acid
MNISVDWSFVESLAVRFVINIIFAYILISCVYAKEHRIREYSFTFFISNILIFLVTSLLASVKVKTGFAFGLFAILSILRYRTEQIQLREMTFLFASIILGVMNSLATDELSLWAVLLADALLCLSIFVAEKAFIGSTDQILLFYDNSKLLAKDKKKELYEDLKNRFGYDVLKVVIVRMNYLTDSAEIKLVYRR

SEQ ID NO: 36529 - DNA, 573 bp, Unknown
  Obtained from environmental sample
  misc_feature (1)..(573): n is a, c, g, or t
ttgggatttattggagacggaataaataaggttcagaaaaaattaaataaaaaaaaattaaaaatgtttgatgtcttcagcggatcgggcattgtcgccaggtatttcaaacaattttcagaactgctaatcgtgaatgatcttgaaaaatattcaaccctgataaatgaatgttatttatcaaacgaggatgagagaagtgaatttactttgcgcgaatattacaatgaattaattgagcaggcaaaaaacaaccttgttaacggcattatttctgaattatacgctccaaaagacgatacacatataaagcaaaatgaacgtgttttttatacaacaaggaacgcgatgtatatagataccatgcgtcaattaattgataatattcccaaaaattatcaaaaatactttcttgctcccttactgtcagaagcgtcaatacacgcgaatacttccggtgtttttaaaggattttataaaaacaaagaaacctgtatcggacaattcggcgggatcaataaaaacgcgttatcaagaataaccagtgacatatcattgccattccctttttag

SEQ ID NO: 36530 - protein, 190 aa, Unknown
  Obtained from environmental sample
  misc_feature (1)..(190): Xaa is any amino acid
MGFIGDGINKVQKKLNKKKLKMFDVFSGSGIVARYFKQFSELLIVNDLEKYSTLINECYLSNEDERSEFTLREYYNELIEQAKNNLVNGIISELYAPKDDTHIKQNERVFYTTRNAMYIDTMRQLIDNIPKNYQKYFLAPLLSEASIHANTSGVFKGFYKNKETCIGQFGGINKNALSRITSDISLPFPF

SEQ ID NO: 36531 - DNA, 954 bp, Unknown
  Obtained from environmental sample
  misc_feature (1)..(954): n is a, c, g, or t
ttgtggatcgncccggcaaggggcaggcttgggaactgcgtgccgcgcatatcgaagtgtacgggccggcgaccccggaaagcttcncccttgcagaaaaaacgccattccgacgaatacntgcgcggcatcgcccacttgcgcccccgcaccaacaaatacggcgccgcgttccgcatccgctccgaagcggcgcacgcggtacacgactttttccgctccgcacatttccattatgtgcatactcccctgctgaccggctccgactgcgagggcgcgggcgaactctttcgcgtgaccgccctgccgccgggcgccgagaatgcggcggacgacttcttccccaaagaatgccgcctgaccgtttccggccagttgggagcggaagcgctggccctcggcctcggcagggtctataccttcggccccgccttccgggcggaaaactcccataccccgcgccatgctgcggaattctggatggttgagccggaaatggcctttgccgacctcgtggacgacatggacctggccgaaggactcgtccggcacgtgatcacccatgtgctcaagcactgcgccgaggatatggaactcttcaaccgttttgtcgatacggaactcatcgtccggcttgaaggcatgatcaaagcgccctttgcccgcatgtcccatgccgaggccgtggccgcgctacgcgcaagcggcagaaaattcgaattccccgtgcgcgacggcatggatttgcaaacggagcacgaacggcatctggccgaggaactccacaaaaagccggtcatcgtgtatgattatcccaaggaaatcaaggcgttctatatgtatttgaacgacgacggcgcaagcgtggccgccatggacgtgctcgcgccgcgcatcggcgaactcatcggcggcagccggcgcgaagaccgcccggattctcggccaatctga

SEQ ID NO: 36532 - protein, 317 aa, Unknown
  Obtained from environmental sample
  DOMAIN (37)...(316): tRNA synthetases class II (D, K and N)
  misc_feature (1)..(317): Xaa is any amino acid
MWIXPARGRLGNCVPRISKCTGRRPRKASPLQKKRHSDEYXRGIAHLRPRTNKYGAAFRIRSEAAHAVHDFFRSAHFHYVHTPLLTGSDCEGAGELFRVTALPPGAENAADDFFPKECRLTVSGQLGAEALALGLGRVYTFGPAFRAENSHTPRHAAEFWMVEPEMAFADLVDDMDLAEGLVRHVITHVLKHCAEDMELFNRFVDTELIVRLEGMIKAPFARMSHAEAVAALRASGRKFEFPVRDGMDLQTEHERHLAEELHKKPVIVYDYPKEIKAFYMYLNDDGASVAAMDVLAPRIGELIGGSRREDRPDSRPI

SEQ ID NO: 36533 - DNA, 903 bp, Unknown
  Obtained from environmental sample
  misc_feature (1)..(903): n is a, c, g, or t
atggttcacaacggaattgagtacggcgacatgcagcttatctgcgaaacctacgatattatgaaaaatgtcctgggactttcctgcgatgaaatgggcgatgtctttgatgaatggaacaggggaagtctgagcagttacctgattgaaattacaagagacatactgcgttataaagacacagacggcaggccccttgtagagaagatccttgacacggcggggcagaagggaaccggncagtggaccggcatcgcggccctggattatggcgtgccgcttaccctgattggcgaggcggtcttcagccgctgcctttccgcggtcaaggacgagcgcnngtgcgggcttcaaggggttttttcaaaaccaaaacccacggccgtcgcggacaaggccgcttttgttaaagacctggaaaaagcgttatacgcatccaaggtgatttcatacgcccagggctatttactgatgagggaagcggcgaaagaatacaaatggaatcttaactacggcggcatcgcgcttatgtggcgcggcggatgtataatccgttctgtttttctgggcaagataaaagaagcgttcgataaaaaccccggcctggacaaccttctcatggatcccttctttacaaagatactggaagatgcccaggattcctggcgcagggttgtgtcaacggcaatacagaacgggataacaacaccggcgttcagcagcgccctcgcctactttgacggctaccgcagcgaacggcttccggcgaatcttttacaggcacagcgagactatttcggcgcgcatacctacgagcgcgttgacaaagcacgcggggaattcttccatacaaactggaccggacatgggggtatgacaagtgcgtcaacatacaccgtataa

SEQ ID NO: 36534 - protein, 300 aa, Unknown
  Obtained from environmental sample
  DOMAIN (1)...(287): 6-phosphogluconate dehydrogenase, C-terminal domain
  misc_feature (1)..(300): Xaa is any amino acid
MVHNGIEYGDMQLICETYDIMKNVLGLSCDEMGDVFDEWNRGSLSSYLIEITRDILRYKDTDGRPLVEKILDTAGQKGTGQWTGIAALDYGVPLTLIGEAVFSRCLSAVKDERXCGLQGVFSKPKPTAVADKAAFVKDLEKALYASKVISYAQGYLLMREAAKEYKWNLNYGGIALMWRGGCIIRSVFLGKIKEAFDKNPGLDNLLMDPFFTKILEDAQDSWRRVVSTAIQNGITTPAFSSALAYFDGYRSERLPANLLQAQRDYFGAHTYERVDKARGEFFHTNWTGHGGMTSASTYTV

SEQ ID NO: 36535 - DNA, 486 bp, Unknown
  Obtained from environmental sample
  misc_feature (1)..(486): n is a, c, g, or t
gtgggccttgaatcccgcccggaagtcctggccgagccggtgggcttcttccgggcgggcgccttggggcttctggagaccgccgacatggtggggctgaccgtgaaatcagtgcggaaactcatcaccggccaggtttcggcccggaccttgggcggccccattctcatagccgaagtcaccggcgaccgggccaaggccggttgggaatccctgttgagtctggccgccttcatcagcgtcaacctgggggttttaaaccttctgcccatacctgtcctggacggcggccagattttattttttctcatcgaggctctgcgccgccggcgcttgagccataggttccgcgaggctgcccagtgggtgggcgtggtctgcctgggcctgttgatgctcctggtcttttacaacgacatcgaccgcctcgtcaccaggttttacgcttcggcggaaagcgcggcccggccggcggaagagccgtga

SEQ ID NO: 36536 - protein, 161 aa, Unknown
  Obtained from environmental sample
  DOMAIN (19)...(139): Peptidase family M50
  misc_feature (1)..(161): Xaa is any amino acid
MGLESRPEVLAEPVGFFRAGALGLLETADMVGLTVKSVRKLITGQVSARTLGGPILIAEVTGDRAKAGWESLLSLAAFISVNLGVLNLLPIPVLDGGQILFFLIEALRRRRLSHRFREAAQWVGVVCLGLLMLLVFYNDIDRLVTRFYASAESAARPAEEP

SEQ ID NO: 36537 - DNA, 372 bp, Unknown
  Obtained from environmental sample
  misc_feature (1)..(372): n is a, c, g, or t
ttggcatggtgcgcggcatggccgagaaggcggttgtttttgccctgggccaatcctacccctgaaatatggccggaggaagccaaggcggccggggcccgggtggtggcgaccggccgcagtgatttccccaaccagttgaacaactgtcttggtttccccggaatcttcaagggcgccttggaggtgcgggccagggttataaatgaagagatgaagatggccgcggccgtagccttgtccgggctggtcaaggattccgagttgacttcggagtatatcattcccacggtctttgatccccgggtggtgccggagatagcccgggccgtggccgaagccgcccggaattccggcgttgccagaatctga

SEQ ID NO: 36538 - protein, 123 aa, Unknown
  Obtained from environmental sample
  DOMAIN (1)...(116): Malic enzyme, NAD binding domain
  misc_feature (1)..(123): Xaa is any amino acid
MAWCAAWPRRRLFLPWANPTPEIWPEEAKAAGARVVATGRSDFPNQLNNCLGFPGIFKGALEVRARVINEEMKMAAAVALSGLVKDSELTSEYIIPTVFDPRVVPEIARAVAEAARNSGVARI

SEQ ID NO: 36539 - DNA, 1629 bp, Unknown
  Obtained from environmental sample
  misc_feature (1)..(1629): n is a, c, g, or t
ttgtgggtccagaactcaaaatgcacgaatgccggtttgccaaaacgcatggctctggaactctacaaacctttcatagtccgcaaaattatgggtgaagaaggtcttgcaaatactgttcgccacgcgaaaaagataatagattcagaagatccaaaagtatgggatatagttgaacccattataaaagaccaccctgtgatgctaaaccgtgcaccaactttgcacagacttggcatacaggctttttacccgaaattgattgaaggttctgcaattcgcttgcatccacttgtttgcgctgcgttcaacgcagattttgatggtgaccaaatggcggtgcatttgcctctctcttttgaggcacagcttgaatgtagagttttgatgctctcttcaaataatattttgcatccggcttctgggcagcccatagcggttccctctcaagatattgtacttggcctttattacctttcaaaaccgcgcccgggcgtaaaaggcgaaggtatggcttttggcagcgaccaagaagttatgcaggcttacgaaaacggcattgttgatttgaacgcaaacataagtttacgtttgcgcgaaggccgcaaactttaccgcggcacttttgactacgacacaatgtgcgaaaacgagcaaggcgaagaggtagtcgcaaaagcaggcacaaaggttgaatttatgattttaaatcaagacagccgcataaaaacttcggttggaagggttattttaaatcaggcaatcccaaatattttaggttatgcagacgatactttttccaaaaaagtaatagcaaaatccgttgatgacttgtatcgcagaagtggcaataatatgaccgttgagtatttgatttccctaaaagaccttggctacagatgggcatctaaggctggttcttccgtggcaatagccgaaatggtaattccaccagaaaagcaagagctccttgacaaagccactcaaaaggcaaacgaaataagagacctttacgaccaaggtgcggttacagatggggaacgttataaccagataattgatttgtggtcgcgcacaacaagcgatgttgcgcaaaagcaatgggatttgctatctagcgacaaagatggcttcaatcctttgtttatgatggcagattctggagcgcgtggttcaagagagcagattaaacaactttctggtatgcgtggtttaatgcaaaagccaaccagaaaaataggtgaacacgaagttatagaaaacccaattaccagttgctttcgcgacggtttgaattccttggaatattttatttctactcacggtgcacgtaaaggtctttccgatacagccttgaaaaccgcagatgctggttatttaactcgccgcttggtggacgttgcacaaaatttggttattaccgaagaagattgctgcgaaataaaaattgtttcggagcgaatatccgttgagcattacgagtgcataaaagatacttccgaggcacttagcttgtttacaaaaagattaagcggatatgttgccgcaagcgatatttcgcaccccgaaaccaaagagattttggtaaaaagaggcgaattttggaaaaagaagttttgcgcaaattga

SEQ ID NO: 36540 - protein, 542 aa, Unknown
  Obtained from environmental sample
  DOMAIN (343)...(428): RNA polymerase Rpb1, domain 4
  misc_feature (1)..(542): Xaa is any amino acid
MWVQNSKCTNAGLPKRMALELYKPFIVRKIMGEEGLANTVRHAKKIIDSEDPKVWDIVEPIIKDHPVMLNRAPTLHRLGIQAFYPKLIEGSAIRLHPLVCAAFNADFDGDQMAVHLPLSFEAQLECRVLMLSSNNILHPASGQPIAVPSQDIVLGLYYLSKPRPGVKGEGMAFGSDQEVMQAYENGIVDLNANISLRLREGRKLYRGTFDYDTMCENEQGEEVVAKAGTKVEFMILNQDSRIKTSVGRVILNQAIPNILGYADDTFSKKVIAKSVDDLYRRSGNNMTVEYLISLKDLGYRWASKAGSSVAIAEMVIPPEKQELLDKATQKANEIRDLYDQGAVTDGERYNQIIDLWSRTTSDVAQKQWDLLSSDKDGFNPLFMMADSGARGSREQIKQLSGMRGLMQKPTRKIGEHEVIENPITSCFRDGLNSLEYFISTHGARKGLSDTALKTADAGYLTRRLVDVAQNLVITEEDCCEIKIVSERISVEHYECIKDTSEALSLFTKRLSGYVAASDISHPETKEILVKRGEFWKKKFCAN

SEQ ID NO: 36541 - DNA, 1488 bp, Unknown
  Obtained from environmental sample
  misc_feature (1)..(1488): n is a, c, g, or t
atgcttgaagaattcaacgattccacaaagagcgtggctgaaatttccattcagctggccaaccccgacacaattcgcgattggtcttacggcgaggtaaccaagccggaaacaatgaactaccgttcgttcaaacctgaaagagatggcttgttctgcgaaaagatttttggtccttacaagaactgggagtgcaattgcggtaaatacaaaaggcggcgttttcaaggtgttatatgcgaccgttgcggagttgaggtgacaacatctaaggttcgccgcgaacgcatggggcatattgaacttgccattccaattgcccatatatggtttttcaaaaatcaaccctgtataataggaaatttgctaggagtttctgccaaagatttggaaagggttatatattatgagcaatatatggttatagacccaggcaattccaaattcaaaaagaaccagataataaccaatgatgactacgatgatgccaaaaaagaaggtatatcttttgtggcagaaatgggtgccatagccataagaaaggttttgagcgaagccaatttgaaattagatgagctatctgctgaattgtctactatggcttctgaaagcggttcanaaagcgtgaagatagacgcattgaaaagactcaaatttgttgaggcatttaaaaattcccccaacaagccccgaatggatgatttgggatgttcttcccctgtattccaccggatttgcgccccccttgtgcaattagatggaggccgctttgcaacttcggatttgaacaatttttacagaagggttatcaaccgcaacaaccgtcttaaaaaattgattgacgctcgtgcgccggatataattttgcgcaatgaaaaaaggatgttgcaagaagctgtggacaacctttttgatagcgatccaaaggctaaaaagaaagagaagatgaaatccctctccgagctgttaaaaggcaagcagggacgtttccgtatgaacttgctgggcaagcgcgttgattattcaggccgttctgttatagttgttggccctgagctaaaaatgcacgaatgcggccttccaaaaagaatggcgttggaactttacaaacctttcatagttcgcaagattatgggtgaagagggtttggcaaatacggttcgccacgctaagaaaataatagattcagaagacccaaaggtatgggatatagttgagcctataataaaagaccatccggttatgctaaaccgcgcaccgactttgcaccgtttgggcatacaggctttttatccaaaattgatagaaggttccgccatacggttgcatcctcttgtttgcgcagcgttcaacgcagattttgacggtgaccaaatggcggtgcatttgccgctctcttttgaagcgcagctcgaatgcagagttttgatgctctcttccaataacataaggcatccagcatccgggcagcctttggctgttccataa

SEQ ID NO: 36542 - protein, 495 aa, Unknown
  Obtained from environmental sample
  DOMAIN (336)...(479): RNA polymerase Rpb1, domain 2
  misc_feature (1)..(495): Xaa is any amino acid
MLEEFNDSTKSVAEISIQLANPDTIRDWSYGEVTKPETMNYRSFKPERDGLFCEKIFGPYKNWECNCGKYKRRRFQGVICDRCGVEVTTSKVRRERMGHIELAIPIAHIWFFKNQPCIIGNLLGVSAKDLERVIYYEQYMVIDPGNSKFKKNQIITNDDYDDAKKEGISFVAEMGAIAIRKVLSEANLKLDELSAELSTMASESGSXSVKIDALKRLKFVEAFKNSPNKPRMDDLGCSSPVFHRICAPLVQLDGGRFATSDLNNFYRRVINRNNRLKKLIDARAPDIILRNEKRMLQEAVDNLFDSDPKAKKKEKMKSLSELLKGKQGRFRMNLLGKRVDYSGRSVIVVGPELKMHECGLPKRMALELYKPFIVRKIMGEEGLANTVRHAKKIIDSEDPKVWDIVEPIIKDHPVMLNRAPTLHRLGIQAFYPKLIEGSAIRLHPLVCAAFNADFDGDQMAVHLPLSFEAQLECRVLMLSSNNIRHPASGQPLAVP

SEQ ID NO: 36543 - DNA, 675 bp, Unknown
  Obtained from environmental sample
  misc_feature (1)..(675): n is a, c, g, or t
ttgacggaaaaaaccgcaagcccttcagggcagccctcccacataggtattataatggacgggaacggccgctgggccaagaaacgcgggcagatgcgtacacagggacacctggaaggactgaaggcagccaagcgtgttgtaaaagccgccggaaattttggcgtttcatacttaaccctttacacgttttccactgaaaactggaagcgcgccgcggaagaggtcgggtttatcatgggcctggtaaagcaatacctaaagggagaaatggatttttaccgggaaaacagcatcagaattcgtcacgctgggaaccgggaaggactgcctgccgatattttacaagacctggacgaagcttgcgccgccaccggcggttttggcggcctccaggtaattctggcgctcaactacggggggagggacgaaattgtcagggcggtagaaaagctgattaattccggagattcggtgacggctgaaaatttaagcaaatacatggacaacccggacattccggatccggatcttataatcagaacggctggggaattcagaacaagtaattttcttttatgggaaggagcttacgctgaatactatatttctgataaactatggcctgactgggcagaggacgatctgaaaaggcatccggctcggccaatctga

SEQ ID NO: 36544 - protein, 224 aa, Unknown
  Obtained from environmental sample
  DOMAIN (18)...(222): Putative undecaprenyl diphosphate synthase
  misc_feature (1)..(224): Xaa is any amino acid
MTEKTASPSGQPSHIGIIMDGNGRWAKKRGQMRTQGHLEGLKAAKRVVKAAGNFGVSYLTLYTFSTENWKRAAEEVGFIMGLVKQYLKGEMDFYRENSIRIRHAGNREGLPADILQDLDEACAATGGFGGLQVILALNYGGRDEIVRAVEKLINSGDSVTAENLSKYMDNPDIPDPDLIIRTAGEFRTSNFLLWEGAYAEYYISDKLWPDWAEDDLKRHPARPI

SEQ ID NO: 36545 - DNA, 555 bp, Unknown
  Obtained from environmental sample
  misc_feature (1)..(555): n is a, c, g, or t
atgagcgagacccaagccgcagccgaagaacggatgaaaaaaaccctggtcaacctaaaagagggcttttccgcccttaggaccggcagggcttccaccgctttgttcgacaagatacgggtagacgcttacggagaaaaatccccgataaaccaggtggcaaatatttccatacccgaagcgcggctcatcgtcattcagccctgggacaaagcgcttatcggcgaaattgaaaaggcgattcgttcatcggagctgtctttaaacccgtcaaacgacggcaaggtgatccgcatatccattcctcccttgaccggcgagcgtcgcaaggagcttgtaaagctggcgaagaacaacgccgaacagagcagggtcgcggtcaggaacatccgcagggacggcaacgaagagcttaaaaaactcttaaaagacagcaagatcaccgaggacgaggaaagcaagaccgcggatgaacttcagaagctgactgatttgtatattggaaagataaaccaggttcttgaggaaaaagaaaaggagatcatggaggtttga

SEQ ID NO: 36546 - protein, 184 aa, Unknown
  Obtained from environmental sample
  DOMAIN (18)...(182): Ribosome recycling factor
  misc_feature (1)..(184): Xaa is any amino acid
MSETQAAAEERMKKTLVNLKEGFSALRTGRASTALFDKIRVDAYGEKSPINQVANISIPEARLIVIQPWDKALIGEIEKAIRSSELSLNPSNDGKVIRISIPPLTGERRKELVKLAKNNAEQSRVAVRNIRRDGNEELKKLLKDSKITEDEESKTADELQKLTDLYIGKINQVLEEKEKEIMEV

SEQ ID NO: 36547 - DNA, 447 bp, Unknown
  Obtained from environmental sample
  misc_feature (1)..(447): n is a, c, g, or t
gtggaaccgttacccggatttcgtccccgactccctaaaagcgcgtctggccgcccacgtaggcgtaacgcccgaaagcgtcatagtgggcaacgggtcaaacgagatgctgctggtgcttatgctctccttcgccgccaaggcaaagagcgtgatcgtatgcccgccaaccttctccgtctacagattgctgagcaacggaacgggcgcgcgccccgtagacgtaagcctcaccgacgacttgcggtacgacatcccggccatcaaaaaagccgccgccgccaaccccgggtcaatgcttataatctgctcgcccaacaacccgaccggcaacgccgtaagcgaagccgacctgcgggacatcctaagcgtccacaccggcatttgcgtcctggaccaagcctacgtggagttcggcggattcaacggattgagcctgataaatga

SEQ ID NO: 36548 - protein, 148 aa, Unknown
  Obtained from environmental sample
  misc_feature (1)..(148): Xaa is any amino acid
MEPLPGFRPRLPKSASGRPRRRNARKRHSGQRVKRDAAGAYALLRRQGKERDRMPANLLRLQIAEQRNGRAPRRRKPHRRLAVRHPGHQKSRRRQPRVNAYNLLAQQPDRQRRKRSRPAGHPKRPHRHLRPGPSLRGVRRIQRIEPDK

SEQ ID NO: 36549 - DNA, 714 bp, Unknown
  Obtained from environmental sample
  misc_feature (1)..(714): n is a, c, g, or t
atgggcaatacaggatgtaatacaggatacattactcagataattggacccgttgtggacgtgcgttttgagcaggggcagatcccgcttattctgaacgcgctgaaagtgaaaacaggcgacgcggggtttaaccgcgtcgttactcttgaagttcttcagcatataggcgacaaccgcgtgcgctgtgtggcgatgtcagcagcagaaggcttatcacggggcctcaaggttgaggacacgggcaagcccatcagcgtgcctgtcggcaaggaagtgctggggcgtatgttcagcgtaacgggcgaccccattgacgacaagggggcgttcagcgcggcccagtacgagtcgatacaccgcggcgcgccaggttttaacgaacagcgtccggcgaccgctctgcttgaaaccggaataaaggtaattgacttaatcgcgccctacgcgaagggcggaaaaaatcggcctgttcggcggcgccggcgtggggaaaacggtcgttattatggaacttatccgcaacatagcgaccgaacattcaggctattcggtgtttgccggcgttggcgaacgctcgcgcgaaggtgccgacctctggaaagaaatgaccgaaagcggcgttatcgacaaaaccgcgctggttttcggccagatgaacgagcctccgggggcgcgcatgagggtcgcccttgccggccttacaatggctga

SEQ ID NO: 36550 - protein, 237 aa, Unknown
  Obtained from environmental sample
  DOMAIN (11)...(82): ATP synthase alpha/beta family, beta-barrel domain
  misc_feature (1)..(237): Xaa is any amino acid
MGNTGCNTGYITQIIGPVVDVRFEQGQIPLILNALKVKTGDAGFNRVVTLEVLQHIGDNRVRCVAMSAAEGLSRGLKVEDTGKPISVPVGKEVLGRMFSVTGDPIDDKGAFSAAQYESIHRGAPGFNEQRPATALLETGIKVIDLIAPYAKGGKNRPVRRRRRGENGRYYGTYPQHSDRTFRLFGVCRRWRTLARRCRPLERNDRKRRYRQNRAGFRPDERASGGAHEGRPCRPYNG

SEQ ID NO: 36551 - DNA, 834 bp, Unknown
  Obtained from environmental sample
  misc_feature (1)..(834): n is a, c, g, or t
gtggggaaaacggtcgttattatggaacttatccgcaacatagcgaccgaacattcaggctattcggtgtttgccggcgttggcgaacgctcgcgcgaaggtgccgacctctggaaagaaatgaccgaaagcggcgttatcgacaaaaccgcgctggttttcggccagatgaacgagcctccgggggcgcgcatgagggtcgcccttgccggccttacaatggctgaacatttccgcgatcaggacaggcaggacgtgcttctctttgttgacaatattttccgcttcattcaggcgggcgcggaagtttccgcccttcttgggcgtattcccagcgcggtcggttaccagccgacgcttgccaacgagatgggcagccttcaagagcgtatagccagcacttcaaaaggctcgatcaccagcattcaggcggtttatgtgcccgccgacgaccttaccgatcccgcgcccgcgacaaccttcgcccatctggacgcgaccaccactctttcacgcaaaatcgtagagcttggaatctatccctctgttgacccgctcgcttcaagttcgcgcatccttgacgcggctattgtgggcgacgatcactataacaccgcccgccgcgcccagcagatattacagcgttataaagagttacaggacataatcgccattttgggcatggacgaactttccgaggaggacaaactcaccgtctccagagccagaaagatccagcgttttttcagccagcccttctttgtcggggaaaaatttaccggcattcccgggcgttacgtgcctgtcaaggaaaccgtccgcggcttaaaatga

SEQ ID NO: 36552 - protein, 277 aa, Unknown
  Obtained from environmental sample
  DOMAIN (203)...(277): ATP synthase alpha/beta chain, C terminal domain
  misc_feature (1)..(277): Xaa is any amino acid
MGKTVVIMELIRNIATEHSGYSVFAGVGERSREGADLWKEMTESGVIDKTALVFGQMNEPPGARMRVALAGLTMAEHFRDQDRQDVLLFVDNIFRFIQAGAEVSALLGRIPSAVGYQPTLANEMGSLQERIASTSKGSITSIQAVYVPADDLTDPAPATTFAHLDATTTLSRKIVELGIYPSVDPLASSSRILDAAIVGDDHYNTARRAQQILQRYKELQDIIAILGMDELSEEDKLTVSRARKIQRFFSQPFFVGEKFTGIPGRYVPVKETVRGLK

SEQ ID NO: 36553 - DNA, 330 bp, Unknown
  Obtained from environmental sample
  misc_feature (1)..(330): n is a, c, g, or t
ttgaaggctgcccatctcgttggcaagcgtcggctggtaaccgaccgcgctgggaatacgcccaagaagggcggaaacttccgcgcccgcctgaatgaagcggaaaatattgtcaacaaagagaagcacgtcctgcctgtcctgatcgcggaaatgttcagccattgtaaggccggcaagggcgaccctcatgcgcgcccccggaggctcgttcatctggccgaaaaccagcgcggttttgtcgataacgccgctttcggtcatttctttccagaggtcggcaccttcgcgcgagcgttcgccaacgccggcaaacaccgaatagcctga

SEQ ID NO: 36554 - protein, 109 aa, Unknown
  Obtained from environmental sample
  misc_feature (1)..(109): Xaa is any amino acid
MKAAHLVGKRRLVTDRAGNTPKKGGNFRARLNEAENIVNKEKHVLPVLIAEMFSHCKAGKGDPHARPRRLVHLAENQRGFVDNAAFGHFFPEVGTFARAFANAGKHRIA

SEQ ID NO: 36555 - DNA, 891 bp, Unknown
  Obtained from environmental sample
  misc_feature (1)..(891): n is a, c, g, or t
atggaacaagggttcgacgtccgcggcgtcaccttctgtactacccccggcgccaccggcgggaagtccgcccgagacgccaaactcgtcgccgaccacctccgcgtcccgcatagcgtggttgacctgtccgcgcaattcgagcgcgacgtcataggcaatttcataagcgagtacaaatccggccgcaccccgaacccgtgcgccgtctgcaaccgacacataaagttcgggccgccgctcttcgggatggctgcggaactcggctgcgaatacatcgccacaggacactacgcgataacagaaggcggggaactgcggcgcggaacggatgtccaaaaagatcagtcatacttcctatacccgatcttagccgcgccgatagagagaatactgtttccgctgggcgcgatgaccaaggcggagacaagagcgttggcaagaaaactcaagttgccgacagcgaacaaaggtgagagccaagacatctgcttcgtccccggaacagactacgcgggctttctgagatcgcgcggggtaggcgccgaaaacgaagcgggcgacatagcggacgccgccggaaacataatgggaaaacacaccggcatacacaactacaccgtaggccagcgcaaagggctgggtgcgctgggaaaaccgatgtacgtcaaacagatcatcccgaaagagaataaggtaatcgtagcggaagacagccaaatattcagtacggaagcggtgatagaagacgcggtaatctccaaaacaagaggcctaagcgccggcaaacactatgccgcccagatccgctacaaaagcaaaccattcggagcctcggtagttgaaataatcacagataaaagtagcgataaaaacgcctgcagcggatga

SEQ ID NO: 36556 - protein, 296 aa, Unknown
  Obtained from environmental sample
  DOMAIN (2)...(288): tRNA methyl transferase
  misc_feature (1)..(296): Xaa is any amino acid
MEQGFDVRGVTFCTTPGATGGKSARDAKLVADHLRVPHSVVDLSAQFERDVIGNFISEYKSGRTPNPCAVCNRHIKFGPPLFGMAAELGCEYIATGHYAITEGGELRRGTDVQKDQSYFLYPILAAPIERILFPLGAMTKAETRALARKLKLPTANKGESQDICFVPGTDYAGFLRSRGVGAENEAGDIADAAGNIMGKHTGIHNYTVGQRKGLGALGKPMYVKQIIPKENKVIVAEDSQIFSTEAVIEDAVISKTRGLSAGKHYAAQIRYKSKPFGASVVEIITDKSSDKNACSG

SEQ ID NO: 36557 - DNA, 681 bp, Unknown
  Obtained from environmental sample
  misc_feature (1)..(681): n is a, c, g, or t
atgattgaatatgtagtccctttgaatattgatgacagggcgctggcaaaagccgcgcgggttctggagggcggcgggcttgtcgcgttacccaccgataccagctggagcattgtctgttcgcttaaatccccaaacggcattaaaaagcttagaaaactgtccggcgagagggatgagaggcattttaccctgctatgttcgggtatttcgcagtttggagaactgtgcagcctggataacagccgcttccgcctgataaaccgcctttcgccggggccttatgtgtttattttgaaaacgcttctgggcaccgaaaaagccctggacatacgccggaaggaagtcggggtcagaatccccgatcattccataccccttgccctcattgacacgcttcaacagcccctttactcaataacagccaaaaagagcatgcaggataatggctctgaagaatttgaagataatgaccccgatgaacataatgactctgacgaacttccgcccattcccgaagacaacctttttgaaggcggctgggagttggacggaatcgacggcctggacctgatattggacggcggcgaggagcgtgagcgtattttctccaccattcttgatttatccggcgacgatgtcatattgctaagacaaggcgccggcacatggccggtgtaa

SEQ ID NO: 36558 - protein, 226 aa, Unknown
  Obtained from environmental sample
  DOMAIN (19)...(220): yrdC domain
  misc_feature (1)..(226): Xaa is any amino acid
MIEYVVPLNIDDRALAKAARVLEGGGLVALPTDTSWSIVCSLKSPNGIKKLRKLSGERDERHFTLLCSGISQFGELCSLDNSRFRLINRLSPGPYVFILKTLLGTEKALDIRRKEVGVRIPDHSIPLALIDTLQQPLYSITAKKSMQDNGSEEFEDNDPDEHNDSDELPPIPEDNLFEGGWELDGIDGLDLILDGGEERERIFSTILDLSGDDVILLRQGAGTWPV

SEQ ID NO: 36559 - DNA, 444 bp, Unknown
  Obtained from environmental sample
  misc_feature (1)..(444): n is a, c, g, or t
atggcccagtatccggttgtcgatgttgaggtaaaggtcacggacggaaagtatcatccggtggattcttcggaactctctttcaaacttgcggcccgcaacgccttccgcgaatcaatgcggcaggcgaaccctacgctgctggaaccggtaatgaatctgacggtttttatcgaggaaaaatacctgggcgacgttatgagcgacctgtcaggcaagcggggaaaaatcctggggcaggattcggcgagcggcatcgcggaggtgcgcgccgaggttccgcaggctgagttgctgcgttactcaatagacctgcgctcgatcacatccggcaccggctccttcgccgtggcgttcagccactacgcacctatttccggccgcatcgctgacgaagtaatcaaggcaagggagtcatttaaggtacaggaagcggacgaataa

SEQ ID NO: 36560 - protein, 147 aa, Unknown
  Obtained from environmental sample
  DOMAIN (46)...(133): Elongation factor G C-terminus
  misc_feature (1)..(147): Xaa is any amino acid
MAQYPVVDVEVKVTDGKYHPVDSSELSFKLAARNAFRESMRQANPTLLEPVMNLTVFIEEKYLGDVMSDLSGKRGKILGQDSASGIAEVRAEVPQAELLRYSIDLRSITSGTGSFAVAFSHYAPISGRIADEVIKARESFKVQEADE

SEQ ID NO: 36561 - DNA, 867 bp, Unknown
  Obtained from environmental sample
  misc_feature (1)..(867): n is a, c, g, or t
atgcagtccggcgaatgggcaacgcttctttccggtcgttatgtggaaatacacatgttcccgttatcatttaaagaatatgtatccgcaaacgtttccgggttgtcacacgataaattatttgcaaattatcttgaatatggttcatttccctttttgttcaatttttataatttatcgggtaacgctccggctgccggcggatgggataaatcaagtattcgcgattatctttccggtatctataacaccattgtattaaaagatattgtcgaaaataaaaaaataaacgaagccggaaggttggaacgggttattaaatttatagccgatacgattggttcggaaacttcgataaaacgaataagcgatatgctgacttcagacggatttaaaattatgccgcttactgttgaaagttatcttgacgctttccgtgacagttatattctgtacaaagcggacagatacgatgttaaaggcaggaaacttttaaaaacgcttaataaatattacatggttgacatgggattgcgccggttactgcttggcaataaagctgtagacagcgggcatatactggaaaatattgtctatcttgaacttctgcgcaggggttataaagtatatatcggcaaagttaacgataaagaagtagatttcatggcggaaggtgcggacggcgttgaatattatcaagtatctgaaactatacgcgataaagaaacgcttgcacgcgaacttgctccgcttgaattgatacgagatcataaccctaaattcttgcttacccgcgattacgaacccaaaacttcttataacgggataaaacagataaacgtactggattggctacttggggaatga

SEQ ID NO: 36562 - protein, 288 aa, Unknown
  Obtained from environmental sample
  misc_feature (1)..(288): Xaa is any amino acid
MQSGEWATLLSGRYVEIHMFPLSFKEYVSANVSGLSHDKLFANYLEYGSFPFLFNFYNLSGNAPAAGGWDKSSIRDYLSGIYNTIVLKDIVENKKINEAGRLERVIKFIADTIGSETSIKRISDMLTSDGFKIMPLTVESYLDAFRDSYILYKADRYDVKGRKLLKTLNKYYMVDMGLRRLLLGNKAVDSGHILENIVYLELLRRGYKVYIGKVNDKEVDFMAEGADGVEYYQVSETIRDKETLARELAPLELIRDHNPKFLLTRDYEPKTSYNGIKQINVLDWLLGE

SEQ ID NO: 36563 - DNA, 312 bp, Unknown
  Obtained from environmental sample
  misc_feature (1)..(312): n is a, c, g, or t
ttgtatcttgattccggctacaaatccgcctttgattttgtccgcgattgcattcagcctgaaattgacaaagtaacgggaacgaattatcacaaagactataaatcggttttacaggaatactgccagcgcgaataccgctgttaccccgaatacgttatagtaaaacgcacaggacccgaacacgatcgcacattctggatggaagtgcgcataggcgataaagtttacggagcgggaacggggcggaataagaagagcgccgaacaggaagcggcgaaagcggcgtgggaacagatagcggcggagtag

SEQ ID NO: 36564 - protein, 103 aa, Unknown
  Obtained from environmental sample
  DOMAIN (34)...(100): Double-stranded RNA binding motif
  misc_feature (1)..(103): Xaa is any amino acid
MYLDSGYKSAFDFVRDCIQPEIDKVTGTNYHKDYKSVLQEYCQREYRCYPEYVIVKRTGPEHDRTFWMEVRIGDKVYGAGTGRNKKSAEQEAAKAAWEQIAAE

SEQ ID NO: 36565 - DNA, 882 bp, Unknown
  Obtained from environmental sample
  misc_feature (1)..(882): n is a, c, g, or t
atggcgagagcgcgtaccctgaattcactagatgccaataccaaagaagttcgcagctataaccgagccttgtggcgaggcatggaaatgataagcgaacgccctctttccacaaatattttcataaatgttgtgcaagaaatcaaacaagatacggctggaattcgagttattcccggtactgttctaaaaaatccggctactggagaaattgtttatacgcctccaagcggcgaaagtgttattcgcaacaaattgaaaaatttggaagattttttgtacttaccgcaatatgccgaaattgacccattgataaaattagctgttatgcactatcaatttgaggctatacacccatttgcagacggtaatgggcgcacagggcgcattataaatattctttggctggtacaggaaaaattgctgaaccgccctattttatttttgtcaaaatattttctgggtcacaaggaagaatattacagcggtttgagaaaagtcacttcggatggtgaatgggaaaaatggattttgtatgtactggatgcggtggaacaaacggctcgtgatactggtgaattgatagataaaatcataaatgcacgcaaggtatgcaaagacgaattgcaagcttattttccaaagatatattctttagatttggttgaaacaattttttccgcaccgtatttcagaatggaagattatttgcagaaaaatccgacaattagccgtcaaacggcatcaaggcatttgcacctgctttgcagcccttataagcgaacagacaatgtaactgcacaaatgctaaaaatataccgccaaggtagagaaaacatatttttcaatcangcaatgtttgatattttaggcaatagataa

SEQ ID NO: 36566 - protein, 293 aa, Unknown
  Obtained from environmental sample
  DOMAIN (17)...(170): Fic protein family
  misc_feature (1)..(293): Xaa is any amino acid
MARARTLNSLDANTKEVRSYNRALWRGMEMISERPLSTNIFINVVQEIKQDTAGIRVIPGTVLKNPATGEIVYTPPSGESVIRNKLKNLEDFLYLPQYAEIDPLIKLAVMHYQFEAIHPFADGNGRTGRIINILWLVQEKLLNRPILFLSKYFLGHKEEYYSGLRKVTSDGEWEKWILYVLDAVEQTARDTGELIDKIINARKVCKDELQAYFPKIYSLDLVETIFSAPYFRMEDYLQKNPTISRQTASRHLHLLCSPYKRTDNVTAQMLKIYRQGRENIFFNXAMFDILGNR

SEQ ID NO: 36567 - DNA, 750 bp, Unknown
  Obtained from environmental sample
  misc_feature (1)..(750): n is a, c, g, or t
atggaaagcatatctataaaaagactctcgtttagccgtacggtgctatcgtcttcggaactgccaaagactccaaacaagtctatttctaatattttaaacaaaacatttgacaaaaccggattcaccaaagccatatttttgccaaagcctcttgaaattcttaaaaatgtgaatctcactcttgaaaaaggggatatactttgcatatcgggaaaatctggcgaaggtaaaagcactcttttgcgggtgattgccggactagacaaggctacatcaggagaaatttcgctttttgatgaacccattaaaccaagcgaatggacagctctctcaatggcgcagaaaggccttggctttgtgtttcaaaacgatgctttgatttctgatttaactgtaagagacaatatagctgttccgcttcgctataataaaataggaaccgaagaagaaataaaacaaaaagttgacagagctcttttgctgatgctcgcaaggagttttgcaaacgaatatccctattcactttcacttggaatgagaaaacgagttgctattgcccgttcttgggcaatggatgcaaacattcttcttttagacgaaccaacatctggactagacaaaaacagccgcaataaccttttatcacttgtaaacaacctgagagaactctacaaaaccaccatattgatggttgtaaacgatttgcttgtagcccgcgacctaacagcaaaatctcggccaatctga

SEQ ID NO: 36568 - protein, 249 aa, Unknown
  Obtained from environmental sample
  DOMAIN (65)...(245): ABC transporter
  misc_feature (1)..(249): Xaa is any amino acid
MESISIKRLSFSRTVLSSSELPKTPNKSISNILNKTFDKTGFTKAIFLPKPLEILKNVNLTLEKGDILCISGKSGEGKSTLLRVIAGLDKATSGEISLFDEPIKPSEWTALSMAQKGLGFVFQNDALISDLTVRDNIAVPLRYNKIGTEEEIKQKVDRALLLMLARSFANEYPYSLSLGMRKRVAIARSWAMDANILLLDEPTSGLDKNSRNNLLSLVNNLRELYKTTILMVVNDLLVARDLTAKSRPI

SEQ ID NO: 36569 - DNA, 1176 bp, Unknown
  Obtained from environmental sample
  misc_feature (1)..(1176): n is a, c, g, or t
atgatatacgccgtaatatcaatgatagcagtaacagtttttattgtcacagggtgtttcgggcgtaaagtttatatccgtaagaaaaacgaaaagataaaagtacaaattgaaaaagaaaggttattgaaagaacaaaccgaaaacgatccgatctttcaacaattagtaagtgatatgaaaaaactcgtgacgattatcacgagtaatccaaaatattatttgaccgctgataaacgcattgctattaaaaacctaatagaaaacacacttgaaaagatagcgccttttcatatcaaaaacggttattatggttatcccgaatatgacaccttaaaaattgcacaagttaatatactcacaaaattacaaaaacttaacgaaatatttatcaaagaaacgctagaaaagcataaagaactttttgacaatattgatggcaaatcattagacaatcaacaacgtatggcaatagtggttgatgaattgcataatctcattatcgctggggctggtagcggcaaaacgctgaccattcttggtaaagtcacgtatttattaaaatgtggtattttaccgcaagaaatattacttatcgcatttacaaaaaaatctgctacagaattggaagaaaggataaatcgtaattcggcattagatataaaagcacaaacttttcataaggttggacttgatataattacaagtaataacaaagaacgccctgacatagacggtgacgataaatttgatacatatcttgaagattatttttcaaaagaacttatccaacatcacaacgacgtacaaacctttcttgaatttatcggctactatctcaatattcctatcgaattaaaagcagacggaactttgggtgagaaaatagaaaaagagaaaaatgcagaccttgaaacattaggcgaaaaatataatcgaattactgttggcgaaaagaaaacaataaaaggcgagcgtgtgaaaagtttagaagagttaataattgcaaactttcttttcttgaatggtgttgaatacgaatacgaacgagaatatccatatcagagcgacgacgataaaacttggaaacgatatagacctgatttttatatcanagattacgacatatatcttgaacactttggcattgataaaaacgacaaatgccatggntag

SEQ ID NO: 36570 - protein, 391 aa, Unknown
  Obtained from environmental sample
  misc_feature (1)..(391): Xaa is any amino acid
MIYAVISMIAVTVFIVTGCFGRKVYIRKKNEKIKVQIEKERLLKEQTENDPIFQQLVSDMKKLVTIITSNPKYYLTADKRIAIKNLIENTLEKIAPFHIKNGYYGYPEYDTLKIAQVNILTKLQKLNEIFIKETLEKHKELFDNIDGKSLDNQQRMAIVVDELHNLIIAGAGSGKTLTILGKVTYLLKCGILPQEILLIAFTKKSATELEERINRNSALDIKAQTFHKVGLDIITSNNKERPDIDGDDKFDTYLEDYFSKELIQHHNDVQTFLEFIGYYLNIPIELKADGTLGEKIEKEKNADLETLGEKYNRITVGEKKTIKGERVKSLEELIIANFLFLNGVEYEYEREYPYQSDDDKTWKRYRPDFYIXDYDIYLEHFGIDKNDKCHG

SEQ ID NO: 36571 - DNA, 786 bp, Unknown
  Obtained from environmental sample
  misc_feature (1)..(786): n is a, c, g, or t
ttggttaatgaacatcagcttacagagtccttgcttgccttttccgccccctcgcatgtgcttcgtattcccgcaaaagtagcggctcttcgcagttttttaatcgcgaaatttcacgctttctctctgcttgcgcggttaaccgaaaaaaacgaagaattgcataatcttgtaagaaatatcccttttaccgtagtttttacattaatggcggaagatgtgtatttttcctgtcttgacgatccgggcttttcaaacgatacaaaatccaagcttgccaacgatttaatcgcgttgtgggacagcggaaccgatcaacgcagtatccatcaccttatggcgctttcttctctttggaaggcaagggattccgctccgcccattttcgggacaatggacggtaacgccgaattactgagaatttccattgatatggacactgacaccgaatgggaagattttttaaaaggggagtccacaagtgattatacaagatgggcgcttgaggaatttctttttggtctgtcttatgaagaaattttacaagttcgcaataggctgctgcattacggagtaaaagccgtaagccatgatgaagttaggtcataccttgattcaaaaccggtctattctgtcgtgaatgaacatgatcctagggctatctatgattttttcctagaaagacgggacgcttgtaccctgcgtaaaagggtaaatgccccaggcccccagcatacttttttttatannnangnaaaanaccgnattattctagagtcctgttag

SEQ ID NO: 36572 - protein, 261 aa, Unknown
  Obtained from environmental sample
  misc_feature (1)..(261): Xaa is any amino acid
MVNEHQLTESLLAFSAPSHVLRIPAKVAALRSFLIAKFHAFSLLARLTEKNEELHNLVRNIPFTVVFTLMAEDVYFSCLDDPGFSNDTKSKLANDLIALWDSGTDQRSIHHLMALSSLWKARDSAPPIFGTMDGNAELLRISIDMDTDTEWEDFLKGESTSDYTRWALEEFLFGLSYEEILQVRNRLLHYGVKAVSHDEVRSYLDSKPVYSVVNEHDPRAIYDFFLERRDACTLRKRVNAPGPQHTFFYXXXKXRIILESC

SEQ ID NO: 36573 - DNA, 510 bp, Unknown
  Obtained from environmental sample
  misc_feature (1)..(510): n is a, c, g, or t
atgaaagcctataaagtttatgatgaagaaattgccggatgggacgaagacatagttatttcatcggcgcgtatgcatgatttgggaaaaatatcgatcacggatttgataataaataaacctgacaaactcactgatactgaatatgaaatgatgaaaacccacgcaatggaaggggagcgtataattgacaagattatctcacggacaggagaaggggaatttttgcataatgccaaattatttgccggcagtcaccatgaacgctgggacggaaacggttatccccgcagattgaaggggacagaaattccgcttcaggggcgcataatggcgattgttgatgtgtatgacgcgcttgtttctgaaagaccctacaagaaggcgttatctgacgaagaggctgtacagattataatggaaaacgcaggcactcattatgatccaaaaatagccgaagttttttataaagtaaaggatttgtttaaaacggtaagggcaggactttaa

SEQ ID NO: 36574 - protein, 169 aa, Unknown
  Obtained from environmental sample
  DOMAIN (6)...(120): HD domain
  misc_feature (1)..(169): Xaa is any amino acid
MKAYKVYDEEIAGWDEDIVISSARMHDLGKISITDLIINKPDKLTDTEYEMMKTHAMEGERIIDKIISRTGEGEFLHNAKLFAGSHHERWDGNGYPRRLKGTEIPLQGRIMAIVDVYDALVSERPYKKALSDEEAVQIIMENAGTHYDPKIAEVFYKVKDLFKTVRAGL

SEQ ID NO: 36575 - DNA, 396 bp, Unknown
  Obtained from environmental sample
  misc_feature (1)..(396): n is a, c, g, or t
atgaaaacagaatgttcattacgggtaagaagctatgaatgcgacggctacaaccatgtaaataacgcaaactatcttaattatcttgaatacgcgcgttatgaatttcttaaagatattggttttgactttgttaaagcgacaaaagccggttacggcgtttacattgcccgaatagaaattgattacaaaaaacccgcgtttaccgacgacacattgattattaaatcgcgtcctgtaaaacgaggcgcggtaagcggcgttatcgcgcaggaaatttggcggggcgaagatttattgattgaggcaaaagttacatgggcgtttgtcgattcaaaaggcgctccgacaaaaattccgccggagtttgatgtgccgggacttaaaccggattaa

SEQ ID NO: 36576 - protein, 131 aa, Unknown
  Obtained from environmental sample
  DOMAIN (17)...(102): Thioesterase superfamily
  misc_feature (1)..(131): Xaa is any amino acid
MKTECSLRVRSYECDGYNHVNNANYLNYLEYARYEFLKDIGFDFVKATKAGYGVYIARIEIDYKKPAFTDDTLIIKSRPVKRGAVSGVIAQEIWRGEDLLIEAKVTWAFVDSKGAPTKIPPEFDVPGLKPD

SEQ ID NO: 36577 - DNA, 567 bp, Unknown
  Obtained from environmental sample
  misc_feature (1)..(567): n is a, c, g, or t
atgtttaatttttgcccgtcgtgcgcttcaaaaaaaatcacctttaacgaagggaaatttttccgctgtcccgactgcggtcttgtttattatcacaatgtcgccgccgcaaacggctgcgtaatcagcgtaccgtcggcggaaggagaaccgcttgtgtttacagtccgcggcaaagaaccggggaaaggtttaatggatttgcccggcggctttgtcgatccgggcgagggcgtccttgacggccttaccngtgaactgcgggaagaaattaactggacgccgcccattcctctgaccactaaaagtggtcagactaaattgacggatgtttttaaactgttcgcctctttttccaatatctacaaatacaagggaattgattacaacacctgcgatatgtatttttccgtcagtgcgcccggccttacgcgggacgatctgcgtttgcaagaaggcgaaattgccgacgttctttttttaaaaccggaacaaattgattttgatcaaattgcctttgagtcaacaagacgcgcggtaaaaacttatttgggtattaataaataa

SEQ ID NO: 36578 - protein, 188 aa, Unknown
  Obtained from environmental sample
  DOMAIN (33)...(182): NUDIX domain
  misc_feature (1)..(188): Xaa is any amino acid
MFNFCPSCASKKITFNEGKFFRCPDCGLVYYHNVAAANGCVISVPSAEGEPLVFTVRGKEPGKGLMDLPGGFVDPGEGVLDGLTXELREEINWTPPIPLTTKSGQTKLTDVFKLFASFSNIYKYKGIDYNTCDMYFSVSAPGLTRDDLRLQEGEIADVLFLKPEQIDFDQIAFESTRRAVKTYLGINK

SEQ ID NO: 36579 - DNA, 801 bp, Unknown
  Obtained from environmental sample
  misc_feature (1)..(801): n is a, c, g, or t
atgattcgtgatctaatgtcatgcaactatggcgagcatgcgtcgaatctgggaggggttatcgcggcggaaatagcggacggtcttaaaataaaagcttacgtcgcagatcccatttccacagacgaaatgcaggaagttgcccgtctttcaggccttcctgaaattgttcgtaccggtcgggtgcataccctcaaccaaaaggcagttgtaagacgtgcggcgaaagagcttggcgtatcggtagaatccgccaactttgtggtggcccaccttggcggcggtatctccatcggggcacacaggggcggcctcatcgtcgactcgaacgatccacgaggggaggggcctttctgtatggatcgcccgggcagcgttcacggctttgagcttgccaaactctgctatagcgggaagtacaccgaagaagaaatgctggagcggcttagcgatggcggcggagtagtcgcgtacatgaaaacccgcgatttttttgatgtaatgcgcctctataacgaaaaagacccgatggcaattacggtatacaacgccctggtttaccagattgccaaggagattggcgcggaggtagcggtgttgcgcggaaaagtggacgctatcattttaacaggcggcatggcgcgcgaagcttgctttatcgaagacataaagggctatgtaggcagcttcgcgaagacaatggtttatcccggcgaattggaagaggaagctatggcaacttacgccgacggtgtagcgagcggagagattaagccacgagtctatacggggaaatgctaa

SEQ ID NO: 36580 - protein, 266 aa, Unknown
  Obtained from environmental sample
  DOMAIN (1)...(262): Acetokinase family
  misc_feature (1)..(266): Xaa is any amino acid
MIRDLMSCNYGEHASNLGGVIAAEIADGLKIKAYVADPISTDEMQEVARLSGLPEIVRTGRVHTLNQKAVVRRAAKELGVSVESANFVVAHLGGGISIGAHRGGLIVDSNDPRGEGPFCMDRPGSVHGFELAKLCYSGKYTEEEMLERLSDGGGVVAYMKTRDFFDVMRLYNEKDPMAITVYNALVYQIAKEIGAEVAVLRGKVDAIILTGGMAREACFIEDIKGYVGSFAKTMVYPGELEEEAMATYADGVASGEIKPRVYTGKC

SEQ ID NO: 36581 - DNA, 903 bp, Unknown
  Obtained from environmental sample
  misc_feature (1)..(903): n is a, c, g, or t
ttgaaccaattacgcatggagttaaaattccagtggacaggcgaagtagacgacaaatccgcccttgaaatcggtaaattnttaggagcgcagacaatcgtatcaggagcgataagcgaactaggcgaccgctaccgaatgagactccgagccttaaacgtgcagacttcccaagtacagggacaatacaacagaaacatagccgcaggcaaaaccatagccgccttaatgaaaggcggaaaatcggctaacacagtttacggcggaagaaccgcaagcggaaacgcaaacgacacaaccgccgcaaatcaaacgccgagccgacagcctgcaacaccaagctccccacaggggagcacaaaaccggtaaccaccacatataaaatcggcgacacgggacccgcaggcggactaatattttacgacaaaggaaacaacataggcggttggcgatacctcgaagccgccccttccgatttaggaccaaataaatttataacggaagaccctggttcgttacccaaaaacttatatgacctgtgggaaaaaaccgacggcgacaaagggcgaggagtaggcaaaggcaaatacaacacggaatttttaatgggaatagcgcaagcaagaggcggatttaattgggcaatacgcctatgcgacgaatacgaactcaacggctataatgattggttcatgccgagcagagacgaactcaattttatgtacggcaatttgcacatgaaaggactaggcaatttcagactggaacaatactggtcatcgacaggttggcaggacacatggggttcatacagcgcatggtacataaattttgaagacggtacagccgcatatcaaaacgcaagccaaccacgccgtttccgtccaatacggcagttttag

SEQ ID NO: 36582 - protein, 300 aa, Unknown
  Obtained from environmental sample
  misc_feature (1)..(300): Xaa is any amino acid
MNQLRMELKFQWTGEVDDKSALEIGKXLGAQTIVSGAISELGDRYRMRLRALNVQTSQVQGQYNRNIAAGKTIAALMKGGKSANTVYGGRTASGNANDTTAANQTPSRQPATPSSPQGSTKPVTTTYKIGDTGPAGGLIFYDKGNNIGGWRYLEAAPSDLGPNKFITEDPGSLPKNLYDLWEKTDGDKGRGVGKGKYNTEFLMGIAQARGGFNWAIRLCDEYELNGYNDWFMPSRDELNFMYGNLHMKGLGNFRLEQYWSSTGWQDTWGSYSAWYINFEDGTAAYQNASQPRRFRPIRQF

SEQ ID NO: 36583 - DNA, 840 bp, Unknown
  Obtained from environmental sample
  misc_feature (1)..(840): n is a, c, g, or t
atggtaaaaaacttaaatcaccggaaagcaaatataagccttaagcttgtaacgggaaacggaagccccgcggcaaatcaggatgtaaaaatagagcaaaaaagccataaatttttatttggaacaggcggctttgaagcgattgaacttgccggagggaaacttgacggttcttgcttagacgaaacgaaggctgcttttatcagggataaacttgacaaactttttgccttaaacaattacacaaccttgccattctatctgggacgttatgagcctgaggagggcaagccggatgaaaaacgccttaaggccgccgcgcgctggtttaatgagcggaacataacagtaaagggacatccgctgtgctggcacaccgtctgcgccgactggctgatgaattattccaacgccgacatattaaaaaaagtaatagcgcgaattgagcgcgatgtgtccgcttttacggggttaatcgacatatgggacgtaattaacgaagtagtcattatgccggtttttgacaaatatgacaacgccgttacgcggatatgcaaagaatacgggcaggtgcgtattgtaaaagaggtgtttgaagccgcaaaacgcgcaaatccgaattctgtattgctgttaaacgattttgacacgtcgattgaatatgaaattcttattgacaaatgcctgcaggcgggcattcctatagacgtaatcggcatacagtcgcatcagcatcagggttactggggagcggaaaaaacactcgacgtgcttatgcgtttttcgcgcttcggactgcccattcactttacggaaaacacgatcattcaggcgaaataa

SEQ ID NO: 36584 - protein, 279 aa, Unknown
  Obtained from environmental sample
  DOMAIN (67)...(279): Glycosyl hydrolase family 10
  misc_feature (1)..(279): Xaa is any amino acid
MVKNLNHRKANISLKLVTGNGSPAANQDVKIEQKSHKFLFGTGGFEAIELAGGKLDGSCLDETKAAFIRDKLDKLFALNNYTTLPFYLGRYEPEEGKPDEKRLKAAARWFNERNITVKGHPLCWHTVCADWLMNYSNADILKKVIARIERDVSAFTGLIDIWDVINEVVIMPVFDKYDNAVTRICKEYGQVRIVKEVFEAAKRANPNSVLLLNDFDTSIEYEILIDKCLQAGIPIDVIGIQSHQHQGYWGAEKTLDVLMRFSRFGLPIHFTENTIIQAK

SEQ ID NO: 36585 - DNA, 327 bp, Unknown
  Obtained from environmental sample
  misc_feature (1)..(327): n is a, c, g, or t
gtgccggcccttacgggagcgcgggtggacgtatcattttacgagcgaagacgggacgcttttttgaaagttntgaataacgccggtatcgagtactcaatgccgcagggagcgttctatcttttctgcaaagtcccaaagagcaaaacaaacaggcaggaagcggacgacaaggcgtntacagaacatcttaaaaagcatttaatattaggcgtgcaaggctcgggcttcggaatatcaggctggctgcgttttgcgtattgcgtagacgaaaagataatcagcgcgtcacaagacgcgtttattaaagcgatggaaacatggtaa

SEQ ID NO: 36586 - protein, 108 aa, Unknown
  Obtained from environmental sample
  misc_feature (1)..(108): Xaa is any amino acid
MPALTGARVDVSFYERRRDAFLKVXNNAGIEYSMPQGAFYLFCKVPKSKTNRQEADDKAXTEHLKKHLILGVQGSGFGISGWLRFAYCVDEKIISASQDAFIKAMETW

SEQ ID NO: 36587 - DNA, 816 bp, Unknown
  Obtained from environmental sample
  misc_feature (1)..(816): n is a, c, g, or t
ttgaaaaagaccgatgaacttaaagccgatttggaacggagcatggaagccctgaaagcggatcgttcaaaggttgaagaataccgtacagaagttgcaaaattggaaacggagtttgtcaagatacgcaggcttgaagatgaggcaaatactaaaatgacccgttttctttccgaaaagaaccatcttgaggcaatagaaaaagactttgataagataatccagacttccctgcgggtagaagaacggttaaaggaagttaccggtgccgatgataccttacagcacattcaggtatccctgcgtaaaatggaagacgccgttgtggcggcggaagataaataccagagggttgaaagcaaaaatcgtattttagaagaaacaaaccgcggtattgaacgtaattttcaaattttggaagaaaccgaaatggccgtgaggaaatttcgggaaaacattgaccgggcggaagatgaactggattccttccggcctgccatagaaaacctggcagcggccagcgaaaaagcccggttaacagaagaaaaacttaatacgctggatacgagcctggcagcgattgatgacaagattgaaaaaatgcaaaccgcaagggagtggcttgccaaggcagaaacgcgttttgaagaactaaaccggaaagcccaggaagaactgaaactgttgggggcggtgcttaaggatggaacaaaaaagaccggacccgccaagggagcgccgacactcgccgacagagaaacagtaatacgtctccgccgtcagggctgggaaatagaagcaatagcccggacttaa

SEQ ID NO: 36588 - protein, 271 aa, Unknown
  Obtained from environmental sample
  misc_feature (1)..(271): Xaa is any amino acid
MKKTDELKADLERSMEALKADRSKVEEYRTEVAKLETEFVKIRRLEDEANTKMTRFLSEKNHLEAIEKDFDKIIQTSLRVEERLKEVTGADDTLQHIQVSLRKMEDAVVAAEDKYQRVESKNRILEETNRGIERNFQILEETEMAVRKFRENIDRAEDELDSFRPAIENLAAASEKARLTEEKLNTLDTSLAAIDDKIEKMQTAREWLAKAETRFEELNRKAQEELKLLGAVLKDGTKKTGPAKGAPTLADRETVIRLRRQGWEIEAIART

SEQ ID NO: 36589 - DNA, 786 bp, Unknown
  Obtained from environmental sample
  misc_feature (1)..(786): n is a, c, g, or t
atgggacgtttagaaaaatgggacttcgacagcgagaagaatgaccaatatatgcttagtgttcgttgcttgaagggttcctcgtcaagttcaaagcctagcagtagttctagttttatcagtccttgcaatataagcggtcacaaaaccgttaaaattggcaaccaaacttggatggcggagaacttgaactgcgaagttgaaggcagcaaatgcttggactgcacaaagtacggaagattatatgaatggagaaccgctaaggctgtatgccccatcggttggcatttgcccagcgatgcggaatggaaaaccttaatagattttgttggtccgcagcatacaggagaaaaattaaagtctaaaaccggctggagaaatggcggtggcacagattattacggcttttcggctctgcctggacgttccattggcagttgccttgttaatatggatggcttcgactacggcacttggtggacatcagaagccaactacacgatggtctatggcgacggcgtgaatatcaacacatacgcttgcgactatcatagtgttcgttgcgtacaggacagcgatggaaaagataattcttcctcgtctagcttaaaatcaagcagttctgctttccccagcaagggcaacgatatggcgaattataaaaccgtcaaaatcggtactcaaacttggatggcagagaacttgaattatgccattgaaggcagcgaaatgtatggagaacgcaccgaaatctataacaaagaaactggtcgctatgagctttga

SEQ ID NO: 36590 - protein, 261 aa, Unknown
  Obtained from environmental sample
  misc_feature (1)..(261): Xaa is any amino acid
MGRLEKWDFDSEKNDQYMLSVRCLKGSSSSSKPSSSSSFISPCNISGHKTVKIGNQTWMAENLNCEVEGSKCLDCTKYGRLYEWRTAKAVCPIGWHLPSDAEWKTLIDFVGPQHTGEKLKSKTGWRNGGGTDYYGFSALPGRSIGSCLVNMDGFDYGTWWTSEANYTMVYGDGVNINTYACDYHSVRCVQDSDGKDNSSSSSLKSSSSAFPSKGNDMANYKTVKIGTQTWMAENLNYAIEGSEMYGERTEIYNKETGRYEL

SEQ ID NO: 36591 - DNA, 636 bp, Unknown
  Obtained from environmental sample
  misc_feature (1)..(636): n is a, c, g, or t
ttgctccaacgggcttttaatttcgccctgttgctccaaatcctctcaaaaatcgcattggcggcaattttcggatttgccttgacattcacattttcctgctctggcgatgacggcggaggcggctcctgcgatatgagcggttacaaaagcaaaaaaatgcctgacgggaaaacgtggatgacggagaatttgaattgcaaagttgctggcagtgaatgctatgataaaaatgaaagcaactgcaatacctacggtcgtctttacaactgggaagcggcaaagaaagcctgttccggcggctggcatttgccaagcgatgatgaatgggaagcattggtgacagcggctggaggtgctaccgcagggactaaattaaaggcgagaggtggttggaatccatatagcggcgttccctctggcacagacgagtatggcttttccgcccttccgggtggcctcggcggtttcgatgacagtttcggtaatgtcggcgacatcggcgtctggtggagttccgctgcgggcagtagcgactacgcctacttcagggttatgtaccacgacttcgagttagtatacaggaaccacgacgttaaggacctcttgctcagtgtccgttgcatacaggattaa

SEQ ID NO: 36592 - protein, 211 aa, Unknown
  Obtained from environmental sample
  SIGNAL (1)...(21)
  misc_feature (1)..(211): Xaa is any amino acid
MLQRAFNFALLLQILSKIALAAIFGFALTFTFSCSGDDGGGGSCDMSGYKSKKMPDGKTWMTENLNCKVAGSECYDKNESNCNTYGRLYNWEAAKKACSGGWHLPSDDEWEALVTAAGGATAGTKLKARGGWNPYSGVPSGTDEYGFSALPGGLGGFDDSFGNVGDIGVWWSSAAGSSDYAYFRVMYHDFELVYRNHDVKDLLLSVRCIQD

SEQ ID NO: 36593 - DNA, 1206 bp, Unknown
  Obtained from environmental sample
  misc_feature (1)..(1206): n is a, c, g, or t
ttgtcacgcagcccgattgcggtattgtcaaataacgacggtataatcgttgcgcttaacgccgaatgtaaagccctgggatttaagcggggagacgtattttttaaagttaaacgcgatatggaaaaaagcggtgtcgttgttttttccagcaactacaccctgtacgccgatatatcggcgcggatgaatttaatctacagccgttttacgcctgatgtcgaggtgtactcaatagacgaaagttttttgttctttccgaagtggaaaaacacagactacgccgagattgggaaggagataaaaaataccgtaaccaaagaaacggggattcccgtgtcgattgggattgcgcctaacaagacgctggcaaagatgtgcaacaaactcgcgaaaaagcgcggtggaatttgcgactgggataaattagactgggataaagaattaaagcattaccctgttgaggatatttggggcgttggcgcttcaaaagcggtttttttgaaaaagcgcggaattattacggcgttggattttaaaaattatcctctgcacaaagcgaaaaaacatttaacaattaccggattcagaactgttcaggaacttaacggcgtaagggttatcgaaaaaattgaggaagcgccgcggcaggtggttatggtttcccggagttttcaatcgcctgtatacgaactaaacgatataattacggctctctctgaatacacacaggaagctgtcaaacgtatgaggggtgaaggcttatcatgcaaatatgtgagcgtttacctaatgactaacgcctacgccgagggtgatcagtattttaaccagatgagtgccgaattgccttatttatccgcatacttgcccgaaatacaggcggtcgctaatgaactggtcaaaaaaatttaccgctttaattataaataccgcaaggtaatgattggtcttaccggattagactttgacgagaacaatcagcttgatttgttcaacacaggctacaatcggagcaaggaactagaacccttaatgcaagcctttgacagtataaatgacagatacggacgaggcactataaaattaggttgcggagtaaaaaaatcgagcaatgaaaaggcggctttgccctgggaattgagacgggattatctttcgccttgctatactaccaatataaaagatattcctttagcatactga

SEQ ID NO: 36594 - protein, 401 aa, Unknown
  Obtained from environmental sample
  DOMAIN (1)...(323): impB/mucB/samB family
  misc_feature (1)..(401): Xaa is any amino acid
MSRSPIAVLSNNDGIIVALNAECKALGFKRGDVFFKVKRDMEKSGVVVFSSNYTLYADISARMNLIYSRFTPDVEVYSIDESFLFFPKWKNTDYAEIGKEIKNTVTKETGIPVSIGIAPNKTLAKMCNKLAKKRGGICDWDKLDWDKELKHYPVEDIWGVGASKAVFLKKRGIITALDFKNYPLHKAKKHLTITGFRTVQELNGVRVIEKIEEAPRQVVMVSRSFQSPVYELNDIITALSEYTQEAVKRMRGEGLSCKYVSVYLMTNAYAEGDQYFNQMSAELPYLSAYLPEIQAVANELVKKIYRFNYKYRKVMIGLTGLDFDENNQLDLFNTGYNRSKELEPLMQAFDSINDRYGRGTIKLGCGVKKSSNEKAALPWELRRDYLSPCYTTNIKDIPLAY

SEQ ID NO: 36595 - DNA, 834 bp, Unknown
  Obtained from environmental sample
  misc_feature (1)..(834): n is a, c, g, or t
gtgatgatgaaaaaaattatttccctcttcgagatgctgcacttgtgcgcggaaaccctgtcaacaggcaatgaaaactaccacgaaatactcagccttcgttttgaacaacaggcttctctttccgcccttattgacgatctaaaaacaaaatatcccaaaggttccggtcttccggcgtatcctctcgaaaaagaacgccagcttgtcgcgctgctccgaaggggaaataaacaggaggcggaaaaacgccttgatgaactgttgtccgtgattatattctgcaatcaggatcatttcaggtatattcagcttaaaacgattgagctggcggtgctgctcgcccgcatcggggcaaattccggcattgggacggaaaacaaggcccgctatatcaaacaaatccaggacgcaaaaaccgttgaggaacttgcggcaatccttcataacatggtggaaaaaattgtcgtccagatagttttgtttcagggtattccccacgcttccgctatgagaaaagcggaatcttttatcaaagaaaactttacccgaaaaatcagcctgcgtgaagtcgcgaaaatagccggtctttcagcgccctatttcagcactattttcaaagaggaaatgggcgaaaacctttccaaatatattaacaggcagagggtggagaaggccagcaggatgcttttggaaacggatatttccctgtccgaaatatcgaacgcctgttgttttgacgatcaaagctggttctcaaaaatattcaaaagctttaccggcatcagccccagcaagtaccgcagtcagggcggaaaaatcaatattgcctga

SEQ ID NO: 36596 - protein, 277 aa, Unknown
  Obtained from environmental sample
  DOMAIN (173)...(219): Bacterial regulatory helix-turn-helix proteins, AraC family
  misc_feature (1)..(277): Xaa is any amino acid
MMMKKIISLFEMLHLCAETLSTGNENYHEILSLRFEQQASLSALIDDLKTKYPKGSGLPAYPLEKERQLVALLRRGNKQEAEKRLDELLSVIIFCNQDHFRYIQLKTIELAVLLARIGANSGIGTENKARYIKQIQDAKTVEELAAILHNMVEKIVVQIVLFQGIPHASAMRKAESFIKENFTRKISLREVAKIAGLSAPYFSTIFKEEMGENLSKYINRQRVEKASRMLLETDISLSEISNACCFDDQSWFSKIFKSFTGISPSKYRSQGGKINIA

SEQ ID NO: 36597 - DNA, 834 bp, Unknown
  Obtained from environmental sample
  misc_feature (1)..(834): n is a, c, g, or t
atgtcaagctcgcagttaaaaatttcgtcacggagggcgcggtacttcagggtcttttctgactggacttttaacgtgtcgtatgagcgcttcacctcgttaagaaccagctcgacctggtgcatattctcgcttgttttggcaagattccgttccacttccgcgccgcgcactttgaagcgggtaatcccggcggcttcctcaaacaggtatcgccgttcatcgggctttgaggaaagcacctggtcgatttttccctgctccatcaccgagtacgccgtcttgcccacgccggtatcccaaaacagttccctcagttctttaagcctgacggactgggaattgataaaatattcgctttcgccggaacggtacagccgccgttttatctccacttccggcacgtccagtggcagaaggcccgtgtcattgccaagcgtcaggatcacctcggctacgttcaggggtttccggtnttcggtgccgttgaagatgacgtcttccattttttcagcccgtagggctttggacgcctgttcgcccagggcccattttatcgcgtctaccacgttagacttgccgcagccgttggggcccaaaagggcggtgattcccgcggcaaattctaccctggttttgtcaggaaaagatttgaagccgaaaatgtcaaggctttttaagaacaaggcttatctccattttgattgtatttatttgtaccattttaaccatttaccgttcaagctcagggcaatagcacttactttatcacctataaattgcccattgcaggctcaccttaccattctttcggtttgccgcttggcggagtaa

SEQ ID NO: 36598 - protein, 277 aa, Unknown
  Obtained from environmental sample
  misc_feature (1)..(277): Xaa is any amino acid
MSSSQLKISSRRARYFRVFSDWTFNVSYERFTSLRTSSTWCIFSLVLARFRSTSAPRTLKRVIPAASSNRYRRSSGFEESTWSIFPCSITEYAVLPTPVSQNSSLSSLSLTDWELIKYSLSPERYSRRFISTSGTSSGRRPVSLPSVRITSATFRGFRXSVPLKMTSSIFSARRALDACSPRAHFIASTTLDLPQPLGPKRAVIPAANSTLVLSGKDLKPKMSRLFKNKAYLHFDCIYLYHFNHLPFKLRAIALTLSPINCPLQAHLTILSVCRLAE

SEQ ID NO: 36599 - DNA, 357 bp, Unknown
  Obtained from environmental sample
  misc_feature (1)..(357): n is a, c, g, or t
ttgagcttggactctgctttttccaggacagaacgaaatgttgttattaatgatagaattaataatatttctcttgaaattgacgttatgctggaaaatggtgacaatgccatgctggttgaaattaagaccaaacttaccgttgaacgcataaatgaccacattgaacgccttgagaaaatgcgaagatatgccgatttgcacggcgacaagcgaaattttttaggggcggttgcgggagttgtggtaactgataaagaaagaaagcacgcattggaacaaggtttttatttaattgaaccatcaggacaagaccttagtattactccgccaagcggcaaaccgaaagaatggtaa

SEQ ID NO: 36600 - protein, 118 aa, Unknown
  Obtained from environmental sample
  misc_feature (1)..(118): Xaa is any amino acid
MSLDSAFSRTERNVVINDRINNISLEIDVMLENGDNAMLVEIKTKLTVERINDHIERLEKMRRYADLHGDKRNFLGAVAGVVVTDKERKHALEQGFYLIEPSGQDLSITPPSGKPKEW

SEQ ID NO: 36601 - DNA, 813 bp, Unknown
  Obtained from environmental sample
  misc_feature (1)..(813): n is a, c, g, or t
atgcgcctgggcggcgtcgacaggtcggtcaccctgccggtggccacaaagccgtcgcaggtctccacgataaacaggggcgtggccgaaaccgtctccgcctaccccgggataatccaattcggagcgatgcaccccgaaatggaagagttcgagccggagatagacttcatggccgcgcaccagataaaaggcataaaactgcacccggagtaccaatacagccacgtagacgaccccagggccttccccatctacgaaaaactggcctccgcgggcctaatcgtagtattccactccggcaaagaccccggccccttcaccaacgaccacgccctcccccccgcgctgaaaaaaatccgcgaaaactttcccgccctgaaaatggtagccgcccaccttggcggctggatggtttggaaagaggtagaggagacgctggccggcctaaacctatttttcgacacctcggccatctacaaactgctccccccggaaattttcgtccgtatatgcagaanacacggcaccgataaaatcctattcggtagcgattcaccctggtacgaccaaggggcaagcgtagagtggataaaaaaaagcggtctgaacgatatcgagatagagccgtcttcggcgggtatgccaaaagactactgggattgtgtggactttgcgacgcgaagcggcgcttgttttaaaaaggttcttcccctagttgagggggaggaattgagggtgggggggaatatagcggggcgttgcgggacaacagcgccccacaggggcgcgtcctccccgcagggtgggtag

SEQ ID NO: 36602 - protein, 270 aa, Unknown
  Obtained from environmental sample
  DOMAIN (6)...(239): Amidohydrolase
  misc_feature (1)..(270): Xaa is any amino acid
MRLGGVDRSVTLPVATKPSQVSTINRGVAETVSAYPGIIQFGAMHPEMEEFEPEIDFMAAHQIKGIKLHPEYQYSHVDDPRAFPIYEKLASAGLIVVFHSGKDPGPFTNDHALPPALKKIRENFPALKMVAAHLGGWMVWKEVEETLAGLNLFFDTSAIYKLLPPEIFVRICRXHGTDKILFGSDSPWYDQGASVEWIKKSGLNDIEIEPSSAGMPKDYWDCVDFATRSGACFKKVLPLVEGEELRVGGNIAGRCGTTAPHRGASSPQGG

SEQ ID NO: 36603 - DNA, 675 bp, Unknown
  Obtained from environmental sample
  misc_feature (1)..(675): n is a, c, g, or t
atgggtactgatattacagaattgaatgaacgggttaaagaggagagcagctttgtctcgcttctcaagtcggagatggctaaggtcatcgtggggcagtctaagatggtggatcggctccttatagggctcctgacgcgggggcatatcctcttggaaggggtgccggggctagctaagacgctgtctatttccacgctggctaaggccgtggataccgggtttaagcggattcagttcacgccggacttgctgccggcggatatcgtggggactatggtctataatcagaagagcggggagtttgtgcccaaaaaggggcctatcttctccaatatcgtgctcgccgacgaaatcaaccgggcgccggctaaggtgcagagcgcactcttggaggctatgcaggagtgccaggtgaccatcggcgacaagtgctataggtttggaggaaccgtttcctcgtgctggccacgcaaaaaccccattagacaaggaggggacctattcccctgccccgaggcgccaggttcaaccggcttccatgctgaaaactccaaggttcctctacccccctcaagggaacaaaaaaaaaaagaaaatccttctaaacggaattggcggcgggaacccgttgcccggaagttaaaccccggtcccataaaagggggaaaataa

SEQ ID NO: 36604 - protein, 224 aa, Unknown
  Obtained from environmental sample
  DOMAIN (49)...(182): ATPase family associated with various cellular activities (AAA)
  misc_feature (1)..(224): Xaa is any amino acid
MGTDITELNERVKEESSFVSLLKSEMAKVIVGQSKMVDRLLIGLLTRGHILLEGVPGLAKTLSISTLAKAVDTGFKRIQFTPDLLPADIVGTMVYNQKSGEFVPKKGPIFSNIVLADEINRAPAKVQSALLEAMQECQVTIGDKCYRFGGTVSSCWPRKNPIRQGGDLFPCPEAPGSTGFHAENSKVPLPPSREQKKKENPSKRNWRREPVARKLNPGPIKGGK

SEQ ID NO: 36605 - DNA, 321 bp, Unknown
  Obtained from environmental sample
  misc_feature (1)..(321): n is a, c, g, or t
ttgtctaatggggtttttgcgtggccagcacgaggaaacggttcctccaaacctatagcacttgtcgccgatggtcacctggcactcctgcatagcctccaagagtgcgctctgcaccttagccggcgcccggttgatttcgtcggcgagcacgatattggagaagataggcccctttttgggcacaaactccccgctcttctgattatagaccatagtccccacgatatccgccggcagcaagtccggcgtgaactgaatccgcttaaacccggtatccacggccttagccagcgtggaaatagacagcgtcttagctag

SEQ ID NO: 36606 - protein, 106 aa, Unknown
  Obtained from environmental sample
  misc_feature (1)..(106): Xaa is any amino acid
MSNGVFAWPARGNGSSKPIALVADGHLALLHSLQECALHLSRRPVDFVGEHDIGEDRPLFGHKLPALLIIDHSPHDIRRQQVRRELNPLKPGIHGLSQRGNRQRLS

SEQ ID NO: 36607 - DNA, 534 bp, Unknown
  Obtained from environmental sample
  misc_feature (1)..(534): n is a, c, g, or t
gtgccgggagatattggggtaagatcgatgaaagtcatatcaagcaaagaatttgattctttttggaaaaaaaacacaaaacgcgctgaagatacagagaccgagaaggttgtcaaagaaatagtagcggaagtacgcgcaaagggggacgccgccgtcagaaatttcgcgtctaaattcgataaatcttctccccaacagcttgaagtccccctctcggaagcaaaacgcgcccttgaacagttacgcgcagccgacccgtctttaacacaggctcttgagcttgcggcaacgcacataaaacttttttccgacaaacaaagggaacaattcgccgattttgaatttgaaatggagcccggtcttgttacaggccagcggatactccctgttncaagagcggcggtttacgttcccggcgggacgtttccccctgttttcttcggtgctaatgtgcatgatccccgctttttgcgccggtgtggaagaggtgatattctcctcgccgccgacgcaagacggcatccccgataa

SEQ ID NO: 36608 - protein, 177 aa, Unknown
  Obtained from environmental sample
  misc_feature (1)..(177): Xaa is any amino acid
MPGDIGVRSMKVISSKEFDSFWKKNTKRAEDTETEKVVKEIVAEVRAKGDAAVRNFASKFDKSSPQQLEVPLSEAKRALEQLRAADPSLTQALELAATHIKLFSDKQREQFADFEFEMEPGLVTGQRILPVXRAAVYVPGGTFPPVFFGANVHDPRFLRRCGRGDILLAADARRHPR

SEQ ID NO: 36609 - DNA, 753 bp, Unknown
  Obtained from environmental sample
  misc_feature (1)..(753): n is a, c, g, or t
ttggccgagggcatcgatcttgcccccgtacgcaaactgcgcgagtcggtctcatgccaaataaccgtagcgggcggcatctcaacgttagctgaaatagaagaaatcgccgcccttggttgtgatgtgcagttgggtatggcgctttacacgggaaaaataaatcttgcggatgcgtttatccagtctcttaactggaagaaagatcaaaattcacttctccccgtaatcgtccaatctgctgacgggcaggtaatgatgacgggctttacggataaaagtgcgttagccgaaacatttaaacgcgggaatgtctgttttcacagcagaacacgaaacaagctgtggatgaaaggcgagaattcaggcaacgtgttaaaactaatccggttaagggcggactgcgacagggacgcgatccttgcgacggcacagcccgcgggtccagtctgccacacaggcgcatggtcatgctttgcaactaacagggattacacgcttcaatttttacaggacataatacgtgagcgttttcgcaaccccgcgcccggttcgtatactgccacccttgacgacgatctggtacgcgaaaaagttatggaagaggcgcaggaattgtgtgaggcaaaaactaccgaagaaattatctgggaagcggctgaccttctttatttttcaaccgtgctgatgaccagggcgggagttaccgttcaggaaatttttgacgagcttgaccggaggcacaaaaagtaa

SEQ ID NO: 36610 - protein, 250 aa, Unknown
  Obtained from environmental sample
  DOMAIN (167)...(249): Phosphoribosyl-ATP pyrophosphohydrolase
  misc_feature (1)..(250): Xaa is any amino acid
MAEGIDLAPVRKLRESVSCQITVAGGISTLAEIEEIAALGCDVQLGMALYTGKINLADAFIQSLNWKKDQNSLLPVIVQSADGQVMMTGFTDKSALAETFKRGNVCFHSRTRNKLWMKGENSGNVLKLIRLRADCDRDAILATAQPAGPVCHTGAWSCFATNRDYTLQFLQDIIRERFRNPAPGSYTATLDDDLVREKVMEEAQELCEAKTTEEIIWEAADLLYFSTVLMTRAGVTVQEIFDELDRRHKK

SEQ ID NO: 36611 - DNA, 585 bp, Unknown
  Obtained from environmental sample
  misc_feature (1)..(585): n is a, c, g, or t
atgagcgaattttggaacagccgcgtcaaaaaaatttctccgtatgttcccggcgaacagcctaaagaccggcaattaattaaacttaataccaacgaaaatccttatccgccttctcctaaagttatagaagccattaaaaatgccgccggggaacgtttgcggctgtatcccgatcctgagtgcgcgatattccgcgaagccgccgccgcccgttatggtgtaaagccgcagcaggtttttgctggcaacggttcagacgaaatactggcattcgcttttggcgctttttttgaaagcggcgaaaaagcagcgcaggtgcttttcccggacatcacttacagtttttatcctgtctatgccaatctgtgggaaattccgtaccgtaccatcgcgctgactgaaaaattttcgattaacataaacgattataatattccttccggcggcgtaatattttccaatcccaacgcgccaaccgcggttgcgcttccgttagacgatattttatccctggcggaatatctggaaaaacaggggaagattattattgtcgatgaagcctatatcctcgtgccgatctga

SEQ ID NO: 36612 - protein, 194 aa, Unknown
  Obtained from environmental sample
  misc_feature (1)..(194): Xaa is any amino acid
MSEFWNSRVKKISPYVPGEQPKDRQLIKLNTNENPYPPSPKVIEAIKNAAGERLRLYPDPECAIFREAAAARYGVKPQQVFAGNGSDEILAFAFGAFFESGEKAAQVLFPDITYSFYPVYANLWEIPYRTIALTEKFSININDYNIPSGGVIFSNPNAPTAVALPLDDILSLAEYLEKQGKIIIVDEAYILVPI

SEQ ID NO: 36613 - DNA, 927 bp, Unknown
  Obtained from environmental sample
  misc_feature (1)..(927): n is a, c, g, or t
gtgataagctgccgggtaaggtattcctttttttcgttcatgatgctacgatactttagcatgaaagcctaccttgatatagtggaaaaaattctctcgcagggttttcgcaagccaaaccgcaccggcgttgacgctctgaccattgccggggcaatgtttgagcatgacatggcggacggtttccccctgcttaccaccaaaaaaatccccttccggctgattgcctcggaactggagttttttatccggggcgtcacggacaaggaatggctgaaggaacggaacaaccatatctgggacgaatggtgctcgggcgacgtggtaccatacgcgaatgacggcgaaacgcaggccagaatgaaggcggaacgcgagcttgggccgatttacggctggcagtggcggaatttcggggctggttatatagcgcataacgcgaaaccggaagggaagggcgtggatcagctccgcctgcttgtggaaacgcttaagaatgatcccggcagccgccgcatgatagtaagcgcgtggaatcccctggacctttccagcatggccctgcccccctgccattacagttttcaggtaacggtcatcgacggaaaactgaatctcctgtggaaccagcgctctgttgacgtcgcccttgggctgccatttaacatcgcaagctacgcctgcctcctgcacctcctcgcgaaagaagcgggcctgggcgagggcaagcttgtcggctttttggcggacacccatatctatgtgaaccatgttgaagcaattcgcggccagcttacaagagaaccccgcgctctgccaaaaataaagacggcgcaattcacctcaatttttgactggcattacaccgacaccgtgattgaaggttatgacccgcacccggcaatacaatttgaaatagcggtatga

SEQ ID NO: 36614 - protein, 308 aa, Unknown
  Obtained from environmental sample
  DOMAIN (22)...(308): Thymidylate synthase
  misc_feature (1)..(308): Xaa is any amino acid
MISCRVRYSFFSFMMLRYFSMKAYLDIVEKILSQGFRKPNRTGVDALTIAGAMFEHDMADGFPLLTTKKIPFRLIASELEFFIRGVTDKEWLKERNNHIWDEWCSGDVVPYANDGETQARMKAERELGPIYGWQWRNFGAGYIAHNAKPEGKGVDQLRLLVETLKNDPGSRRMIVSAWNPLDLSSMALPPCHYSFQVTVIDGKLNLLWNQRSVDVALGLPFNIASYACLLHLLAKEAGLGEGKLVGFLADTHIYVNHVEAIRGQLTREPRALPKIKTAQFTSIFDWHYTDTVIEGYDPHPAIQFEIAV

SEQ ID NO: 36615 - DNA, 915 bp, Unknown
  Obtained from environmental sample
  misc_feature (1)..(915): n is a, c, g, or t
atgtggcttgtggcggtttgcgcgtttatagccacgctgcagtccgccgttggggattcgtttttgtccctgatcatcgcccttgccgcccttgcttccgcgttattaacggaactgcttataacctataaaacgcacggcttcgggaagataaaggatgggagcgcggccgcgtcggcgctggttcttgccctcctgtttccgaatcagattcaccctgtatacgccgcgttaagcgccatattcgccatcgccgtggtaaagcacagttttggcgggctgggggcgaattggatgaatcccgctttgggcggctggctttttgcccgtttttcatggccgcacgccttttcaattgcgcttaacggatccatgataagcctggatgaaacgggcaccgccgtcggcaatatggttaacagctccctgaacaggacgcttttttcttttctcggggcggaactgcctcccggttatattgaccttttcgcgttaaaaacgccgggcattatcgccgaccgcgccgtgcttgcgctcgttctcgccacggccgtcattgccgcttcccagataagccgctcatggctttcctttgtttacctcgccgtcttcgggctgctggcgcggatgtttggggatgttgccccgtggaacggcgatgttctttacgcttttctttcgggcggtacccttgtgacggcgtttattctgatcgcggatccttnncacggggctaaatcaatgccgggcggcgtaatcgcggcggttcttgccgcggttctgggtttcattttccggtttnacggcggggagttttttggctgcctctatgcggccgcccttgttaataccctgattccgctgttatacaaagcggaacgccgcctgctttatcccgcgaaggaggcggcatga

SEQ ID NO: 36616 - protein, 304 aa, Unknown
  Obtained from environmental sample
  SIGNAL (1)...(18)
  DOMAIN (1)...(299): NQR2, RnfD, RnfE family
  misc_feature (1)..(304): Xaa is any amino acid
MWLVAVCAFIATLQSAVGDSFLSLIIALAALASALLTELLITYKTHGFGKIKDGSAAASALVLALLFPNQIHPVYAALSAIFAIAVVKHSFGGLGANWMNPALGGWLFARFSWPHAFSIALNGSMISLDETGTAVGNMVNSSLNRTLFSFLGAELPPGYIDLFALKTPGIIADRAVLALVLATAVIAASQISRSWLSFVYLAVFGLLARMFGDVAPWNGDVLYAFLSGGTLVTAFILIADPXHGAKSMPGGVIAAVLAAVLGFIFRFXGGEFFGCLYAAALVNTLIPLLYKAERRLLYPAKEAA

SEQ ID NO: 36617 - DNA, 789 bp, Unknown
  Obtained from environmental sample
  misc_feature (1)..(789): n is a, c, g, or t
ttgaagctatcagggggggatatgaggctgtttagacttttcgcggcttttttacttttatcagcagttctcgcgtgggcggaagatggagaagctaaaaatagcggaataaaaacctcaacagatatgcaattgcaaatttccagcgtgcctgaggcaaagctctcattcagccagggctttatctttccttttatgcagggttcaagccctttaacccgggacaacaatatcgccgcagtgcttaccgctgaggtttcccctgtttccctgaacggaaaagcggaagtcgtctggacaccggcggcttttttcctgctttccggcggcggccttgccggatcaggctggaatatgccccttggatacggcataggcatcaacaagccggaagatgaaagcgccgccccgcccagaaaagcaacgatcgacggaacagcctttgacggccttctctggcgggcctggggagcgggaaccctgcaattcgaccttggcgcggtcatccccggcgactggacccatgtgcttttccagtcccgccaggaactccgctacgccgcttatagccgcgccgagcccggcgaatcctgggtcttcgaggctgattatggggaaaaccagaacggatgggtttactacgccagttacgtccttggctatcaaatgcccctggcgccggtactggacacaatcgctttcatggcggagctggaaaagcccctttacaacactccgggcggcgatttttggggcgaagacctgggcaaatggacttttcggggctga

SEQ ID NO: 36618 - protein, 262 aa, Unknown
  Obtained from environmental sample
  SIGNAL (1)...(27)
  misc_feature (1)..(262): Xaa is any amino acid
MKLSGGDMRLFRLFAAFLLLSAVLAWAEDGEAKNSGIKTSTDMQLQISSVPEAKLSFSQGFIFPFMQGSSPLTRDNNIAAVLTAEVSPVSLNGKAEVVWTPAAFFLLSGGGLAGSGWNMPLGYGIGINKPEDESAAPPRKATIDGTAFDGLLWRAWGAGTLQFDLGAVIPGDWTHVLFQSRQELRYAAYSRAEPGESWVFEADYGENQNGWVYYASYVLGYQMPLAPVLDTIAFMAELEKPLYNTPGGDFWGEDLGKWTFRG

SEQ ID NO: 36619 - DNA, 534 bp, Unknown
  Obtained from environmental sample
  misc_feature (1)..(534): n is a, c, g, or t
atgacagaaaaaagctttttcgccggtttcggcggtcagggcatcatatccctgggtcagatctgggtttattgcggcatgaaggaaggaaaaaacgtttctttctttccgttttatggcgctgaaaagcggggcggcattgcaagggcgggagtcattatctccgatgaagaaattgccagcccgctggtaaccactcccgattcggtgttggttatgaatatggattccctcccgctctgcgaggaaatcgtaaaaccccagggcgtcatggttataaactcctccctcgttaaagaggggcccaaacgcaccgatattaaggtggtaaaagtggaagcgtccggccttgccgaaaagatcggcagcatcctttacgcaaacatggtcgcgctgggtgctgtcgcaaaggttacaggggctttgaagcttacggacattgaagcgatattgataaagttcttcccgcctgagaaacacaaatttgtcccaatgaacgttgaagctatcagggggggatatgaggctgtttag

SEQ ID NO: 36620 - protein, 177 aa, Unknown
  Obtained from environmental sample
  DOMAIN (11)...(175): Pyruvate ferredoxin/flavodoxin oxidoreductase
  misc_feature (1)..(177): Xaa is any amino acid
MTEKSFFAGFGGQGIISLGQIWVYCGMKEGKNVSFFPFYGAEKRGGIARAGVIISDEEIASPLVTTPDSVLVMNMDSLPLCEEIVKPQGVMVINSSLVKEGPKRTDIKVVKVEASGLAEKIGSILYANMVALGAVAKVTGALKLTDIEAILIKFFPPEKHKFVPMNVEAIRGGYEAV

SEQ ID NO: 36621 - DNA, 1014 bp, Unknown
  Obtained from environmental sample
  misc_feature (1)..(1014): n is a, c, g, or t
ttgacgcgatgcttttggaagaatcgaaaagggccgccgaaccgcaggggcgtttccctgattttgtttcaatgctccgcaagcttggcttgcccgcgcagcaaacaggcccttccggcgcggaagatatacgcaaacgccgcgaaaggcttaaggggttgtgagatgattaagttttttgctttttcattgatttttatctctgcttttttattccttccagtttcagctaacgcgcaggctcagcccttgcctcagccgtctccgcctgcgtttccggatatgtccgtgcggggaacaatgaatataccaaccccgcccccccctcccgtgattcctttcattgacctgacagtccgcaacccggacggcggtcaggaagtggctttttctttacagcttttattgctgttaacggtattgtccctcgcgcccagcatcattattttaatgacaagttttttgcgcgtatccattgttctggattttatcaaacgcgcgctttcattacagcaggttccgcctaatcaggtgatttggggaatttccctttttttaaccgtgtttataatgtggcctacttttaacacaatttacaataattcaataaaaccgctttccgccggggaacttaacgtgcagaacgcctacagcgaggcggtaacacctttaaggatttttatgtacaaacagatggggcgcagccgggaagcgcagggaaatatcgctctttttatggcgatgcgcggtcttgaaaggccggccgttttagaagatgttcccacttatatattaattccggcgttcattcttaatgaacttaccgtagcgtttagaataggaataatgctgtttattccgttcatagtaattgacatggtggtggcaagcgcccttatgtccatgggcatgattatgctcccgcctgtaatgatatccatgccgtttaaacttattctatttattcttgtggacgagctgggggttgtgacgaatcaacctcggccattctga

SEQ ID NO: 36622 - protein, 337 aa, Unknown
  Obtained from environmental sample
  DOMAIN (137)...(330): FliP family
  misc_feature (1)..(337): Xaa is any amino acid
MTRCFWKNRKGPPNRRGVSLILFQCSASLACPRSKQALPARKIYANAAKGLRGCEMIKFFAFSLIFISAFLFLPVSANAQAQPLPQPSPPAFPDMSVRGTMNIPTPPPPPVIPFIDLTVRNPDGGQEVAFSLQLLLLLTVLSLAPSIIILMTSFLRVSIVLDFIKRALSLQQVPPNQVIWGISLFLTVFIMWPTFNTIYNNSIKPLSAGELNVQNAYSEAVTPLRIFMYKQMGRSREAQGNIALFMAMRGLERPAVLEDVPTYILIPAFILNELTVAFRIGIMLFIPFIVIDMVVASALMSMGMIMLPPVMISMPFKLILFILVDELGVVTNQPRPF

SEQ ID NO: 36623 - DNA, 396 bp, Unknown
  Obtained from environmental sample
  misc_feature (1)..(396): n is a, c, g, or t
atgatactggttctggccctttgcgccgccgcggtgtacggcatagtcttttttcttaaacgttcttccaaacaaaccgtttcaaaggaccctttcttaaaaattcttgccacggttaatcttggcgtaaaccgttacgcgcatgttgtttccgttggaagcaaggcgtggcttttgggttcaagcgacggcggcgttaaccttataggcgaagtggaagacaaggaaataattgacgcgatgcttttggaagaatcgaaaagggccgccgaaccgcaggggcgtttccctgattttgtttcaatgctccgcaagcttggcttgcccgcgcagcaaacaggcccttccggcgcggaagatatacgcaaacgccgcgaaaggcttaaggggttgtga

SEQ ID NO: 36624 - protein, 131 aa, Unknown
  Obtained from environmental sample
  SIGNAL (1)...(23)
  misc_feature (1)..(131): Xaa is any amino acid
MILVLALCAAAVYGIVFFLKRSSKQTVSKDPFLKILATVNLGVNRYAHVVSVGSKAWLLGSSDGGVNLIGEVEDKEIIDAMLLEESKRAAEPQGRFPDFVSMLRKLGLPAQQTGPSGAEDIRKRRERLKGL

SEQ ID NO: 36625 - DNA, 738 bp, Unknown
  Obtained from environmental sample
  misc_feature (1)..(738): n is a, c, g, or t
atgcgctctgtggcgcaggcaatcgaaaatacggtggcggacaaaaacaaggtctgcattgtttcaggcattggctgttcctcgagggcggcgggttacatgaattttaacaccctgcacacaactcacgggcgcgcccttgccttcgcgacggggataaagctggcaaaccctgagcttacggttatcgtaataaccggcgacggagacgcgaccgcgattgggggaaaccattttatccacgccgcccggagaaacataggcataacaacgattgtattcaacaacagtatatacggcatgacaggcgggcagtattctccgctgacaccgacaaatgactttgcgactaccgccccctacggcaacattgaccgccccttcgatataatcaaactggcggatgccgcaggcgctacttatgtggcgaggatcaccacctaccatgtgaaagaggcggtaaagctgattgaaaaggggctcgcgaacaaaggcttttcggtcatcgaaggcatcagcgcgtgtcccacctattacggcagaaagaacaaaaaaggcgatgccatggagatcatgaagtgggtcaaagaccacgctgttgatgtgaagaaagccagggcggaaaatatgacaaccgaaaatcttcgcggaaagcttatcattggtgagttcaagaacaccgttgaaagcgaatatacctacgaataccaaaaaattgtcgacaggatcaggggttaa

SEQ ID NO: 36626 - protein, 245 aa, Unknown
  Obtained from environmental sample
  DOMAIN (23)...(171): Thiamine pyrophosphate enzyme, C-terminal TPP binding domain
  misc_feature (1)..(245): Xaa is any amino acid
MRSVAQAIENTVADKNKVCIVSGIGCSSRAAGYMNFNTLHTTHGRALAFATGIKLANPELTVIVITGDGDATAIGGNHFIHAARRNIGITTIVFNNSIYGMTGGQYSPLTPTNDFATTAPYGNIDRPFDIIKLADAAGATYVARITTYHVKEAVKLIEKGLANKGFSVIEGISACPTYYGRKNKKGDAMEIMKWVKDHAVDVKKARAENMTTENLRGKLIIGEFKNTVESEYTYEYQKIVDRIRG

SEQ ID NO: 36627 - DNA, 603 bp, Unknown
  Obtained from environmental sample
  misc_feature (1)..(603): n is a, c, g, or t
atgcagacagaacttagattgagcggttcaggcgggcaagggctgatattggcgggcgtaattctggccgaatccgccctgctcgacggcaagcaggctatacagtcccagtcatacggcccggaagcaaggggcggttcaagcaaggccgaggtcataataagcgacagcgagattgattttgtgaaggttcagaaatgcgatatgctcctttgcctgacgcaggacgcctacgacaagtacggaaaagactttacccatgtccttgtcctagatgaaaggatagaaataaaataccctgagcctgaaaaagtttataggctccccatttttgacaccgcttcggaaaaactgcgncagcccatggttgccaacataattgcccttggcgcgattaacggctgctcacattgtcaccangaatcgcttttaaaggcaataatgatcgtgtgccaagggaacagaggaattgatagccgggcctggatcgggatcaaactgcggaagaagctctctgtttcaaccagaaattccgccgcttcccgtctgccgcttaaaaccacccaaatcccgttttcctgcctcgccggaggaaaaaaataa

SEQ ID NO: 36628 - protein, 200 aa, Unknown
  Obtained from environmental sample
  DOMAIN (11)...(166): Pyruvate ferredoxin/flavodoxin oxidoreductase
  misc_feature (1)..(200): Xaa is any amino acid
MQTELRLSGSGGQGLILAGVILAESALLDGKQAIQSQSYGPEARGGSSKAEVIISDSEIDFVKVQKCDMLLCLTQDAYDKYGKDFTHVLVLDERIEIKYPEPEKVYRLPIFDTASEKLRQPMVANIIALGAINGCSHCHXESLLKAIMIVCQGNRGIDSRAWIGIKLRKKLSVSTRNSAASRLPLKTTQIPFSCLAGGKK

SEQ ID NO: 36629 - DNA, 1230 bp, Unknown
  Obtained from environmental sample
  misc_feature (1)..(1230): n is a, c, g, or t
atgaataaccccgcggatacattcaccgctctcggcatcgagtcgttactaacgcaaaaattaaaagaacgcgcaatagaaaagccaaccgccgttcaaagccttgtcatcccgcgcctgcttgcgaaaaaagacacggttttccgctcggcgaccggaaccggcaaaacattcgcctacttgttaccggcattacagcgcgttgcttccgaaggcggcagtttgttaatttgcgcccccactctggaactttgctcccagataaaagcggaagttgactttttaacgccaagccttcccgcttcctgcagaaatacggcgctgcttatcggttccgtcaaaatcgaaaaacaaattgaaaatttaagaagagccaaacccgttataatcgttggaaatccgggcagactgcttgttctatcaaaaatgagaaagttaaaattaaacaacctgcgctttttaattttagatgaagccgaccgccttaccgcgcccgagtgccttgaagagacagaagaatttctcgctttcatcgaaaaagtaacaatgcgttcacccgcccgcgaaccggcggatcaaagccgcctgtgcgtcgcggcgtgttccgctacagttggcaaaaaaacaagcatgcagttaggcgctctttttgaatccgccgaagttgtcgaatgcgccgaccatgaaatcttgcgcgagcgtatcgagcactgggcgctgttcagcgaaaagcgccgtaaagctcaaacactgcgttccctcttgtccgcgcttcagggcaaatcaaaaaaagcgcgagtcaaggcgctggtttttacaagccgcggcgatgaagcggacttagtcctctcgcgcctcctgtaccaccatgtatccgccgcgggacttttcggcaaagtaaataaaaagccgcaaacaggcacagagcgcaaagaggcgctcgactctttccgcgagggcagggtgcaagtgctggtctccacagacctagccgcccgcggcctggacattcccgacattacccatgttatcgcgttagatgtccccgccgacagcgaagtctacatccaccgctgcggccgcaccggacgcgccggaaaaaaaggcataatggtaacaataggcgacgaaacccaaatgcgcctcctagcctcattggaaaaaaagctaaaaatcagagtaatgccgaaggaattgtatgaaggcaaggtttgtatcccggaaatctag

SEQ ID NO: 36630 - protein, 409 aa, Unknown
  Obtained from environmental sample
  DOMAIN (26)...(180): Type III restriction enzyme, res subunit
  misc_feature (1)..(409): Xaa is any amino acid
MNNPADTFTALGIESLLTQKLKERAIEKPTAVQSLVIPRLLAKKDTVFRSATGTGKTFAYLLPALQRVASEGGSLLICAPTLELCSQIKAEVDFLTPSLPASCRNTALLIGSVKIEKQIENLRRAKPVIIVGNPGRLLVLSKMRKLKLNNLRFLILDEADRLTAPECLEETEEFLAFIEKVTMRSPAREPADQSRLCVAACSATVGKKTSMQLGALFESAEVVECADHEILRERIEHWALFSEKRRKAQTLRSLLSALQGKSKKARVKALVFTSRGDEADLVLSRLLYHHVSAAGLFGKVNKKPQTGTERKEALDSFREGRVQVLVSTDLAARGLDIPDITHVIALDVPADSEVYIHRCGRTGRAGKKGIMVTIGDETQMRLLASLEKKLKIRVMPKELYEGKVCIPEI

SEQ ID NO: 36631 - DNA, 747 bp, Unknown
  Obtained from environmental sample
  misc_feature (1)..(747): n is a, c, g, or t
ttgcgccccgaatccctcaaaaatcccgcggaagtttcttttgtggggcggccttttccgctgaatgaagcggaaagtcatttcgagcgtttgagccgggccggttttacctttttgcgcttcattatcacctgggaagccctggaacataacgggccgggtcagtatgacgaggcatttttggcttatttgcggaaaattctcctgattgccgaggaaaaaggcatttctgttttccttgatccccaccaggacgtatggagcaggtggacaggcggcgacggcgcgccagcctggactttggaaaaactgggcatagaccttgaaaagctggacacgaccggagccgcccttacccggcagcgctacgccgagtttcacgggggcgcggcttttccccgcatggcctggcccggcaattacaaccgctacgcggcggcgactatgttcagccttttttttggcggaaaaatcttcgcccccggtttgaacatagacggtgaaaatgtccaggactggctgcagagccgctacattgccgccttccgccactgttaccgccgcctgaaaaactgcgccgccattgccggctggggcgttatgaacgaaccgcacaacggctttatcgggcatggcgatctgacccaggccgaaaatcccgtactgccggcgggaccgcgccccagtccctgggatgccatacgcgccgctttccggttacgcgacaacagtgcccgtatacaatga

SEQ ID NO: 36632 - protein, 248 aa, Unknown
  Obtained from environmental sample
  misc_feature (1)..(248): Xaa is any amino acid
MRPESLKNPAEVSFVGRPFPLNEAESHFERLSRAGFTFLRFIITWEALEHNGPGQYDEAFLAYLRKILLIAEEKGISVFLDPHQDVWSRWTGGDGAPAWTLEKLGIDLEKLDTTGAALTRQRYAEFHGGAAFPRMAWPGNYNRYAAATMFSLFFGGKIFAPGLNIDGENVQDWLQSRYIAAFRHCYRRLKNCAAIAGWGVMNEPHNGFIGHGDLTQAENPVLPAGPRPSPWDAIRAAFRLRDNSARIQ

SEQ ID NO: 36633 - DNA, 696 bp, Unknown
  Obtained from environmental sample
  misc_feature (1)..(696): n is a, c, g, or t
atggaacagcaaaacattagcgtagaatccgcggcccagaaactggagcagatgaaggagcaagttgccaaagcctttatcggccaaaagcagcttgtggaccacgccctgatcaccctaatcgcaggcgggcaccttctggttgagggcgttcccggcctgggcaagacactcctggtccgcgcccttgccagggcaattggcggggattcaaaacgggtccagtttacgccggaccttatgcccagcgacatcaccggtaatatcatgcttgatcccgcaacgggaaaatttgctactcgtaagggcccagcctttaccaatctgtttattgccgacgagatcaaccgcgccccggcaaaaacccaggccgcccttttcgaggccatgcaggaattccaggtaagccttgacggcgaaagccatcccctgcctgccccgtttatggttctggcaaccgaaaatccctttgagcatgagggaacctatcccctgcccgatgcccagaaggaccgttttttaatgaagatcatcgcggcatacccaaacagggatgaggagaaaaccatggtaacgcaggtgcttgccggggacacgggcgcgcagctttcggtcgcggctgtaaacaccgtgcttgataccgatacattcatcgccctgaaaaattgcgcggcttcccctagggtggatccctga

SEQ ID NO: 36634 - protein, 231 aa, Unknown
  Obtained from environmental sample
  DOMAIN (45)...(216): ATPase family associated with various cellular activities (AAA)
  misc_feature (1)..(231): Xaa is any amino acid
MEQQNISVESAAQKLEQMKEQVAKAFIGQKQLVDHALITLIAGGHLLVEGVPGLGKTLLVRALARAIGGDSKRVQFTPDLMPSDITGNIMLDPATGKFATRKGPAFTNLFIADEINRAPAKTQAALFEAMQEFQVSLDGESHPLPAPFMVLATENPFEHEGTYPLPDAQKDRFLMKIIAAYPNRDEEKTMVTQVLAGDTGAQLSVAAVNTVLDTDTFIALKNCAASPRVDP

SEQ ID NO: 36635 - DNA, 810 bp, Unknown
  Obtained from environmental sample
  misc_feature (1)..(810): n is a, c, g, or t
atggcactgatacttaaagaatctttaatttttgaacgctccgtgcctggcaaggtgggaatggacttgcccaaactggacgtgccagaggctgctgatactcgccccgcccacttaaaacggcaagcgttcggcgccctgcccgaagtcagtgaggttgacgtggtgcgccacttcactaggctgtctaggtggaatttcggcgtggatgacgggctttatccgctgggcagttgcacgatgaaacacaacccgcgccttgccgaaaaggtggcggccctgccagggttcgccaatagccatccaatggccccaaccacgcacgtgcagggcaatttggctctgatatggacgctgcaagaatggctgaaagaaataactggcctcgccgcagtgacgctgcacccagcggctggagcgcatggcgagttgacgggcgtaatgctgatacgcgcaagccatattgcaaagggagcaaagcgcagcatcattttgataccagatagcgcacatgggacaaaccccgccacagctgcaatggctggctatacgtgcgtggaggtaccaagccatgcggatggcaccatctcttttgaagatgtgatagacgcatccacgggaaaaaccaaaaaaggactattgagcctgatcaaagagcatggcagcgaaattgcggggatgatgataaccaaccccaacacagtgggcatctttgaatatcggatagccgaaatagccaagctgctgcacgaaattggcgcactgctgtacatggacggggccaacatgaacgccctcgttggcgggtag

SEQ ID NO: 36636 - protein, 269 aa, Unknown
  Obtained from environmental sample
  misc_feature (1)..(269): Xaa is any amino acid
MALILKESLIFERSVPGKVGMDLPKLDVPEAADTRPAHLKRQAFGALPEVSEVDVVRHFTRLSRWNFGVDDGLYPLGSCTMKHNPRLAEKVAALPGFANSHPMAPTTHVQGNLALIWTLQEWLKEITGLAAVTLHPAAGAHGELTGVMLIRASHIAKGAKRSIILIPDSAHGTNPATAAMAGYTCVEVPSHADGTISFEDVIDASTGKTKKGLLSLIKEHGSEIAGMMITNPNTVGIFEYRIAEIAKLLHEIGALLYMDGANMNALVGG

SEQ ID NO: 36637 - DNA, 1203 bp, Unknown
  Obtained from environmental sample
  misc_feature (1)..(1203): n is a, c, g, or t
ttgaaccgcaagcccggcagggcacgatacactccggaatatatcgaccgcatgcgcgaagagggcaccccagtggagattccacagaccgatcgaacggacgggcttgaggaacagatcggcgaagcgttggacagcctgaaaacatacggcctgttttatttcctacgggagatcggcgagaagataaagatcatcaggatactccaaaaggcgttaccggcatactgggaagaggtatggatgctgggtgagtaccttataggcggagacaagccgcttatgtatatggaagactggatagaggaacatgaaagctatccggtgggaacgatgaactcgcaacggctgagcgagctgctcggcgcatttggtcagaaggaacggaatgattttttcaaggcgtggtgcgcggcgaacatcagcgacgaatatatggctgtggacattacctcaatatcgtcatattcgcgcctgataccggagtgcgaacgtgggtataaccgtgacggggaaaatctggagcaaatcaacttctgtttgctattcggggagcggactggattgccggtgtatcaggctgtgtattcgggaagcataggggatgcggcaaccctgaaggcgacgctggcggaagtagaagcggtcagcggtggaaagcggctggttttagtggctgaccaggggttttacagcgtaaaaaacgtaaatatgatgctggaacgatataaagggagcgagtttctgatagcggtaccgttcgcgaacaaatggactatggagttgatcaggaaggaacgggacggtatagaccggataaccaacttgatacatacctccggttctccaagccgtggggtaaggcgggaaattgatttcgccggaacgccgttgaccgcccatgttctgtacgaccccgagcgggcgctgggcgaacgcaatgaccggtacaactatgtatcctggcttacgggacatgtggaagccggcaaatggacagtcgcataccgcaaggatatagataactatttgatggcaagcaaagacagggtacagaccgtcagtgctgagatcaaggaggatgtgcttaaccgcgagcttgacacggccggattgttgttatgcttgggaacgggaaccttactacgcaacaggcgcataaatattcagcaaaaaaggtgtggttcaaaaaagcgtttatga

SEQ ID NO: 36638 - protein, 400 aa, Unknown
  Obtained from environmental sample
  misc_feature (1)..(400): Xaa is any amino acid
MNRKPGRARYTPEYIDRMREEGTPVEIPQTDRTDGLEEQIGEALDSLKTYGLFYFLREIGEKIKIIRILQKALPAYWEEVWMLGEYLIGGDKPLMYMEDWIEEHESYPVGTMNSQRLSELLGAFGQKERNDFFKAWCAANISDEYMAVDITSISSYSRLIPECERGYNRDGENLEQINFCLLFGERTGLPVYQAVYSGSIGDAATLKATLAEVEAVSGGKRLVLVADQGFYSVKNVNMMLERYKGSEFLIAVPFANKWTMELIRKERDGIDRITNLIHTSGSPSRGVRREIDFAGTPLTAHVLYDPERALGERNDRYNYVSWLTGHVEAGKWTVAYRKDIDNYLMASKDRVQTVSAEIKEDVLNRELDTAGLLLCLGTGTLLRNRRINIQQKRCGSKKRL

SEQ ID NO: 36639 - DNA, 360 bp, Unknown
  Obtained from environmental sample
  misc_feature (1)..(360): n is a, c, g, or t
atggtacttgaaagggtaaagagggtcatatcggcaggccttggagaattgccgatccaggagaaaggggcgacgttcaagcccgccgggacgaagcgcgagaccaaggccggcgaggtgccggaaaacaccggctacaccgaaagccagacgttcgcgtcgctgaagctgaagctcaacgcgacgggcaagctgggcgtggaagagcttagcaacatgggggaggacaccctcacgatcttcaccaccggcggcaagcagtacatgatgcccaacgcctgggtcgtggagcccggcgagctgggcgacgccgaaatggacatcgagtacaactcggcaaccagcccgaggctggcgtag

SEQ ID NO: 36640 - protein, 119 aa, Unknown
  Obtained from environmental sample
  misc_feature (1)..(119): Xaa is any amino acid
MVLERVKRVISAGLGELPIQEKGATFKPAGTKRETKAGEVPENTGYTESQTFASLKLKLNATGKLGVEELSNMGEDTLTIFTTGGKQYMMPNAWVVEPGELGDAEMDIEYNSATSPRLA

SEQ ID NO: 36641 - DNA, 582 bp, Unknown
  Obtained from environmental sample
  misc_feature (1)..(582): n is a, c, g, or t
atgaaaaaaattcaagtcaggttaattaaatctttagttaacaagacattttttgttttttcatgcgtcctttttctgattattaccctgtcagctattgtcgcgtatacaatttccgctcatcaaattaacctttcttttattaaacaacagctctccatagcttccgaaacaatgcgtctgcgtctggcttcgacggtaaacagcgaacttgcccttgtattaaaaatggcggatactcccgtaataatacagcactttatgaatcctcatgatccttatcttagatctctggcttataccgaattggaactttataaggaacactttgaaaataaaactgttttttgggtcaatgatgttgacagaatattttactcgacgggaaacgagccgtacgttgtcaatcccgacgatccggcgtcttattggtataatttaacgctgtacgaaacagaaaaatttaattttaacattaattacaatcccgatttgcatcaaatcaacctttgggtaaatgtccctgtattttccgacgcgcgcgaagttaaaaagcctatagggatgctggaatcggcataa

SEQ ID NO: 36642 - protein, 193 aa, Unknown
  Obtained from environmental sample
  misc_feature (1)..(193): Xaa is any amino acid
MKKIQVRLIKSLVNKTFFVFSCVLFLIITLSAIVAYTISAHQINLSFIKQQLSIASETMRLRLASTVNSELALVLKMADTPVIIQHFMNPHDPYLRSLAYTELELYKEHFENKTVFWVNDVDRIFYSTGNEPYVVNPDDPASYWYNLTLYETEKFNFNINYNPDLHQINLWVNVPVFSDAREVKKPIGMLESA

SEQ ID NO: 36643 - DNA, 519 bp, Unknown
  Obtained from environmental sample
  misc_feature (1)..(519): n is a, c, g, or t
ttggcggaatccgaagccgaacaggcggaatataataggaaggcagataagcgtcttgactatttgtctatggactccggcgtccagggacagcggttgggtcaacttgtggagtttattgtcgttcccgggatacgccacgcgctgaactctttgggacatcatttcaaatacgcatccgccaacaaaaagatccatgccatcatcaaaggcgaaaaaataagggttgcggaggtggatttgttactgcacaacggttcggaggcaatggctgtggagataaaaacgagcctatccccggaagacgtaaacaagcatctggacagattggttaaactgcgtaaatacgaaaaagtggctaatattcaggacaaaaatctctacggcgcggttgtcggagtgttcatagacgacaacgcccgaagattcgcgctgaaaaatggcctatacgtattggaaataattgaagaggaaagctcgctaaaaacagataaaccgccgaaatgccgggtgtggtag

SEQ ID NO: 36644 - protein, 172 aa, Unknown
  Obtained from environmental sample
  misc_feature (1)..(172): Xaa is any amino acid
MAESEAEQAEYNRKADKRLDYLSMDSGVQGQRLGQLVEFIVVPGIRHALNSLGHHFKYASANKKIHAIIKGEKIRVAEVDLLLHNGSEAMAVEIKTSLSPEDVNKHLDRLVKLRKYEKVANIQDKNLYGAVVGVFIDDNARRFALKNGLYVLEIIEEESSLKTDKPPKCRVW

SEQ ID NO: 36645 - DNA, 759 bp, Unknown
  Obtained from environmental sample
  misc_feature (1)..(759): n is a, c, g, or t
atgaaacntatttcatggtataaatcactgagccaatcaaaatatcgttgcgagtacggctattttttgattgacggaaaacgatccgtcgaccatgttctgacgtatcaccgtcaaagcgtacgcgaattactntgcgttgaagatgccgcccaatcgtatcaatcgcaatcatccgacgtcccgattcggataatctccgaagcaaacatgaatacaatcagcccatcccgcactccgcaaggcgtatgcgccctcgtgcggataccggacggcgtttacacgtcaaaaattcccgaagcgtcaaccgcaatcaacagcaaaattctcctactggagcacatacaagaccccggcaacgtaggaaccctaatccgtaccgccgccgccttcggcgttgacggcgtgataatgagcggtcaatgcgccgacccgttctcccccaaagccatacagtcaaccgccggttcgctgctgtcgctgtggataagacgtagtaacgactatctgcggatgattgccgagttgaaaaaccgcggttgcaaactgatagccgcagatttgcgcggcgacgaattacagattcaagaaagttgcgccggcccgcggatactggcgctcggcagcgagggggccggtcttagcggcgacgttatcggcatgagcgattacaaggtgcgtatcccgatagcggaatccggagcggagtctctgaacgtagccgtggcgggggggatattgatgtttgtttggcgttga

SEQ ID NO: 36646 - protein, 252 aa, Unknown
  Obtained from environmental sample
  DOMAIN (23)...(93): RNA 2'-O ribose methyltransferase substrate binding
  misc_feature (1)..(252): Xaa is any amino acid
MKXISWYKSLSQSKYRCEYGYFLIDGKRSVDHVLTYHRQSVRELLCVEDAAQSYQSQSSDVPIRIISEANMNTISPSRTPQGVCALVRIPDGVYTSKIPEASTAINSKILLLEHIQDPGNVGTLIRTAAAFGVDGVIMSGQCADPFSPKAIQSTAGSLLSLWIRRSNDYLRMIAELKNRGCKLIAADLRGDELQIQESCAGPRILALGSEGAGLSGDVIGMSDYKVRIPIAESGAESLNVAVAGGILMFVWR

SEQ ID NO: 36647 - DNA, 711 bp, Unknown
  Obtained from environmental sample
  misc_feature (1)..(711): n is a, c, g, or t
atggattattttgtaaacaaaatatccacaacaaggaaaaaaacccacggagatgaaaccgccgatattatcggagaacgcgccgcgcatgaattgcggtcaggccagattgtgaacatcggcatcggcattcccgaaatggtaggcatttacgcgtccggactcggcatactaaaagagattgtcaatactgtggaagcaggcggtgtgggagggcttcccgcgcccggcgtggcgtttggcgcaactatcggcgcggacatgatctgcgatatggcgacgcagtttgatttttacgacggcggcggactggacatctgctttctcgggggtcttgaaaccgacgcgcagggcaatgtgaacgcccacaaactcgagggcagttacgccggaatcggaggattcgccaatattacatactccgccaaaacgattgtattctgcatgagttttaataccaaagggcttatcaccgcgaaagaaaacgacaaagtaataatcaagcatgaaggcgcggtgcctaaattcaaaaaacaaatttccgcgataagttttgcggcaaaaaacgctatcaagcggggacagagggtgttatacgtcaccgagcgctgcgtgtttgaactgaccgggaaaggcttgacgcttaaagaagtataccccggtattgacgaggctcgccaaattcgcggtatgctggactatcagtcttaa

SEQ ID NO: 36648 - protein, 236 aa, Unknown
  Obtained from environmental sample
  DOMAIN (21)...(230): Coenzyme A transferase
  misc_feature (1)..(236): Xaa is any amino acid
MDYFVNKISTTRKKTHGDETADIIGERAAHELRSGQIVNIGIGIPEMVGIYASGLGILKEIVNTVEAGGVGGLPAPGVAFGATIGADMICDMATQFDFYDGGGLDICFLGGLETDAQGNVNAHKLEGSYAGIGGFANITYSAKTIVFCMSFNTKGLITAKENDKVIIKHEGAVPKFKKQISAISFAAKNAIKRGQRVLYVTERCVFELTGKGLTLKEVYPGIDEARQIRGMLDYQS

SEQ ID NO: 36649 - DNA, 309 bp, Unknown
  Obtained from environmental sample
  misc_feature (1)..(309): n is a, c, g, or t
gtgatacggtacggcggcgaggaatttgtgatcttattgccaaataccggcaaggcgggcgcgggaataacggcggaaaggcttcttgaaagcgtaagagcccttgaaataccccatataaacagcgacatcgctgattatgtaacggtgtcgattggagcgactacagtcaaagtgaagcacaaccatcaatacatggattacatagaacgcgccgatgaagcgctgtatgtgtctaaagaaaccgggcgtaacaagtacacccatctaaaataccatgatcaggcaggaggcggcgatgaagtttaa

SEQ ID NO: 36650 - protein, 102 aa, Unknown
  Obtained from environmental sample
  DOMAIN (2)...(86): GGDEF domain
  misc_feature (1)..(102): Xaa is any amino acid
MIRYGGEEFVILLPNTGKAGAGITAERLLESVRALEIPHINSDIADYVTVSIGATTVKVKHNHQYMDYIERADEALYVSKETGRNKYTHLKYHDQAGGGDEV

SEQ ID NO: 36651 - DNA, 579 bp, Unknown
  Obtained from environmental sample
  misc_feature (1)..(579): n is a, c, g, or t
atgatcaggcaggaggcggcgatgaagtttaatattctggaatacagcaaactgctggcggaatataatatcagtatcatctacagcggtcctttatgggcggaaggaattgacggtatggccgagtttttacaaaaaaggcttgatatggacgatatgcccctaaacgcatcgcaggctgttttttcggtgtttgtggagcagatgaacaatatgctgatgtattcggcagagaaagagaaacatgaacgccctgaaacaaagcctgaggaaacatccagcggcgtttttgtcctgggcagttgcgataaatcgtattatgtacagacaggaaacgtaataaaaaacagcagcgttgagcttttgaaagagcggatagatttccttaatacgctggacaaaaaagagttgcggcaattttacaaggaacagatgaaagccgaaaatgacaatcctgaaagcaggggagcggggctcggtcttacggaaatagcgagacgggcgacttcaaaaatcgaatatgagtttattccctatagcgaaggtttgtcatattttacaatgtacgtaacagtatag

SEQ ID NO: 36652 - protein, 192 aa, Unknown
  Obtained from environmental sample
  misc_feature (1)..(192): Xaa is any amino acid
MIRQEAAMKFNILEYSKLLAEYNISIIYSGPLWAEGIDGMAEFLQKRLDMDDMPLNASQAVFSVFVEQMNNMLMYSAEKEKHERPETKPEETSSGVFVLGSCDKSYYVQTGNVIKNSSVELLKERIDFLNTLDKKELRQFYKEQMKAENDNPESRGAGLGLTEIARRATSKIEYEFIPYSEGLSYFTMYVTV

SEQ ID NO: 36653 - DNA, 369 bp, Unknown
  Obtained from environmental sample
  misc_feature (1)..(369): n is a, c, g, or t
ttggaaaaggaaaaaacaacttcaactccctatatattgattgatgaagaaaagggttatatgaggttcgagggccggagttttcatganaacgtcgtggaattttacaaggacgtaaacaactggctggccgcttaccttgagaaagatttcggctcttttacctttgactttgagatgaactacttcaacagttcaacctcaaaattgctgcataacatgttgacaaaaatggatgagtacacctccgatgaaaaaaaggtgatcgtaaattggataaccaccgaggacaacgatattattattgagtgcggcgaagattttcaggaagatttcaccaatctgaaatttaatatgattatcaaatag

SEQ ID NO: 36654 - protein, 122 aa, Unknown
  Obtained from environmental sample
  misc_feature (1)..(122): Xaa is any amino acid
MEKEKTTSTPYILIDEEKGYMRFEGRSFHXNVVEFYKDVNNWLAAYLEKDFGSFTFDFEMNYFNSSTSKLLHNMLTKMDEYTSDEKKVIVNWITTEDNDIIIECGEDFQEDFTNLKFNMIIK

SEQ ID NO: 36655 - DNA, 408 bp, Unknown
  Obtained from environmental sample
  misc_feature (1)..(408): n is a, c, g, or t
ttgccggttatcatccgtcagactgaggaggctataaagtcggtgccggatatgtatagggagggcagctacgggcttggggcgtctaagctgcggacggtttttcggatagttttgccgtcggcgatgccggggattctctcggcggtgattttgagtatgggcaggattatcggtgagaccgcggcgctgatattcacgctgggttccgtggcgcagtttccggggagtttgcttgacagcagccgctctttggcggtgcacatgtacatatcgacgcgtgacggcggtgcggcgggtcgcgaggtggcgttctttaccggcgcggtgctgatcgcggtcatattgcttatgaacataggcgcatcctatttgggaggaaaggttgggaaagattttgaaaattaa

SEQ ID NO: 36656 - protein, 135 aa, Unknown
  Obtained from environmental sample
  misc_feature (1)..(135): Xaa is any amino acid
MPVIIRQTEEAIKSVPDMYREGSYGLGASKLRTVFRIVLPSAMPGILSAVILSMGRIIGETAALIFTLGSVAQFPGSLLDSSRSLAVHMYISTRDGGAAGREVAFFTGAVLIAVILLMNIGASYLGGKVGKDFEN

SEQ ID NO: 36657 - DNA, 549 bp, Unknown
  Obtained from environmental sample
  misc_feature (1)..(549): n is a, c, g, or t
atgacctccggcttcacggcgagcgcccgcgctatgcacaaacgttgctgctgcccgccccgatatggcgagcgccgacttcttcagcctgtctttaagctcatcccaaatagccgcgttcttcaggctctcttccacaatctggtcaagctcgcgccgtttctttatgccgtgcgtccgcggaccgtacgctatattgtcatacacgctcatgggaaacgggttcggcttctgaaacaccatgcccatccgcttccgcaaaacgttcacgttcatcttcttgccgtaaatgtcctccccgtcaaagagtatcttgcccgtaatgcggcaactctcgacgaggtcgttcatacggttgagcgacttaagcagggtggacttcccgcacccggacggcccgataaacgccgtgatctcattctccgccacgtcaaggttgacgttgatgagagcctgaaaagcgtcgtagtagagattcatatcctcaactttaattttcaaaatctttcccaacctttcctcccaaataggatgcgcctatgttcataa

SEQ ID NO: 36658 - protein, 182 aa, Unknown
  Obtained from environmental sample
  misc_feature (1)..(182): Xaa is any amino acid
MTSGFTASARAMHKRCCCPPRYGERRLLQPVFKLIPNSRVLQALFHNLVKLAPFLYAVRPRTVRYIVIHAHGKRVRLLKHHAHPLPQNVHVHLLAVNVLPVKEYLARNAATLDEVVHTVERLKQGGLPAPGRPDKRRDLILRHVKVDVDESLKSVVVEIHILNFNFQNLSQPFLPNRMRLCS

SEQ ID NO: 36659 - DNA, 444 bp, Unknown
  Obtained from environmental sample
  misc_feature (1)..(444): n is a, c, g, or t
atgctccatgaaaaggggccgggcattgtactggtgacaagctaccatgacggtaaggcgggcggcgggcctggcgatgaaagaagaatagggatgctggcttcggacaaaagcggggtttattcgataagcaccccggaattgcccataggagccggcatggcgggatcgggcgatattaccgcgtcggtgttcctgtcccgctaccttgaaaccggcgatgtcaaaaaaaccctggaactatgtaccgcgtccatatatggcgtcatagaagcaagctggcagatccggaatggtaaagttttctctcaattgagagataagttttctcccgattcggaaaaaacttatatacccggtccgggactgatggaattaaggataatacaggctcaaaatgagcttgtatcgcctacacattcttttgaggcgattaggctttag

SEQ ID NO: 36660 - protein, 147 aa, Unknown
  Obtained from environmental sample
  misc_feature (1)..(147): Xaa is any amino acid
MLHEKGPGIVLVTSYHDGKAGGGPGDERRIGMLASDKSGVYSISTPELPIGAGMAGSGDITASVFLSRYLETGDVKKTLELCTASIYGVIEASWQIRNGKVFSQLRDKFSPDSEKTYIPGPGLMELRIIQAQNELVSPTHSFEAIRL

SEQ ID NO: 36661 - DNA, 933 bp, Unknown
  Obtained from environmental sample
  misc_feature (1)..(933): n is a, c, g, or t
ttgcaaatgttcaaaacaaaacggagatgggccatgcaaagcccttatgagcgtttttttgattttatcgcccccgaagccgaccgcttcgccgtgcttgtggatcatatacaaaagctgggccttaattccctggtcatctccatagaggggaaccgccatttctttttatttcccaaaagaataaatctgaaactgtcccccggcgacgccttccctttcaatggggaaagccctattgtgctgaccgcgcattatgaccgggttcccggaagcccgggggcaaacgacaacagcgccgcggttttccaactgataaagacagccctaaaacttgacgagatgtatcttgaccgctggataattatttttaccgacaaggaagaactgcagagtggcgaggggtttaagcaacagggctcctatggcctggcaaaaaagctccgccgcttggggcttctaaacgcccaaattttcaattttgacgcctgcggaaccggcgaagtttttttgttctctggcacaaccgactatcttctggacaaaaacgaaaagcccggttttcgccgtgttatccaaagggtaaaaaaactaaggcaaaaagttcttgacaccgcccgcaaactcagcctcagccacgtgctgtccgttccgacgccattctccgacgacgccggttttttacaagggggacttccggcccaaaccatcacaatgctccccgaaaatgaagccagccatttcgcgtccctgctccgcaaccaccccgaatttgtcgatatgctcatttccggttcttttaaagatgacgccgaccgccaaaatctccccgaaacatggcgtgccattaacggcccggaagacacccatatgcgcctgacgcctgaacactatgaccgcattatccgctttgccgtggagctggttaaataa

SEQ ID NO: 36662 - protein, 310 aa, Unknown
  Obtained from environmental sample
  DOMAIN (78)...(252): Peptidase family M28
  misc_feature (1)..(310): Xaa is any amino acid
MQMFKTKRRWAMQSPYERFFDFIAPEADRFAVLVDHIQKLGLNSLVISIEGNRHFFLFPKRINLKLSPGDAFPFNGESPIVLTAHYDRVPGSPGANDNSAAVFQLIKTALKLDEMYLDRWIIIFTDKEELQSGEGFKQQGSYGLAKKLRRLGLLNAQIFNFDACGTGEVFLFSGTTDYLLDKNEKPGFRRVIQRVKKLRQKVLDTARKLSLSHVLSVPTPFSDDAGFLQGGLPAQTITMLPENEASHFASLLRNHPEFVDMLISGSFKDDADRQNLPETWRAINGPEDTHMRLTPEHYDRIIRFAVELVK

SEQ ID NO: 36663 - DNA, 456 bp, Unknown
  Obtained from environmental sample
  misc_feature (1)..(456): n is a, c, g, or t
ttgaacaccaggaaattaattctgagcctggccgtaaactggcccgccaaggtgctttcggtagccctcgcgttgatcctgtttgtatttcacgagatgagcacactgacgacgcgcacgattatagtacccctgacaattgaaacaaattccgcaatgacccccggcagcgcttatcccagaaatgtaaggataaggctgaggggcgagagcgacggcgttaagtcaatccttgacagcgacattgaagcgtatcttgatttaagcatgcatgaatccgaaggccagtaccgcgccccggtgcaaatccgcaaaaaaggaagcgcccttgttccggaacctctggaaatcgcggttaaccccctggaggtttccatcaaccttgacaaacggataaataaaacattcccgcttgcggcaagcatacagggaaacgccgccgccggtttgaactga

SEQ ID NO: 36664 - protein, 151 aa, Unknown
  Obtained from environmental sample
  SIGNAL (1)...(20)
  DOMAIN (43)...(128): YbbR-like protein
  misc_feature (1)..(151): Xaa is any amino acid
MNTRKLILSLAVNWPAKVLSVALALILFVFHEMSTLTTRTIIVPLTIETNSAMTPGSAYPRNVRIRLRGESDGVKSILDSDIEAYLDLSMHESEGQYRAPVQIRKKGSALVPEPLEIAVNPLEVSINLDKRINKTFPLAASIQGNAAAGLN

SEQ ID NO: 36665 - DNA, 834 bp, Unknown
  Obtained from environmental sample
  misc_feature (1)..(834): n is a, c, g, or t
atgatcttaattcaacgaataataaccggttttgatcaaatccgccccattttggatgtcgcgctgctcgccttcctcctgttcaaaggctatgaactgctggcaaaaacacaggcgcttcaactgataaaaggggcggggcttgtcatccttatatacggcatagctttcctttttaaactgtccaccctgctgtgggtgctcaatatactggcccccggaatgttcattgcggtcgccattgtcttccagcccgaattgcgaaaaatctttatgcgcctcggtcagggggattttttcaggccggacgcaaagccgaaccttggccagcttgaggcggtggtgaacgcggcggagattctctcgcagcggcgcagggggatgctggtagtattcccgcgcaagacaaatataaggaacattatcgagacaggaaccaggataaacgccgaaatatcctcaagcctgattatcgccatattccagtttgacggcccgcttcacgacggcgcgatggtgatacagaacagcagaatagtcgcggcaagctgcgtcctgccgctttccgaacaacaggatatacagagaagttttggcacacggcaccgcgccagcctgggaatgtccgagcagtcagacgcggttgtgctggttgtttcagaggagacaggagccctgtcactggcctttgactccaaattgttctatgatctttccacaattgaaattaccagaaaactgaacgaactgcttgacaggggaagccgcaaaaccgaggacagggacgggcttgcggcgcctctcctggagcaggggaaaggaagtttcggttga

SEQ ID NO: 36666 - protein, 277 aa, Unknown
  Obtained from environmental sample
  DOMAIN (114)...(235): Domain of unknown function DUF147
  misc_feature (1)..(277): Xaa is any amino acid
MILIQRIITGFDQIRPILDVALLAFLLFKGYELLAKTQALQLIKGAGLVILIYGIAFLFKLSTLLWVLNILAPGMFIAVAIVFQPELRKIFMRLGQGDFFRPDAKPNLGQLEAVVNAAEILSQRRRGMLVVFPRKTNIRNIIETGTRINAEISSSLIIAIFQFDGPLHDGAMVIQNSRIVAASCVLPLSEQQDIQRSFGTRHRASLGMSEQSDAVVLVVSEETGALSLAFDSKLFYDLSTIEITRKLNELLDRGSRKTEDRDGLAAPLLEQGKGSFG

SEQ ID NO: 36667 - DNA, 624 bp, Unknown
  Obtained from environmental sample
  misc_feature (1)..(624): n is a, c, g, or t
ttgtgtatgcggtcgcaatcgggccggaaaagcaaaggcgaaaaggacggaatcatgcgttttaaagagataatgtttatagtaatagtggcgctggtcgcctttccggtactgtatatcgccatgctcttcgccacgggttcgctcagattggtgtacgcgtttaaggaggataagccggacgccaaagtgataaaggttgaggagatcaggcatacggcgcgccgggattcgctggcggcggccaactcaaaggtctttgaggcgttgcagaaggagcgcgccgacctgaagagggagcaggagaggcttgccgagcagtacgcccgacttgagatactgcaagccgagattgagaaggggcgcgagtcgttggtcagcgagcgcgggcagcttgagaagaagatggcggatataccggcggttgaggacgctcgttacaagaagctggccaagatatatcaggccatgaagccgggggaggccgccgcgatcttggagacgattcaggacgcgcaggtcgccgcgatcttagacaggataaacgacaataaacaaaagggaaagatactatcccttcttacaaaggaaaaagccgttcgcgtcaacaagctgataaagtaa

SEQ ID NO: 36668 - protein, 207 aa, Unknown
  Obtained from environmental sample
  misc_feature (1)..(207): Xaa is any amino acid
MCMRSQSGRKSKGEKDGIMRFKEIMFIVIVALVAFPVLYIAMLFATGSLRLVYAFKEDKPDAKVIKVEEIRHTARRDSLAAANSKVFEALQKERADLKREQERLAEQYARLEILQAEIEKGRESLVSERGQLEKKMADIPAVEDARYKKLAKIYQAMKPGEAAAILETIQDAQVAAILDRINDNKQKGKILSLLTKEKAVRVNKLIK

SEQ ID NO: 36669 - DNA, 741 bp, Unknown
  Obtained from environmental sample
  misc_feature (1)..(741): n is a, c, g, or t
gtggaatttttgcgtacttattcccaactccgcgccaaaaccgaacacaccgccgtcggtaaaacgagtcgacgcgttgacgtaaacacaggccgcgtcaaccccgtttcggaactgccgggcggaatgaagatcattggtcagtatcgcttccgaatgttttgtcccgtaacggttgatgtgttcaatcgcctcctggcaggagccgacggttttaatcgcaagaatagcgtcaagaaattccgtactccaatcttcctcgacagcgtctttcagtctcagattaaccaaagcctcatcccttatcgcggccctggattcggcatcacagcggaattcgaccgctccggcaagccgggctacaagccggaacatcaaggggcgaagtgtcccgcgatgcaccagcagggtttccacggcattgcaggcgccgggcttttgcagtttggcgttggctataatttccacggcattatccatattggcgctgggctccacatagatatggcaattaccttcgccggtttcgataaccggaatgcgcgcgttctgaacaacacgttgaatcaaatccctgccgccccggggcagcaccacgtcaatccatcccctggcggcaaggatttcgtctacatcctcatggctgccggacttcgcctgatcggaaagctctaccgcgtcaggaatgccgccaccggactccagccccattttaatcgtggttacaagcgcccggtttga

SEQ ID NO: 36670 - protein, 246 aa, Unknown
  Obtained from environmental sample
  misc_feature (1)..(246): Xaa is any amino acid
MEFLRTYSQLRAKTEHTAVGKTSRRVDVNTGRVNPVSELPGGMKIIGQYRFRMFCPVTVDVFNRLLAGADGFNRKNSVKKFRTPIFLDSVFQSQINQSLIPYRGPGFGITAEFDRSGKPGYKPEHQGAKCPAMHQQGFHGIAGAGLLQFGVGYNFHGIIHIGAGLHIDMAITFAGFDNRNARVLNNTLNQIPAAPGQHHVNPSPGGKDFVYILMAAGLRLIGKLYRVRNAATGLQPHFNRGYKRPV

SEQ ID NO: 36671 - DNA, 678 bp, Unknown
  Obtained from environmental sample
  misc_feature (1)..(678): n is a, c, g, or t
atgactaacgaagagattttccgccatatcgatcacacgctgctgaaggccgtgtcttcctgggcggaaatcgataaaatctgcgccgaggcgatccgtttcaggaccgcctcggtatgcattcctccctcttatgtaaaacccatcagtaacgcttaccgtgatttgaacatctgtacggttattggctttcctctgggttacagcgtaagcgccgccaaacagcgggaagcggaagccgcgcttgccgatggtgccgccgagctggatatggttattaacatcggggacgttaaaaacggcgcttttacacaggtcgaggaagaaatttccgccttaaaaaaaatcgcgggaaaaaacatcctcaaagttatcgtagaaacctgttatctgacgcaggaagaaaaagtccggctttgccaaatcgtaaccaatgctggcgccgactacatcaagacctcaaccggctttggcactgccggggccgcgattgaggacgtgcttttatttaaggaacatatcggccccgacgtaaaaataaaggccgccgggggcgttaaaacccgcgaagaccttgtaaaattcatcgatgctggatgcgaccgcatcgggacaagctccgctattgcgctattgactggcggcggtggcgcaccgactggtgcgtcggcttattag

SEQ ID NO: 36672 - protein, 225 aa, Unknown
  Obtained from environmental sample
  DOMAIN (5)...(214): DeoC/LacD family aldolase
  misc_feature (1)..(225): Xaa is any amino acid
MTNEEIFRHIDHTLLKAVSSWAEIDKICAEAIRFRTASVCIPPSYVKPISNAYRDLNICTVIGFPLGYSVSAAKQREAEAALADGAAELDMVINIGDVKNGAFTQVEEEISALKKIAGKNILKVIVETCYLTQEEKVRLCQIVTNAGADYIKTSTGFGTAGAAIEDVLLFKEHIGPDVKIKAAGGVKTREDLVKFIDAGCDRIGTSSAIALLTGGGGAPTGASAY

SEQ ID NO: 36673 - DNA, 585 bp, Unknown
  Obtained from environmental sample
  misc_feature (1)..(585): n is a, c, g, or t
atggaagaatttataattaatgcccgtgatttatcaaaaacttatatgattagagaagcatccgatgctcccctgtttaagcgattattttccaaaaaaaaataccgtgaagtagaagccctaaaaggagtttcgttgaaaatcaaacagggggaatttgtcggcctcataggcaataatggcgctgggaagtctacgctgattaagcttatgaccggcattttgtacaaaactgccggggaaattgaagtcctggggcgtgacccatttaagcacagactgatgaacaatgcggaaataggcgtggtattcgggcaaagaacccagctcagttgggacctttcggctctggattcatttaacctgtataagcatatttatagcattccggatgatatttttaaggcgaatattgaaaagtttacggaattattcggaatgcatgacgtactgcgtcaaccagtcaggactttaagtttggggcaaaggatgcaatgcgagatagcagcttcttttctccataatcccaaaataatctttcttgacgagccaacaatcggccttgatgtttcaataaggagataa

SEQ ID NO: 36674 - protein, 194 aa, Unknown
  Obtained from environmental sample
  DOMAIN (51)...(194): ABC transporter
  misc_feature (1)..(194): Xaa is any amino acid
MEEFIINARDLSKTYMIREASDAPLFKRLFSKKKYREVEALKGVSLKIKQGEFVGLIGNNGAGKSTLIKLMTGILYKTAGEIEVLGRDPFKHRLMNNAEIGVVFGQRTQLSWDLSALDSFNLYKHIYSIPDDIFKANIEKFTELFGMHDVLRQPVRTLSLGQRMQCEIAASFLHNPKIIFLDEPTIGLDVSIRR

SEQ ID NO: 36675 - DNA, 477 bp, Unknown
  Obtained from environmental sample
  misc_feature (1)..(477): n is a, c, g, or t
atggcaaatgtaggttctatcatccaggtcgtaggtccagtcgtggacgtgggtttcagcgcaacaggcggtacggaatccattccgggaattcttaacgccctggaagtgataacggatcgaagatccgacgggaacaggaaggtcgtgctggaagtcttgcagcatataggggacaaccgtgtccgctgtgttgccatggaggcaacggaaggcctttcacgcggtatggaagtaagcgacacaggtcacgcgattcaggttccggtgggcgacgaaatccttggaaggatgttcaacgttacaggcaaatccatcgatgacaaggggtctttcactgccaaacagtacgcatccattcaccgtagtgcgccggactttgccgatcagaagccggctaccgaagtttttgaaactggcataaaggtcatcgatcttatagccccgatgccaaaggcggcaactcggccgatctga

SEQ ID NO: 36676 - protein, 158 aa, Unknown
  Obtained from environmental sample
  DOMAIN (7)...(83): ATP synthase alpha/beta family, beta-barrel domain
  misc_feature (1)..(158): Xaa is any amino acid
MANVGSIIQVVGPVVDVGFSATGGTESIPGILNALEVITDRRSDGNRKVVLEVLQHIGDNRVRCVAMEATEGLSRGMEVSDTGHAIQVPVGDEILGRMFNVTGKSIDDKGSFTAKQYASIHRSAPDFADQKPATEVFETGIKVIDLIAPMPKAATRPI

SEQ ID NO: 36677 - DNA, 405 bp, Unknown
  Obtained from environmental sample
  misc_feature (1)..(405): n is a, c, g, or t
atggggtattttgacgaagtccatatcgtgtatacccatatgtacagttccatcaagcttgttccaagagaaaggcagattttgcccctcaaccctgagagtatgcaggaagaatttgaaagaataggcggaaagcgggagaagctccagtttgaatatgtaccatcgaaagaagcggtgtttgaggcccttgttcccatgtatgtaaaagggctgatatacggctctcttgtggaggcctatgtgagcgaacaaagcgcccgaatgtccgcaatggacgaggccagcaaaaacgccgaagaaatgctcgccaatttacagattaactacaaccgtgcaaggcaggcgggtattacccaggagatgacagaaattgtcggcggcgccgaagcgctgagcgactaa

SEQ ID NO: 36678 - protein, 134 aa, Unknown
  Obtained from environmental sample
  DOMAIN (1)...(132): ATP synthase
  misc_feature (1)..(134): Xaa is any amino acid
MGYFDEVHIVYTHMYSSIKLVPRERQILPLNPESMQEEFERIGGKREKLQFEYVPSKEAVFEALVPMYVKGLIYGSLVEAYVSEQSARMSAMDEASKNAEEMLANLQINYNRARQAGITQEMTEIVGGAEALSD

SEQ ID NO: 36679 - DNA, 426 bp, Unknown
  Obtained from environmental sample
  misc_feature (1)..(426): n is a, c, g, or t
gtgtttccggcgtttttgctttgcagcagcggcgtaagctccgcacgtatcggctcggcccttgcctcaaagctccgcagcctgtccacggcatcgccgcccagccctgcctgttccgccagctgcagtaccagttccctgaccgcccgtcccgcaaccgcgtcccggtcaatccgcgcaagctccgcttcgcaggcttcgatctgcgcctgcccttcctcttcggctaattcctctggcgtcttgccgacaactatctcgccgccgattacccgcgccatgcaccttgcggcctcgaattcctctgccggaaccgttttgtcaggctgccttgtcaggccgtccaactgcgccgcagcctccagattcgtgtggtggattgcgcggctgccggctttccaaagatatacgttcttcatagtttaa

SEQ ID NO: 36680 - protein, 141 aa, Unknown
  Obtained from environmental sample
  SIGNAL (1)...(22)
  misc_feature (1)..(141): Xaa is any amino acid
MFPAFLLCSSGVSSARIGSALASKLRSLSTASPPSPACSASCSTSSLTARPATASRSIRASSASQASICACPSSSANSSGVLPTTISPPITRAMHLAASNSSAGTVLSGCLVRPSNCAAASRFVWWIARLPAFQRYTFFIV

SEQ ID NO: 36681 - DNA, 816 bp, Unknown
  Obtained from environmental sample
  misc_feature (1)..(816): n is a, c, g, or t
ttgcctgttacgggctttaccacaggcggaactttgacagtatcagcttccaaattggggtataacataacaccgtcaaaaacggtaactatttacggcggtagtggtagtacaggcggcggcggtcaaaatgatccgggtgatctggcaggaacgtggacaggtaaaataggaaattatgacgctactattactgtttcgggaacaggatggacaatgacggcttcaggtactagcttttatgattccggctattttatcagaaatggtaataccgcaactttgtatttaagcagcggtacaaataacgggacagcaacacttattaatagcaccacaatacaagttgtcttaaatagcaataccatttttccgggtacttatacattgacaaaacaaggcagtagcggcggcggcggcgacacaaccgttaccaacggtgtacttaaagtgactggtattccgccgcagtataacgggaaatgggcatatgttatgactgatgatgagtctatatggggcgctgaaaccatatctacggcaggaaccggtacaggggcttcaattagcaatggaagtgtaagcatacccatgtggaaattgagcggcagtagttttgtaaaatattccggcaataactctcttcaggtttttgttggagtagcaagtcaaaaaaatggttcagtagatagttggtcaagcagcaacattgataacattacaatagcttatattgtctataatactacaaaaattacctttaaaaatggcggagccacagtatcgtggagtagcgctaatcaaaaagccccgtaa

SEQ ID NO: 36682 - protein, 271 aa, Unknown
  Obtained from environmental sample
  misc_feature (1)..(271): Xaa is any amino acid
MPVTGFTTGGTLTVSASKLGYNITPSKTVTIYGGSGSTGGGGQNDPGDLAGTWTGKIGNYDATITVSGTGWTMTASGTSFYDSGYFIRNGNTATLYLSSGTNNGTATLINSTTIQVVLNSNTIFPGTYTLTKQGSSGGGGDTTVTNGVLKVTGIPPQYNGKWAYVMTDDESIWGAETISTAGTGTGASISNGSVSIPMWKLSGSSFVKYSGNNSLQVFVGVASQKNGSVDSWSSSNIDNITIAYIVYNTTKITFKNGGATVSWSSANQKAP

SEQ ID NO: 36683 - DNA, 1092 bp, Unknown
  Obtained from environmental sample
  misc_feature (1)..(1092): n is a, c, g, or t
atgggcggcaaaattgcccacgaatttatgctagacaccccaagcggcgaggattatttaattatttgcaaacactgcggctaccaagcgaatagggaaatagccgaatttaaaaggcagcccgttgatggaaatttgggtcttgagaaagtagcaacgcctagcaaacaaaccattgacgaggtttgcacttttttaaaagcaaacaaaaaaaatgccggcaaatgcgtattctttgatgttgacagcaaactgatagtagctttggttcagggttatttagaggtgagcgaaacaaaactgagaaattttttgaaggtaaaaaccttaatccccgcatccgaagaattgataaaagcaagcggaatgattccaggttacgcaagcccaataaacgcaaaaaattgcagaataatactagacaccggagctgccgaaagcaaagacctaattgttggagcaaacgaagaaggctatcactttatgcactgtattccaaaaagagattttgcaaattttgaaacggtggatattgcagaagcggcagcggattgcctttgccccaaatgcgaaaaagaattgaccgaaacaaggggcattgagcttggcaacatattcaagctgggcacaaaattcagcgaaaacatgaattgcactttcacagatgcggctggagaggttaagcccgcgataatgggttgctatggcattggtgttggtcgtttaatggcaagcgttgtcgaaaacagccacgatgattttggtcctatatggcccctttccatcgcaccatttcaagttctcattgtgcaaatagcaaaggacgatgcaattttgcaagtatctgagcaactggaaaaagaacttgaagctcaaggtattgaagttttggtggatgaccgtgacgaacgcccaggcgttaaattcaaagacggcgatttatggggaatacccattcgcatatccataggcaaaaaaggtcttgcagagaacaaagttgagtggaaacttcgctctcagaaggagatggagatggtgcctattgcagatgttgtggataaagcgcataaatgcattaaacaaaattgttaa

SEQ ID NO: 36684 - protein, 363 aa, Unknown
  Obtained from environmental sample
  DOMAIN (48)...(178): YbaK / prolyl-tRNA synthetases associated domain
  misc_feature (1)..(363): Xaa is any amino acid
MGGKIAHEFMLDTPSGEDYLIICKHCGYQANREIAEFKRQPVDGNLGLEKVATPSKQTIDEVCTFLKANKKNAGKCVFFDVDSKLIVALVQGYLEVSETKLRNFLKVKTLIPASEELIKASGMIPGYASPINAKNCRIILDTGAAESKDLIVGANEEGYHFMHCIPKRDFANFETVDIAEAAADCLCPKCEKELTETRGIELGNIFKLGTKFSENMNCTFTDAAGEVKPAIMGCYGIGVGRLMASVVENSHDDFGPIWPLSIAPFQVLIVQIAKDDAILQVSEQLEKELEAQGIEVLVDDRDERPGVKFKDGDLWGIPIRISIGKKGLAENKVEWKLRSQKEMEMVPIADVVDKAHKCIKQNC

SEQ ID NO: 36685 - DNA, 717 bp, Unknown
  Obtained from environmental sample
  misc_feature (1)..(717): n is a, c, g, or t
atgtcatccgcgctaaaattccgcatctcggccacgctgtcgccattcattttgctcattggcttgcttggcctgatggcctgcagggacgcgaaggcgccaacgccgcccaagccccctgcaccgccgcaggcaccagttccgccagcgccgcctgtcccgccggttcctcccgttccgccgcgccgccccagcatagacctgccaccagcggcatactctttcatcaatggcacgtgggagggcaaggttggcgacccgtacggatgggacataaaattcgactgctttgcccagaacggcatccaaaaggtgctgttcacctgcatagcccccaagttccaaaccttctatttccccatcgaatatggctttgaaggcgatgcggcactgctgtggtggaacgacgaggacaacagggggaagatggagctgcgggtgggctggggcaaccaagccgtgggtacgtttgagcaaaagaagtggggcgggtctgtgccaatcacgctgtccaaaacatccaatacgccaaaggacggtgccgccccctaccacggcacctgggagggcaagctgggcgacccattccaatggaacgtgaggttcgactgctttgcggcaaacggcttgcaaaaagtgttggcatccatgacaggaaatggacctgacgcccttttttttgaagtcaaccacgcgctagagggcgacggcctatga

SEQ ID NO: 36686 - protein, 238 aa, Unknown
  Obtained from environmental sample
  SIGNAL (1)...(27)
  misc_feature (1)..(238): Xaa is any amino acid
MSSALKFRISATLSPFILLIGLLGLMACRDAKAPTPPKPPAPPQAPVPPAPPVPPVPPVPPRRPSIDLPPAAYSFINGTWEGKVGDPYGWDIKFDCFAQNGIQKVLFTCIAPKFQTFYFPIEYGFEGDAALLWWNDEDNRGKMELRVGWGNQAVGTFEQKKWGGSVPITLSKTSNTPKDGAAPYHGTWEGKLGDPFQWNVRFDCFAANGLQKVLASMTGNGPDALFFEVNHALEGDGL

SEQ ID NO: 36687 - DNA, 402 bp, Unknown
  Obtained from environmental sample
  misc_feature (1)..(402): n is a, c, g, or t
ttgggggctatgcaggtgaacagcaccttttggatgccgttctgggcaaagcagtcgaattttatgtcccatccgtacgggtcgccaaccttgccctcccacgtgccattgatgaaagagtatgccgctggtggcaggtctatgctggggcggcgcggcggaacgggaggaaccggcgggacaggcggcgctggcggaactggtgcctgcggcggtgcagggggcttgggcggcgttggcgccttcgcgtccctgcaggccatcaggccaagcaagccaatgagcaaaatgaatggcgacagcgtggccgagatgcggaattttagcgcggatgacatgagtgactccttgttggaatgtatattatacggctgtgggatagaaaggtttagggatagatag

SEQ ID NO: 36688 - protein, 133 aa, Unknown
  Obtained from environmental sample
  misc_feature (1)..(133): Xaa is any amino acid
MGAMQVNSTFWMPFWAKQSNFMSHPYGSPTLPSHVPLMKEYAAGGRSMLGRRGGTGGTGGTGGAGGTGACGGAGGLGGVGAFASLQAIRPSKPMSKMNGDSVAEMRNFSADDMSDSLLECILYGCGIERFRDR

SEQ ID NO: 36689 - DNA, 405 bp, Unknown
  Obtained from environmental sample
  misc_feature (1)..(405): n is a, c, g, or t
atgttccgcaagctgcttgacgatgcgcaggcaggcgacaatgtgggtcttttgcttcgcggcgcggagaaaacggacgttgagcgcggtcaggtattggctgctcctggttcaatcacgcctcacaccagctttgaagctcagatctacgttctgagcaaggaggaaggcggtcgccacacgcagtttgccaaaggctaccgtccccagttctacctccgcaccaccgatgtgaccggcaccataacgctgccatccggcgttgagcttgtgatgccgggcgacaacgtcaacataaccgtagagctaatatcgcccgtagcaatggatcagggtctgcgcttcgccatacgcgaaggcggcagaactgtgggtgctggctccgtaaccaaaattattaagtag

SEQ ID NO: 36690 - protein, 134 aa, Unknown
  Obtained from environmental sample
  DOMAIN (39)...(133): Elongation factor Tu C-terminal domain
  misc_feature (1)..(134): Xaa is any amino acid
MFRKLLDDAQAGDNVGLLLRGAEKTDVERGQVLAAPGSITPHTSFEAQIYVLSKEEGGRHTQFAKGYRPQFYLRTTDVTGTITLPSGVELVMPGDNVNITVELISPVAMDQGLRFAIREGGRTVGAGSVTKIIK

SEQ ID NO: 36691 - DNA, 609 bp, Unknown
  Obtained from environmental sample
  misc_feature (1)..(609): n is a, c, g, or t
gtgatcgcggcgctgtggtacttcttcctcggcggcagtgatgtcttctttaaggattccgcacctcctcccctggcctaccaggaaacacagcaaataaatgagcctgttgttcagccgccgactccgccgccgcagatgccaccgccagtcagacaggaaccgccgccgcagacgccaccggcagccagacaggaaccgccgactcctccgccgcagacgccaccggcagccagacaggaaccgccgactcctccgccgcagacgccaccggcagccaggcaggaaccgccgactcctccaccgcagacgccgccggcagccaggcaggatccccccgtgattaaggcgccagcggccccgccctcggcccgcccgacatcccagcgtgtccgtcccatggcgccggttatgtcgtacaagatcccggctgtcatacccaagaacggcgtagtgtaccagatccaatggggcgatactctttgggatatttcatacgccttctaccggaacccctggttttaccagcgtatcgccaaggataataaaatttccaaccctgataaaattctcgccggcagcaatgtacgaatttatcccaggcgctaa

SEQ ID NO: 36692 - protein, 202 aa, Unknown
  Obtained from environmental sample
  DOMAIN (153)...(199): LysM domain
  misc_feature (1)..(202): Xaa is any amino acid
MIAALWYFFLGGSDVFFKDSAPPPLAYQETQQINEPVVQPPTPPPQMPPPVRQEPPPQTPPAARQEPPTPPPQTPPAARQEPPTPPPQTPPAARQEPPTPPPQTPPAARQDPPVIKAPAAPPSARPTSQRVRPMAPVMSYKIPAVIPKNGVVYQIQWGDTLWDISYAFYRNPWFYQRIAKDNKISNPDKILAGSNVRIYPRR

SEQ ID NO: 36693 - DNA, 330 bp, Unknown
  Obtained from environmental sample
  misc_feature (1)..(330): n is a, c, g, or t
ttgggtatgacagccgggatcttgtacgacataaccggcgccatgggacggacacgctgggatgtcgggcgggccgagggcggggccgctggcgccttaatcacggggggatcctgcctggctgccggcggcgtctgcggtggaggagtcggcggttcctgcctggctgccggtggcgtctgcggcggaggagtcggcggttcctgtctggctgccggtggcgtctgcggcggaggagtcggcggttcctgtctggctgccggtggcgtctgcggcggcggttcctgtctgactggcggtggcatctgcggcggcggagtcggcggctga

SEQ ID NO: 36694 - protein, 109 aa, Unknown
  Obtained from environmental sample
  misc_feature (1)..(109): Xaa is any amino acid
MGMTAGILYDITGAMGRTRWDVGRAEGGAAGALITGGSCLAAGGVCGGGVGGSCLAAGGVCGGGVGGSCLAAGGVCGGGVGGSCLAAGGVCGGGSCLTGGGICGGGVGG

SEQ ID NO: 36695 - DNA, 690 bp, Unknown
  Obtained from environmental sample
  misc_feature (1)..(690): n is a, c, g, or t
gtgcgtaccttacaggtgcgctatccaacccggctggacgaggttattggggccagcaactggaaaaatgcctacttgccgtggcaaaacaacgcgcagttatgcggattgtcgatttacgatacggaacgcaaagagtgggtcgctaagtatgacggggccgagaacaccgatattgaatcaattaaaggaggcttgagcgattcgttcaagcgggcggcctgtgtgtggggaataggccgttatctgcatgagctcggcggtatatgggttgatattgaatcgagtaaaagcggaaagggttcatttatcaaggataaccagtatagcaaactggaggccgaatataacaatgccgtagccaggattttctttaatgccccgcctaatcaagataagcctctgcctgccgaacagaaacctgcgccggtatcggcagcgaaagacaacgcgcagagcgcagtttcaggcgcgtcttccgattataaggttcagtcggtaacgcccagcggcaaggaatccctaaaggttgaacttgtgaaaccttcaggcgaggttatctccgcgtttatcaagaaaggcgacaatgctatcaaagccggaaccaggctgaaagaggttgatattgtgccgaaagacagcgcctacggcccttacaacatgattaacgcttataagatagccgcataa

SEQ ID NO: 36696 - protein, 229 aa, Unknown
  Obtained from environmental sample
  misc_feature (1)..(229): Xaa is any amino acid
MRTLQVRYPTRLDEVIGASNWKNAYLPWQNNAQLCGLSIYDTERKEWVAKYDGAENTDIESIKGGLSDSFKRAACVWGIGRYLHELGGIWVDIESSKSGKGSFIKDNQYSKLEAEYNNAVARIFFNAPPNQDKPLPAEQKPAPVSAAKDNAQSAVSGASSDYKVQSVTPSGKESLKVELVKPSGEVISAFIKKGDNAIKAGTRLKEVDIVPKDSAYGPYNMINAYKIAA

SEQ ID NO: 36697 - DNA, 1365 bp, Unknown
  Obtained from environmental sample
  misc_feature (1)..(1365): n is a, c, g, or t
ttgatttttacgttaatatatattgttatttctcttcttgcgctttttcttggcatatttcaaattgtaggaaaaaaccagcgcggtactttaaactggtactttttcgccatttgtactgtagtagcgatttccacttttaacaccggtatttcgttttatatagccttttcggaaaacgtgcgtttaggcgaatcgagttatatatacagtacggttaatattattttatcaacaataaaagttgtggccgttccgtttcttttcgcttttatctttaatctttcaaaaatcaattcaaaaaaattcagaatattacaatttgtcttactctccgtcaattcacttgctgttacctcaatttatattattttagttgcatctgctaacgcggtttatattctttcttcccctttttttaatatatttaccctattaattgtcattttctctttcttttgcctgattcttctattatataaatggataagaaccgcgtcccttaaacgtgaccttttacaggcaaaaacaatatcaatagcttcgcttgtatcgcttctttcccttgtctgcctgttattttccctaagtttatatttgatagaaattatcccttatatcggaatgctggcgcttctgtttatctgcaactattacgccaaccagtataacagttttagttttaacatttccaaccttgccgcttatgtttatacggctgtaaaactgcccgtgcttattcttgacgaaacaggcggtattgtgctgtgcaacacggcttcggaaagtttttttaagaataacattgatcagcttaaaagattgaaattatctgacttgttttattttggaaatacatcgctgtcattgcagcgtcaaaaaaaagacgcggttgtttttaactgcgacgccgtctgcctggtagagaaacaagaatgtcaaatctcactgaattatgtttatgataaatttgacgaaatgatctgtaccgtcgtgattgtaacagacatcaccgaaaaagaggatttgatccgccagcttaacgaatctcacgcgaaaattgaacgctttaacaaggaattaaagtccgaggttgacaggcaaaccgaaagtatacgcaatctgcaaacggcgattgtatattcaatgagcgatttaatagaaaaaaaagacggctacacaggagtacacacaaggcgcgtaagcgaatatgtcgttatcttactgcgtgaattggcgcggcgcggacatcaatttaccgaatccgatattcaaagaatagctgaatcttcccttttgcacgacatgggaaaaatcgccgtaccggacagtatccttcttaaaaactggaaaattagacgatga

SEQ ID NO: 36698 - protein, 454 aa, Unknown
  Obtained from environmental sample
  SIGNAL (1)...(24)
  misc_feature (1)..(454): Xaa is any amino acid
MIFTLIYIVISLLALFLGIFQIVGKNQRGTLNWYFFAICTVVAISTFNTGISFYIAFSENVRLGESSYIYSTVNIILSTIKVVAVPFLFAFIFNLSKINSKKFRILQFVLLSVNSLAVTSIYIILVASANAVYILSSPFFNIFTLLIVIFSFFCLILLLYKWIRTASLKRDLLQAKTISIASLVSLLSLVCLLFSLSLYLIEIIPYIGMLALLFICNYYANQYNSFSFNISNLAAYVYTAVKLPVLILDETGGIVLCNTASESFFKNNIDQLKRLKLSDLFYFGNTSLSLQRQKKDAVVFNCDAVCLVEKQECQISLNYVYDKFDEMICTVVIVTDITEKEDLIRQLNESHAKIERFNKELKSEVDRQTESIRNLQTAIVYSMSDLIEKKDGYTGVHTRRVSEYVVILLRELARRGHQFTESDIQRIAESSLLHDMGKIAVPDSILLKNWKIRR

SEQ ID NO: 36699 - DNA, 303 bp, Unknown
  Obtained from environmental sample
  misc_feature (1)..(303): n is a, c, g, or t
atgttcgccaaggttcgcattattaccgaacaaaaaaataatattgtaaaaattcctgttgcggcggtaatcagccgttttggagagcagtatgtttttaccgttgataaagacgcggaaaatcctgatatcactattgttaataaaaagaacatagtacccggtattattattgacggaataatggaaatacaaagcggtcttacgcaggatgatgaaatcgttatccgcggacagactctgcttgatgaaggctcaagggtgaatgtaattgatcggattgcgccgctaggtgcaaattag

SEQ ID NO: 36700 - protein, 100 aa, Unknown
  Obtained from environmental sample
  misc_feature (1)..(100): Xaa is any amino acid
MFAKVRIITEQKNNIVKIPVAAVISRFGEQYVFTVDKDAENPDITIVNKKNIVPGIIIDGIMEIQSGLTQDDEIVIRGQTLLDEGSRVNVIDRIAPLGAN

SEQ ID NO: 36701 - DNA, 1233 bp, Unknown
  Obtained from environmental sample
  misc_feature (1)..(1233): n is a, c, g, or t
atgagtatggttaaaacggtcgtttcacggcctaccactttttttataatattcgctctgcttatcgggcttggttttttcgcgctggtaaatctgccgattgatctctatcctgaaattagtcctccgattctggttgtatacacgtcatacacaggcgcggggccggaagaagttgaacgctctatttcccgtcctcttgaagcggtcttaaccggcgtatccgcacttgaaaaaattacttccacttcaagcaaaggtgccagcatggttataatggagtttacttacggaacaaatatgtccgacgcttccaactccattcgcgatgcgcttgagcgtatcagaaactatctgccgacgggcgcggatacgccgatgattttcaagtttgatccttccatgattccgatcatggggcttatggttacatcggacaagcgcactccggaagagttacgcgaaatttcagaggacacgatagttccgcgcattgaacagacgccgggagtcgcaaccgcttccgtaaacggcggcagggaaaaaattgtccgcgtggaaattccgcaaagcagacttgaagcctacgggcttacaataacgcaaatacagcagatgatcgccgcgcaaaatatgcagacagccgccggaacaatcacggaaggcgggctttcctatattcttacgacaatgggcgaatatacctcgttagaggaaataaaaaacaccgttatttcctacaagggcggcggttattcgggcggacaggtggaaatgccaaaacagatttatctgcgcgaccttgccaatgtatttgaaggttaccgcgatgaaaccagcacggtttatgtagacgggcagactgcggtaatgctgatggtacagaaacagagcggaaaaaactccgtgcaaacggcgaaagatttgcgcgtaaggcttacaggcatggctaaacagcttccgcccgacattaaaataacggaaatttttaacaccacggatatggtgcaaaattctcttaatcaggtaacgtcaagcgcgttcagcggagcgttgcttgccgtattgatacttttcattttcctgcgttccgcaaaaccgacgttaatcatcggaataagcatacctgtattcgttattatcaccatgaagataatgtactttttcccctctaacccctcacttgatggacaagggcggggcttggttctagaaaaaagaatggttatttaa

SEQ ID NO: 36702 - protein, 410 aa, Unknown
  Obtained from environmental sample
  SIGNAL (1)...(28)
  misc_feature (1)..(410): Xaa is any amino acid
MSMVKTVVSRPTTFFIIFALLIGLGFFALVNLPIDLYPEISPPILVVYTSYTGAGPEEVERSISRPLEAVLTGVSALEKITSTSSKGASMVIMEFTYGTNMSDASNSIRDALERIRNYLPTGADTPMIFKFDPSMIPIMGLMVTSDKRTPEELREISEDTIVPRIEQTPGVATASVNGGREKIVRVEIPQSRLEAYGLTITQIQQMIAAQNMQTAAGTITEGGLSYILTTMGEYTSLEEIKNTVISYKGGGYSGGQVEMPKQIYLRDLANVFEGYRDETSTVYVDGQTAVMLMVQKQSGKNSVQTAKDLRVRLTGMAKQLPPDIKITEIFNTTDMVQNSLNQVTSSAFSGALLAVLILFIFLRSAKPTLIIGISIPVFVIITMKIMYFFPSNPSLDGQGRGLVLEKRMVI

SEQ ID NO: 36703 - DNA, 957 bp, Unknown
  Obtained from environmental sample
  misc_feature (1)..(957): n is a, c, g, or t
ttgagtgacgggcggattgcgtttttttgcaaaatcttgggggaagggcagggtatggaagacaatatcgaaggcaacaggagtcgtctggcgattgcgaaccgcgtctcggtcgtgtctattatcgtcaacgccgtgctttcggcgtttaagctcgcggttgggattctggcccactcggcggctatggtctccgacgccgtacactcgctctccgacgtgctgagcacattcatcgtcatcataggcgtaaaccttgccgagcagaagtcggataggggacacccgtacggacacgagcgctttgagtgcgtggcctccataatcctcgctcttatgctcgggcttacgggcgccggaataggttacagcggggttaagagcataattgagggcaactacgagaataagatccccggcgtcgcggcgctcgtcgcggcggtcgtctccatagcggtgaaggagtggatgtaccggtacacgcgaaaggcggcgaagcggatcaactccggtgcgctcttggccgacgcttggcatcaccgttcggacgcgctctcgtcggtgggcgcgttcataggcatattgggcgccataatgggggttccggctctagacccggcggcgagccttgtcatttgcctgttcatcgcgaaagccgcttacgatatttttacggacgcgatcaacaagatggtcgacaagtcgtgcgacgaggaaaccatcaacgcgctgcggacgctcgttttgtcgcagagcggcgtaatcgccgtggacgacattagaacgcgcatattcggctcaaagatatacgtggacatagagatagccgccgacaaggatttggtcttgacgcaggcccacaaaatagcggagaacgtccacgacgcggtggagaaaaattttcccactgtgaaacactgcatggtgcatgtgaacccgggggtggttgcagactaa

SEQ ID NO: 36704 - protein, 318 aa, Unknown
  Obtained from environmental sample
  DOMAIN (37)...(318): Cation efflux family
  misc_feature (1)..(318): Xaa is any amino acid
MSDGRIAFFCKILGEGQGMEDNIEGNRSRLAIANRVSVVSIIVNAVLSAFKLAVGILAHSAAMVSDAVHSLSDVLSTFIVIIGVNLAEQKSDRGHPYGHERFECVASIILALMLGLTGAGIGYSGVKSIIEGNYENKIPGVAALVAAVVSIAVKEWMYRYTRKAAKRINSGALLADAWHHRSDALSSVGAFIGILGAIMGVPALDPAASLVICLFIAKAAYDIFTDAINKMVDKSCDEETINALRTLVLSQSGVIAVDDIRTRIFGSKIYVDIEIAADKDLVLTQAHKIAENVHDAVEKNFPTVKHCMVHVNPGVVAD

SEQ ID NO: 36705 - DNA, 684 bp, Unknown
  Obtained from environmental sample
  misc_feature (1)..(684): n is a, c, g, or t
atggcggtaatcaaagcagaaaatgttataaaagactatggcttggacgggcaagttgtgcatgccttgcggggcattagtttggaatttgagaagggggagttcgccgctattgctggtccttcggggagcggaaaatccacgtttcttcacttagctggatgtttagataccttaacgggcggaaatatgctcgtgggaggttccaatacgggaaatatgtcaaagcagcaactggctttgctcaggcggcagaatataggttttatttttcaggcgtataatttgattcccgtgctgtctgtggaagagaatatttcttttcctcttacattgcttggtattgctcaaaaagatattaaggaacgcacagcgaaaattctgcgagatgttggacttgaagatatggcaaaacgccgcccaaaagaaatgtctggcgggcagcagcagcgtgttgccattgcccgtgcattggtgaaaaagcctgcgcttattttagcagacgaaccaacggcgaatttggattctgcaactggcaaggaaattcttgaactgatgctctctctcaataagaccgaaggctgcacatttatcttttccacgcacgaccaaatggtgatggattacgctcgccgcattgtgcgcattagagatgggcaaatagaaagcgatgaggttaagtga

SEQ ID NO: 36706 - protein, 227 aa, Unknown
  Obtained from environmental sample
  DOMAIN (33)...(219): ABC transporter
  misc_feature (1)..(227): Xaa is any amino acid
MAVIKAENVIKDYGLDGQVVHALRGISLEFEKGEFAAIAGPSGSGKSTFLHLAGCLDTLTGGNMLVGGSNTGNMSKQQLALLRRQNIGFIFQAYNLIPVLSVEENISFPLTLLGIAQKDIKERTAKILRDVGLEDMAKRRPKEMSGGQQQRVAIARALVKKPALILADEPTANLDSATGKEILELMLSLNKTEGCTFIFSTHDQMVMDYARRIVRIRDGQIESDEVK

SEQ ID NO: 36707 - DNA, 372 bp, Unknown
  Obtained from environmental sample
  misc_feature (1)..(372): n is a, c, g, or t
atgattacgccccaaattttctatattcaaactatgccattgcatacagacataatatcaaaaatagttcaaagccttataggtttgaacatctataaaataatcctattcggctcttacgcaaacggcaccgcaacagaagacagcgacatagacttactcgtaattttagatacagaaaaatttgcaaaaacatttgacgaaagaatggaccgaaagcgaccaatatccacagcattgctagaagtaaattatcagttcccaatggacataatagtatattccaaaggcgaatttgactacctaaaaaacaacgaggatttctttgtgcaaganatagaaaaaacaggcaaagaattatatggaaaataa

SEQ ID NO: 36708 - protein, 123 aa, Unknown
  Obtained from environmental sample
  DOMAIN (12)...(120): Nucleotidyltransferase domain
  misc_feature (1)..(123): Xaa is any amino acid
MITPQIFYIQTMPLHTDIISKIVQSLIGLNIYKIILFGSYANGTATEDSDIDLLVILDTEKFAKTFDERMDRKRPISTALLEVNYQFPMDIIVYSKGEFDYLKNNEDFFVQXIEKTGKELYGK

SEQ ID NO: 36709 - DNA, 1317 bp, Unknown
  Obtained from environmental sample
  misc_feature (1)..(1317): n is a, c, g, or t
atgaaagtcagggatatactggaaatagattaccttattctgctgccggtgattattttggttattatcggcgtgatgttcatatattcttccggcattacctctaccggggaaatggtttccactgaatacataaggcagatagtatgggcttccatcggcctgacggcggcgcttgtattgtcaatggtcaattaccgccgcttttataaaatttcactgtacttgttcctcgccacgctggtccccctcgtgtatacccttctttttggacgtatggcttacggtacgcgctggctgagaataggctcttttgggttacaggcgtccgaattcgcgaaaattactaccataatttttctggcccgctaccttaccgataccaggctgagtgaaaattcctttgtccggtttattgtatcctgtctgattgtgtttgtgccgatggggatcgtgtttatacagcccgacctgggtaccgctcttgtgtttatcccgattcttctttccatgacgtatatagccggcatatcaatgcgctatatagtttttttggccgcctgcattttcatgaccggtattctgacggtcctgccgctttggcagacgtatattttacgcaggtctttgtccaccctgcagctgctgaccaatccccgcctcattgttattgccgttcttgccctgagccttattatcggcattgcgatttttgggtatcttaaatacaggaagcggtattttttctggatagtgtacgcttttacgattgttgttttttcgttaggcgcttcttacgccgcccgcatactgctgaagaattaccagatcatgaggctcattgtgtttctcgatccgaatatagatccgaggggggctggctggcatattatacaatccgttacggccattggttcgggagggcttaagggacagggctatttgaagggcacccagagtcattaccgcttccttcccgaacagagcaccgactttatcttttcgattttttccgaggagacgggctttatcggcgggattgcggtgtttatcctgttcctgatcatctgcatgaggattgtgcagataataaaaataacttcagacccctttgccgcgtacatctgcgccggcctggcggggatgtacagctttcacttcattattaatgtgggcatgaccatgggcattatgccgattacgggcattcccctgctgtttatatcctacggcggctccgcgatgttctcggcgatgataggaatagggcttgccctgagcatacacatcagaaggtatatacctcccgcgttatga

SEQ ID NO: 36710 - protein, 438 aa, Unknown
  Obtained from environmental sample
  DOMAIN (10)...(434): Cell cycle protein
  misc_feature (1)..(438): Xaa is any amino acid
MKVRDILEIDYLILLPVIILVIIGVMFIYSSGITSTGEMVSTEYIRQIVWASIGLTAALVLSMVNYRRFYKISLYLFLATLVPLVYTLLFGRMAYGTRWLRIGSFGLQASEFAKITTIIFLARYLTDTRLSENSFVRFIVSCLIVFVPMGIVFIQPDLGTALVFIPILLSMTYIAGISMRYIVFLAACIFMTGILTVLPLWQTYILRRSLSTLQLLTNPRLIVIAVLALSLIIGIAIFGYLKYRKRYFFWIVYAFTIVVFSLGASYAARILLKNYQIMRLIVFLDPNIDPRGAGWHIIQSVTAIGSGGLKGQGYLKGTQSHYRFLPEQSTDFIFSIFSEETGFIGGIAVFILFLIICMRIVQIIKITSDPFAAYICAGLAGMYSFHFIINVGMTMGIMPITGIPLLFISYGGSAMFSAMIGIGLALSIHIRRYIPPAL

SEQ ID NO: 36711 - DNA, 771 bp, Unknown
  Obtained from environmental sample
  misc_feature (1)..(771): n is a, c, g, or t
atggcgcgtgacttgcctgcgaacgcggacgatgtaacggtagccgcgggcggggacggaacctgcaacgaagtcataaacggattattattgcgtaaagccgccgctccccctgttttcggaatcctccccatagggcgcggcaatgatttttccgccaccccgaaaattcctcaggatgtcgaaaaagccctgcagttgatgctcagcggtaacgccaagccgcttgacgccggttttgtaaaaggcggctttttccccgagggccgctattttgtcaacggtatcggcataggctttgacaccaaggtcggctttgaggcggcaaaattaaaaattaaaagcggcatttcatacgttgtcggcgcttttatcatgcttatccgctacgaaccttcgcctattctgcatattagttacgacggcaaggaaataactctccccgcggttcttgtttcggttgtaaacggaaggcgcatgggcggaagtttttacatgggccctaacgcgctgcttgacgacgggcttttggacatctgttatgtgcatcatcaaaaatcgcgtttaagcctgcttaaaataatgtcccattatacaaagggaacccagggcgaatgtaagggcgtaactttcgacagaggctcgcattttgttcttaaggcgcttgagggaggaatggcggcgcactgcgacggggagacagtctgttatgacggcaaggagttggagataacctgtatccctaacgccttgcggcttatagaggcataa

SEQ ID NO: 36712 - protein, 256 aa, Unknown
  Obtained from environmental sample
  misc_feature (1)..(256): Xaa is any amino acid
MARDLPANADDVTVAAGGDGTCNEVINGLLLRKAAAPPVFGILPIGRGNDFSATPKIPQDVEKALQLMLSGNAKPLDAGFVKGGFFPEGRYFVNGIGIGFDTKVGFEAAKLKIKSGISYVVGAFIMLIRYEPSPILHISYDGKEITLPAVLVSVVNGRRMGGSFYMGPNALLDDGLLDICYVHHQKSRLSLLKIMSHYTKGTQGECKGVTFDRGSHFVLKALEGGMAAHCDGETVCYDGKELEITCIPNALRLIEA

SEQ ID NO: 36713 - DNA, 672 bp, Unknown
  Obtained from environmental sample
  misc_feature (1)..(672): n is a, c, g, or t
atggatttcagaagattcgccgtaagttatttcatgaaaggaatattaagcgtaatctgtaaaattgactgcaaagaatttattcaagctttaaaaaacaacaaacctatgctggttatttttaaccatataaattttttggaagtccctattcttgtaacgcacagttatccccttcatgtatccggtcttgttaaagaggaaacatggaacagcctgttattttcgtttatttttaacacatacaaagcgattcccatcaacagaagaggagctttcagcgaagcttttaagaaagcgctggacgcgataaataaagggttttatatctgcgtagctcccgaaggaacaagaagcaaagacggcgtattgggaaaaggaaaacccggaatcattcagcttgctcttgaagcaaaagtgcccatacttcccgtagcccatttcggcggcgagaacatttggagtaacatgcgccgcttccgccgcactccgttttgttttaaggccggccgtcctttccgcattaattgcgatgcaatgcccggaaaagaagaacgtgataaaataatgacggaagttatggcgcaaatggcgcgtcttctgcctgaaagaatgcgcggcgaatacgccgaatttacaaacagcgattataaatatttggaatttatataa

SEQ ID NO: 36714 - protein, 223 aa, Unknown
  Obtained from environmental sample
  DOMAIN (21)...(148): Acyltransferase
  misc_feature (1)..(223): Xaa is any amino acid
MDFRRFAVSYFMKGILSVICKIDCKEFIQALKNNKPMLVIFNHINFLEVPILVTHSYPLHVSGLVKEETWNSLLFSFIFNTYKAIPINRRGAFSEAFKKALDAINKGFYICVAPEGTRSKDGVLGKGKPGIIQLALEAKVPILPVAHFGGENIWSNMRRFRRTPFCFKAGRPFRINCDAMPGKEERDKIMTEVMAQMARLLPERMRGEYAEFTNSDYKYLEFI

SEQ ID NO: 36715 - DNA, 582 bp, Unknown
  Obtained from environmental sample
  misc_feature (1)..(582): n is a, c, g, or t
atggcgaagagctttttctttttgggaaccctgccatataatatcgctgcggctttaatcgccgactttattgaaaaggcctgttttnttaggcgcgttgtggtaaccgtgcagagggaagtcgccttgcggatggctgccgttcccggttccgcagattattcttcattctcggtgttatgttcgtccgtctacaaagtaaaactgctcagagtaataaaggcttcttcgttttatccggttcccagggtggattctcagggggtgcttatggatctgattccccagccggaaagaaggccaaaacttttttacccccttgtgcgaagccttttttcttcccgcagaaagactatcagaaacacattaacggcttttgcttcttctgttataattaattctattaacggatctatgactggatcagagctttccggaaaggcttttctttccgcgagggaagccgccggggaaaccttgaagaaggcgggaatttctggcgacaggcgggcagagaccctgggcattgacgagttttccgccctggcggcgtttttggaggagatcttttttaatggctga

SEQ ID NO: 36716 - protein, 193 aa, Unknown
  Obtained from environmental sample
  misc_feature (1)..(193): Xaa is any amino acid
MAKSFFFLGTLPYNIAAALIADFIEKACFXRRVVVTVQREVALRMAAVPGSADYSSFSVLCSSVYKVKLLRVIKASSFYPVPRVDSQGVLMDLIPQPERRPKLFYPLVRSLFSSRRKTIRNTLTAFASSVIINSINGSMTGSELSGKAFLSAREAAGETLKKAGISGDRRAETLGIDEFSALAAFLEEIFFNG

SEQ ID NO: 36717 - DNA, 477 bp, Unknown
  Obtained from environmental sample
  misc_feature (1)..(477): n is a, c, g, or t
ttgccctggtcttttcccttcttttttgcattctggtttattttcttcacgcgctggacaggcgctacaggaacagcattgcatccttcaattaattacgattcgccaaatgagctaaaagcgtttctcgatgagcgcggaattgggatgaggaaaaaattcggccagaattttatgattaacccgcgtgagcgttccatgctgcttgacgcgctggaattgcctgccggggcgagggtctgggaagccggcgcggggttaggcgcaatgacagccggccttcttgaacgcggcgcggacgtatccgcttttgaaattgatcccgcttttgcccgcgccctaagggaattcttcggggataattctatcggaagccaaggctcttttcgacttgttgaaggggatattttaaaaacatgggagctagttaacgttaatggcgaagagctttttctttttgggaaccctgccatataa

SEQ ID NO: 36718 - protein, 158 aa, Unknown
  Obtained from environmental sample
  misc_feature (1)..(158): Xaa is any amino acid
MPWSFPFFFAFWFIFFTRWTGATGTALHPSINYDSPNELKAFLDERGIGMRKKFGQNFMINPRERSMLLDALELPAGARVWEAGAGLGAMTAGLLERGADVSAFEIDPAFARALREFFGDNSIGSQGSFRLVEGDILKTWELVNVNGEELFLFGNPAI

SEQ ID NO: 36719 - DNA, 447 bp, Unknown
  Obtained from environmental sample
  misc_feature (1)..(447): n is a, c, g, or t
ttgcttggaattcttaccctgggcgaagccgtgcgggatctgttacggggaaggctgcctgagcttcttggcacagggctttcggcttccataggcgcgtttgtgttgaccgccccggtcgtcgccttttactttgcctccgtacgcccaataggaatcctcgcgggccttgtagcagctcctgtggcgtcggtattcatggttttgtccctcgcggctcttgtcgctggttttatgcctttccagatatggaatgtctttaactttgcgctttcctggatataccgttttctggaatcatttgtaaatctgacagggcgcgtcccgggactttcaacatcaaaccctgttattgccctggtcttttcccttcttttttgcattctggtttattttcttcacgcgctggacaggcgctacaggaacagcattgcatccttcaattaa

SEQ ID NO: 36720 - protein, 148 aa, Unknown
  Obtained from environmental sample
  misc_feature (1)..(148): Xaa is any amino acid
MLGILTLGEAVRDLLRGRLPELLGTGLSASIGAFVLTAPVVAFYFASVRPIGILAGLVAAPVASVFMVLSLAALVAGFMPFQIWNVFNFALSWIYRFLESFVNLTGRVPGLSTSNPVIALVFSLLFCILVYFLHALDRRYRNSIASFN

SEQ ID NO: 36721 - DNA, 816 bp, Unknown
  Obtained from environmental sample
  misc_feature (1)..(816): n is a, c, g, or t
atgacagaatcggccgaggactttaaagattttaaagattttaaagattttgatttttcagatattatttttaatgaattaaaccgaatgaaaggaaagcccatgtgcgacgctaccgatatcctctacgaaggcaaatcaaaacttgtctgtaaaggccgcgacgagtccacccttctcatcaggtacaaagataccgccacggcgttcaacggcgaaaaaaaggccgagctttcgggcaaaggcgtgctgaacgcggctatctccaacctgatctacggctaccttgaggaaaacggcgtgaaaacgcacttggttgaggtcgtcgacgatacctccgttatcgccaaaaaagccgagatcatcatggtcgaggtcattgtaagaaacgtcgccgccggcgggttttcgaagaaatacggcgttcctgaggggtctgagttgaaaaacatcgtgctggagttctgcctgaaaagcgacgatctcggcgacccgatgataaacgagagccagatcaccgccatcgggctcgccacggacgaggagctcggctatatggccgggcaggccttgaagatcaacgagttgctgcgctccctattcgaaaaagccggcatcaggcttatagatttcaagttagagttcggcagaagcggcggcgaggtcatcctctgcgacgaaatatcgccggattcctgccggttgtgggacgctgagacgaacaaaaaattggataaagaccgcttccgccgcgatttgggcgatgtgctcgacggttacagggatgttttggcgaggttgcaaaatgtccgatag

SEQ ID NO: 36722 - protein, 271 aa, Unknown
  Obtained from environmental sample
  DOMAIN (38)...(271): SAICAR synthetase
  misc_feature (1)..(271): Xaa is any amino acid
MTESAEDFKDFKDFKDFDFSDIIFNELNRMKGKPMCDATDILYEGKSKLVCKGRDESTLLIRYKDTATAFNGEKKAELSGKGVLNAAISNLIYGYLEENGVKTHLVEVVDDTSVIAKKAEIIMVEVIVRNVAAGGFSKKYGVPEGSELKNIVLEFCLKSDDLGDPMINESQITAIGLATDEELGYMAGQALKINELLRSLFEKAGIRLIDFKLEFGRSGGEVILCDEISPDSCRLWDAETNKKLDKDRFRRDLGDVLDGYRDVLARLQNVR

SEQ ID NO: 36723 - DNA, 603 bp, Unknown
  Obtained from environmental sample
  misc_feature (1)..(603): n is a, c, g, or t
atgaaaaccagaatagttcatcccggtgattttttgctggctacgccagctctctctgggagctattttcaagattgcgtgatttttgtaattgaatgttctgtagagacaggctcatggggtttggtgataaatcatttagcgcatatcccgctagacgaggtttttagaaaaaatccggggataacacgtaagccgcttccttgggaaataatgggcgcagcacgggaattgcacacattcttttttggaggtcctgttcagaacacagacccttttcaaaaactttcagttttgcatttggaaactggagattctgtttttaacggagcttatgaaatttcaaatggcgttttcatatcaaagataccactagaaatggagcttcccgtatctaggctaatatctccgcaaaataaaacagcgcgtattttctttggctacagcggttgggcagtagggcagttggagagagagattttagacggagcctgggaaatttcaaatccatttccctttgatgtgttttccaaaaatagggatgaagttcctataacagtgaataaattccgtgagtgctatgaaaaaagctaccgagcctga

SEQ ID NO: 36724 - protein, 200 aa, Unknown
  Obtained from environmental sample
  DOMAIN (5)...(183): Uncharacterized ACR, COG1678
  misc_feature (1)..(200): Xaa is any amino acid
MKTRIVHPGDFLLATPALSGSYFQDCVIFVIECSVETGSWGLVINHLAHIPLDEVFRKNPGITRKPLPWEIMGAARELHTFFFGGPVQNTDPFQKLSVLHLETGDSVFNGAYEISNGVFISKIPLEMELPVSRLISPQNKTARIFFGYSGWAVGQLEREILDGAWEISNPFPFDVFSKNRDEVPITVNKFRECYEKSYRA

SEQ ID NO: 36725 - DNA, 582 bp, Unknown
  Obtained from environmental sample
  misc_feature (1)..(582): n is a, c, g, or t
atgtccaaatgtggattaaanggcaggaatttcataaattttgaaataaaaacggcatatagaattgatataaaagaaggggtaaaaatggaatattttggcggtcttagttttagaaaatttgagaaagatgatgttgaatgcttcactcaaataatgaaaaaagcatttgacagagatactcaaatacatcttggagaagacgaaggaggccctgacggttatgacaatggaatatttctaaaaaaatggtatttgaataaaaacgcaacagcgtttgctgtatataaagaagataaacctattgctgcaattaatgtatggataaaaaaagacaatataaattatcttggaaatacatttgtcgatcctgatttacaggataaaggaattgggttaacaatatggaaatttattgaacaaaaatttcctgaaacaaaagcatggagaacagaaacaccaggattctcaaataggaatcataatttttatgtaaacaaatgtgggtttaaaatatgtaaaatagaaaatcctaaaaatataagggaatcaaattatttattagaaaaaataatgaaataa

SEQ ID NO: 36726 - protein, 193 aa, Unknown
  Obtained from environmental sample
  DOMAIN (93)...(171): Acetyltransferase (GNAT) family
  misc_feature (1)..(193): Xaa is any amino acid
MSKCGLXGRNFINFEIKTAYRIDIKEGVKMEYFGGLSFRKFEKDDVECFTQIMKKAFDRDTQIHLGEDEGGPDGYDNGIFLKKWYLNKNATAFAVYKEDKPIAAINVWIKKDNINYLGNTFVDPDLQDKGIGLTIWKFIEQKFPETKAWRTETPGFSNRNHNFYVNKCGFKICKIENPKNIRESNYLLEKIMK

SEQ ID NO: 36727 - DNA, 912 bp, Unknown
  Obtained from environmental sample
  misc_feature (1)..(912): n is a, c, g, or t
atgaagcttgtaaaaaacaaggaggagaatatgaagatccaattcaaactgagcattgtagtaatcgcaatcatggctgccgtggtagcaggaattacctcactattgctttggcaggcgtccaaaaacaccctgcaattaagcctgcgaagtcaggaacatttggccaatagccgcgctgaattctggaaaggccgggaagaaggctatcttagggcgttaaaaacaatggcgaatgtaatgggagactttgaaaccgtgaaaccggaagaacgcagggacacgtatgacgatatgctgagatcggctctggacacggaacctatgatggtggtcctgtatacagcatggaaaccaaacgccattgacgggatggacgcaaaatacataggcaggacaggctccagcccgaccggacagtacgcgatggcatgggccaaagaaacaggcgcaaccgtaaaacggcttaccacagctcttgacagcgctatggaacatcttacaggtcccgacgcgtccaaagactgcatttatgaaccggtattcaggactataagaggagaggacatgtggacaatcagatttcaggttcctattaccaataacaagaatcatgaggtagtaggcgtccttgggtgtgtattatcaataaaaccggtacaagagatagtggataaaacattaacagcaaacgatgagaccgacatagtaatactttattcaaataaaggatcaattctcgcgcattatatacctgacagggtcggcaaaaatatgtttgatgttgacgaggaattgggcgactccagaaaagacatatacaacgccatgaacaacggagaaacttacttcgggaaagaatacaattctgcccttcatgacactataatgtatgtggtaaagccnggttaa

SEQ ID NO: 36728 - protein, 303 aa, Unknown
  Obtained from environmental sample
  misc_feature (1)..(303): Xaa is any amino acid
MKLVKNKEENMKIQFKLSIVVIAIMAAVVAGITSLLLWQASKNTLQLSLRSQEHLANSRAEFWKGREEGYLRALKTMANVMGDFETVKPEERRDTYDDMLRSALDTEPMMVVLYTAWKPNAIDGMDAKYIGRTGSSPTGQYAMAWAKETGATVKRLTTALDSAMEHLTGPDASKDCIYEPVFRTIRGEDMWTIRFQVPITNNKNHEVVGVLGCVLSIKPVQEIVDKTLTANDETDIVILYSNKGSILAHYIPDRVGKNMFDVDEELGDSRKDIYNAMNNGETYFGKEYNSALHDTIMYVVKPG

SEQ ID NO: 36729 - DNA, 558 bp, Unknown
  Obtained from environmental sample
  misc_feature (1)..(558): n is a, c, g, or t
gtgtgtcccggcggcggttttgcatatgtcggatcgctccacgaaggtttccccctcgcgttggagataagtaaaaaagggtataacgcttttgttatcagataccagataggcggggaacgttttgcctgcaaggatttagcggcggcgattgcctacatcataaccaattcccggacacttgaactcaatacagaagattattccctttggggcggctcggcagggggacgaatggccgcgcggctttcttccaatggaaccgcgttttatggtgaaaaggactatcctaaaccggcagcggcggtcatactctacactagccattcagactttaccgtaaataatccgccgactttcgccgttttaggtgaaatggacaatatcgcaaatccggtaatcatgatacagcgcattaatgacatgaaagccgcaggcattgacgttgaattttacctgtacccgagtgtcgggcatggtttcgggcttggcgttggcacttttgcagagggctggcttaacaacgctgtgcgtttttgggaaaagcacattaaataa

SEQ ID NO: 36730 - protein, 185 aa, Unknown
  Obtained from environmental sample
  DOMAIN (15)...(176): Prolyl oligopeptidase family
  misc_feature (1)..(185): Xaa is any amino acid
MCPGGGFAYVGSLHEGFPLALEISKKGYNAFVIRYQIGGERFACKDLAAAIAYIITNSRTLELNTEDYSLWGGSAGGRMAARLSSNGTAFYGEKDYPKPAAAVILYTSHSDFTVNNPPTFAVLGEMDNIANPVIMIQRINDMKAAGIDVEFYLYPSVGHGFGLGVGTFAEGWLNNAVRFWEKHIK

SEQ ID NO: 36731 - DNA, 588 bp, Unknown
  Obtained from environmental sample
  misc_feature (1)..(588): n is a, c, g, or t
ttggcggcgttgctcccgaaaggaggcattaaactgggcattttcaggcccatcaccgtatggcccttcccttataaggctctgaccgaattggccgcgaagaaaaaaacctttcttacagtggagatgagcgagggtcagttggttgaggacgtaaagctttctgtttatgaagctgttacaaatggcctttcactcacccttgaagaagtagagctgcttttcaagacgacaagggagcgcataagacagattgaggcaaaagcgcagcgccacctcaagaaggatccagggcggagcattgacgaggaagtcgccgacgcgtttttcatcctgtccgaacaggaacaggaaaatctgaaaatgcgctttcccgaacaagtggagcagcttttcaaggcgacaagggagcgtaaaaggcagattgaggcaaaagcgctgcgccgcctcgggcatccacagcggagcattctcgggcatccacagcggaacattggcaaggtgcatttcctgggacattccggcgggataattcccacggaagaagaagtttttgccgaggcgaaaaggattttaggtgtagaatga

SEQ ID NO: 36732 - protein, 195 aa, Unknown
  Obtained from environmental sample
  misc_feature (1)..(195): Xaa is any amino acid
MAALLPKGGIKLGIFRPITVWPFPYKALTELAAKKKTFLTVEMSEGQLVEDVKLSVYEAVTNGLSLTLEEVELLFKTTRERIRQIEAKAQRHLKKDPGRSIDEEVADAFFILSEQEQENLKMRFPEQVEQLFKATRERKRQIEAKALRRLGHPQRSILGHPQRNIGKVHFLGHSGGIIPTEEEVFAEAKRILGVE

SEQ ID NO: 36733 - DNA, 693 bp, Unknown
  Obtained from environmental sample
  misc_feature (1)..(693): n is a, c, g, or t
atggaagtcgtttcgttttcggtactggaactttttaaacttggcggcgtttttatgtggccccttcttgtattttcaatcgccaccgtcgccatttcgctggaacgggcgttctatcttatctaccacaatcttcgcgttgatgatatttacgccaatgtttcattttttgtcaattcgtcggattatcccgccgcgatagaatatctttccgatatttccaacaggcgtatgggagcgaggattcttctcgcgttgttcacgcgcgctaatccggggaaaaatttttcggaacacggcgccgaacgcatcgtagagacagaagccgcgaactgcatcaactcccttgaaaacggttttaactttcttaccgccctcggttccatatccccgctaacgggctttctcggaactgtttccggaatgataggcgcgttcagatctatcgccgaagcgacggaggtaaacgcccaaattgtcgcgaacggcatttacgaagcgcttattaccaccgtattcggacttgtaatcgcgataatagccatgatctttcattcgatatttacccaccttgttgataaattttcaagcaatatggaaagcatctgttcggatttaattatccgcctggctgaacagcatgaacacggacatgaacataaacatcacgaaaagagtaaacatgagatttaa

SEQ ID NO: 36734 - protein, 230 aa, Unknown
  Obtained from environmental sample
  DOMAIN (67)...(204): MotA/TolQ/ExbB proton channel family
  misc_feature (1)..(230): Xaa is any amino acid
MEVVSFSVLELFKLGGVFMWPLLVFSIATVAISLERAFYLIYHNLRVDDIYANVSFFVNSSDYPAAIEYLSDISNRRMGARILLALFTRANPGKNFSEHGAERIVETEAANCINSLENGFNFLTALGSISPLTGFLGTVSGMIGAFRSIAEATEVNAQIVANGIYEALITTVFGLVIAIIAMIFHSIFTHLVDKFSSNMESICSDLIIRLAEQHEHGHEHKHHEKSKHEI

SEQ ID NO: 36735 - DNA, 684 bp, Unknown
  Obtained from environmental sample
  misc_feature (1)..(684): n is a, c, g, or t
atgctttcttataaaaacccactccccattccctactccccactccctcacttgcacaaccggcgacaatatagtataccattattaaaggtttacaaaaaattgactgcaaacaataaattaaccgtaggcatcatttttggcggcaagtcggctgaacacgaagtttctttacagtcggcaaagaacgtgtatgacgccattgaccgcggcaaatttgatcccgtgcttataggcatagacaagaacggcgtatggcgctcaaccggcggttccatgtcattgttgaattcaagcgatccccgccgcatcagcctgaacgcctcgggcgaacctgttgctttggttcctgcgagcgacggactgctttccgccaagacggctgatggccccaaaattgacgtgatcttccccatactccacggcccgcttggcgaggacggcactgtccagggcctgcttaaacttgccggcgttccctttgtcggttcgggagtgttgggttccgcggtaggcatggacaaagacgtgatgaatcggcttttccgcgacgccggcctgcccataggcaaattcctcacgttcaaacacagcgaaaaacttccccctttcccggaaataaaggcggcccttggccaccccctgcttgtaaagcccgctaacatgggctcctctgtggaataa

SEQ ID NO: 36736 - protein, 227 aa, Unknown
  Obtained from environmental sample
  DOMAIN (41)...(173): D-ala D-ala ligase N-terminus
  misc_feature (1)..(227): Xaa is any amino acid
MLSYKNPLPIPYSPLPHLHNRRQYSIPLLKVYKKLTANNKLTVGIIFGGKSAEHEVSLQSAKNVYDAIDRGKFDPVLIGIDKNGVWRSTGGSMSLLNSSDPRRISLNASGEPVALVPASDGLLSAKTADGPKIDVIFPILHGPLGEDGTVQGLLKLAGVPFVGSGVLGSAVGMDKDVMNRLFRDAGLPIGKFLTFKHSEKLPPFPEIKAALGHPLLVKPANMGSSVE

SEQ ID NO: 36737 - DNA, 951 bp, Unknown
  Obtained from environmental sample
  misc_feature (1)..(951): n is a, c, g, or t
atggatacccatgaactgttaaccagaataaccagccttcccattgtagcggacggtcttgcggaaaatatgcttgccggtaatttccgctcggtattcaagggtcagggcatggagtttgacgaggcgcgccattatcagtggggcgatgacgcgcgggcgatagactggaatgccagcgcccgcctgggtactccctttgtaaagatgttccgggaagaacgggagttgacaattctgctgctcctggatacgtcggcttccatgcacggcggaacttcaaacctgttggggaattttcagatgggcgcgcacgaagagcaatgtccgagcccctttgagcaggcgttgatcgccgccgcccttattgctttttccgcggaacanagcggacagcgggtaggggcttttctttttgatcgggaaatagaccgggtgtttcctccccgcaagggaaggcgtaatgtactggcctttgtgtccggagcgctgcagcgccataaaccggaaacttcagtttggcaaaattttctgcccgcaaacgggtacaccagcaacctccgttccgccattaccggggcgggcagactgctcaagcggcggagtatggtggtgctgttctccgattttcacagcatgggctgggagcaggaactgggcggcctctccaacaggcatgatgtaattgccgtcaggataagtgacccgctggacgaagatttacccgacctggggcttatcaccctgcgggatcctgaaacgggcctggaattggcagcccctaccggttccgctgtctttcgggacgcgtggtcacaatggcacaaggaccacgccgacttatggttgaatttctgccgcagggcaggcgccgctcatcttacacttcccgtcaatgcggaccctgcggcggtattaacccacttttttggcggcagaggcggatggtag

SEQ ID NO: 36738 - protein, 316 aa, Unknown
  Obtained from environmental sample
  misc_feature (1)..(316): Xaa is any amino acid
MDTHELLTRITSLPIVADGLAENMLAGNFRSVFKGQGMEFDEARHYQWGDDARAIDWNASARLGTPFVKMFREERELTILLLLDTSASMHGGTSNLLGNFQMGAHEEQCPSPFEQALIAAALIAFSAEXSGQRVGAFLFDREIDRVFPPRKGRRNVLAFVSGALQRHKPETSVWQNFLPANGYTSNLRSAITGAGRLLKRRSMVVLFSDFHSMGWEQELGGLSNRHDVIAVRISDPLDEDLPDLGLITLRDPETGLELAAPTGSAVFRDAWSQWHKDHADLWLNFCRRAGAAHLTLPVNADPAAVLTHFFGGRGGW

SEQ ID NO: 36739 - DNA, 351 bp, Unknown
  Obtained from environmental sample
  misc_feature (1)..(351): n is a, c, g, or t
atggcaatagagtggaagcatattgaccttgccttgtttgatcggcttcctagaaaagacgaaaatttagccgttattgttgaagtcaagagaaagggctgcgcttgtttgtacgctaaagagcaggcaaagggttatgctcaaggtaaagatcactgtaaaaggttgattgtgacagacgggctgtgctatggaacgtataagaaaggacacaacggcgaatggtatccgaagccgtacgcatacttcaatctacaagatttgagagacgaacacacgatatacgattgtggaggagccaaagaggcattacaaatgatggcaatagagtggaaggacgagactctctag

SEQ ID NO: 36740 - protein, 116 aa, Unknown
  Obtained from environmental sample
  misc_feature (1)..(116): Xaa is any amino acid
MAIEWKHIDLALFDRLPRKDENLAVIVEVKRKGCACLYAKEQAKGYAQGKDHCKRLIVTDGLCYGTYKKGHNGEWYPKPYAYFNLQDLRDEHTIYDCGGAKEALQMMAIEWKDETL

SEQ ID NO: 36741 - DNA, 465 bp, Unknown
  Obtained from environmental sample
  misc_feature (1)..(465): n is a, c, g, or t
atgaaaaaaatcctttacttcgacatggacaatgtccttgttgacttttcctccggtattgcccgcctgagcgaagaaacaaaaaaagaatacgatgggcgtttggacgaagtcccgggtattttcagcttaatggatccgtttccgggttctatagaagccgtaaagaatttgtcgcgatattttgacatctatattctaagtactgcgccatggaaaaacatttcggcatggtctgacaaagcagcatgggtacataaatattttggcatcgacaaagacagcccattttacaagcgcttgattatctcgcaccacaaaaatcttaacaagggcgattttctgattgatgatcgtacgaaaaacggtgcaggagagtttgaaggagaattgatacaatttggaagtgaaaaatttcctgattggaataaagtaattgattatttagttagtaaatcaacataa

SEQ ID NO: 36742 - protein, 154 aa, Unknown
  Obtained from environmental sample
  DOMAIN (5)...(154): 5' nucleotidase, deoxy (Pyrimidine), cytosolic type C protein (NT5C)
  misc_feature (1)..(154): Xaa is any amino acid
MKKILYFDMDNVLVDFSSGIARLSEETKKEYDGRLDEVPGIFSLMDPFPGSIEAVKNLSRYFDIYILSTAPWKNISAWSDKAAWVHKYFGIDKDSPFYKRLIISHHKNLNKGDFLIDDRTKNGAGEFEGELIQFGSEKFPDWNKVIDYLVSKST

SEQ ID NO: 36743 - DNA, 567 bp, Unknown
  Obtained from environmental sample
  misc_feature (1)..(567): n is a, c, g, or t
ttgccggcgcagcctaggcactccgtgcccctccccctttgcactttcatgttgttgtttggagaacgctccgtgagtcagaaggaaagctcaaaggggaatggctacggctccccacagccactagacgaagcgcgccgctacacgatgagccggataaagagcaaggacacgtccatcgaggtcaggctcaggaaggccctgcgggcatcggggattcgctacaggaaaaactattccatgctgccgggcatccccgacgtggctatccccagctatcggatagccattttctgcgacggcgagttctggcacggcaaggactgggatcccttggcgccgaaggtccagcacaacagggacttctgggcggccaagatagagaggaacatcggccgggacagggcagtggagagggatctgcgggacatggactggactgtcctacgctactgggggtcggacatagtgaaggatccatcccgctgcgtcgaggaaattgaatacgcgatgttccagagcatgatggaggcatcggccacggactgggactacgaggatctatag

SEQ ID NO: 36744 - protein, 188 aa, Unknown
  Obtained from environmental sample
  DOMAIN (39)...(112): DNA mismatch endonuclease Vsr
  misc_feature (1)..(188): Xaa is any amino acid
MPAQPRHSVPLPLCTFMLLFGERSVSQKESSKGNGYGSPQPLDEARRYTMSRIKSKDTSIEVRLRKALRASGIRYRKNYSMLPGIPDVAIPSYRIAIFCDGEFWHGKDWDPLAPKVQHNRDFWAAKIERNIGRDRAVERDLRDMDWTVLRYWGSDIVKDPSRCVEEIEYAMFQSMMEASATDWDYEDL

SEQ ID NO: 36745 - DNA, 753 bp, Unknown
  Obtained from environmental sample
  misc_feature (1)..(753): n is a, c, g, or t
atgggacgagataacaaagcatggcggaaagagccgcctgttggaggccgcgctgtgaaagaattgcaatacgacgcggtcgttatcggcgcgggagccgcgggaatggcggcggctcttgaacttgagacgcaaggcttttcctgcgcgattattgatagggaagatcatcttggcggaatactcatgcagtgcattcacaacggtttcggccttcacgaattctccgaagaactgaccggtcccgaattcgccgaacgttttattgagcgcgtaacaaaatcaaagatagcggtttaccttaacaccaccgttacgcgctttacatccacaggcaataactgtatcaaggaactctactgcgtctctccttcaggcgcgatgagactccagagccgcgccgtggtactcgcgatgggctgccgcgagcgcaacagaggcaacgtgcgcatacccggctcgcgccccgccggaatttataccgcaggtctcgcacagcgtctggtaaacatagaaggctacattcccggcaaagaaatagtagttatcggctcaggcgacatcgggctgattatggcgcggcgcatgagttgggtcggctgtaaagtaaaagccgtggtagaaatcatgccgtatccggccggccttacacgcaacatcgtccagtgcttgaaagactttgacattccgctctacctttcctcgcagacaacaagcattttcggcaacgaccgcgtacagggaatgaggtaa

SEQ ID NO: 36746 - protein, 250 aa, Unknown
  Obtained from environmental sample
  DOMAIN (25)...(242): Pyridine nucleotide-disulphide oxidoreductase
  misc_feature (1)..(250): Xaa is any amino acid
MGRDNKAWRKEPPVGGRAVKELQYDAVVIGAGAAGMAAALELETQGFSCAIIDREDHLGGILMQCIHNGFGLHEFSEELTGPEFAERFIERVTKSKIAVYLNTTVTRFTSTGNNCIKELYCVSPSGAMRLQSRAVVLAMGCRERNRGNVRIPGSRPAGIYTAGLAQRLVNIEGYIPGKEIVVIGSGDIGLIMARRMSWVGCKVKAVVEIMPYPAGLTRNIVQCLKDFDIPLYLSSQTTSIFGNDRVQGMR

SEQ ID NO: 36747 - DNA, 801 bp, Unknown
  Obtained from environmental sample
  misc_feature (1)..(801): n is a, c, g, or t
gtgtcaaaaattttcggcgcggaagaatttacgattagcgcgagaaagggcgagtattttcttttggacaggctgacaaaagcctgtccgtcaaaagtggtctttcccgttcccacaagcgtttcaaaaggaatgcttgtaatccctacggttgaaggaaccgcgcttgtcggtcccaccgccgacgcagtcgaagacaaagacgatttttccaccacctctgcgcaccttgaaaggatactcgtttcgggaaagaccatgataccgtccttaagccagaacgatgttataacttcttttgccggccttcgcccgtgtttaggcgaagatttttatattgaggcttcggctaaagttccggcctttgttcaggtagccggcattcaaagcccgggacttaccgcgtcccccgccataggcgaatatgtaaaaaatattttacttgaaatcgggcttgtactgacggaaaagccgcattgggacccttatgttgaagaccgtccctgcgcgcgcgagcttaacttcagtcaactggacagcctgatcgcgaaagattccaaatggggcaacattgtctgccgctgtgaaaatgtcagcgaggctgaaatagtccaggctgtaaaacttgggcacacaactttagacggagtaaaatactttacgcgcgcgcagatgggacgctgtcagggcggattttgtacctacaagatcattaaaatcataatgagggaaaccggcctttcatgggacgagataacaaagcatggcggaaagagccgcctgttggaggccgcgctgtga

SEQ ID NO: 36748 - protein, 266 aa, Unknown
  Obtained from environmental sample
  DOMAIN (190)...(245): BFD-like [2Fe-2S] binding domain
  misc_feature (1)..(266): Xaa is any amino acid
MSKIFGAEEFTISARKGEYFLLDRLTKACPSKVVFPVPTSVSKGMLVIPTVEGTALVGPTADAVEDKDDFSTTSAHLERILVSGKTMIPSLSQNDVITSFAGLRPCLGEDFYIEASAKVPAFVQVAGIQSPGLTASPAIGEYVKNILLEIGLVLTEKPHWDPYVEDRPCARELNFSQLDSLIAKDSKWGNIVCRCENVSEAEIVQAVKLGHTTLDGVKYFTRAQMGRCQGGFCTYKIIKIIMRETGLSWDEITKHGGKSRLLEAAL

SEQ ID NO: 36749 - DNA, 1290 bp, Unknown
  Obtained from environmental sample
  misc_feature (1)..(1290): n is a, c, g, or t
ttgaactgcggctgtacctatcccatgctgaccgtggcgtgtaaaaagggattggtcagcgaagaggcgatagatgccgcgcttacccggttgctacgcacccgctttaagctggggatgttcgatccgccgaacagcggcaaatacggaaagttggggcgcaaggtaatcaactgcgagaagcacaaacagcttgcgctcaaggccgcggaaaagtccattgtgctgctcaaaaacgacaacaagcttctgcctttggattccggcccgaaggtgatcaccgtcgccggccctgccgcggcaaacgcccacgcgctttttggcaattattacggggtcagcccgcgctttgtcaccatacttgaaggcctggctgataaggttaaagacgcgttcggcattgacctgaattaccgccagggctgccttatgtatggcgatatcagcaaatccaacgtcgtatacggcgaggccaatgtcagtgatattgtaatcgcggtaatggggctggacggcgcaatcgagggcgaggagggagacgcaatcgcttcggactccaacggcgaccgcatggcgattgagctgcccccctggcaggtgaagttccttaaagcgattcgcgcggcgggtaaaaagatcgttctggtgcttacaggcggcagccccatcgcttttcccgaagatctcgcggacgcggttatcttcgcgtggtatccaggcgagttaggcggtagagccgttgctgacattatctttggcgacacggttccgtcagggaaacttcccatcaccttcccggtttcgacggcgcagcttcccccttacgaggattattccatgaagggccgtacttaccgctacatgaaagaaaaacccctttatccgtttggctttgggctttcctataccgctttccgttttgattcgcttgcactttccgcgccgacaatttcggcgaatgcgacggttaaagcgaaagtaacgctgagcaataccggcaagcgggacgcggaaaatgtggtgcagatctacgtttcaaaagatgagcgcggcgttgacgatccggaattttctttgcgcgctttccgccgcgttttagtcccggcgggtaaatctgttactgcagaattcgccctttccgccgcggcttttgaaacagtgaacgccgaaggggattccgtgctgctgccaggttcctacacggtaattgccgcggactcagctccattgccggttgctgtagaaaagggagctactgttccggtaaatgccaagataacggtaggctag

SEQ ID NO: 36750 - protein, 429 aa, Unknown
  Obtained from environmental sample
  DOMAIN (74)...(304): Glycosyl hydrolase family 3 C terminal domain
  misc_feature (1)..(429): Xaa is any amino acid
MNCGCTYPMLTVACKKGLVSEEAIDAALTRLLRTRFKLGMFDPPNSGKYGKLGRKVINCEKHKQLALKAAEKSIVLLKNDNKLLPLDSGPKVITVAGPAAANAHALFGNYYGVSPRFVTILEGLADKVKDAFGIDLNYRQGCLMYGDISKSNVVYGEANVSDIVIAVMGLDGAIEGEEGDAIASDSNGDRMAIELPPWQVKFLKAIRAAGKKIVLVLTGGSPIAFPEDLADAVIFAWYPGELGGRAVADIIFGDTVPSGKLPITFPVSTAQLPPYEDYSMKGRTYRYMKEKPLYPFGFGLSYTAFRFDSLALSAPTISANATVKAKVTLSNTGKRDAENVVQIYVSKDERGVDDPEFSLRAFRRVLVPAGKSVTAEFALSAAAFETVNAEGDSVLLPGSYTVIAADSAPLPVAVEKGATVPVNAKITVG

SEQ ID NO: 36751 - DNA, 969 bp, Unknown
  Obtained from environmental sample
  misc_feature (1)..(969): n is a, c, g, or t
ttgatccgccgcttccgttacaaggcaaccaaagcagctctcgcccaggaacttatcaagcggcttgataaaatggagcgtatagaaatcccggaaaacctgaaaaagataaacataacttttccgccgccgccccattcgccccgtgtcgcgctgaccattgaagggcttggcaagagctacggcgcaaagagggttcttcatgggctggatctgactattgattcaggcgagaggctggtggttgccgggcccaacggggcgggcaagacgaccctgcttcgcatacttgcgggcaatgacaataattttgaaggctctgtaaaattcggatcgggcataagtgccggttatttttcgcaggacgcagccgaggcgttgaacggcagcgagcaggtgcttgagttcatggaagccaatgcccccacggcgctcatccccaaaatacgggatatgcttggggcgtttctctttcgcggcgacgatgtttacaagcccgtctcggtgctttcaggcggggagaaaagccgcctcgccctgctgtacatgctccttaagcccctgaacctcctgattctggacgagccaaccaaccaccttgatctccattcaaaggacgtactgctggaaaccctcaatcaattcaagggaacgataatttttgtctctcacgaccgcgccttcatggaagccctgtccacgaagacactggagctttctcctggtgatggtggtgcttcatcacgagcaatgctttactatggaaactatgcgtactacttggagaaaatagggagtggggagtggggagtggggagtagggggcagggagcagggagcagggaacagggaacagggaacgggggaagaggcataacatataacagagaacagataacagataacagagaagaaggagaagggaagaggaaagagggaagagggagcgatatcaaaagagcgcgatga

SEQ ID NO: 36752 - protein, 322 aa, Unknown
  Obtained from environmental sample
  DOMAIN (77)...(242): ABC transporter
  misc_feature (1)..(322): Xaa is any amino acid
MIRRFRYKATKAALAQELIKRLDKMERIEIPENLKKINITFPPPPHSPRVALTIEGLGKSYGAKRVLHGLDLTIDSGERLVVAGPNGAGKTTLLRILAGNDNNFEGSVKFGSGISAGYFSQDAAEALNGSEQVLEFMEANAPTALIPKIRDMLGAFLFRGDDVYKPVSVLSGGEKSRLALLYMLLKPLNLLILDEPTNHLDLHSKDVLLETLNQFKGTIIFVSHDRAFMEALSTKTLELSPGDGGASSRAMLYYGNYAYYLEKIGSGEWGVGSRGQGAGSREQGTGNGGRGITYNREQITDNREEGEGKRKEGRGSDIKRAR

SEQ ID NO: 36753 - DNA, 483 bp, Unknown
  Obtained from environmental sample
  misc_feature (1)..(483): n is a, c, g, or t
atgatcgcgagcgggataaccgctctttcccccggggacatcatggccatcaccgaccacataaatctgcttggcgacaatccgctgataggcccgaacgacgaccgcataggcccgcgctttcccgatatgtcgcagccctattcgggcgaattgctgaatatcgcctccaaggtcgctcttgacaacgggataaggcttgagcgcggggtgtacgccgcaatgagcgggccgtcgcttgagactaaggcggaataccggatgcttaagacgctcggcgccgacgttatcgggatgagcaccgttccggaggtgatagccgccgtccacgcttggatgagggtgctcgggttctcggtgatcaccgattcgtgcctgcccgacgcgcttgaaccggccacgctgacaaaaatcctcgcgattgcggataaagccgaacccgtacttgttaaattgatagaaaaggttttgcaggcgctatga

SEQ ID NO: 36754 - protein, 160 aa, Unknown
  Obtained from environmental sample
  DOMAIN (3)...(160): Phosphorylase family 2
  misc_feature (1)..(160): Xaa is any amino acid
MIASGITALSPGDIMAITDHINLLGDNPLIGPNDDRIGPRFPDMSQPYSGELLNIASKVALDNGIRLERGVYAAMSGPSLETKAEYRMLKTLGADVIGMSTVPEVIAAVHAWMRVLGFSVITDSCLPDALEPATLTKILAIADKAEPVLVKLIEKVLQAL

SEQ ID NO: 36755 - DNA, 807 bp, Unknown
  Obtained from environmental sample
  misc_feature (1)..(807): n is a, c, g, or t
ttgcacggacacaacacggactatcacggattttgcgtgatgctggaacagggaggaatcgagccgaagggtaaaaagacattagtgttaggcgacggcggatctgcacggacagtgagggctgcgctggacggactgggcgcgcgcgagattgtgacgatctcacgtcgtggggagaatcactacggcaatatcgctctacattatgacgcggatattatcgtaaataccacgcctgtcggcatgtatcctgacaacggtaatagtcctttgagccttgcgggatttaagcaattaacaggcgtggccgatctgatctacaatcccacacggaccaaacttctgcttgaagctgaggagcttggcattacccgcgtaaacggccttgtaatgcttgttgcccaggccgaggcggcatcccgcttgtttctggacagtcctgcgaggccggaattggtgaataaaatttacgatgcgattctcaaaagaacgcaaaacatcgcccttatcggcatgcccggctgcggaaaaagcactgtcggcaggctgctcgctgaaaagctggggcggccatttatggatattgacgcacagattgaggcggccgcggggaaaaaaatcccccaaattttcgccgaagacggggaggagacattccggcaactggaaacccgcgtactcgccgaagaagccaaaaaaagcggcgtggtactggcgacaggcggaggcgttgtaacacggcctgaaaatctcaatttgctgaaacaaaacagttttaattgtttacttaaaacgcgaattaactga

SEQ ID NO: 36756 - protein, 268 aa, Unknown
  Obtained from environmental sample
  DOMAIN (11)...(115): Shikimate / quinate 5-dehydrogenase
  misc_feature (1)..(268): Xaa is any amino acid
MHGHNTDYHGFCVMLEQGGIEPKGKKTLVLGDGGSARTVRAALDGLGAREIVTISRRGENHYGNIALHYDADIIVNTTPVGMYPDNGNSPLSLAGFKQLTGVADLIYNPTRTKLLLEAEELGITRVNGLVMLVAQAEAASRLFLDSPARPELVNKIYDAILKRTQNIALIGMPGCGKSTVGRLLAEKLGRPFMDIDAQIEAAAGKKIPQIFAEDGEETFRQLETRVLAEEAKKSGVVLATGGGVVTRPENLNLLKQNSFNCLLKTRIN

SEQ ID NO: 36757 - DNA, 1188 bp, Unknown
  Obtained from environmental sample
  misc_feature (1)..(1188): n is a, c, g, or t
gtggaagtggacaaagacggcataaggcggcgcatagaccttgcccagaacgttcaggaccactggtatctgcagcttgcgttctcccccatgattgattatctcgggaatccttccatagagctggataaccgctggttgtacctgaaaaacgcgaggatgccgaacaatccggtaaaagacatcaagatccccctggacggtaatggcaggatgctgcttgactggccaaaaacagattattttgacagctataaccatatttcctttgctgatttctccctgatggaagaacttgagcttgaacttgagcagtatacgcggactctgggcgatacggatattccttttttttcagagcttgaacctcaaccgagcccgaagggcgaaggttcccctcttgaaccttccctcgcgaaaatacccttgatcatcatggatcttgaaaaaatttttgatgtgattcatccggcaagagccgaggctctgagaaattgttccgacgaattatttaaaacctatgtggattgccgcaggataagccgcgggcttatgcgtgaaatcctgaacataaaccctgatgttaaagtaaagacccttatccccgaacttgaggaacgttatccgaataacgcggacgcaatccgcgatgaagccgcgtacatatcgaccctggtggagtacatccgcataaacctggacagatacgaaagcatcagtgaaaatattgaaaaattgattaatgataaattctgcattcttggccgtgtcgatacgggaacaacggatataggctcaaatccgttctacagcgaatatgtcaatgtaggaacccacggggtgatactcgacatgatcctttccggttctttcatcactccgctgggaatatactggcagacgtttttcgcgcttgtcttcgcggcattgtttcttttggccggctcgcgcctttcgcctgcgtcaagggcgtcatccggttttattttaatcgtcattgtaaccggcctgacggttttactgttccggtttaccgggttgttcttcagccccctcgcggcggtcttttccatggtttctgcggtcattgtcagcgagatcatctcctataccgaatcggaacgtgaaaaacaatttatcagaaaggccttttccacttatgtttccgacgatgtggtcaaggaataa

SEQ ID NO: 36758 - protein, 395 aa, Unknown
  Obtained from environmental sample
  misc_feature (1)..(395): Xaa is any amino acid
MEVDKDGIRRRIDLAQNVQDHWYLQLAFSPMIDYLGNPSIELDNRWLYLKNARMPNNPVKDIKIPLDGNGRMLLDWPKTDYFDSYNHISFADFSLMEELELELEQYTRTLGDTDIPFFSELEPQPSPKGEGSPLEPSLAKIPLIIMDLEKIFDVIHPARAEALRNCSDELFKTYVDCRRISRGLMREILNINPDVKVKTLIPELEERYPNNADAIRDEAAYISTLVEYIRINLDRYESISENIEKLINDKFCILGRVDTGTTDIGSNPFYSEYVNVGTHGVILDMILSGSFITPLGIYWQTFFALVFAALFLLAGSRLSPASRASSGFILIVIVTGLTVLLFRFTGLFFSPLAAVFSMVSAVIVSEIISYTESEREKQFIRKAFSTYVSDDVVKE

SEQ ID NO: 36759 - DNA, 1572 bp, Unknown
  Obtained from environmental sample
  misc_feature (1)..(1572): n is a, c, g, or t
atgaagcgttttgccaaataccttaaaacacggccaatcggcatggtctcctttgttcttcttttacttttgtattttatgatgatcttcgccgagtttttcgcgctttattcgcctaacacatcgttctccgacaaaagctaccatcctcccaacgttcgtttttataagggcaaattacaggtacaggaattccgcgtgacaaacaccgttacatggaaatacgcgcgggtaaaagatatgtactctccgctgattttctttggaaagggcgaagcatacaggctttggggccttatccccgcgcagcgtcatataatcggcagcgctaacggcaacgccgactcttccaggccggtcttcctcatgggtacggacaacctgggccgggacattttttcccgcatcgtgtacggctcgcggatttcgcttaccatcggctttgttgcgacattcctgtcgctcgcgctggcggtattgttcggggggctttcaggctactacggcggccttaccgactggtcgatcatgcgttttgccgaattcctcatgttgattccaggcctctacctgatcttgtttttacgctcgctcatggcttcgaccatggacaccggccaggcgtacatgatgatcacggtgatactctcgctggttggctggcccggctcggcgcggacgattcggggcatggtgcatgcgattaaacgcgaggaatttgtattgaatgccaaattggagatgatcccgtccgtngtaataattttcaggcacattatcccgcagatagcgagtttgttaattgtaagcgtggcgttaagcatacccggctttattatgacggagaccgtcctttcttaccttggacttggtattactgacccggcggtaagctggggttctcttatcaaacgagatctttccacgattgcaaaccttcgcgctttcccttggctgttaagtccggtctggtttttattgggcgtaacgctggcgtttaacttcatcggagacgcattgcgcgacttttatgacccgtaccatatcggtatgacgggaagcggaaaatggagtcttaagaaattgatccgcaaaattttccgttctcccgcacagccgctttccactacaaataccacactccccgcttcccaagacaccgccgaacacaatgcttccaacgccgcccttctctctatccgcgatcttacggtaactttcaaagtccagcgcggcagggattttatcgcaattcaggcggtacgcgggctttcctacaacctgcaaaaaggcgagaccctcggcattgtaggagaaagcggatctggcaagagcgtaggcactttggcaattccgggattactgccaaagaacgcgaatgttaacggttccattttatatgaaggaaaggagcttacaggacttgataccgaaggtttacgcaaataccgaggaaaaaagatcggaatgatttttcaggagcccgggcgctcctatgatccgcttcagaacatgggaaatgtgttttgggagacattcagaaacagcgagcctaaatctcggccaatctga

SEQ ID NO: 36760 - protein, 523 aa, Unknown
  Obtained from environmental sample
  DOMAIN (140)...(350): Binding-protein-dependent transport system inner membrane component
  misc_feature (1)..(523): Xaa is any amino acid
MKRFAKYLKTRPIGMVSFVLLLLLYFMMIFAEFFALYSPNTSFSDKSYHPPNVRFYKGKLQVQEFRVTNTVTWKYARVKDMYSPLIFFGKGEAYRLWGLIPAQRHIIGSANGNADSSRPVFLMGTDNLGRDIFSRIVYGSRISLTIGFVATFLSLALAVLFGGLSGYYGGLTDWSIMRFAEFLMLIPGLYLILFLRSLMASTMDTGQAYMMITVILSLVGWPGSARTIRGMVHAIKREEFVLNAKLEMIPSVVIIFRHIIPQIASLLIVSVALSIPGFIMTETVLSYLGLGITDPAVSWGSLIKRDLSTIANLRAFPWLLSPVWFLLGVTLAFNFIGDALRDFYDPYHIGMTGSGKWSLKKLIRKIFRSPAQPLSTTNTTLPASQDTAEHNASNAALLSIRDLTVTFKVQRGRDFIAIQAVRGLSYNLQKGETLGIVGESGSGKSVGTLAIPGLLPKNANVNGSILYEGKELTGLDTEGLRKYRGKKIGMIFQEPGRSYDPLQNMGNVFWETFRNSEPKSRPI

SEQ ID NO: 36761 - DNA, 330 bp, Unknown
  Obtained from environmental sample
  misc_feature (1)..(330): n is a, c, g, or t
atgccggcaagggcgtatacaagttcctgctgtccgttcccgtcaattccggcaatgcagacaatctcgccttccctcacctcaaaactcgcgttgttaacaaggggtatacctgaagtattgccggtaacggtaagattctctacttttagaataacatctcccggttttttttcggttttttcaaccataagatttacctttctgcctaccatcatttcggaaagttcttctttggaaacggaggcgacatccgccgttcccgtggatttgcccttgcgcagaacggtacagcgccccgctaccgctttgatctcgtccagtttgtga

SEQ ID NO: 36762 - protein, 109 aa, Unknown
  Obtained from environmental sample
  misc_feature (1)..(109): Xaa is any amino acid
MPARAYTSSCCPFPSIPAMQTISPSLTSKLALLTRGIPEVLPVTVRFSTFRITSPGFFSVFSTIRFTFLPTIISESSSLETEATSAVPVDLPLRRTVQRPATALISSSL

SEQ ID NO: 36763 - DNA, 723 bp, Unknown
  Obtained from environmental sample
  misc_feature (1)..(723): n is a, c, g, or t
atggctatttactcgggcaatggagccataataggaaacctgcggcctgatcgtgtagggaaacttctgcccgaagtggaagctttatacggtatttatcagaaaaacgccaatcaggccgtacttgacggcaaaccgttcaactgttcaagctattcgaattcgttaaataagaacgtgagaattgaaatggcgcctttcaggataggcaactcaacaaactactggagcgtaatgatcgcggctacagaggaatatattatgagagatgtcatagcgatgaaaaattttgtcattgttatggcgtcgatcgcggccgcggcggcggttgtaatcctattcctccttctgaacagcgccgtcaggtcaattatcaacaacgcaaaaaaataccgggcaatattttcatacacgatagtcctggtcgtcatattggcgttcgcgcttatggtcgctctaagttccgtttttatgtccaacatagtcagccgtcagctggaaagcaacgcgcttgcggcgcttgactatctggaaaccaatatcgttgtagacctcaaagagcccaggacgctgctgggcggcgcgtcagaaaccgtgcgaaaaatgatcctgcacggcgcanacgaaaaagaagtgcatgcttatctgaatgaaatctccgattttttactgagtgatgatgagcagcttgcggactttgacgggcttttcgggttattttaa

SEQ ID NO: 36764 - protein, 240 aa, Unknown
  Obtained from environmental sample
  misc_feature (1)..(240): Xaa is any amino acid
MAIYSGNGAIIGNLRPDRVGKLLPEVEALYGIYQKNANQAVLDGKPFNCSSYSNSLNKNVRIEMAPFRIGNSTNYWSVMIAATEEYIMRDVIAMKNFVIVMASIAAAAAVVILFLLLNSAVRSIINNAKKYRAIFSYTIVLVVILAFALMVALSSVFMSNIVSRQLESNALAALDYLETNIVVDLKEPRTLLGGASETVRKMILHGAXEKEVHAYLNEISDFLLSDDEQLADFDGLFGLF

SEQ ID NO: 36765 - DNA, 825 bp, Unknown
  Obtained from environmental sample
  misc_feature (1)..(825): n is a, c, g, or t
ttgtgcggggcgaatgaagcccgacatctcgctaaatttcttttgtgcaaggatagagaagaaatagaagacttgtttgaaaaacttatggagtgcaatgcccagcgcagaaagatagaactggatattcacgctcaggcaattaagagaattgaggaaatttacggaaatgatttgcccaaagttctgatagtggattctttggaatggaatataggcgttgtgggaattgttgcagcgcgagttgctcaggggtataagcgcccaaccgcgataatctccattcaaagcgatggtattgcggttgcgagtgcacgttccgctggttcgtttgattggcacgccgcgcttttcccgtgcaggtctctttttatccgttggggcgggcacgtgaaagctgccggttttaacatagctgcagagaagataaacgagcttagagttcgcatggaagaacaagcaaacattcaggggttcacgccgatagttgaagaaaatgttcattatgatttggaggtttcgctttcggaaatcaatgcaaattttttgaatgaattaaaaaggttagaaccctttggcaatgaaaatccctatccggtatttttggcaaggcaggttactgttaagaatttaaaactgttgaacgatagccatttgcgtttttatgcggttcagggcaggagttcaatttctgctatagcattccataaggcatatttgtctgattcgcttcaaaaaaacgaagtaaatttgatttttgaagctcgttttaatgtttatcaaggggtggagaacgttcagttgatagtgctgggaacggtgtag

SEQ ID NO: 36766 - protein, 274 aa, Unknown
  Obtained from environmental sample
  DOMAIN (87)...(152): DHHA1 domain
  misc_feature (1)..(274): Xaa is any amino acid
MCGANEARHLAKFLLCKDREEIEDLFEKLMECNAQRRKIELDIHAQAIKRIEEIYGNDLPKVLIVDSLEWNIGVVGIVAARVAQGYKRPTAIISIQSDGIAVASARSAGSFDWHAALFPCRSLFIRWGGHVKAAGFNIAAEKINELRVRMEEQANIQGFTPIVEENVHYDLEVSLSEINANFLNELKRLEPFGNENPYPVFLARQVTVKNLKLLNDSHLRFYAVQGRSSISAIAFHKAYLSDSLQKNEVNLIFEARFNVYQGVENVQLIVLGTV

SEQ ID NO: 36767 - DNA, 459 bp, Unknown
  Obtained from environmental sample
  misc_feature (1)..(459): n is a, c, g, or t
atggctgtttaccagtccgacacgatctattcgtccttttttctggtttactcgaaccgaatttaccaggctacgcccagtttggacctgttttacaaccgccaggagccgaatggggccataagaagcgcttataacatcaatacagggaagccggttgtcgagcgcgacaactccgaatgcctcggcatcccgctttttgcctgggctgagtataatatctaccataaaggggctaataaaaaacgggtcaaggacgtgcttgccgttctggaccagtataccgcgtggattgacaaaactttcacaaagtcccaccgtctttaccgggtgcccctcgcggtcacgggcatatcaaattccccccacaaaggaacctattattctctggatatcaacgccctgatggcgatccacgccctgtatctgtccgcaatggccgatatgctgcacgactaa

SEQ ID NO: 36768 - protein, 152 aa, Unknown
  Obtained from environmental sample
  misc_feature (1)..(152): Xaa is any amino acid
MAVYQSDTIYSSFFLVYSNRIYQATPSLDLFYNRQEPNGAIRSAYNINTGKPVVERDNSECLGIPLFAWAEYNIYHKGANKKRVKDVLAVLDQYTAWIDKTFTKSHRLYRVPLAVTGISNSPHKGTYYSLDINALMAIHALYLSAMADMLHD

SEQ ID NO: 36769 - DNA, 756 bp, Unknown
  Obtained from environmental sample
  misc_feature (1)..(756): n is a, c, g, or t
atgtgggacccccaggacggtttttaccatgacatcgacaaaaacgaaaaaaagctgcccgtaaaaaccatcgcggggtactggccgctcctggcggaaatccccaatgacgagaaagccgaaaaaataatcgccaagctctccgacccgaattatttcggcgcgccccaccccttcccttcgctttcgctttccgataaaaactttgacgaaaacgggcgcgggtatcacggctcagtgtacccacacctgacgttcatggttataaagggactggaacgctaccagcgctgggatctcgcccgcgaatgcgccatacgccatctgtattttatgctggattcgatgagcccggacggcaaccaccacaggggcaacctttgggaagcctatatgcccacaaaggaaggcccggcaaaatggcccggcaagcccgattttccccgctcccagtacctgtcctacgacgcgctttccacaatctgcctgaccatcgagaatatagtcgggttgtttatatcacttccaagaaaaaccgtggactgggtcatccccaaccttgaaataatgggcattgaaaacctgtccctcaagaaaaacatgataacgatactctcccacagaagcgggcggggatgggaaatacacatggaaagcgagaaactctattactttaccattaacatccttgggaagaaaaaaaagaccctgcccattccctcgggaaaatgctcaatgcttatagacaaattgtaa

SEQ ID NO: 36770 - protein, 251 aa, Unknown
  Obtained from environmental sample
  misc_feature (1)..(251): Xaa is any amino acid
MWDPQDGFYHDIDKNEKKLPVKTIAGYWPLLAEIPNDEKAEKIIAKLSDPNYFGAPHPFPSLSLSDKNFDENGRGYHGSVYPHLTFMVIKGLERYQRWDLARECAIRHLYFMLDSMSPDGNHHRGNLWEAYMPTKEGPAKWPGKPDFPRSQYLSYDALSTICLTIENIVGLFISLPRKTVDWVIPNLEIMGIENLSLKKNMITILSHRSGRGWEIHMESEKLYYFTINILGKKKKTLPIPSGKCSMLIDKL

SEQ ID NO: 36771 - DNA, 327 bp, Unknown
  Obtained from environmental sample
  misc_feature (1)..(327): n is a, c, g, or t
atgaaatacatactttgcctggcgctgnccgcgaccttcattttcgcntgcgccagctttaagtcagaaaatgcggatttgtatgaaggctccgcaatgggataccggggtatgatccatgtacgggtgggaatggaaaacggaactattacggagattaccgtaattgaatccggcgaagatccggctataggaggagcagctattgaggaattgacagaccttgtgctgatgtacaataccacggagatcgacgcggtttctggggcaacggaaacaagcaggggcttccttgaagcggtcgaaaatgctatatttaccccatga

SEQ ID NO: 36772 - protein, 108 aa, Unknown
  Obtained from environmental sample
  SIGNAL (1)...(21)
  DOMAIN (34)...(108): FMN-binding domain
  misc_feature (1)..(108): Xaa is any amino acid
MKYILCLALXATFIFACASFKSENADLYEGSAMGYRGMIHVRVGMENGTITEITVIESGEDPAIGGAAIEELTDLVLMYNTTEIDAVSGATETSRGFLEAVENAIFTP

SEQ ID NO: 36773 - DNA, 345 bp, Unknown
  Obtained from environmental sample
  misc_feature (1)..(345): n is a, c, g, or t
atgagcgactgtattttttgcaggatcataaagggagaaatccccagtaaaaagatctatgaagatgatgaaatgttcgcgttccatgatattacgccaatggcccctgtgcattttctgcttattcccaaaaagcatattaagagcctgatgcatcttgaagcggaagacactgcgttgataggccggctactgggcaaggctcaggaactggcaaaagatcagggctgcgcggagaacggcgcgcgctttgtgatcaatgcggggcgcgacggcgggcagacagtggatcatctccacatccacatccttggcggacgcgccctcggctggcctccggggtga

SEQ ID NO: 36774 - protein, 114 aa, Unknown
  Obtained from environmental sample
  DOMAIN (4)...(109): HIT domain
  misc_feature (1)..(114): Xaa is any amino acid
MSDCIFCRIIKGEIPSKKIYEDDEMFAFHDITPMAPVHFLLIPKKHIKSLMHLEAEDTALIGRLLGKAQELAKDQGCAENGARFVINAGRDGGQTVDHLHIHILGGRALGWPPG

SEQ ID NO: 36775 - DNA, 1125 bp, Unknown
  Obtained from environmental sample
  misc_feature (1)..(1125): n is a, c, g, or t
ttgcgcaggaacttatcaaacgngcttgaaaaaatggagcgcattgagattccagaaaacctaaaaaagataagtatcagctttccgccgccgccccattcgcctcgagtagccctaacgctggaagggatatccaaaagctatggcgaaaggcaggttctctcgtaccttgacctaacccttgacgccggtgagcggctgcttgtggcaggccccaacggcgcggggaaaaccacgctgctaagaattattgcaggcggggatacagattacgaggggctggtcaaatacggcgcgggtatttccaccggatatttttcgcaagacgcggcggaaaccatttcgggcagccaaacggtagagcaatacatcgagagcgaagcgcccacacacttaattccaaaagtaaggggcatgcttggggcttttcttttccggggcgacgatgtcttcaaatccctttcggtattgtcaggcggtgagaaaagccgtcttgccatgctcaggatgcttcttaaacccatgaaccttttgatattggacgagccgactaatcacctggatttacagagcaaggacatactgcttgactgccttaaagctttcgaaggaacaataattttcgtttctcatgaccggggttttatggaagccctgtcaacaaaaacattggagctgtccattgggagattggcaggtgaagcggaaccgaagcggcggcaccggcttttctacggcaactacgcttattatctggatcgcatagccaacgaggaatcaaaccataggtttgttggcgaaataaacgcaagcgataatattgaggtgaagcccccaaaaagtcagtcgccgtcggaacgccgagaacaggaaaaacaaaagcaggcccttgtacggcggcttgagcgtaaggaagcagaaacgctcttggctatggaaaagctggaaagcgaaaagaagcggcttgaagaagaacttggcaaaccggcagtttactcgtcaggcgaaaaagcaagggccgttaagctcgctctggacgaaacagtggcggctctggaagctaaatccagagaatgggaaggtattgcaggagagctggaaaaggctagaaagagttctctataa

SEQ ID NO: 36776 - protein, 374 aa, Unknown
  Obtained from environmental sample
  DOMAIN (40)...(232): RecF/RecN/SMC N terminal domain
  misc_feature (1)..(374): Xaa is any amino acid
MRRNLSNXLEKMERIEIPENLKKISISFPPPPHSPRVALTLEGISKSYGERQVLSYLDLTLDAGERLLVAGPNGAGKTTLLRIIAGGDTDYEGLVKYGAGISTGYFSQDAAETISGSQTVEQYIESEAPTHLIPKVRGMLGAFLFRGDDVFKSLSVLSGGEKSRLAMLRMLLKPMNLLILDEPTNHLDLQSKDILLDCLKAFEGTIIFVSHDRGFMEALSTKTLELSIGRLAGEAEPKRRHRLFYGNYAYYLDRIANEESNHRFVGEINASDNIEVKPPKSQSPSERREQEKQKQALVRRLERKEAETLLAMEKLESEKKRLEEELGKPAVYSSGEKARAVKLALDETVAALEAKSREWEGIAGELEKARKSSL

SEQ ID NO: 36777 - DNA, 933 bp, Unknown
  Obtained from environmental sample
  misc_feature (1)..(933): n is a, c, g, or t
ttgtcgcgggcgctgtctgccgtggacgagattctgcaggcggatccaagggacggagaaatccttttgattaaagcctcgatccttcttgagcaggggcagtattcgcagtcaaacacttcattggacagttacgcctccattaacccaaacaacagaacatatctctttttacgcgcgcgtgtacaggccgaaggaaaccgcaaccgcgattcggcgttaaactacctccgctcgattttgcgcacttcccccgatgatacggaagttcttgtttatgcggcaggtttgcttatggagtcccagcgtcctgcggatcaaagcgagggcagggaaatgcttgagcgcctaaggcggacaaacggctcttccgtggaagtgctgagcctaagcctgagggacgcggtacaacgcgaacagtggcaggaggcgcaggggtatttgaacaggattcttgcagtccgcagaacggttcaggatctgacagacgcgtataatgttgaacgggggctgggcaataacgcaagagcgcttaccttcgcccgcgaattgtacgagcgcgataattccaatcatgagtatgccgcgatttatatttccgccctgattaattccggcagaagggacgaagcggcgcgtttgctggaaagccgtattaattccgcaagtacaagtcaaattaaaagccgttatttttatctgcgaagccgtttacaatcaaatcaagacgacgcccttagcgatttgcgctccagtctttttgaagaccccagaaatctggacgccattatcgccatgttccagatttaccacgaccgccgcgaagaacgccgcgccgtctactacctgaaacaggggcttgccatatctcccgatcatcctgtcttaaaacgctacgagaaagaatacgcctcgttgttaggtagaaattaa

SEQ ID NO: 36778 - protein, 310 aa, Unknown
  Obtained from environmental sample
  misc_feature (1)..(310): Xaa is any amino acid
MSRALSAVDEILQADPRDGEILLIKASILLEQGQYSQSNTSLDSYASINPNNRTYLFLRARVQAEGNRNRDSALNYLRSILRTSPDDTEVLVYAAGLLMESQRPADQSEGREMLERLRRTNGSSVEVLSLSLRDAVQREQWQEAQGYLNRILAVRRTVQDLTDAYNVERGLGNNARALTFARELYERDNSNHEYAAIYISALINSGRRDEAARLLESRINSASTSQIKSRYFYLRSRLQSNQDDALSDLRSSLFEDPRNLDAIIAMFQIYHDRREERRAVYYLKQGLAISPDHPVLKRYEKEYASLLGRN

SEQ ID NO: 36779 - DNA, 525 bp, Unknown
  Obtained from environmental sample
  misc_feature (1)..(525): n is a, c, g, or t
gtggcaatgccttccttaccgctaaggttacaatttcctagtcattctcaggagcagaaaataagtcttgcatgttttgaaacagttcattctttatcgtcagagactacatttgatattgaaagcgaagaatcaaccggaactgtccaactatttaatatgctttttttgcttctggatgtagtatgtaatgggaaatcaataatgcttgatgaatttgatttaagcctccacaccaaacttgcggattttgttatcgatctgtttcatgcttcgtcaaaatcccagtttctttttacatctcacaataccaatttaatagatgtaaagcgattcaggcgcgatcaaatcctgtttaccaataaaaggcctgatggttctacagaagtttactcgttatatgatcacaaggatttcagggagaacatggatgctgaaaaaggttatttacagggtcgttttgaagccataccttatgtagacagttctgttgccaacttaaaaaaacttcttggcaatatatag

SEQ ID NO: 36780 - protein, 174 aa, Unknown
  Obtained from environmental sample
  misc_feature (1)..(174): Xaa is any amino acid
MAMPSLPLRLQFPSHSQEQKISLACFETVHSLSSETTFDIESEESTGTVQLFNMLFLLLDVVCNGKSIMLDEFDLSLHTKLADFVIDLFHASSKSQFLFTSHNTNLIDVKRFRRDQILFTNKRPDGSTEVYSLYDHKDFRENMDAEKGYLQGRFEAIPYVDSSVANLKKLLGNI

SEQ ID NO: 36781 - DNA, 933 bp, Unknown
  Obtained from environmental sample
  misc_feature (1)..(933): n is a, c, g, or t
gtggtatggggtgaaaaaggctggactgccagcaaggcggcattgggcgagcctatggggaatatgtcgcctaacaacgaacagtatttgattaaccccatttttgaaacggaaattatgtccgatgtcgcaaagaaaagcgtgatgatgagccttgtccgtcatcgtccgatgatcggaccttccattttcctgcccacgagggacaggggcggcgttcaacttaactggctgaccgcctacgggcagaaaatcgagggcagcaagccgaagggtgcggaacgtgtagaacttaaagcctacacgttggcgggatacattccgtggtttgacgaattcgaggaagatgtgtatgtcgatttgggggctatgttcattgatgagtttatcgaaacatacggacaggaatttgaccgccaatgcttgttagctgacaatgacccgttcacgggggctatgacttgcgccgatgttacggaggtaacaatcgccggagatactataaatgatctgacgtggaaggatttcagggacgctgtgtacaaagtgcccgcagaggagcgcaaagactgttcatggtttatcaatgaaacgatacttaaccacattgcgaatatcgaggatataacgggcagaccgatttggcggcgacctactgaagctatgccggggcggttggatttgtacccttatcacgaggtttctattcttccgcagatcacggacattggcaagaatgaaatatttgcgatttttatgaacccaaaaagaattcagcatggaaacaggcggggcatcgagcttaaaaagtttgatgctactactgaaagtctggaatacggagagcttnttttgcgtttccgtaaacgtgatgggtttctagttaccagaccaaaagggaacatggttatactaaaaactaaagcttcttaa

SEQ ID NO: 36782 - protein, 310 aa, Unknown
  Obtained from environmental sample
  DOMAIN (27)...(307): Phage capsid family
  misc_feature (1)..(310): Xaa is any amino acid
MVWGEKGWTASKAALGEPMGNMSPNNEQYLINPIFETEIMSDVAKKSVMMSLVRHRPMIGPSIFLPTRDRGGVQLNWLTAYGQKIEGSKPKGAERVELKAYTLAGYIPWFDEFEEDVYVDLGAMFIDEFIETYGQEFDRQCLLADNDPFTGAMTCADVTEVTIAGDTINDLTWKDFRDAVYKVPAEERKDCSWFINETILNHIANIEDITGRPIWRRPTEAMPGRLDLYPYHEVSILPQITDIGKNEIFAIFMNPKRIQHGNRRGIELKKFDATTESLEYGELXLRFRKRDGFLVTRPKGNMVILKTKAS

SEQ ID NO: 36783 - DNA, 1053 bp, Unknown
  Obtained from environmental sample
  misc_feature (1)..(1053): n is a, c, g, or t
gtgcgccttcacgcttcaagcggcaccacgggaattcccacgacaatttattttacaaaggacgacataaaacaatgggcgcattacatggcgcgctgtatctacgggacaggctgtacaaaaagcgatgtgttccagaacatgataacttacggcctttttacaggcggtctgggaatgcatcagggcggcgaggaagtgggaatgctggtaattcccgcgggtcccggaaacaccgcgcgccaatttaaaatgatgcaggattacaaaaccaccacgttacacgcaacgccaagttttcttcttcaccttgagacaaaaatgaaagaggccggcgtagcccgcgaaagcctttttcttaaacgcgcctttgccggagccgagccttattcggaagacacgcgccggcgcattgaagggcttttaaaaattgacgtttacaattcatacgggctttctgaaatgaacggtcccggcgtcgcctttgaatgccagtgcaaagacggcctgcacatctggggagacggctatatcgctgaaatcgtcgatcccgacactcttgaacctgtcagagacggagaaataggcgagcttgtccttacgattttatgcanggaagcgactccccttctccgctaccgcacgcgcgaccttacctctttttacacggagccatgcgcctgcggcagaacacaccgccgcctgcgccgcataaccgggcgcagcgacgacatgctgataattaacggcgtaaacgtcttccccagccagatcgaggaagtgatcatgggcatgaaggaagtgggaaacaactaccttattgtggttgaaaaagacggcgcgcttgatcgtctaacggtaaaaaccgaagtcggcccggatatttttatggacgacgcccgccccctcaatgccctaaaggaaaagataagggaaacccttcaggtatccatttcgatcagccccagggttgagctccacgaaagcggcagtatggcggtttcggaaggcaaagcggtaagggtgcaggacaagcggccaaaggacgtttga

SEQ ID NO: 36784 - protein, 350 aa, Unknown
  Obtained from environmental sample
  misc_feature (1)..(350): Xaa is any amino acid
MRLHASSGTTGIPTTIYFTKDDIKQWAHYMARCIYGTGCTKSDVFQNMITYGLFTGGLGMHQGGEEVGMLVIPAGPGNTARQFKMMQDYKTTTLHATPSFLLHLETKMKEAGVARESLFLKRAFAGAEPYSEDTRRRIEGLLKIDVYNSYGLSEMNGPGVAFECQCKDGLHIWGDGYIAEIVDPDTLEPVRDGEIGELVLTILCXEATPLLRYRTRDLTSFYTEPCACGRTHRRLRRITGRSDDMLIINGVNVFPSQIEEVIMGMKEVGNNYLIVVEKDGALDRLTVKTEVGPDIFMDDARPLNALKEKIRETLQVSISISPRVELHESGSMAVSEGKAVRVQDKRPKDV

SEQ ID NO: 36785 - DNA, 360 bp, Unknown
  Obtained from environmental sample
  misc_feature (1)..(360): n is a, c, g, or t
atggtcatgtcgaaggcgataaatgccttaaaattaccgcgcaaanctctttttaaaagcataacaagagcggatgattttgtcgcgaggtatggcggggaagaatttgtcgttgtcctacccaataccggcgaacaaggagcgcaatatgtcgcgaataaactgcttgtcaatatacggaactgcaacataccgcatgtaaaaaatgacgcggcggattatgtcaccatttctgtcggagtcacaaccggtaaggtaatacatacacaaaatgcggatgattttgtaaaaaaggctgatgaactgctgtataaatcaaagcagggcgggcgtgacagatattcgtttgagacgctttga

SEQ ID NO: 36786 - protein, 119 aa, Unknown
  Obtained from environmental sample
  DOMAIN (2)...(113): GGDEF domain
  misc_feature (1)..(119): Xaa is any amino acid
MVMSKAINALKLPRKXLFKSITRADDFVARYGGEEFVVVLPNTGEQGAQYVANKLLVNIRNCNIPHVKNDAADYVTISVGVTTGKVIHTQNADDFVKKADELLYKSKQGGRDRYSFETL

SEQ ID NO: 36787 - DNA, 795 bp, Unknown
  Obtained from environmental sample
  misc_feature (1)..(795): n is a, c, g, or t
atgccaaaatcaattttagttcacccggaagaagtacggaaaccgcaaattctcaagctcaaagacataccggttaatcaatataagagcgacttcaggaaagaaagcggcctgtacggcacacagcggcttgtacaaatttggcacgacatggttgtgatccgcgaattcgagtccatgctcaacacctttaaaacacaggggacatggaacggcatagagtatcaccacaaagggcctgcccatctgtccatgggtcaggaagcgtcatcggtgggacagtgcgtgaacctggacacagatgactatattttcggaagccaccgcagccacggcgaaattcttgcaaaatgtttttcggcggtctggcagtttacgcaaaacgccgaaggcgaaaaacggcttgaggcggtaatgaaaaatttccttaacggcgaaacattgggcatcgcagaaaaaattccctacaacagcatacgggaccttgccgaanactttgtcctgtacggaaccctgggtgaaatattcgcccgtaaagcgggatttaaccgggggcttggcggttccatgcacgcctttttctcccccttcggttcaatgcccaacaacgccattgtgggcggttccgcggacatcgccgcggggtccgcgttgtacaagcgaatcaatcacaaaccgggggatcgtcattgccaatatcggcgatgcgtcaatgggctgtgggccggtctgggaagggatgatgttagccgcaatggatcagtacaataccctttggcccgaaagcacgcataa

SEQ ID NO: 36788 - protein, 264 aa, Unknown
  Obtained from environmental sample
  misc_feature (1)..(264): Xaa is any amino acid
MPKSILVHPEEVRKPQILKLKDIPVNQYKSDFRKESGLYGTQRLVQIWHDMVVIREFESMLNTFKTQGTWNGIEYHHKGPAHLSMGQEASSVGQCVNLDTDDYIFGSHRSHGEILAKCFSAVWQFTQNAEGEKRLEAVMKNFLNGETLGIAEKIPYNSIRDLAEXFVLYGTLGEIFARKAGFNRGLGGSMHAFFSPFGSMPNNAIVGGSADIAAGSALYKRINHKPGDRHCQYRRCVNGLWAGLGRDDVSRNGSVQYPLARKHA

SEQ ID NO: 36789 - DNA, 1092 bp, Unknown
  Obtained from environmental sample
  misc_feature (1)..(1092): n is a, c, g, or t
ttgttaccgtttctgattttattattatgtcttctcgtcgggatcattgctgtgacaagtttcaaaaaggataaatccggcagttggcttcaattcttcgcaaaaggaaaagaagccggttttacaatgaaagacatagaacagttaaaacagcttgccgccaactgcgaaattaaagaccctttaaatatttttaagtctaaaaaagagtttgaaacaattatccgttctatggttaaagctttgcatttatcgggagagtacaatgttccggcgacccagttattcctttcaaggctttttgagtattaccacaaaatagagatgcagtcttccgaaaacgaggtaaaaattaaaacctcgcgtcaaatcagcgaaggacagtcgttaaggattttagtggcgggaaccggcgtttataaatctgaagttgtaaaaaattcaagcaattatcttgctattgcgcgccctgtaaataccagtatgcagaacgctatggaatggttcgggcttaaaatatcagtttatttctggcgcgaagatgacgcgggatatgtcttcgattcggaagtagtcgatgaagttttttccaaaggtatatcctcattaaaaatagaacagaatgattcgctttttagaactcaaaaaagaaaatccatacgcgctaaattccgcaaggcggcgtttttgtatcttttaaatgaccttgaaaatccgcacaaactggaaaaagcggcgggattaaaagtaatgatggacgatatttccagttcaggatgcgcgttcaaagtaatggggcaggtttccaccggaatgcgctttaagacgcaatttttacttaacaagattcccgtttgcgtgccggggacggtacgttccgtagattataatcgggaaagcaatatttcaatcgtacacatggaagcggacacccttccgattggaaccagaaattttattctatgcgaagtctttcatttaatgcccgaagacgatgaagacgaactgccgttccgcgttatggaagatggaactacccccgcttcaaaacagccggaggaacagttcaaggaggaggaaaagaatgaataa

SEQ ID NO: 36790 - protein, 363 aa, Unknown
  Obtained from environmental sample
  SIGNAL (1)...(22)
  DOMAIN (215)...(326): PilZ domain
  misc_feature (1)..(363): Xaa is any amino acid
MLPFLILLLCLLVGIIAVTSFKKDKSGSWLQFFAKGKEAGFTMKDIEQLKQLAANCEIKDPLNIFKSKKEFETIIRSMVKALHLSGEYNVPATQLFLSRLFEYYHKIEMQSSENEVKIKTSRQISEGQSLRILVAGTGVYKSEVVKNSSNYLAIARPVNTSMQNAMEWFGLKISVYFWREDDAGYVFDSEVVDEVFSKGISSLKIEQNDSLFRTQKRKSIRAKFRKAAFLYLLNDLENPHKLEKAAGLKVMMDDISSSGCAFKVMGQVSTGMRFKTQFLLNKIPVCVPGTVRSVDYNRESNISIVHMEADTLPIGTRNFILCEVFHLMPEDDEDELPFRVMEDGTTPASKQPEEQFKEEEKNE

SEQ ID NO: 36791 - DNA, 906 bp, Unknown
  Obtained from environmental sample
  misc_feature (1)..(906): n is a, c, g, or t
atgtgcaagaataacgaacaccctaagctgggcggcgagaagagggtttgcaccgcgtactttaccgacatagagggcttctcgaccttctccgaggcgctgaaggatcccgaacgtctggtgacgcttctaaacgagtatctctccgtcttgaccgacatcctgacggatcttcaccacggtacgctcgacaagtacgagggcgacgctatagtagccttcttcggtgccccgaataatttgcccaaccacgcttatcaggcctgtaacaccgccataattatgcagcaggaattgggcagactgcgggaaaaatggcgccttgagggcgacaagtggccccccatcgtccataacatgagaatgcgcataggcataaacaccggcgagatcatagtgggcaacatgggttccgatctaagaaagaactacactatgatgggcgacgccgtcaacctagccgcccgcttggagagcgccgccaaagattacggcgtctacacgatgatcagccaccacacatacaacgcggctggcggagaaaataccgacaaaaatataagcggcttgtttgaaacaaggaagttggacgtaataacggtggtcggaaaggacgaaccggtaacggtgtacgagttgatctgccgaaagggagagttgacaagcgaatggtccggcgggctgttggagctttataacaacggcgtggacgcctattataatcgtgactttcgtaaagccatggagttttttgagagggcgagcgaactggaaccgaacaaaaaaataatctccgaaaagccgaagcctacgccgtccggcagattcgtagatatgtgcaagatgtttatagataatcctccgggggccgattgggacggggtcaataggctaacgtctaaatag

SEQ ID NO: 36792 - protein, 301 aa, Unknown
  Obtained from environmental sample
  DOMAIN (228)...(261): Tetratricopeptide repeat
  misc_feature (1)..(301): Xaa is any amino acid
MCKNNEHPKLGGEKRVCTAYFTDIEGFSTFSEALKDPERLVTLLNEYLSVLTDILTDLHHGTLDKYEGDAIVAFFGAPNNLPNHAYQACNTAIIMQQELGRLREKWRLEGDKWPPIVHNMRMRIGINTGEIIVGNMGSDLRKNYTMMGDAVNLAARLESAAKDYGVYTMISHHTYNAAGGENTDKNISGLFETRKLDVITVVGKDEPVTVYELICRKGELTSEWSGGLLELYNNGVDAYYNRDFRKAMEFFERASELEPNKKIISEKPKPTPSGRFVDMCKMFIDNPPGADWDGVNRLTSK

SEQ ID NO: 36793 - DNA, 585 bp, Unknown
  Obtained from environmental sample
  misc_feature (1)..(585): n is a, c, g, or t
gtggatattccaaacgaacgttctgggcttttgatagattccgcttcttatgaaaaatggtttgagaaaaagggttggaaatggagcgcaggtgaaattttaaatatcgccattgggcaaggcgcgcttttggtcactccattgcagcaaaccgtgatggtaggtacgcttgctgctggcagtggtttatacaagccgcattttttaaaagagattgtaagccccgaaggggaactggtcagaaaaattgaaccggaaaaaataggcgaagggaaagtttctgagcgcactaggaatatagtactcaaaggcctttatgaagttgtgaacgctcctaatggcacggggcgccgtgccattgttccaggtataaaggtaggtggaaaaaccggcagcgcagaaaatccgcatggcgataaaacacatgcttggtttgttgccgtggctcctttggatgcaccggaaatagctgttggcgtggttttggaaaatgcaggtggtggcggagctatggctgctcccatagcgcaaaaagttttggatgcgtattttaatcccctcacttctacggcggtaaccgaatga

SEQ ID NO: 36794 - protein, 194 aa, Unknown
  Obtained from environmental sample
  DOMAIN (2)...(181): Penicillin binding protein transpeptidase domain
  misc_feature (1)..(194): Xaa is any amino acid
MDIPNERSGLLIDSASYEKWFEKKGWKWSAGEILNIAIGQGALLVTPLQQTVMVGTLAAGSGLYKPHFLKEIVSPEGELVRKIEPEKIGEGKVSERTRNIVLKGLYEVVNAPNGTGRRAIVPGIKVGGKTGSAENPHGDKTHAWFVAVAPLDAPEIAVGVVLENAGGGGAMAAPIAQKVLDAYFNPLTSTAVTE

SEQ ID NO: 36795 - DNA, 1443 bp, Unknown
  Obtained from environmental sample
  misc_feature (1)..(1443): n is a, c, g, or t
gtgatctcttcggcgcgatgtcttttggtcaatctcggtctcgacatgatgccggaccttgagttccccaacctcaccgtcgtcaccgcctattcgggcgcggcggcggaggacgtggagcagcttgtcacccggccgatcgaggccgccgtggcgagtctcaaggggatcgacaagctgacctcaacctcagccgaggggctctccaccgtcagcgtcaactttaagtgggggacgaacctcgacgtagccagtcaggatattcgagagagcatcagccgcataaagacctacctgccgtcgggcataaacgacccgatggtgatgaagttcgatatgtcgcagatgccggtgctgctctacggcgtgtcgggcatgaacaacaccttggagctgcagaagtactttgaggacgccatagtgccgcgtgtggagcgtcttgagggggtggcgtctatggcggtgttcggcgggccgaagcgtgagataaacgtattcctcagcaagacgcgcctagaccagtacaagatcgggccggacgcggtgatgggggcgctcatgtcctccaacatgaacgtgtctagcgggcacgtctccgccggccaccaagagtatctcgtgcggactatgggcgagttcgggaacatcaacactatcaccaacacgatcatcacagccgtgaacgggtcgcccatacgtatcggcgacgtggcgcgggtggaggacacgcagaaggagcagcgcaactacgtgcggatgaacggccgggacggcgtggtcttcatgataacaaagcagagcggctccaacacgctcaagacggtgaacgaggtgaaaaacctgctcgcggaactaaagccctccatgccgccggacgtgcagtacgtgcccatctttgaccaaggagagatggtggaacgcgtgacgggcaacgccacggagtcggcggtgcagggtaccatcctcgccattttcattctgtggttttttctgcgcaactggcgcccgactttcgttatcgcgctggccattcccatctctatcatcactacttttatagggatgtacgttttgggctacacgctcaacgtgataacgataggaggtttcgcgcttgccgtcggtatgcttgttgacaacgcggtagtggtgatagagaacatctaccggcacttggaaggcggcaaacaccggaacgcggcggccgtagacggcgcgacggaggtggggctcgccatcacggcctccacgctgaccaccgtggcggtcttcgtcccgctggcgcttgccggcggcttcgccgggaagatcgcgcaacccttggcgctgaccgtctgcgccggccttggcgcctcgctgctagtggccataaccatcgtccccatgctcgcgtcggtcttcttcaagcgcaaaacggcgaagagcaaaactctccgaatctga

SEQ ID NO: 36796 - protein, 480 aa, Unknown
  Obtained from environmental sample
  DOMAIN (1)...(480): AcrB/AcrD/AcrF family
  misc_feature (1)..(480): Xaa is any amino acid
MISSARCLLVNLGLDMMPDLEFPNLTVVTAYSGAAAEDVEQLVTRPIEAAVASLKGIDKLTSTSAEGLSTVSVNFKWGTNLDVASQDIRESISRIKTYLPSGINDPMVMKFDMSQMPVLLYGVSGMNNTLELQKYFEDAIVPRVERLEGVASMAVFGGPKREINVFLSKTRLDQYKIGPDAVMGALMSSNMNVSSGHVSAGHQEYLVRTMGEFGNINTITNTIITAVNGSPIRIGDVARVEDTQKEQRNYVRMNGRDGVVFMITKQSGSNTLKTVNEVKNLLAELKPSMPPDVQYVPIFDQGEMVERVTGNATESAVQGTILAIFILWFFLRNWRPTFVIALAIPISIITTFIGMYVLGYTLNVITIGGFALAVGMLVDNAVVVIENIYRHLEGGKHRNAAAVDGATEVGLAITASTLTTVAVFVPLALAGGFAGKIAQPLALTVCAGLGASLLVAITIVPMLASVFFKRKTAKSKTLRI

SEQ ID NO: 36797 - DNA, 465 bp, Unknown
  Obtained from environmental sample
  misc_feature (1)..(465): n is a, c, g, or t
ttgcgcgatcttcccggcgaagccgccggcaagcgccagcgggacgaagaccgccacggtggtcagcgtggaggccgtgatggcgagccccacctccgtcgcgccgtctacggccgccgcgttccggtgtttgccgccttccaagtgccggtagatgttctctatcaccactaccgcgttgtcaacaagcataccgacggcaagcgcgaaacctcctatcgttatcacgttgagcgtgtagcccaaaacgtacatccctataaaagtagtgatgatagagatgggaatggccagcgcgataacgaaagtcgggcgccagttgcgcagaaaaaaccacagaatgaaaatggcgaggatggtaccctgcaccgccgactccgtggcgttgcccgtcacgcgttccaccatctctccttggtcaaagatgggcacgtactgcacgtccggcggcatggagggctttag

SEQ ID NO: 36798 - protein, 154 aa, Unknown
  Obtained from environmental sample
  misc_feature (1)..(154): Xaa is any amino acid
MRDLPGEAAGKRQRDEDRHGGQRGGRDGEPHLRRAVYGRRVPVFAAFQVPVDVLYHHYRVVNKHTDGKRETSYRYHVERVAQNVHPYKSSDDRDGNGQRDNESRAPVAQKKPQNENGEDGTLHRRLRGVARHAFHHLSLVKDGHVLHVRRHGGL

SEQ ID NO: 36799 - DNA, 456 bp, Unknown
  Obtained from environmental sample
  misc_feature (1)..(456): n is a, c, g, or t
ttgaattatgccgttgcaggcagtgtatgcggtggtaatgacccagccaattgcgacaagtatggtcgtctttacaactgggaaactgcaatatttgtttgtcctagcagttggcatttacctagcagagacgaatgggatgttctcgtaaattttgctggaagctcatctattgcaggaactaaattgaaagctacgagcggttggaattcatatagcggcgttccctctggcacagatgcgttcggtttttcggctctgcctggtggctacggtacttccagtggctatttctacggtgtcggcgactacggcaattggtggagtagctcggaggactatgccggcggtgcttacggacggcttatgtccgacgaagacgaggaagtcagagacaacgactactgggggagcggtaaaagcaacttgcttagcgttcgttgcttgatggattaa

SEQ ID NO: 36800 - protein, 151 aa, Unknown
  Obtained from environmental sample
  misc_feature (1)..(151): Xaa is any amino acid
MNYAVAGSVCGGNDPANCDKYGRLYNWETAIFVCPSSWHLPSRDEWDVLVNFAGSSSIAGTKLKATSGWNSYSGVPSGTDAFGFSALPGGYGTSSGYFYGVGDYGNWWSSSEDYAGGAYGRLMSDEDEEVRDNDYWGSGKSNLLSVRCLMD

SEQ ID NO: 36801 - DNA, 909 bp, Unknown
  Obtained from environmental sample
  misc_feature (1)..(909): n is a, c, g, or t
ttggggtgccctttgcctaaaaaattcacgttcagaggcggcgttcacccgccgcactttaagtcgctgaccgagtattctcgtatcgaggagttcccggcgccggaagtggcggtgatcccgctgtctcagcacttgggagcgccggccaccgttttggtagagaagggcgagagggtgctcttggggcagattatcggtgaggcgggcggcaacgtttccgccgccgtgcacgcctccgtcgcggggacggtgctgtcggtgcggcctttcgcccacccgtcggggcggctcgtgaaggcggtgcagattgaaaacgacggaacggacgaggcggtgccctttgaaccagtcggggattcttggcgcgacgcggcgcgcggggagctcgtgaacaagatcgcggagtgcggaattgtcgggatgggcggcgccggcttcccaacccacataaagctctcgccgcccagccgcaagcccatcgacacgatcataatcaacgggacggagtgcgagccgtacctcacggacgacaaccgtataatgattgaacgcgccgaggacattttggtcggggctcagattataaagaagatattgggcgctaaggatgtgatatttgctatagaggacaacaaacccggacgcaatanacaccgtgagcaacaagacggccggttcacgctacaacgacatcacggtcgcgacgctcaagacgaagtacccgcagggcggagaaaaaatgctgataacggcgctcaccggacgcgaagtgccgtcgggcggactgccaatggacgcgggctgtatcgtgcaaaatgtcggcacaataatcgccgtagccgaagcgttctggcccggaaaacctgtcatcgacagggatttgacaatcagcggaggagcgtgtaa

SEQ ID NO: 36802 - protein, 302 aa, Unknown
  Obtained from environmental sample
  DOMAIN (117)...(301): Respiratory-chain NADH dehydrogenase 51 Kd subunit
  misc_feature (1)..(302): Xaa is any amino acid
MGCPLPKKFTFRGGVHPPHFKSLTEYSRIEEFPAPEVAVIPLSQHLGAPATVLVEKGERVLLGQIIGEAGGNVSAAVHASVAGTVLSVRPFAHPSGRLVKAVQIENDGTDEAVPFEPVGDSWRDAARGELVNKIAECGIVGMGGAGFPTHIKLSPPSRKPIDTIIINGTECEPYLTDDNRIMIERAEDILVGAQIIKKILGAKDVIFAIEDNKPGRNXHREQQDGRFTLQRHHGRDAQDEVPAGRRKNADNGAHRTRSAVGRTANGRGLYRAKCRHNNRRSRSVLARKTCHRQGFDNQRRSV

SEQ ID NO: 36803 - DNA, 672 bp, Unknown
  Obtained from environmental sample
  misc_feature (1)..(672): n is a, c, g, or t
gtgagcaacaagacggccggttcacgctacaacgacatcacggtcgcgacgctcaagacgaagtacccgcagggcggagaaaaaatgctgataacggcgctcaccggacgcgaagtgccgtcgggcggactgccaatggacgcgggctgtatcgtgcaaaatgtcggcacaataatcgccgtagccgaagcgttctggcccggaaaacctgtcatcgacagggatttgacaatcagcggaggagcgtgtaacaccccgaaaaacatccgcgccccgataggaatgtcaataaaagacataccccccgaattcatggatatagattattcaaaaatagcgaaaatagttttcggcggcccgatgatgggcaacgccgtacattctttggaagtgcccatacaaaaaaacacatccggcgtaatattgatgacaaaagaagaaacaatagcggaagaagaaggcccgtgcatacgctgctgccgctgcgtgcgaaactgcccctgccgcctgtcgcccgtgatagtgaataacagccttgaagcgcangattacaattacgccctgaaagccggattgttagactgcatggagtgcggaagctgttcctacgtttgcccggcgagaataaaactcgtacagcgcttccgtgtaggcaaacnacgctnaaaatga

SEQ ID NO: 36804 - protein, 223 aa, Unknown
  Obtained from environmental sample
  misc_feature (1)..(223): Xaa is any amino acid
MSNKTAGSRYNDITVATLKTKYPQGGEKMLITALTGREVPSGGLPMDAGCIVQNVGTIIAVAEAFWPGKPVIDRDLTISGGACNTPKNIRAPIGMSIKDIPPEFMDIDYSKIAKIVFGGPMMGNAVHSLEVPIQKNTSGVILMTKEETIAEEEGPCIRCCRCVRNCPCRLSPVIVNNSLEAXDYNYALKAGLLDCMECGSCSYVCPARIKLVQRFRVGKXRXK

SEQ ID NO: 36805 - DNA, 849 bp, Unknown
  Obtained from environmental sample
  misc_feature (1)..(849): n is a, c, g, or t
atgatggccgagagcccggcagcaccacgagtacagtctttgggcgatctgtacgtgcagcagaagaagatgccgcaggcggtcgccgcctataagaagtaccttgagaaggtgcccaccgccaccaagatagcgcgtctcgtcggcgaccacgagtacgctcagaagaattggtcggaggcgagcaaatattatggaatggtctccggcacggacgccaccaatgccgattacctcaaaaatttcgggacggcgtgtttcgaggctaaaaactacgcaagggcgggtatgctcttcaagcagctctccgaagccaatccacgggacgcggagtctttgaagaaactgtatgagattgagaatctgaacaagaatccccgcggcgcctccgagcatttgaagaagtacgttgcgctggtgccgggcgacgcttccatgcagaagacgcttggcgatatgctctttgacaacggcgacaagcccggcgcccttaccgcttatagggcggctatgaaattggatccctccataaagggcatccacaagaggttcgtcgatctgctgaaagaggcgtcgtccgcagagaggatcgcggcgctcaacgcggcgatcgcggcgaacgaggctgacgcggccatgttcgcccagttgggcgagctgtacaaggcgggcggcaattgcaaggccgccgtacccgtgcttgagccaggccatgaaattggacgccagaaacaccggcgtgatggcggcgatcgccgattgccaggtgaagagcggcaacaccgccggcgcggtactggcgctggagcaggtcacgctgatgaacccgagcgccaccgccgagtataa

SEQ ID NO: 36806 - protein, 282 aa, Unknown
  Obtained from environmental sample
  DOMAIN (144)...(177): Tetratricopeptide repeat
  misc_feature (1)..(282): Xaa is any amino acid
MMAESPAAPRVQSLGDLYVQQKKMPQAVAAYKKYLEKVPTATKIARLVGDHEYAQKNWSEASKYYGMVSGTDATNADYLKNFGTACFEAKNYARAGMLFKQLSEANPRDAESLKKLYEIENLNKNPRGASEHLKKYVALVPGDASMQKTLGDMLFDNGDKPGALTAYRAAMKLDPSIKGIHKRFVDLLKEASSAERIAALNAAIAANEADAAMFAQLGELYKAGGNCKAAVPVLEPGHEIGRQKHRRDGGDRRLPGEERQHRRRGTGAGAGHADEPERHRRV

SEQ ID NO: 36807 - DNA, 930 bp, Unknown
  Obtained from environmental sample
  misc_feature (1)..(930): n is a, c, g, or t
atggacgagaatggggaacgcgctgtgttgattgaaccccgcgcgggggacacgatgctgagaacattccactcctttggggcttggtttctcaggcgcaacggaaatctcgccgggcttgactcgtcctttgtcatttatgacgatgacgacgttgtttccctgctttccggcattatggaaaacgccccaaaacaggaagttaaacagtgcgcgcacagtatttcccgcgcaaaagattattttctctctcccgaagatccgttacttgcaaatatagacagccggaaaaaattcagaagcatctacgcaagctatgaggagcgtatggcgcagatcggcaatgttgattttggggacttaataaaaaaacctgttgatattctccgaagccagccggaggtggcgcggcgtttccgcgaccgtttcaaggtaataatggtggacgaatatcaggacgcgaatgtcgcgcagttccgcctgttaaaagaattgtgcggaccgcaaacctatgtgtgcgtagtcggcgatgacgaccagtccatctaccgttttcgcggcgcggaagtgaaaaatattctagagttccccgacaaattttcgggagcggacattatccgccttgaacaaaattaccgctccactaaccccatcttaaaagcggcgtcatccgttgtaaactgcaaccgcggccgtttggggaaaaccctgcgcgccgagaaaggagacggctccctgcccgttttaacctatatgccggatcaggatgaggaagcgatgtattgcgcggatacaatcgaaagttcagtaaaaaagaangagaccgcgtggtctgactgggcgattctctaccgcaccaaacgccagtctctcggatttgaaacgctttttttacgcagagggatccctatcgagttgtcggctctttaa

SEQ ID NO: 36808 - protein, 309 aa, Unknown
  Obtained from environmental sample
  DOMAIN (1)...(309): UvrD/REP helicase
  misc_feature (1)..(309): Xaa is any amino acid
MDENGERAVLIEPRAGDTMLRTFHSFGAWFLRRNGNLAGLDSSFVIYDDDDVVSLLSGIMENAPKQEVKQCAHSISRAKDYFLSPEDPLLANIDSRKKFRSIYASYEERMAQIGNVDFGDLIKKPVDILRSQPEVARRFRDRFKVIMVDEYQDANVAQFRLLKELCGPQTYVCVVGDDDQSIYRFRGAEVKNILEFPDKFSGADIIRLEQNYRSTNPILKAASSVVNCNRGRLGKTLRAEKGDGSLPVLTYMPDQDEEAMYCADTIESSVKKXETAWSDWAILYRTKRQSLGFETLFLRRGIPIELSAL

SEQ ID NO: 36809 - DNA, 525 bp, Unknown
  Obtained from environmental sample
  misc_feature (1)..(525): n is a, c, g, or t
ttgttatcgggttgcggggaggataataattcatacgagtctgtgtctatcggcggtaataagtggatgaagaagaatctgaacatagagaccgagggttcttggtgctatgataacaacgccgataactgcgccaaatacgggaggctatataattggaacgccgcgaagacggtctgcccttccggatggagattgccggacaagacggattggaatcgtttggtggaaacggcgggcggttgggaggatgcgggtaagaagttgaaatcatcgacaagcgattggattgataacggaagcgtcgggaccgatgattaccgatttgcggccctgcccggcggttactgtacatccagcggtaaattctatcgtcttggagaggagagcgtttggtggacggccacaaagcgcgataacaactccgcgtactaccagaccatatcatacgacttcgacgacatgcaagaggacacgcgcaatgttagctacggctactctgtgcgttgcgttaagaaagattga

SEQ ID NO: 36810 - protein, 174 aa, Unknown
  Obtained from environmental sample
  misc_feature (1)..(174): Xaa is any amino acid
MLSGCGEDNNSYESVSIGGNKWMKKNLNIETEGSWCYDNNADNCAKYGRLYNWNAAKTVCPSGWRLPDKTDWNRLVETAGGWEDAGKKLKSSTSDWIDNGSVGTDDYRFAALPGGYCTSSGKFYRLGEESVWWTATKRDNNSAYYQTISYDFDDMQEDTRNVSYGYSVRCVKKD

SEQ ID NO: 36811 - DNA, 618 bp, Unknown
  Obtained from environmental sample
  misc_feature (1)..(618): n is a, c, g, or t
atgtatagcgaccaaacgcagggggaactttgtacgcccacaggcgcggcgctactcaaacattttgtgaaagaatttcgcgcaatgcctgtgataagcgttaataaaatcggatatggcatgggcaaaaaagattttgaaaaagcgaattgcataagggcatatatcggcaacacagcaaataacattgaagaagttacggagcttgtctgtaatttagacgatatgactcctgaagctgtagctttcgcccaacagcttttatttgatgaaggtgcgcttgacgtatacaccactcctgtttgcatgaagaaagggcgcatgggtttgacttttacctgtatgtgtcgcagtgaaataaaagacaagatggtttcgcttattttcaaacatacaaccacacttggaatgagagagaacacaagccgccgtaacacactgcagagggagcaaaaagaaattcatacccaatacggcacggttagaataaaaaccgcttacgggtacggtatacggaaatcaaaacccgaatatgaggatatagctaaaatagcgcgggaaaggggaatggcaatacaggatgtggtaaaagagattccgccgcttgacaaactgtag

SEQ ID NO: 36812 - protein, 205 aa, Unknown
  Obtained from environmental sample
  DOMAIN (1)...(204): Protein of unknown function DUF111
  misc_feature (1)..(205): Xaa is any amino acid
MYSDQTQGELCTPTGAALLKHFVKEFRAMPVISVNKIGYGMGKKDFEKANCIRAYIGNTANNIEEVTELVCNLDDMTPEAVAFAQQLLFDEGALDVYTTPVCMKKGRMGLTFTCMCRSEIKDKMVSLIFKHTTTLGMRENTSRRNTLQREQKEIHTQYGTVRIKTAYGYGIRKSKPEYEDIAKIARERGMAIQDVVKEIPPLDKL

SEQ ID NO: 36813 - DNA, 663 bp, Unknown
  Obtained from environmental sample
  misc_feature (1)..(663): n is a, c, g, or t
atgaaaacattgtattttgaatgtaacatgggcgcggcaggcgatatgctgacagcggccttacttgaattacatgacaatcctcaagaatttttgaaaaaattaaacggtattggtatacccaatgtactggtagaagcggaacagtctgtaaaatgcggtatcaccggaacacatataaaagttacgattaacggaaaggaagaagatgatcatgcacacgaacaccatcatcacaaacatatacacggcgaacatcaccacagccataacagctatcacgatattgaacatttaatcggtcggttaaatgtttccgatactgtaaaaaaaaacacccttgaggtttataaactgatagccgaggctgaaagccatgtgcacggcgttccggtagacaaaatacattttcacgaagttggagaaatggacgcgcttgccgatattatcggcgtttgtatgctgatagaagaaatcgcacccgatataattctggcttctccggttaataccggaagcggacacgtccgctgcgctcacggcattttacccgtgccggtcccgcaacgnccaatattttacagaaaattcccatgtatagcgaccaaacgcagggggaactttgtacgcccacaggcgcggcgctactcaaacattttgtga

SEQ ID NO: 36814 - protein, 220 aa, Unknown
  Obtained from environmental sample
  DOMAIN (4)...(220): Protein of unknown function DUF111
  misc_feature (1)..(220): Xaa is any amino acid
MKTLYFECNMGAAGDMLTAALLELHDNPQEFLKKLNGIGIPNVLVEAEQSVKCGITGTHIKVTINGKEEDDHAHEHHHHKHIHGEHHHSHNSYHDIEHLIGRLNVSDTVKKNTLEVYKLIAEAESHVHGVPVDKIHFHEVGEMDALADIIGVCMLIEEIAPDIILASPVNTGSGHVRCAHGILPVPVPQRPIFYRKFPCIATKRRGNFVRPQARRYSNIL

SEQ ID NO: 36815 - DNA, 363 bp, Unknown
  Obtained from environmental sample
  misc_feature (1)..(363): n is a, c, g, or t
atgatcggcgagatcttcagagacggcaaaatatctttccccgacgcatgggcggaagtaataaacagggaagtctggctccgatcactgcggatcgcggaaaatcctttttcttcggtctttaatcacgatccggaccggaaaaaaaagctcctcctccaccgggacgaaatcaagcgtatcgcccggaaaaccgaagaaaaaggttataccctcattcctctgtcattttattttaaaaagggccgggttaaggtggaattgggactgtgcaagggcaaaaaggtctacgacaagcgggctgatatccgcgaacgggacatgaaacgggaagtttccagggaattcaggggcaagttgtaa

SEQ ID NO: 36816 - protein, 120 aa, Unknown
  Obtained from environmental sample
  misc_feature (1)..(120): Xaa is any amino acid
MIGEIFRDGKISFPDAWAEVINREVWLRSLRIAENPFSSVFNHDPDRKKKLLLHRDEIKRIARKTEEKGYTLIPLSFYFKKGRVKVELGLCKGKKVYDKRADIRERDMKREVSREFRGKL

SEQ ID NO: 36817 - DNA, 471 bp, Unknown
  Obtained from environmental sample
  misc_feature (1)..(471): n is a, c, g, or t
atgaaactcggcaaatatctcttgattccctggtttacattggcggtatacacggttctgtcggtttgttttgggacggcgggtattgtaccgtaccggattttgttgaacgaacgtcaaaaaatactggaaaatctggatagactgcaaacaattaacaaggaacttgaaggaaccatggacgcgctgctctatgattcagagacgatccgtattaaggcccgggaactggggtatggtgagagggaagaacgttttgccaggattgtgggccttcccagcggacggcccactgaattacggccggggacgatcagaaccgccgtccagccgcttccttccggcaagtcgtaccggaccatttccttttgttttgggctgcttctttttgccctgtttcttgccggtgatctgcttctgaaaaaggattccccccagcatcataaagagaatgttacaacttgcccctga

SEQ ID NO: 36818 - protein, 156 aa, Unknown
  Obtained from environmental sample
  DOMAIN (14)...(92): Septum formation initiator
  misc_feature (1)..(156): Xaa is any amino acid
MKLGKYLLIPWFTLAVYTVLSVCFGTAGIVPYRILLNERQKILENLDRLQTINKELEGTMDALLYDSETIRIKARELGYGEREERFARIVGLPSGRPTELRPGTIRTAVQPLPSGKSYRTISFCFGLLLFALFLAGDLLLKKDSPQHHKENVTTCP

SEQ ID NO: 36819 - DNA, 885 bp, Unknown
  Obtained from environmental sample
  misc_feature (1)..(885): n is a, c, g, or t
ttggccgcaaagaaagaagccttgcaagagcaatacgccgccgagatagaagaagcggagaaggcgtttacggacgcatcggcgatccgcgaaaggtacgctctcgagtttgagaatttagaaaaacagcgggtagccgcggcaaaggccgccgacgatgaaatgacggcgattacgagggacggcaatgccgcccggaaagcgcttaataaagagtatgttcagggtttcgtgtcaggtacggtttccgccgtcaatcaattaggctcgatcatgtcgatgttttcctccaacgacgaaaagcgcctggacaaaaagtataaagatgacaaggcgcgtatagaggcgaacgtttccgacgaagaggaacgcgccgcgcagctcgcggccctcgacgaagaatacgaggccaagaagcttgaagcccaaaaggagaacgcgaagcgcgaaaaggctttggggatattcaacacggttatcaacacggcgcaggctatcgtcaaggccttggccgacttggggccgatagccgggccgataatggccgccaccgtcggagcgatgggcattgcccagactgcggccatcgcgtcaacgcccgaacctttcgaggcgggcgccctcatccagggcggccgcggcggcgttacggggcttgtcggcgagggcaagcaggacgagctgatcctgccgatggaggcgggcgtcgagcgtctcgcggaagagctcgcgaagcgcgacgccgtgggcggcggcacctacacctacaacataagcgtgaacgtcgggaactttatgggcgaccaaaagggtatcaaagagcttggccgtaaaatacgcgaggtgataatcgccgaggataggagaaccgggagggtatcatga

SEQ ID NO: 36820 - protein, 294 aa, Unknown
  Obtained from environmental sample
  misc_feature (1)..(294): Xaa is any amino acid
MAAKKEALQEQYAAEIEEAEKAFTDASAIRERYALEFENLEKQRVAAAKAADDEMTAITRDGNAARKALNKEYVQGFVSGTVSAVNQLGSIMSMFSSNDEKRLDKKYKDDKARIEANVSDEEERAAQLAALDEEYEAKKLEAQKENAKREKALGIFNTVINTAQAIVKALADLGPIAGPIMAATVGAMGIAQTAAIASTPEPFEAGALIQGGRGGVTGLVGEGKQDELILPMEAGVERLAEELAKRDAVGGGTYTYNISVNVGNFMGDQKGIKELGRKIREVIIAEDRRTGRVS

SEQ ID NO: 36821 - DNA, 1029 bp, Unknown
  Obtained from environmental sample
  misc_feature (1)..(1029): n is a, c, g, or t
ttgggcgaagcccgtagcctccgttacggcgaaaacagccaccagtcggcggcgctttacctgaacaccgacaggcctggcgctttggcgggtatacagcagctccacggcaaggagctgggttataacaatatccgcgatcttgaccttgcctggaaagcggcttgcgcgttcgggcttcccgcaaaaaaaattgcgccgatgggcgaagacgaagtgaaatgccttgtgcctttggcggcggaaagtaccgccggcaaagtctgctgcgtcgcggtaaagcacagcactccctgcggcatagccctgggcgatacccccattgaagcttacgaaaaaacatttgcctacgatcctgtttcgatatatggcggaatagtagcctgcaattcacaggttgatgaaaaaacggcatcgaagcttggagagctttttctggaaattgtaatcgccccggattttgaaagcggcgctcttgagattctcaaaaagaaaaaaaacctgcgtatcatgaaagccggatatgccccaagggacacaaaagaatacgtctctgtggacggcggccttctcgttcaggacacggataagctgcttctagaaaaatgggaagtggcaacccgcctcgctccggctgccgaagacattcccgatcttatctttggcttaagggcggtaactttcgtaaaatcaaacgcgatacttgttgttaaaaaactcgccgcggcaggcattggcggtgggcaagtgaaccgcatctggcctacaacgcaggcgcttgaacgaagcgccgccgccataaaggcagccgcagaaaaaggcggcccttgggcggacggccaatgcgccagggttctcgcctcggatgcattccttccctttgcggacgtggttgaagccgcagcagcagccggaataaaagccatcatccagcccggcggttctatcaacgacaagctttccatcgaagcctgtgacaggctgggattggctatggtgtttaccgggacaaggcatttcaagcattaa

SEQ ID NO: 36822 - protein, 342 aa, Unknown
  Obtained from environmental sample
  DOMAIN (1)...(260): AICARFT/IMPCHase bienzyme
  misc_feature (1)..(342): Xaa is any amino acid
MGEARSLRYGENSHQSAALYLNTDRPGALAGIQQLHGKELGYNNIRDLDLAWKAACAFGLPAKKIAPMGEDEVKCLVPLAAESTAGKVCCVAVKHSTPCGIALGDTPIEAYEKTFAYDPVSIYGGIVACNSQVDEKTASKLGELFLEIVIAPDFESGALEILKKKKNLRIMKAGYAPRDTKEYVSVDGGLLVQDTDKLLLEKWEVATRLAPAAEDIPDLIFGLRAVTFVKSNAILVVKKLAAAGIGGGQVNRIWPTTQALERSAAAIKAAAEKGGPWADGQCARVLASDAFLPFADVVEAAAAAGIKAIIQPGGSINDKLSIEACDRLGLAMVFTGTRHFKH

SEQ ID NO: 36823 - DNA, 699 bp, Unknown
  Obtained from environmental sample
  misc_feature (1)..(699): n is a, c, g, or t
atgctccaattatttccgtactgctggatcgctattatgttacgcgatcaaacaaacagtcttgtccccactttgctgggaaagaaaatatgtgaaatgctggttgaatattttccgggttatgttgacgttgattttacggcctctatggaatcaaagctcgacaaggtagaggaaagccagttgaaatggcccgatatgctcaaggagttttgggggcctttcaaagcccgcgttgacgaggtcggtaaaaccctggagtcctttaaaggttctttggatgagccgaccgattttgtatgcgaaaaatgcggcaagcccattgtaaaaaaacttggacgcaacggttttttcctcgcctgtaccggctttccggaatgcaggaatacaaggtcggttccccttgccgtatgccccaaatgcggcggtgacgtcgtagcgcggaaaacaaagggccggggaaaggaattttacggctgcgccaggtaccctgaatgtgattttgtcagccactacaagccgatcaaccagaactgcccgaagtgcgggaaattcatggttgaaaaatacgacaagaaaaacggcagccataaggcatgcataaatcctgaatgcgatttccttcataccaaagacgatgtcagcgatgatcttggtgataaaagagatgatataaaggatgagaataatggcgaataa

SEQ ID NO: 36824 - protein, 232 aa, Unknown
  Obtained from environmental sample
  DOMAIN (176)...(214): Topoisomerase DNA binding C4 zinc finger
  misc_feature (1)..(232): Xaa is any amino acid
MLQLFPYCWIAIMLRDQTNSLVPTLLGKKICEMLVEYFPGYVDVDFTASMESKLDKVEESQLKWPDMLKEFWGPFKARVDEVGKTLESFKGSLDEPTDFVCEKCGKPIVKKLGRNGFFLACTGFPECRNTRSVPLAVCPKCGGDVVARKTKGRGKEFYGCARYPECDFVSHYKPINQNCPKCGKFMVEKYDKKNGSHKACINPECDFLHTKDDVSDDLGDKRDDIKDENNGE

SEQ ID NO: 36825 - DNA, 651 bp, Unknown
  Obtained from environmental sample
  misc_feature (1)..(651): n is a, c, g, or t
atgagaataatggcgaataacgataatcatcctgatttgaaaaagaataatcgcgtggaagaatacctatgttacctttcttccgtccgcggggtctccgagcgcaccgcttccgcctataggcgggatcttcagcatttttccgcctattgcgaaaaccatggcttttctccggaaaaagccacgcaggcagaggtaagggggtttatcgctgacctttccgccgagggggcggcttccgtaagcgtaaaccgcgctctttcttccatccgggggttttaccgctggatgctgcgctttgatttccgtcaggacgatccttcttcccccctgaaaaaccttaaaacgccaaaaacactgcctgtttttctttgggaggccgagatggcccatttttcaacgctccccgaaaaggcagggattctctggcctgagcgggacaaggcgctgatcctggcaatttattcaggcggtcttcgcatatccgaggccgtgtccataagcctgaaaaacatagggcatgatttttcaagcgccaggatcatcggcaagggtaacaaggagcggcaggtgtttttctccgaggaagcgaaagaagccctgctcgcttatctgcctgcanctcggccatctgatcatgaannnnnntag

SEQ ID NO: 36826 - protein, 216 aa, Unknown
  Obtained from environmental sample
  DOMAIN (19)...(101): Phage integrase, N-terminal SAM-like domain
  misc_feature (1)..(216): Xaa is any amino acid
MRIMANNDNHPDLKKNNRVEEYLCYLSSVRGVSERTASAYRRDLQHFSAYCENHGFSPEKATQAEVRGFIADLSAEGAASVSVNRALSSIRGFYRWMLRFDFRQDDPSSPLKNLKTPKTLPVFLWEAEMAHFSTLPEKAGILWPERDKALILAIYSGGLRISEAVSISLKNIGHDFSSARIIGKGNKERQVFFSEEAKEALLAYLPAXRPSDHEXX

SEQ ID NO: 36827 - DNA, 504 bp, Unknown
  Obtained from environmental sample
  misc_feature (1)..(504): n is a, c, g, or t
ttgcgggaaaattttggcgctcttaaggngcagactctttgctatgtgggcgatgggcgncataatgtggncagagcgttgaatgatatctgcgccnaattggggacaaattttacggtaataaacgccccacaactaaacgccgatggtgaactttttgcaagtgcaattcgtttgccaaacgtcgggcgccgttataaagttacctctgatttgggagcggtaaaaggcgcggacgcattgtacaccgacgtatggacttcaatgggcgaagaagatcaaaaggaagagagggtcaggcttttaagcccgtttcaggtaaaccaaaaattgatggatatgacgggcaagagcgatacaattttccttcactgcctgcccgcggttaagggtgaagaggttacaattgacgtgattgacggcaaacaaagcagggcgtgggatcaggcggaaaaccgaaaacatacgataaaagcggtaatgcttgccactttgataaagtaa

SEQ ID NO: 36828 - protein, 167 aa, Unknown
  Obtained from environmental sample
  DOMAIN (8)...(164): Aspartate/ornithine carbamoyltransferase, Asp/Orn binding domain
  misc_feature (1)..(167): Xaa is any amino acid
MRENFGALKXQTLCYVGDGRHNVXRALNDICAXLGTNFTVINAPQLNADGELFASAIRLPNVGRRYKVTSDLGAVKGADALYTDVWTSMGEEDQKEERVRLLSPFQVNQKLMDMTGKSDTIFLHCLPAVKGEEVTIDVIDGKQSRAWDQAENRKHTIKAVMLATLIK

SEQ ID NO: 36829 - DNA, 1584 bp, Unknown
  Obtained from environmental sample
  misc_feature (1)..(1584): n is a, c, g, or t
ttgatggcgagagagactcaagaggcgctgcgtaaggctacggaggcaagcaaggcgaaaagcgaatttctgtccaacatgagccacgaaatgcgcacgcccctgaacgcgataaccggtatgacgactataggcagaagcgcgaaggacatggaacgcaaagactatgccctggacaagatagaggtcgcctcaacacatctgttaggcgttataaacgacgttcttgacatgtcaaagattgaggcgaatatgctggagctgtctcccgttgaatttatctttgacaagatgctgcaaaaaattgtaacagtggtaaatttccgaatagacgaaaaacagcagaaactctcgattcatattgacaaagctatacctaaaacctttattgccgatgaccagaggctggcccaggtcatcacgaaccttctgataaacgcggtcaaatttaccccggaaaaaggttctatctcctttaatgcggattttatcggagaagatgacgatctttgcaccgtaaaaatctccgtaagcgatacgggaattggaataagcaaagaacagcaaacacgcctgttcagttctttccagcaggcggagagcagcaccacgcgtaaattcgggggttccggactcggcctcgcgatttcaaagagcatagtggagatgatgggcggtaaaatctggattgaatcggagcttgataaaggctccacatttatttttaccgttaagatgaaacgcggaaccgataaagaacagggctttttgtctccggggctgaatttgaataatgtccgtattatggcgatagacgacgaccctgacgtattaacattctttcgcgatatggtgcaggatttcggcgtagtgtgtgaaaccgctctcagcggggaagaagcgctcgccctggcggaacagaaaggcgactgccggatttgttttgtgaactggaagctgccggatatggacagcatacaactggcacagaaactcaagcaacgtacgtctaaaaattccatagttatgataatttccgccaccgaatggagcgcgattgcggaagaagcgaagaaggcgggtatagataaattcctgtccaaacccctgttcccctccgttgtcgcggaaatcatcagtgaatatgccggcgcgggcggacaacaggcggaggaagagcaaacggatattaacggcctgtatgcggggcggcacattttgctggcggaagacgtagaaattaaccgcgaaatcgtactgtccctgcttgaagcgacgcagatagagatagactgcgcggaaaacggcaaagaagccgtgcgcatgttctgtgaaacgccggataaatacgaattaatcttcatggacgtacagatgcctgaaatggacggctacgaagcgacgcggcacatccggtcgtttgaagctgaaatgaggaaaaaagcccaattaccggaaaaagcaaaaggaattcccataattgccatgactgccaacgtattccgggaggatattgaaaggtgcctccacgccggtatggacagccatatcggaaaaccattggtttttccgatctttggataa

SEQ ID NO: 36830 - protein, 527 aa, Unknown
  Obtained from environmental sample
  DOMAIN (19)...(84): His Kinase A (phosphoacceptor) domain
  misc_feature (1)..(527): Xaa is any amino acid
MMARETQEALRKATEASKAKSEFLSNMSHEMRTPLNAITGMTTIGRSAKDMERKDYALDKIEVASTHLLGVINDVLDMSKIEANMLELSPVEFIFDKMLQKIVTVVNFRIDEKQQKLSIHIDKAIPKTFIADDQRLAQVITNLLINAVKFTPEKGSISFNADFIGEDDDLCTVKISVSDTGIGISKEQQTRLFSSFQQAESSTTRKFGGSGLGLAISKSIVEMMGGKIWIESELDKGSTFIFTVKMKRGTDKEQGFLSPGLNLNNVRIMAIDDDPDVLTFFRDMVQDFGVVCETALSGEEALALAEQKGDCRICFVNWKLPDMDSIQLAQKLKQRTSKNSIVMIISATEWSAIAEEAKKAGIDKFLSKPLFPSVVAEIISEYAGAGGQQAEEEQTDINGLYAGRHILLAEDVEINREIVLSLLEATQIEIDCAENGKEAVRMFCETPDKYELIFMDVQMPEMDGYEATRHIRSFEAEMRKKAQLPEKAKGIPIIAMTANVFREDIERCLHAGMDSHIGKPLVFPIFG

SEQ ID NO: 36831 - DNA, 666 bp, Unknown
  Obtained from environmental sample
  misc_feature (1)..(666): n is a, c, g, or t
atgggaatcaaaaaaagcaaatttatatgcggttttttacgccaaaaactcgtatttttatgttataataatcatatgaacaatatacaaattaaatttatcaataccggtaaaaccataatctgcccttacggaactattgcctcgactcttatcgagcattttgacattccgcaggaggaaattgcggcaatcaaggaaaataacgagatacgcccgcttggaacgactttacttgtgaacgcgtcggtagagcctgtcctttttgattcccgcgaaggcgttgcggtttatcgccgcactctttcttttgttctggctattgcggcgcagaaaatatttccaaaagacggcgtgtatgtcggtcactcgcttggaaacagttattactatacgttaagctccggcgataagccaaaggaaagcgatgttaaagagcttgaaaatgaaatgcgcgctcttataaaagaaaatctgccaatcacgtttaaatatctttcttatgaagaggcgctgcagttattcaaaaaaaataatcaaacagacacagtgcttcttctggaacatagaagttctccgcttatncaggtaaacgaatgtaaagattatatggatatctatgttcagccgcttctttcgcgcacgggtctttctaaacgctnttga

SEQ ID NO: 36832 - protein, 221 aa, Unknown
  Obtained from environmental sample
  misc_feature (1)..(221): Xaa is any amino acid
MGIKKSKFICGFLRQKLVFLCYNNHMNNIQIKFINTGKTIICPYGTIASTLIEHFDIPQEEIAAIKENNEIRPLGTTLLVNASVEPVLFDSREGVAVYRRTLSFVLAIAAQKIFPKDGVYVGHSLGNSYYYTLSSGDKPKESDVKELENEMRALIKENLPITFKYLSYEEALQLFKKNNQTDTVLLLEHRSSPLXQVNECKDYMDIYVQPLLSRTGLSKRX

SEQ ID NO: 36833 - DNA, 582 bp, Unknown
  Obtained from environmental sample
  misc_feature (1)..(582): n is a, c, g, or t
atgttcagccgcttctttcgcgcacgggtctttctaaacgctnttgagcttatgccgtatcaggacggttttctcctgcgttttcccggcataggcaagggaaaggaaatcgcgccctttgttgacgagccggatctttttcaggtttacagcgattataaaaaatgggggcgtatggtaggggtgcgcgtagtaggagagttaaattcaaaagtggcggacaggacgtttctcgactacatcagaatttcggaggcgcatcaggcgcgcaaattatctcagacagccgaaaaaatttacagcaaacacgacaagattaaaatgatccttattgccggtccttcaagctccggaaaaacaacaagcgcgaagaggctttcaatagagttgatggtcttaggccttaaaccaattgccgtaagtctggatgattattacaggggaacggcggcgacgccgaaagatgaaaacggcgagccggactatgaatgtcttgaagcgctggacgtgccttatcttaacgaacaattacaggccctgtaccggggagaagaaattacccttcccgtttacgatttttag

SEQ ID NO: 36834 - protein, 193 aa, Unknown
  Obtained from environmental sample
  misc_feature (1)..(193): Xaa is any amino acid
MFSRFFRARVFLNAXELMPYQDGFLLRFPGIGKGKEIAPFVDEPDLFQVYSDYKKWGRMVGVRVVGELNSKVADRTFLDYIRISEAHQARKLSQTAEKIYSKHDKIKMILIAGPSSSGKTTSAKRLSIELMVLGLKPIAVSLDDYYRGTAATPKDENGEPDYECLEALDVPYLNEQLQALYRGEEITLPVYDF

SEQ ID NO: 36835 - DNA, 375 bp, Unknown
  Obtained from environmental sample
  misc_feature (1)..(375): n is a, c, g, or t
atgctgtcgcactccaactttggcgttgtgcaggagggcagcgcaaagcgcgtagcaaaggcggtggagattttgcaaaaccactaccctgacatgatggtagagggcgaaatgcaagccaactacgccttcaacggcaagctgcgcatggaaaaattccccttcaacaagctgcaggataaggaggtgaattgctttgtatttccctgcttgagctcgggtaacattgtaccgctttttgtaaaggagctaagcggatacgaaattataggacctgtcattcttggattggacaaacccgtacacattttgcccgacgagtgcagcgtacgcgatgtgctgaacatggtggctattgcagcctcagggatataa

SEQ ID NO: 36836 - protein, 124 aa, Unknown
  Obtained from environmental sample
  misc_feature (1)..(124): Xaa is any amino acid
MLSHSNFGVVQEGSAKRVAKAVEILQNHYPDMMVEGEMQANYAFNGKLRMEKFPFNKLQDKEVNCFVFPCLSSGNIVPLFVKELSGYEIIGPVILGLDKPVHILPDECSVRDVLNMVAIAASGI

SEQ ID NO: 36837 - DNA, 378 bp, Unknown
  Obtained from environmental sample
  misc_feature (1)..(378): n is a, c, g, or t
atgtcttgggacaacgccatagcagactttttgacctacctgcggttggaaaaatcgttgggagaaaaaacgcttaccgcctacagcagcgatgtggaaaagttgcgccgctttatcgaaggcgaatatcggctgcaaccgcagcaggttacgcatacgcacgttgagcaatttctcgcccacgtttacgaccttggtcttaatagccgctcacaggctcgcgtgctgagcggagttagggcattctttcagtacctgctctgcgaagatgccattaccgccaaccccacgcagcaaatagacggaccccaagatgggcgcaagctgcccgtagtgctgagcgtgggagaaatcgagaaaatcatagctgcccgttga

SEQ ID NO: 36838 - protein, 125 aa, Unknown
  Obtained from environmental sample
  DOMAIN (7)...(90): Phage integrase, N-terminal SAM-like domain
  misc_feature (1)..(125): Xaa is any amino acid
MSWDNAIADFLTYLRLEKSLGEKTLTAYSSDVEKLRRFIEGEYRLQPQQVTHTHVEQFLAHVYDLGLNSRSQARVLSGVRAFFQYLLCEDAITANPTQQIDGPQDGRKLPVVLSVGEIEKIIAAR

SEQ ID NO: 36839 - DNA, 489 bp, Unknown
  Obtained from environmental sample
  misc_feature (1)..(489): n is a, c, g, or t
atgaaaatcacccagctatttgcggctatgaaccgcaaggcaatgatgaaagtgattcttgaagggtttgaaattgcggacggaagcggctatgaaacctttacgacgattcataactacattgatacggattcaatgatactgcgaaaaggggcggtttccgcaaaggcaggtgaaaaattgctcattcccattaatatgcgtgacggcagccttgtatgcagggctttaggtaaccctgactggaatttttcagcgccgcacggcgcgggaagattaatgagccgcagtaaagcaattaaaacattgtctttagatgactttaaggaacagatggccggtatatattcaacttcgattaacaaggatactttggacgaaagcccaatggcctacaagaatatggatgacattgtccgcaacatagccccgaccgctgagattgaaaaaataattaagcctgtttacaattttaaggcgacggaatag

SEQ ID NO: 36840 - protein, 162 aa, Unknown
  Obtained from environmental sample
  DOMAIN (1)...(160): Uncharacterized protein family UPF0027
  misc_feature (1)..(162): Xaa is any amino acid
MKITQLFAAMNRKAMMKVILEGFEIADGSGYETFTTIHNYIDTDSMILRKGAVSAKAGEKLLIPINMRDGSLVCRALGNPDWNFSAPHGAGRLMSRSKAIKTLSLDDFKEQMAGIYSTSINKDTLDESPMAYKNMDDIVRNIAPTAEIEKIIKPVYNFKATE

SEQ ID NO: 36841 - DNA, 810 bp, Unknown
  Obtained from environmental sample
  misc_feature (1)..(810): n is a, c, g, or t
ttgcagcaagaacaggagatgcgtcaatacgggaaagcgggagaggaaactctgtcggaagaatcgcagtggcacggtgagcggacgctgtcacgcaaagaactgcgggagtntgagcggcagcagcgggaagagcgcaaactgcgcgaaaagcgcatgtggcgcgtacacgctgtgaacatcacgggcaacaaggcctacggcaagaaggatctccaaagcctgatggaactcaagcggaagtcgcgcttcaccaactaccttatgcaatccgatttggacgcgctgacggcgttctacaagaacggcgggttcgagtacgtcagcgtgcggagcgccgacgtccagcgtgacagtttaaaacgcagggtgacggttcacatcgctgtggaggaggggccgcgcatttgcgtcagcgagatcggcgtcaacgcgaaacggtttgcgcccggcgcgtcggtgatgcgcaaactcgccacaaagcagaactcgccgctggttcactccgacgtacgccaagactgccgcaaacttaaggagatcgccggcgaacgcggattcttggaggccgtcgtcgagccggaggtttttatagacaccgtcaaatatcaggcaagcgtgctcttcaatgttatcgaaggcccggtagtggaaataggaaagataaagatcgaggcgccggggtttcggaaatccaccgtggaaagggaactctccatacgcggcggcgacacgctgaacctgcgtacggtgcggcagtccgaacgcgacctctacaccaccggccctcggccaatctgtcatgggtga

SEQ ID NO: 36842 - protein, 269 aa, Unknown
  Obtained from environmental sample
  DOMAIN (54)...(133): Surface antigen variable number repeat
  misc_feature (1)..(269): Xaa is any amino acid
MQQEQEMRQYGKAGEETLSEESQWHGERTLSRKELREXERQQREERKLREKRMWRVHAVNITGNKAYGKKDLQSLMELKRKSRFTNYLMQSDLDALTAFYKNGGFEYVSVRSADVQRDSLKRRVTVHIAVEEGPRICVSEIGVNAKRFAPGASVMRKLATKQNSPLVHSDVRQDCRKLKEIAGERGFLEAVVEPEVFIDTVKYQASVLFNVIEGPVVEIGKIKIEAPGFRKSTVERELSIRGGDTLNLRTVRQSERDLYTTGPRPICHG

SEQ ID NO: 36843 - DNA, 597 bp, Unknown
  Obtained from environmental sample
  misc_feature (1)..(597): n is a, c, g, or t
atgcccgccaaccaatccaccatgagcatctgcaacctggccctggctttcttgggcggggagcagctttcctcggtagaggccccctgggaccagagcgccctgggggttctctgcctgaaccatttcaacatagtgcgggacacggccctggaagctcacgactggagctttgcccgggctcgggcggtcctggctgagaagccgcaagaaatgatagtgcgggggtatcgtcatcgctatgctctgccggccgactgtatcagacctatcggcctggaaggagttcttgacgaccgcgctttctttctggaggggcaggatcttctgactgatgtgactccggccatactcagttatattcggcggatggaagaccccagggtttatcctccggcgttttacaacgcgctggcttggggcctggcttcggtgctggccacggccaggaacaacgacccgcgcaagcaactgctctgccagcagaactataccgctttgctgtctgaatccatggcccgggacaacaacacgcaaaatctcaggccggaaatatcccgctggaatcggacagctcggccgatctgtcatcggtaa

SEQ ID NO: 36844 - protein, 198 aa, Unknown
  Obtained from environmental sample
  misc_feature (1)..(198): Xaa is any amino acid
MPANQSTMSICNLALAFLGGEQLSSVEAPWDQSALGVLCLNHFNIVRDTALEAHDWSFARARAVLAEKPQEMIVRGYRHRYALPADCIRPIGLEGVLDDRAFFLEGQDLLTDVTPAILSYIRRMEDPRVYPPAFYNALAWGLASVLATARNNDPRKQLLCQQNYTALLSESMARDNNTQNLRPEISRWNRTARPICHR

SEQ ID NO: 36845 - DNA, 783 bp, Unknown
  Obtained from environmental sample
  misc_feature (1)..(783): n is a, c, g, or t
atgggccttgaccagcgcagggacatggtagacttaaaagagcgggaagccgacgaagccagccagcaggcggccataacccgcgacgccgtcagggaggaagaggaaaggatagcccgcgaaagagaagcggcccagcaacagcaacagcaggccgaggcggaacagcgccaaattgcccaggagcgccaacagcccggtgccgaccagcaggctctggacgcacgggagcaggaagcccagcggcaggaacaggaagcccagcaggctctggaacaactggatcaagatcaggaagccgtggaagcccagaagcaggaagcggaaagccaggaagcgtttgccgagcaaaaggccagcgaagcccaggaagatcgtcagcaaattgcggacgatcaacaggccattatcaggcaggaagctcctcccgctcaaagcgcgggcgttttgggcttttcgttgctgaacccagatcaataccttggtcgtcttgtaaagctcgatccgactacgggcgctgaaaacagaagatcgccgattacaaccgtcaacggaaggacggttatcctggttaatagccgaatattcgcgatagcgggagaaaacaggggcgacggggcaatcaggattgttgaaattaacccggataccctggaaatgctgaaacaaggcgatgacgatatatccccggacagccttctctggataaacgggcaggatctgtacgcgattacaggaacgccagacaactgcatcttgccaggttcaatttggatctggtaa

SEQ ID NO: 36846 - protein, 260 aa, Unknown
  Obtained from environmental sample
  misc_feature (1)..(260): Xaa is any amino acid
MGLDQRRDMVDLKEREADEASQQAAITRDAVREEEERIAREREAAQQQQQQAEAEQRQIAQERQQPGADQQALDAREQEAQRQEQEAQQALEQLDQDQEAVEAQKQEAESQEAFAEQKASEAQEDRQQIADDQQAIIRQEAPPAQSAGVLGFSLLNPDQYLGRLVKLDPTTGAENRRSPITTVNGRTVILVNSRIFAIAGENRGDGAIRIVEINPDTLEMLKQGDDDISPDSLLWINGQDLYAITGTPDNCILPGSIWIW

SEQ ID NO: 36847 - DNA, 363 bp, Unknown
  Obtained from environmental sample
  misc_feature (1)..(363): n is a, c, g, or t
gtgagaaagatggtctgcgattacgggatgacggacgagctcgggccggtgtcgtacggggataaggacgactcgatatttttggggcgcgagatgaaccgccacagggattactcggagtctacggcggaggcgatagaccggcacgttaggcggataatagacgagcagtcggcgcgggccaaggagatacttacggggcatagggacgagctggagaggctggctaaggcgcttttggagcatgagctgctggacagggaggagatcatcaaggtggtgggcggggcgacgcttgagagcgctaagaagaacagggttttgccgcagaagattgaagttgtggtgggggatgttaattaa

SEQ ID NO: 36848 - protein, 120 aa, Unknown
  Obtained from environmental sample
  DOMAIN (1)...(93): Peptidase family M41
  misc_feature (1)..(120): Xaa is any amino acid
MRKMVCDYGMTDELGPVSYGDKDDSIFLGREMNRHRDYSESTAEAIDRHVRRIIDEQSARAKEILTGHRDELERLAKALLEHELLDREEIIKVVGGATLESAKKNRVLPQKIEVVVGDVN

SEQ ID NO: 36849 - DNA, 885 bp, Unknown
  Obtained from environmental sample
  misc_feature (1)..(885): n is a, c, g, or t
atgagaccaagaattagagttaaaaaggaagaggaagaaaaagaacttaaagtatccttcttttccaagaacccctacatctgtccggcctgcagcgcgaaattccacaaggaggagctgctttccggaggcggcaggatgatcgcagggtctctcaccgaggaactgcaccggctctacgaaccttcggtaaaatacggcgaggtctatcctctggcgtacaactccgtagtctgcccggaatgctggtttgcctcgacggacacggactttccccttcttccggattttaaagttgaaacggtaaatgccgatcagaatcgccgcaaggccgatacgctgttgatcttccctgacgtggatttctcccagccaaggggccttaaagaagccgcggcgtcgcagtacctgactgtacgctgttatgatttttatacaaagcataactctcctacgataaaacaggggattgcctctttgcgcacggcatggtttcttgacgaattgaacagaaaattcccgaaacagcactacgactggctcgccacgctgttccgcaagaaggcccagtatttttacaccgaagccctcgacagggagcagaaacaggttgaaacaatgtccgccatgaaatcattcgggcccgacatagacaaaaattattcttatgaggggatgctgtacatctgcgcctacctgcgttacaaatacggcccggccgaaggatcggaagaaaggcgcgcttcccttgaggaagcccgcaggacaatagccaagctgttcggcatgggaagaaaatccaaagaaaaacccggcgcctttcttgatctggcccgcaaggtatataacgcgatcaacgaggaactcggcgttggcgacctctga

SEQ ID NO: 36850 - protein, 294 aa, Unknown
  Obtained from environmental sample
  misc_feature (1)..(294): Xaa is any amino acid
MRPRIRVKKEEEEKELKVSFFSKNPYICPACSAKFHKEELLSGGGRMIAGSLTEELHRLYEPSVKYGEVYPLAYNSVVCPECWFASTDTDFPLLPDFKVETVNADQNRRKADTLLIFPDVDFSQPRGLKEAAASQYLTVRCYDFYTKHNSPTIKQGIASLRTAWFLDELNRKFPKQHYDWLATLFRKKAQYFYTEALDREQKQVETMSAMKSFGPDIDKNYSYEGMLYICAYLRYKYGPAEGSEERRASLEEARRTIAKLFGMGRKSKEKPGAFLDLARKVYNAINEELGVGDL

SEQ ID NO: 36851 - DNA, 609 bp, Unknown
  Obtained from environmental sample
  misc_feature (1)..(609): n is a, c, g, or t
atgaccgggcccaacgctcttgacaggctggttgcgcttttttcaaggctccccggtattggaaaaaaaagcgcaagccgtcttgtgtaccacatccttgactccgatccgtcatatgccggaactcttgccgctgagctccggggccttcatgacgcgattaaacgatgctcgcgttgcggcagttttaccgaaagcgatccctgttccatctgcacggataacacccgtgatcacagcctgctttgtgttgtggaacgcgcccaggatgtcagggtcatagatgaatccagggagttcaggggccttttccacgttttaggcgggctcattgcgcctctggaaggcgtaaaccccggcgaccttgccatagcgcagctcctcggtcgtgtcagggacgagggcgtcagagaggtaattctggccctgaacccgacaatagagggggacactaccgccctttttatccagaagtttctgaaagaaaaactgccctccggccagctcgaaataagccgcctggcttcgggcctccccgtcggcggcgaccttgaatacgccgacaggcttaccctgtcccgaagtctgcggggcaggataaggatgtaa

SEQ ID NO: 36852 - protein, 202 aa, Unknown
  Obtained from environmental sample
  DOMAIN (80)...(177): Toprim domain
  misc_feature (1)..(202): Xaa is any amino acid
MTGPNALDRLVALFSRLPGIGKKSASRLVYHILDSDPSYAGTLAAELRGLHDAIKRCSRCGSFTESDPCSICTDNTRDHSLLCVVERAQDVRVIDESREFRGLFHVLGGLIAPLEGVNPGDLAIAQLLGRVRDEGVREVILALNPTIEGDTTALFIQKFLKEKLPSGQLEISRLASGLPVGGDLEYADRLTLSRSLRGRIRM

SEQ ID NO: 36853 - DNA, 456 bp, Unknown
  Obtained from environmental sample
  misc_feature (1)..(456): n is a, c, g, or t
atggggattttattaaacgaggtttttgaccagcgatccatattattgaatcttgagagtaaaaccaaagagggaatttttgtcgaattggctgaaactataagctcaattcaccctggatgtgatcgctcttcaatgcttacggcattatgggagcgtgaaaacaagctaaatacagggatcgtttccggtgtcgcatttccacatacgatttacgggggaatcactaacatagccggggcaatcggcatatcgcagacaggtatcgattacggcgctcttgataacaaaccggtttacgttgtgtttatgctggcgataagcgataaggcaatggaaaaccatttgcgaatattaaaccagcttttcacgcttgcccaatccgaggcaatcgcgattatgagaaaagcgcagaatacagataccgtgaaagatattctgtcgcgatttcagtga

SEQ ID NO: 36854 - protein, 151 aa, Unknown
  Obtained from environmental sample
  DOMAIN (7)...(150): Phosphoenolpyruvate-dependent sugar phosphotransferase system, EIIA 2
  misc_feature (1)..(151): Xaa is any amino acid
MGILLNEVFDQRSILLNLESKTKEGIFVELAETISSIHPGCDRSSMLTALWERENKLNTGIVSGVAFPHTIYGGITNIAGAIGISQTGIDYGALDNKPVYVVFMLAISDKAMENHLRILNQLFTLAQSEAIAIMRKAQNTDTVKDILSRFQ

SEQ ID NO: 36855 - DNA, 924 bp, Unknown
  Obtained from environmental sample
  misc_feature (1)..(924): n is a, c, g, or t
atggtatccgattcaggtcttaacgcgctattggcagggcaactcaatgacggaggcgaacttgatttatctgcggaaacgcaggaaattgatcttgatgcgtgtgctcttgagcttacggatgagtctcaaaacattcttttaagcgcggatcaattatttacaagtttgcttgaaacagaagtatcaggtgaaaacggattatcgcttgaaatcgacagggtaaaatcattaattgatgaaatgccctcgcagacggtatcatttgcggataaagggcaggatgacgccgccgctcaattaagagccgctcaggaaattaatgatctggcgcaaatgtcggataacaagaaaaaagcgaatacgcagtccaaagctgacagcgaagacgcgttatccgcaaaaaacaagacgggcgaaaacaaagacactttactttccaaaacaaatgaaggcaaagaacagcccggcaaacttgaagaattccgcaaccgctcccgcaaagacaaagttaatatcgaagtccgcgacttcaggacaaataccaaccccgacggaacgcagacgcgcactttctctgttgttgaaacagcggcagggcgcgcgcatgggcagaacgctgttcaggaagtaactttagatttgcgtctgccggatcaggggcaaagctctcagcttaataattcatgggaagtaaaatcgggcaatatgttagaaaacatgcttgccagagaactgcaccagaactttaacggcgatattgtccgccacgcttcaatggctctgcgggacggcggagcgggaacaatcaaaatcgcccttcaccctgagactctgggacatgtaaagatacacctggaaatgaccgaaaacaagattacggggagaatccccgtgaaagcgaggaagcccttcacgctttaa

SEQ ID NO: 36856 - protein, 307 aa, Unknown
  Obtained from environmental sample
  misc_feature (1)..(307): Xaa is any amino acid
MVSDSGLNALLAGQLNDGGELDLSAETQEIDLDACALELTDESQNILLSADQLFTSLLETEVSGENGLSLEIDRVKSLIDEMPSQTVSFADKGQDDAAAQLRAAQEINDLAQMSDNKKKANTQSKADSEDALSAKNKTGENKDTLLSKTNEGKEQPGKLEEFRNRSRKDKVNIEVRDFRTNTNPDGTQTRTFSVVETAAGRAHGQNAVQEVTLDLRLPDQGQSSQLNNSWEVKSGNMLENMLARELHQNFNGDIVRHASMALRDGGAGTIKIALHPETLGHVKIHLEMTENKITGRIPVKARKPFTL

SEQ ID NO: 36857 - DNA, 693 bp, Unknown
  Obtained from environmental sample
  misc_feature (1)..(693): n is a, c, g, or t
atgaattttaagcggcgttttatagtgatcttttcattgttagccattttccttttatatttgatcattcattacgccgtattgataattaagggcgaacttcctccgcccgcccgcccgaatacgaatcttcctgaacgtggttctattctggacagaaacggacgtttcctcgctattcaaatccgttttgccgatgtcagcgtttggcggccttcgataaaagatattgatgttttatcaaatgaacttgcagtaatcctagatatgtccccttctgaaatccgcgaaaaaataaattcgtctgaatcaaactttctttatttaagaagacgtatcgacgacggcacggcaaggcagcttaccgccattcttgaagaaaaaaaaataaggggtgtaatgcttcaacccattgtaggcagggtatatcccgagaaaaatatcgcgagccaaattgtcggttttgtaggggacagaaacgaggggatagaatacgcgtttaacaatgtcttatccggcgttgataatgacggcaaaggctccaatgttgtgttgacgattgatgtctatattcaacatatcttacggcagattgcggtaaaaacaatgggaagagacancagcggaggcggctatgcttctcgcgatggatccgcgcagcggcgacattatcggttccgcctcccttcctaa

SEQ ID NO: 36858 - protein, 230 aa, Unknown
  Obtained from environmental sample
  SIGNAL (1)...(28)
  DOMAIN (42)...(185): Penicillin-binding Protein dimerisation domain
  misc_feature (1)..(230): Xaa is any amino acid
MNFKRRFIVIFSLLAIFLLYLIIHYAVLIIKGELPPPARPNTNLPERGSILDRNGRFLAIQIRFADVSVWRPSIKDIDVLSNELAVILDMSPSEIREKINSSESNFLYLRRRIDDGTARQLTAILEEKKIRGVMLQPIVGRVYPEKNIASQIVGFVGDRNEGIEYAFNNVLSGVDNDGKGSNVVLTIDVYIQHILRQIAVKTMGRDXSGGGYASRDGSAQRRHYRFRLPS

SEQ ID NO: 36859 - DNA, 531 bp, Unknown
  Obtained from environmental sample
  misc_feature (1)..(531): n is a, c, g, or t
gtgaacgtagaaaacgctgtggcggcaagcgcggcagcatgggtagcgggtgttagcctaaaacacattcccgccgcgctcaagaactttcagggcgtaaggcggcgcttcgatgtgcagctaagcacccccgctgttacctacattgacgattacgcgcaccaccccgaggagttgtgcgctgcaataacctcaatacgcggcatgtttcccggcaaaaaaatcacaggtgtttttcagccgcacctttacacgcgcacgcgcgactttgccgacgggtttgtcaagagtcttagcctgctcgacgagctgatactgcttgacatttaccctgcacgcgagaaacctattgagggcgtaacctcatcgctgctgtttgacaaaattgcgctcgaaaacaaaacgctgtgcagcaaagatgagctgttgaacgtgctaaaaacgaaacgcctggaggtgcttgtaacccttggcgcaggtgacattgacactatggtagaaccgataagggaattgctaacctcttcctaa

SEQ ID NO: 36860 - protein, 176 aa, Unknown
  Obtained from environmental sample
  SIGNAL (1)...(21)
  DOMAIN (33)...(120): Mur ligase family, glutamate ligase domain
  misc_feature (1)..(176): Xaa is any amino acid
MNVENAVAASAAAWVAGVSLKHIPAALKNFQGVRRRFDVQLSTPAVTYIDDYAHHPEELCAAITSIRGMFPGKKITGVFQPHLYTRTRDFADGFVKSLSLLDELILLDIYPAREKPIEGVTSSLLFDKIALENKTLCSKDELLNVLKTKRLEVLVTLGAGDIDTMVEPIRELLTSS

SEQ ID NO: 36861 - DNA, 681 bp, Unknown
  Obtained from environmental sample
  misc_feature (1)..(681): n is a, c, g, or t
atgaacccttgggtatttgatggctgtacagagcttgcgggtattagcgtggacaaaaacaatcctattttttgcttagttgatggcgtaatgttcgacaaagcaatgaccaccctgatgttgttccctcaaggaaagaatggaaggtattctgtaccagaaggaattatcagtatcaggaaaaatgcttttgataattgtaaactgaccagcatatcttttcttcaaagccttttattcattgatagtgatgggtttaatggtgaacagcttacagatattacggtaagcgagttaaatccgtattattacagtattgatggggttatgttcaacaaagaaagcaaagaaaatatcgtccttcgggagtatccgaaaaacaaagagaaaacagattatactgttcctgagggagtaatgggtattgattcctgtgcgtttgacagatgtaaaagattggccaatataattcttccggaaagcctgaaaattattcgtgattatacatttgcgaaatgtgaggggcttaaggctatcactctctccatgagtctacagtacatcggtgaaagagcatttgaagattgtccaaaccttgagaccgttacactttcacgaaaaacaaagatagggcacaaagcttttgaggggtataaggggcggctggtttacagggattga

SEQ ID NO: 36862 - protein, 226 aa, Unknown
  Obtained from environmental sample
  misc_feature (1)..(226): Xaa is any amino acid
MNPWVFDGCTELAGISVDKNNPIFCLVDGVMFDKAMTTLMLFPQGKNGRYSVPEGIISIRKNAFDNCKLTSISFLQSLLFIDSDGFNGEQLTDITVSELNPYYYSIDGVMFNKESKENIVLREYPKNKEKTDYTVPEGVMGIDSCAFDRCKRLANIILPESLKIIRDYTFAKCEGLKAITLSMSLQYIGERAFEDCPNLETVTLSRKTKIGHKAFEGYKGRLVYRD

SEQ ID NO: 36863 - DNA, 369 bp, Unknown
  Obtained from environmental sample
  misc_feature (1)..(369): n is a, c, g, or t
atgccttcacgctgtcgaagcgctttgaatcgcactgggagcccaccgggcaacaacctgttgcgcgcggccgtcgatctcgccaaggatgggcgcaaggatcgcgtgctgcgccgcctggaggccatgcttctggttgcggacagcgagcatacgctgatcgtcaccggcacaggcgatgtcattgatcccgacgacggcgcggccgccatcggcagcggcggcccctatgccctggccgcggcgagagccctgctcaggcatgcggatctcgatgccgaagccgtggcccgcgcggccatgagcattgcctctgaaatctgcgtctatacgaacaattcgatcatcctggaaaaattggaagggtaa

SEQ ID NO: 36864 - protein, 122 aa, Unknown
  Obtained from environmental sample
  misc_feature (1)..(122): Xaa is any amino acid
MPSRCRSALNRTGSPPGNNLLRAAVDLAKDGRKDRVLRRLEAMLLVADSEHTLIVTGTGDVIDPDDGAAAIGSGGPYALAAARALLRHADLDAEAVARAAMSIASEICVYTNNSIILEKLEG

SEQ ID NO: 36865 - DNA, 558 bp, Unknown
  Obtained from environmental sample
  misc_feature (1)..(558): n is a, c, g, or t
ttgatgaattttgtaacaatcgactttgaaaccgcaaaatactcacaagagagcgcctgctctgttgggcttgtaaaatttcaggatggaaaagccgcagatacttactattcgctgattagaccgccaaaactttacatacgccccgactttaccgagattcacggacttactgttgacgatgtaagggacgctcccacattcataaatatctgggaaagcgaagtaaagccgtttatcggcgattatccgctggcggcgcataatgccgcctttgacatgggcgtacttggcgctgttcttgactggtacgaattggacataccaaaactgccttatttttgcacgtgcaatcttgcacgtcacacatgggcgggattaaaatcatattcacttacaaatcttgccaattatttcggcattgtttacaacgcgcacaacgcgcttgaagacgcttttgcatgcggaaagttggtgcaaatggcttcggaaaaattcggatgtacgaacgttgaagaactgctgggaagcgccgggttgaagatgagtgcgctgtaa

SEQ ID NO: 36866 - protein, 185 aa, Unknown
  Obtained from environmental sample
  DOMAIN (4)...(159): Exonuclease
  misc_feature (1)..(185): Xaa is any amino acid
MMNFVTIDFETAKYSQESACSVGLVKFQDGKAADTYYSLIRPPKLYIRPDFTEIHGLTVDDVRDAPTFINIWESEVKPFIGDYPLAAHNAAFDMGVLGAVLDWYELDIPKLPYFCTCNLARHTWAGLKSYSLTNLANYFGIVYNAHNALEDAFACGKLVQMASEKFGCTNVEELLGSAGLKMSAL

SEQ ID NO: 36867 - DNA, 1314 bp, Unknown
  Obtained from environmental sample
  misc_feature (1)..(1314): n is a, c, g, or t
ttggatattgcaaaaagcatttcggaagggcttgcccgcaaagccattgccgttaaactcggtgaaaaaattttagacttaaaccgccccataactacaaacggcacatttcgcataataacggcgagcaacgaagatgccgatgccctttatgtgctgcgtcactcctgcgcccacgttttggcagaagcaatttgcgcgctttgcccgggtacaaggcttgcttatggaccccctgtggaagacggtttttactatgaccttgcaacacccgagcctttgacacacgcagactttgaacgcattgaaaaaaagatggcggaaataataaaagaagaccgcccatttacacgcattgatgtttcaaaagaagaagcccttaaacgcacagaaggcgataaatacaaaagagacaatgttgacagagccattgaacgcggagatactgtttttagcttttatgcaaacggaatcccaaacgaaggctgggaagatttatgcgcaggtccccacgttccaagcacaggcaaactaaaggcgttcaaagtactcagccttgccggagcctattggcacggagaccaaaaaagcgaccagctcaccagagtttacggaacctgctttgcagacaaagcgggtttggatgcccatttgaaatttttggaagaggcaaagaaaagagaccatcgccgcattgggcaagagatggacttataccacatagaagaccacagccccggcatggtgttttggcacccgcacggagccgtgcttgtgaatgtgctgaaagattttgtccgcaaagagataacaaagcgaggctacaaagaggtgattacccccgaaatagtggataaatcactttggataaaaagcggtcacgcagacaaatacgattccaatatgttcaaaaccttggcaggcgagaaagatatggcggtaaaacctatgaactgcccctgccatattgaaattttcaaccaaggcttaaaaagctggcgcgacttgccgcttcgctttgccgaatttggaaaatgccaccgcaacgaaccagccggcacaatgcacggcttgatgagagttcgcggttttgttcaagacgatgcccatatattctgcaccgaggagcanatcactcaggaagtgagcagtttttgcacattggtaaaagacctttacaaagtttttggctttgaaaaaataaccgtgaaattcagcacacgcccagaactcagaattggctcagacgaacttttgggacaagcagaacactccttggaagagccacaaaactgccggcttgnaattcagtaa

SEQ ID NO: 36868 - protein, 437 aa, Unknown
  Obtained from environmental sample
  DOMAIN (151)...(204): Threonyl and Alanyl tRNA synthetase second additional domain
  misc_feature (1)..(437): Xaa is any amino acid
MDIAKSISEGLARKAIAVKLGEKILDLNRPITTNGTFRIITASNEDADALYVLRHSCAHVLAEAICALCPGTRLAYGPPVEDGFYYDLATPEPLTHADFERIEKKMAEIIKEDRPFTRIDVSKEEALKRTEGDKYKRDNVDRAIERGDTVFSFYANGIPNEGWEDLCAGPHVPSTGKLKAFKVLSLAGAYWHGDQKSDQLTRVYGTCFADKAGLDAHLKFLEEAKKRDHRRIGQEMDLYHIEDHSPGMVFWHPHGAVLVNVLKDFVRKEITKRGYKEVITPEIVDKSLWIKSGHADKYDSNMFKTLAGEKDMAVKPMNCPCHIEIFNQGLKSWRDLPLRFAEFGKCHRNEPAGTMHGLMRVRGFVQDDAHIFCTEEXITQEVSSFCTLVKDLYKVFGFEKITVKFSTRPELRIGSDELLGQAEHSLEEPQNCRLXIQ

SEQ ID NO: 36869 - DNA, 576 bp, Unknown
  Obtained from environmental sample
  misc_feature (1)..(576): n is a, c, g, or t
atggtaatttcggatttttcggcggttttaaagcttgaaaacaaggttttgacggcaaaaccttctttaatcagcaaaaatgtgctgattttcggagccgcaaaggttttaaacaacgatcatcatgaagctgtcctcttttttaagaattatcttggaaaatgcgggaaaaatgacaaacaatgggtgcattggttctacggtttttcacagcttttaaacggcaactttagacaggcggagcctgaattttcatcattgtctgttacctctgatagtattcttataaccgggctttccgcttattttttgcaaaatacaatagaaaaacattcttcagattccaagaaatgccatgaagcggcggaaaatggtcgtgaacgcgtgaaaaacgcgcttaatgatattgagaattggcaaaaagagaaagaaaaaatgagggcggaaatccatatcgcaataataaataaatatattaatgaagccggaaaatggatttttaataaagattccgcgaatccgccgctttatgccgatctgccggttacaaatgataattcggggaaacataaatga

SEQ ID NO: 36870 - protein, 191 aa, Unknown
  Obtained from environmental sample
  misc_feature (1)..(191): Xaa is any amino acid
MVISDFSAVLKLENKVLTAKPSLISKNVLIFGAAKVLNNDHHEAVLFFKNYLGKCGKNDKQWVHWFYGFSQLLNGNFRQAEPEFSSLSVTSDSILITGLSAYFLQNTIEKHSSDSKKCHEAAENGRERVKNALNDIENWQKEKEKMRAEIHIAIINKYINEAGKWIFNKDSANPPLYADLPVTNDNSGKHK

SEQ ID NO: 36871 - DNA, 759 bp, Unknown
  Obtained from environmental sample
  misc_feature (1)..(759): n is a, c, g, or t
ttgncgcgggaagcgcgggggcaagcgaatggcgcgacattcccaacgcggagttttaacctgnttctttcctcgtgggtcggggaaggcgccgccaaactgctgaaaacaaagtacggaaggccgtatctgcatattccatatattccgacgggggccgcggcgacaagccgcgtgttacgcgaaatagccgcgttcgcgggcattaacagcgaaaaggtcgaaagaattattgaacgcgaggaaaaacgtttttacaattattttatatcgctggcggactttttcgcggactatcgcaacagcataccctatgaattgtatcttgtatcagactcgtcatacgcgataggtatcagtgatttcctggtaaacgagcttggttttaccccggaaggcatatatattaccgatacgcctggcgattcggcgaagaaaaccatactggaaacattcgacaagttaggcggtgaattttcaggcaaagttatatttgaggacgacggaggattaatacagtccgacataaaaaaacgcctgaacggctccaaaaaagccgccatattcggaagcctgtgggaagattcacttgccgaggaaacaggcaatctgtcctaccacctgagccttcctctggtgaacgacattattaccagccgttcctttgccggatataacggcggcatacgtcttatagaagagttatacgccggcgtattccgccgccgtgacgttgcgggaacgacattagtggaatga

SEQ ID NO: 36872 - protein, 252 aa, Unknown
  Obtained from environmental sample
  misc_feature (1)..(252): Xaa is any amino acid
MXREARGQANGATFPTRSFNLXLSSWVGEGAAKLLKTKYGRPYLHIPYIPTGAAATSRVLREIAAFAGINSEKVERIIEREEKRFYNYFISLADFFADYRNSIPYELYLVSDSSYAIGISDFLVNELGFTPEGIYITDTPGDSAKKTILETFDKLGGEFSGKVIFEDDGGLIQSDIKKRLNGSKKAAIFGSLWEDSLAEETGNLSYHLSLPLVNDIITSRSFAGYNGGIRLIEELYAGVFRRRDVAGTTLVE

SEQ ID NO: 36873 - DNA, 624 bp, Unknown
  Obtained from environmental sample
  misc_feature (1)..(624): n is a, c, g, or t
gtgacaggcgtaataaattacggcgcgggaaatctcggctcggttatgaatgccttaaagcggctttcggttccggcgcgttttgtttccggcgcggacgagcttgccttgggaacgaccccctttgaaaggatcattttcccgggtgacggtcatttcgcgacggcaatggcttctctctctaagtccggttatgaccaggcgatcagggaatggataaaggctgacaggcctttccttggaatatgtatcggcttgcagctgctctttgaatcttcggaagaggccccgccggttaacggcgttgaagtgaaaggactttctgtgatcccgggaaccgtgcggcgttttcccgggcgcaagcttccccaaatcggctggaaccaaacggaagcgaggcctaattcaaagctgttcaggggtataaacgaaaaaagttttttttattatatacattcatactacgccgatcctgtggataattcagtaacgcccgctcaaaccgaatactatctgcgctattgctgtgccgtgaaacgcggagcgttagccgcagtgcagtttcaccctgaaaaatcaggcgcggcagggcttgcccttttgaaaaattgggtggagggataa

SEQ ID NO: 36874 - protein, 207 aa, Unknown
  Obtained from environmental sample
  DOMAIN (37)...(160): CobB/CobQ-like glutamine amidotransferase domain
  misc_feature (1)..(207): Xaa is any amino acid
MTGVINYGAGNLGSVMNALKRLSVPARFVSGADELALGTTPFERIIFPGDGHFATAMASLSKSGYDQAIREWIKADRPFLGICIGLQLLFESSEEAPPVNGVEVKGLSVIPGTVRRFPGRKLPQIGWNQTEARPNSKLFRGINEKSFFYYIHSYYADPVDNSVTPAQTEYYLRYCCAVKRGALAAVQFHPEKSGAAGLALLKNWVEG

SEQ ID NO: 36875 - DNA, 777 bp, Unknown
  Obtained from environmental sample
  misc_feature (1)..(777): n is a, c, g, or t
atgcaggcaaagcgtataattccatgccttgatgttgacgacggcagagtagtgaagggcgttaaattcaagggtattcaagacgccggagacccaagagaacttgcccgccgttacaacgacgacggcgcggacgaacttacattccttgacatcggcgcttcctacaaaagcagagcgacattgctggatgttgttcgcaaagtagccgccgaagtatttatccccctgtgcgtcggcggcggcataagagtaattgacgatatgcgagacgcaatgaacgcaggagcggacaaagtttcagtatgcacttccgccttgagccgccccgaattgttacgcgaaatggcaaacgcctacggcagtcagtgtgtcgtgctttcgatagacgcaaaacgcgtcgagggcggaaacggcttgcgctggcacgcctattcccacggcggcagaaccgacacggggattgacgccattgaatgggcaattcgcgccgtagaactcggcgcaggcgagatacttctcaactcaattgatgctgacggaacaggcggcggctacgatttggaactgaaccgccgaatactaaacgccgttcccgtacctgtaatcgcctcaggcggcgcggggacgcttgatcaaattgcggaggttttgctcagtaccgcgtcggcggaaatgccgcagggacttgcgccggaagaagcgccgggagcggacgccgcgctgatagcgtcgctttgcacttggaagacactcggcgataagccnnnntnataa

SEQ ID NO: 36876 - protein, 258 aa, Unknown
  Obtained from environmental sample
  DOMAIN (5)...(227): Histidine biosynthesis protein
  misc_feature (1)..(258): Xaa is any amino acid
MQAKRIIPCLDVDDGRVVKGVKFKGIQDAGDPRELARRYNDDGADELTFLDIGASYKSRATLLDVVRKVAAEVFIPLCVGGGIRVIDDMRDAMNAGADKVSVCTSALSRPELLREMANAYGSQCVVLSIDAKRVEGGNGLRWHAYSHGGRTDTGIDAIEWAIRAVELGAGEILLNSIDADGTGGGYDLELNRRILNAVPVPVIASGGAGTLDQIAEVLLSTASAEMPQGLAPEEAPGADAALIASLCTWKTLGDKPXX

SEQ ID NO: 36877 - DNA, 330 bp, Unknown
  Obtained from environmental sample
  misc_feature (1)..(330): n is a, c, g, or t
atggcttttggtattaataatgccggatggtggggtgaaggcgaagtaaaattttttatagacggcgatgacgaaaatcccaccatctgtggaactgggaccgaagattattttggcggagcatgggattggaatgtagatggtaattataccacttatactaccccatttcttggaatgcatcaggttcttaaaccagacggtctctacgattcccaacaccgtcatgccatgtatcgctggcatgtgatggatcctattcgtttcaagaaagatctcaaggttaccatccaggttttaggctggcgtagcgagcaccataagcgttaa

SEQ ID NO: 36878 - protein, 109 aa, Unknown
  Obtained from environmental sample
  misc_feature (1)..(109): Xaa is any amino acid
MAFGINNAGWWGEGEVKFFIDGDDENPTICGTGTEDYFGGAWDWNVDGNYTTYTTPFLGMHQVLKPDGLYDSQHRHAMYRWHVMDPIRFKKDLKVTIQVLGWRSEHHKR

SEQ ID NO: 36879 - DNA, 1524 bp, Unknown
  Obtained from environmental sample
  misc_feature (1)..(1524): n is a, c, g, or t
ttgcttcccaaagaaaattttatccccaaaggtgaagaacaatcccatctggacaggtatcttgcggtaaaaaaagaagcgtttaacgaacttgaaaaattaaaaattaccatgcaaaaacacgatccgcaaaaagctgatattttcagcgcgcatcaggaaattattgaagatattgttattaatgaggaaatcccgtccagaattttaaacgataaatgggcgggcgactgggcgatttatcatgtttatgaaacagtccttatagtgcttcaaaaagcgggagatccattaatcgccgagcgcgccgcggattttgacgacgtgcgcgcgcttcttttgcggttatggtacggcagaaaaaacgacggcctttcttcccttaccgaacctgttattattgccgcgcatgatttaatgccttccgacactgtttctttggacaggagcaaggcgctggcgcttcttaccgagaaaggcgggcttaccacccacaccgcgattatcgcaaagagttacggaatccctacgttattcggcatacacgggcttatggacgcggtaaaacagggccagcttgcggtggtaaacgccgatgaagaaaaaataattctggaacctgaaaccgatgttgccgccgaatatgaaaaaaagtacgaagcctaccgcagagacaagcaggacgccgacacatatcttgcanaacaggcctgtaccaatgacgggacgcggattgacattggtttaaatctttccggggctttagacgatgaacttcaagcggcttcttttgcggattccgtcggtcttttcagaaccgagtttctttaccttggcagggatttcttgccggacgaagaagagcagatttccgcttataaaaaagttcttgaatgtttcggcaagcggcctgtaatcctgcgcactcttgacataggcggggacaaacagctgtcaagcatgaatttaaagcgcgaggaaaatccgtttttgggaaaccgtggagtgcgtttttgtttaagttaccctgatatttttaaaacgcagattagggcggctttacgcgccggcgtttacggaaatatgtggatcatgttcccaatggtaaattccatagacgacatacgaaaagcgaaagagattgttgcgtccgttcaggaagaacttgagaatgaaggaaaaccctacgggcggattaaaaccggcattatgatagaaacgccttccatcgcgcttatggcaggccttgccgcgcgggaagttgatttcgcgagcataggcacaaatgatttatgccagtacctatgcgcggcggacaggatgaacagcgaagtggagccctattaccagtcctttcatcccgcgatattcaaactgataaaggaagtgacagccgcttttgaaaaaaacggaaaacccatatncatctgtcgagaacttgcggcggatccgctggcggcccctgtttttgtagggctgggcttaaggaaactgagcatgggcgccgcatcggtcgccgcctaa

SEQ ID NO: 36880 - protein, 507 aa, Unknown
  Obtained from environmental sample
  DOMAIN (1)...(103): PEP-utilising enzyme, N-terminal
  misc_feature (1)..(507): Xaa is any amino acid
MLPKENFIPKGEEQSHLDRYLAVKKEAFNELEKLKITMQKHDPQKADIFSAHQEIIEDIVINEEIPSRILNDKWAGDWAIYHVYETVLIVLQKAGDPLIAERAADFDDVRALLLRLWYGRKNDGLSSLTEPVIIAAHDLMPSDTVSLDRSKALALLTEKGGLTTHTAIIAKSYGIPTLFGIHGLMDAVKQGQLAVVNADEEKIILEPETDVAAEYEKKYEAYRRDKQDADTYLAXQACTNDGTRIDIGLNLSGALDDELQAASFADSVGLFRTEFLYLGRDFLPDEEEQISAYKKVLECFGKRPVILRTLDIGGDKQLSSMNLKREENPFLGNRGVRFCLSYPDIFKTQIRAALRAGVYGNMWIMFPMVNSIDDIRKAKEIVASVQEELENEGKPYGRIKTGIMIETPSIALMAGLAAREVDFASIGTNDLCQYLCAADRMNSEVEPYYQSFHPAIFKLIKEVTAAFEKNGKPIXICRELAADPLAAPVFVGLGLRKLSMGAASVAA

SEQ ID NO: 36881 - DNA, 813 bp, Unknown
  Obtained from environmental sample
  misc_feature (1)..(813): n is a, c, g, or t
atgaagtattccctatcttttatcccgaccctgcgggaagttcccacggacgcaataattgtaagccaccgccttatgttccgctccggaatgatccggcggctgggtaacggcctctttacttatctgcctttggggctgcgttctttcagaaaggtggagcagatcatccgtgaagaaatgaacgctatcggttccctggaaataaaacccaccgtggttatacccggagagctttggaaagaatccggacgctgggacagcatgggcgaggccctgctcagggtaaaaaaccgcctgggcgcggattttgtcgtctcccccaccgcggaagaagcctttaccgcccttgtgcgggatgagctttccagctaccgccagcttcctgtttcgctttaccaaataaacaccaagtaccgcgacgaaatccgcccgcgctacggggtaatgcgcggcagggaattcgtaatgaaagacgcctattcctacgacgcagacgaggcgagcctggaaaagagttaccaggacatgggccgcgcctaccgccgggttttcaagcgctgcggcctttcagtgatctccgtcaaggccgattccggcgcaatgggtggaagcggctctgaagagtttatggtagaaagcgaaatcggggacaacaccctgcttttctgcagggaacttgttcccagaactgcgacttcgcggcaaacgttgaaaaggccgactgtaagccggactattcagtcgtttcttctgcatctgcttcaacgccgtctgtcgaaaagatcgacaccccgaacgttaaaacaatag

SEQ ID NO: 36882 - protein, 270 aa, Unknown
  Obtained from environmental sample
  DOMAIN (49)...(219): tRNA synthetase class II core domain (G, H, P, S and T)
  misc_feature (1)..(270): Xaa is any amino acid
MKYSLSFIPTLREVPTDAIIVSHRLMFRSGMIRRLGNGLFTYLPLGLRSFRKVEQIIREEMNAIGSLEIKPTVVIPGELWKESGRWDSMGEALLRVKNRLGADFVVSPTAEEAFTALVRDELSSYRQLPVSLYQINTKYRDEIRPRYGVMRGREFVMKDAYSYDADEASLEKSYQDMGRAYRRVFKRCGLSVISVKADSGAMGGSGSEEFMVESEIGDNTLLFCRELVPRTATSRQTLKRPTVSRTIQSFLLHLLQRRLSKRSTPRTLKQ

SEQ ID NO: 36883 - DNA, 570 bp, Unknown
  Obtained from environmental sample
  misc_feature (1)..(570): n is a, c, g, or t
gtggagcttcagggggccgaatgcgaggaagctttttacgccgtgtgcatacgcggggacttggaaataaacgaagccaagctctgtgcccttttaaaagccgccgaagtgagccttgccagcgaagcggacgtggtgcgcctaaccggagcgccagttggtttcgcgggcccagtgggcttaagccagttgaaggtaattgcagacctcacagttacggccattaacgacggggtaacgggcgcacttgccaaggaccttcactacaagcacgtcgcctacgggcgggatttccaggcctggatgacagccgatgtgcgaacggttaaagccggcgaccgctgctccctctgcggcggggaactttacgagaaaaaaggcaacgagctgggacacattttcaagttaggctacaagtacacaaagtcaatgaacgtcagttaccttgacgaaaagggagtaaggcaaatccccctaagcggcagttacggcattggccttgatcgcaccctggccagcatcattgaggaacaccacgacgacgccggtatcatctggcccttaacgtag

SEQ ID NO: 36884 - protein, 189 aa, Unknown
  Obtained from environmental sample
  DOMAIN (1)...(106): YbaK / prolyl-tRNA synthetases associated domain
  misc_feature (1)..(189): Xaa is any amino acid
MELQGAECEEAFYAVCIRGDLEINEAKLCALLKAAEVSLASEADVVRLTGAPVGFAGPVGLSQLKVIADLTVTAINDGVTGALAKDLHYKHVAYGRDFQAWMTADVRTVKAGDRCSLCGGELYEKKGNELGHIFKLGYKYTKSMNVSYLDEKGVRQIPLSGSYGIGLDRTLASIIEEHHDDAGIIWPLT

SEQ ID NO: 36885 - DNA, 810 bp, Unknown
  Obtained from environmental sample
  misc_feature (1)..(810): n is a, c, g, or t
ttgggaaatctggctgagcctaagatacttctggctattatcggattaatcatcattattatactatattcgctcaaggtgccgggggccatacttatcgggattctggccacaacgatcctgagtattccaatgggtataaccgtccttgaaaaaggctggaaacctttcagcgtgccggcagcccccctgtttttcaaatttgatttttccagtataataagttttaaatttttcaccgtattttttacctttctatttgtagacatttttgacactgtaggaaccctggtcggagttactacccagggcgggcttattgaccagaatggaaaaattccccggcttaaacaagcgttcctctctgacgcggtaggtacagtagcgggcgccgcccttggcacatccacggtcaccagttatgtggaaagcaccgccggcgtagcagcgggaggcaggaccggcctcaccgccctgtctacgggcatacttttcctcctggccttggtgttatcgcccatattcctccttattcccggcgccgctacagccccggccctgatcttcgttggtttcctcatgatggcgccggtagtggatattaatttcaaagatcccaccgaaggcattcccgccttcatggctattgtcatgatgccctttgcctacagcatcgccgatggtattgtatacggcgtgctttcctatgtgatactcaaggttgcaacgcgcagatttaaagaaattaacgttgtcacatgggtgttgtttatagtatttattctgaaaatcgtgttggaaggaaagtag

SEQ ID NO: 36886 - protein, 269 aa, Unknown
  Obtained from environmental sample
  DOMAIN (1)...(231): Permease family
  misc_feature (1)..(269): Xaa is any amino acid
MGNLAEPKILLAIIGLIIIIILYSLKVPGAILIGILATTILSIPMGITVLEKGWKPFSVPAAPLFFKFDFSSIISFKFFTVFFTFLFVDIFDTVGTLVGVTTQGGLIDQNGKIPRLKQAFLSDAVGTVAGAALGTSTVTSYVESTAGVAAGGRTGLTALSTGILFLLALVLSPIFLLIPGAATAPALIFVGFLMMAPVVDINFKDPTEGIPAFMAIVMMPFAYSIADGIVYGVLSYVILKVATRRFKEINVVTWVLFIVFILKIVLEGK

SEQ ID NO: 36887 - DNA, 1038 bp, Unknown
  Obtained from environmental sample
  misc_feature (1)..(1038): n is a, c, g, or t
gtggtgggaggcatgggttatagctggcagcttgccctgaccgcggtttttcttgaaggtattttattcatcattctgtccttgttcaaaatacgcgaagcgatcatcgacgcaattccggcaaacctgagaaaagcagtggcggttggtattggtctttttatcgcgctgattggctttgccaatgcgggtatcgttgtcggcaacaccggcaccgtgattgggctgggaaatgtaacaacaggcgagcctttgctggcgttgctgggccttatcatcatgattgttctgttcacgcttaaagttcccggttcgattcttctgggcattatcatcaccacgattattggaattccctttggtataaccaacattcctgagggttggtcgccggtaggcactcccgccgcgcctcttttctttcaatttgagattactcccaaagagattatttcctttaaattttttatcgtcttttttaccttcctgtttgttgatatttttgacacggtgggaactctggtaggtgtaactactcaggcgggtttgatagacaaaaacggaaaaatccccaaagtaagagaggccctgcttgctgacgctatcggaacggttgtcggcgcttcggtgggcacttcaaccgttaccagttatgtggaaagcgcctcaggcgttgccgccggaggacgcaccgggctgacatcgtttactaccgccattttgtttctgattgccctgtttctttcaccgctgttcctgcttattccttccgccgccaccgctccggcgttaataatggtcggctactttatgtttgaaccggtaacaagcattgactttaccgatccgaccgaagggattcccgccttcatggccattataatgatgccctttacctacagcatcgccgacggcattgtttacggcgtgcttacctatgtgacgctcaaggttgtaacgcgcagattaaaggaaattcatccagtcacatggctattttttatagtgttcattctgaaagtcgtgttagacaggtaa

SEQ ID NO: 36888 - protein, 345 aa, Unknown
  Obtained from environmental sample
  DOMAIN (26)...(322): Sulfate transporter family
  misc_feature (1)..(345): Xaa is any amino acid
MVGGMGYSWQLALTAVFLEGILFIILSLFKIREAIIDAIPANLRKAVAVGIGLFIALIGFANAGIVVGNTGTVIGLGNVTTGEPLLALLGLIIMIVLFTLKVPGSILLGIIITTIIGIPFGITNIPEGWSPVGTPAAPLFFQFEITPKEIISFKFFIVFFTFLFVDIFDTVGTLVGVTTQAGLIDKNGKIPKVREALLADAIGTVVGASVGTSTVTSYVESASGVAAGGRTGLTSFTTAILFLIALFLSPLFLLIPSAATAPALIMVGYFMFEPVTSIDFTDPTEGIPAFMAIIMMPFTYSIADGIVYGVLTYVTLKVVTRRLKEIHPVTWLFFIVFILKVVLDR

SEQ ID NO: 36889 - DNA, 720 bp, Unknown
  Obtained from environmental sample
  misc_feature (1)..(720): n is a, c, g, or t
atgcttgaagaagaaaataagctcgttacagcaggaagtagctatgctggcatacaggctcccgaaagcacaacgcttactataagcggtacgggcagtttggaggcgatcggtggtaactacggagcgggaattggcggaggtgacgagggcggtgcaggtacaatcacgattagtggagtaacagtgacagctactggcggtagtttgggtatcaatcgtgctcagggaattggcagaggatatggcagtgccacagcaggaacgttgtttataaacaacaatgcggttgtgtttacaaataattctgttggagatttaagcttggatagaattactagtgctatcctcttttctggcaataatggaggttcttacggtactgtaacgctcagagaaaatctaactatttctgccgagcgtacgttaaatatacgaggaaatactactttgactattcccgcaggcataacgctcaccaacaatggcactgtaacgccagcaaatggctctacagtgatagttgagggaactgttaccaaaaaaataaatggttctaacataagaactccagtagctgacgaaagaactgcaacaagcataactataaatgcggcaacccttttggctgcaacagggcaagtagttgaatatgcgaaaaatactaccagtaccgtgcctgcaagcggctggcaaacagaaactacttttggggattaa

SEQ ID NO: 36890 - protein, 239 aa, Unknown
  Obtained from environmental sample
  misc_feature (1)..(239): Xaa is any amino acid
MLEEENKLVTAGSSYAGIQAPESTTLTISGTGSLEAIGGNYGAGIGGGDEGGAGTITISGVTVTATGGSLGINRAQGIGRGYGSATAGTLFINNNAVVFTNNSVGDLSLDRITSAILFSGNNGGSYGTVTLRENLTISAERTLNIRGNTTLTIPAGITLTNNGTVTPANGSTVIVEGTVTKKINGSNIRTPVADERTATSITINAATLLAATGQVVEYAKNTTSTVPASGWQTETTFGD

SEQ ID NO: 36891 - DNA, 453 bp, Unknown
  Obtained from environmental sample
  misc_feature (1)..(453): n is a, c, g, or t
gtgcagcttatggcttttgaggaaacgggcgggcttgaggtcggtaaccgcgttatcgcgcggggcagccgccttgaagtgccggtttcgaccaaacttctggggcgggtgctggacgctttggggaatcctgttgacggtaaaggcgaaatcgaatctcccgtcatgtatcccgcgctggcaaatcctcccgacccgctgaaacggcggcgcgtcaccgagcgtattgttaccggggtgcgggccattgacggccttttggcggtgggccggggtcagcggctggggatttttgccggttccggcgtgggtaaatcaaccctgctggggatgattgcccgtaatacccatgccgatgtcaacggggtcgcccttaacggcgagcgcgggcgggaagtaaacgactttatagagaacgatctggtcccgaagggcttgcccgcagcgtactga

SEQ ID NO: 36892 - protein, 150 aa, Unknown
  Obtained from environmental sample
  misc_feature (1)..(150): Xaa is any amino acid
MQLMAFEETGGLEVGNRVIARGSRLEVPVSTKLLGRVLDALGNPVDGKGEIESPVMYPALANPPDPLKRRRVTERIVTGVRAIDGLLAVGRGQRLGIFAGSGVGKSTLLGMIARNTHADVNGVALNGERGREVNDFIENDLVPKGLPAAY

SEQ ID NO: 36893 - DNA, 732 bp, Unknown
  Obtained from environmental sample
  misc_feature (1)..(732): n is a, c, g, or t
gtggatttcggcgacctgataaaaaaaccagtggaaattctaaggaaagaacctgaagtccgccgccgtttcagggaacgtttttcagttataatggtggacgaataccaggacgcgaatgtcgcccagtttgaaatgttgaaagaactggccggcccggaaacgtatgtctgcgttgtgggagacgatgaccagtcgatttaccgtttccgcggcgctgaagtaaaaaacatccttgagttcccggaaaaattttccgatgccgacattatccgcctagaaagcaactaccgttccaccgcgccgattttgaaagccgccgcctcggtcgtggatcacaacaagggccgtttggggaaaaccctcagagcggagcggggaaacggacaactaccggtactcgcctttctgccgaatcagaaagaagaagccaatttttgcgcctcgcttatcgaaaaatcggtaaaaagtggcaatgcgaaaacgcaggcggctcaatggtcggattgggcggtattatatcggactaacgcgcaatcttatgattttgaaacggaattcctgcaccgtcgcattccctacaagctggtcggctcgttgaaattttatgagcgcgaggaaatcaaagatgccattgcccttctttcgttcatggtgaacccccgcgacgaggtggcttttcgcccgtatggtgaacaaacccgcccggggcctgggcgcggtaacggttga

SEQ ID NO: 36894 - protein, 243 aa, Unknown
  Obtained from environmental sample
  DOMAIN (1)...(243): UvrD/REP helicase
  misc_feature (1)..(243): Xaa is any amino acid
MDFGDLIKKPVEILRKEPEVRRRFRERFSVIMVDEYQDANVAQFEMLKELAGPETYVCVVGDDDQSIYRFRGAEVKNILEFPEKFSDADIIRLESNYRSTAPILKAAASVVDHNKGRLGKTLRAERGNGQLPVLAFLPNQKEEANFCASLIEKSVKSGNAKTQAAQWSDWAVLYRTNAQSYDFETEFLHRRIPYKLVGSLKFYEREEIKDAIALLSFMVNPRDEVAFRPYGEQTRPGPGRGNG

SEQ ID NO: 36895 - DNA, 474 bp, Unknown
  Obtained from environmental sample
  misc_feature (1)..(474): n is a, c, g, or t
ttgtcaatgatagaatcctttaatcaggatcaacggtataaccttgtttgcaaaatggggcttgcgatagatatgattgagcaggcttatggcgacaattcaaaatggagatggacatttgtcgatattgaaggccgttttgcggtaacggcaaaaaatataattaacttaaaaaccgcttacgagaacatgtcccccggagccgaatattatgattccaccgtgtatcatcttagattggtaaaaaaacttatagcccaggccgcggatcgttaccgtgaaaagtacgagctgagtactgggcaaattcttgattttaaaacgggaataaactttcttggcgcgttacgccgtttgcacattgtcatgtccgaaagcgaagaagctaatgaagtaaaaaagaaattggcgatttggtcagcaaaacttgaaaccgatcataaaaagcaagaagaagccaaaaagagaacatga

SEQ ID NO: 36896 - protein, 157 aa, Unknown
  Obtained from environmental sample
  misc_feature (1)..(157): Xaa is any amino acid
MSMIESFNQDQRYNLVCKMGLAIDMIEQAYGDNSKWRWTFVDIEGRFAVTAKNIINLKTAYENMSPGAEYYDSTVYHLRLVKKLIAQAADRYREKYELSTGQILDFKTGINFLGALRRLHIVMSESEEANEVKKKLAIWSAKLETDHKKQEEAKKRT

SEQ ID NO: 36897 - DNA, 654 bp, Unknown
  Obtained from environmental sample
  misc_feature (1)..(654): n is a, c, g, or t
atgagccgtcccaatatctctttgaaggaatacaaggcgctttttccgtatctgtcgcgttataaagcccattacataataggcgttatctttcttataatcgtagacgcggcgcagatcgcgattccccaatttatccgttatgcgatagatttaatttcaagcggtgatttccaatggaagcaaatattaattctttcactgtggatggttggaataatggcggtcgtctcccttggccgttttttatggcgttattttatcagcggatcttccaggcgcatagaagccgagttacgcgaaactctgtacgcccatctgcaaaaactctcatgggatttttatcagaaaaataaaataggggatctgatggcgcgctccataaatgatcttaacgccataagaatggcgatgggaatggggatcgtcgccctatttgattttgttttcatggctacctccattttaattattatttttgtccaagacgcccgttccgcccttgtttcaataattcccctgcctcttggtaccgttttaattcttctctttggcaaaatggtaggaaaaaaattctccccgttcaaaggcttattcaaagtgagcgatacgcccagaaactttccccggatcaacggaaaaatccctttgtaa

SEQ ID NO: 36898 - protein, 217 aa, Unknown
  Obtained from environmental sample
  misc_feature (1)..(217): Xaa is any amino acid
MSRPNISLKEYKALFPYLSRYKAHYIIGVIFLIIVDAAQIAIPQFIRYAIDLISSGDFQWKQILILSLWMVGIMAVVSLGRFLWRYFISGSSRRIEAELRETLYAHLQKLSWDFYQKNKIGDLMARSINDLNAIRMAMGMGIVALFDFVFMATSILIIIFVQDARSALVSIIPLPLGTVLILLFGKMVGKKFSPFKGLFKVSDTPRNFPRINGKIPL

SEQ ID NO: 36899 - DNA, 840 bp, Unknown
  Obtained from environmental sample
  misc_feature (1)..(840): n is a, c, g, or t
atgcttcaatccgcgatggcgggcggggaaaaaatatttaagttgatggacacgaatgaaaaaatcccgaccacaggaacaatggaagtaacggccgcacgagggcatattgaatttgaaaatgtgcgttttgcgtacaagtctggagaagacgttttaaaggggcttacattttccgttaagcccggagagatggcggcgattgtggggtacacgggcgcgggtaaaaccacaatcatcaatgttcttacccgtttatgggacattgacaatggggaaatccgtcttgacggactgccgataaaaaacatccccttggataaattacgccgctgtattatgcctgtcactcaggatgtaactttattttccggcactatagaggagaacatcagtcttgggcttgagctttcacaggaagaaatagttgaggccgcgaaaacggttcacgctcatgaatttatttccgccctacctgacgggtataagactgagctttccgaaaaagcggcaaatatttctaccgggcaaaggcagttaataagttttgcccgcgtaatcgcccataacccccgcgtagtaattcttgacgaggcgacaagttcaattgataccgaaacggagagattgattcagcttgggatgaagagagtattggcgggaagaacttcgtttgtcatcgcccacaggctttctacgattagggacgcggattgcatttttgttctgtccaacggccgcctggtagagcagggtactcatgaagagcttaccgcaaaagacggaatttactcaggtctttacagattgcaatatgaggatatgaggattaaaatataa

SEQ ID NO: 36900 - protein, 279 aa, Unknown
  Obtained from environmental sample
  DOMAIN (63)...(246): ABC transporter
  misc_feature (1)..(279): Xaa is any amino acid
MLQSAMAGGEKIFKLMDTNEKIPTTGTMEVTAARGHIEFENVRFAYKSGEDVLKGLTFSVKPGEMAAIVGYTGAGKTTIINVLTRLWDIDNGEIRLDGLPIKNIPLDKLRRCIMPVTQDVTLFSGTIEENISLGLELSQEEIVEAAKTVHAHEFISALPDGYKTELSEKAANISTGQRQLISFARVIAHNPRVVILDEATSSIDTETERLIQLGMKRVLAGRTSFVIAHRLSTIRDADCIFVLSNGRLVEQGTHEELTAKDGIYSGLYRLQYEDMRIKI

SEQ ID NO: 36901 - DNA, 546 bp, Unknown
  Obtained from environmental sample
  misc_feature (1)..(546): n is a, c, g, or t
gtggtgatgataggcgagatgcgcgacctggagaccatagactccgcgctgacgatgcgggagacggggcacctggtgttcggcaccctgcacacgaattcggccatccagacggtcaacaggattgtggatgtcttccccgccttccagcagccgcaggtcaggtcccagctctcgatggtgctggagggcataatctgccagtgcctgatacccaaggccagcggcagtgggcgctctatggcgctggagatactgatccccacgccggccgtcagaaacctgataagggacgacaagattcaccagatttacggcacgatgcagtcgggacaggggaagcacggaatgcagacgcttaaccagagcctgtcagacctggtcatgaagggcgacatcagccgggaggaggccatggcctactccagcgaccgcgacgagctggccgaattgctcaacaggggcgtggggaccgtggacgctgcgctgcgccgggagaacggctccattttgggcgccagaaaccccaatataaggtattcttag

SEQ ID NO: 36902 - protein, 181 aa, Unknown
  Obtained from environmental sample
  misc_feature (1)..(181): Xaa is any amino acid
MVMIGEMRDLETIDSALTMRETGHLVFGTLHTNSAIQTVNRIVDVFPAFQQPQVRSQLSMVLEGIICQCLIPKASGSGRSMALEILIPTPAVRNLIRDDKIHQIYGTMQSGQGKHGMQTLNQSLSDLVMKGDISREEAMAYSSDRDELAELLNRGVGTVDAALRRENGSILGARNPNIRYS

SEQ ID NO: 36903 - DNA, 381 bp, Unknown
  Obtained from environmental sample
  misc_feature (1)..(381): n is a, c, g, or t
ttgaggccaggacccagacgtggtgatgataggcgagatgcgcgacctggagaccatagactccgcgctgacgatgcgggagacggggcacctggtgttcggcaccctgcacacgaattcggccatccagacggtcaacaggattgtggatgtcttccccgccttccagcagccgcaggtcaggtcccagctctcgatggtgctggagggcataatctgccagtgcctgatacccaaggccagcggcagtgggcgctctatggcgctggagatactgatccccacgccggccgtcagaaacctgataagggacgacaagattcaccagatttacggcacgatgcagtcgggacaggggaagcacggaatgcagacgcttaa

SEQ ID NO: 36904 - protein, 126 aa, Unknown
  Obtained from environmental sample
  misc_feature (1)..(126): Xaa is any amino acid
MRPGPRRGDDRRDARPGDHRLRADDAGDGAPGVRHPAHEFGHPDGQQDCGCLPRLPAAAGQVPALDGAGGHNLPVPDTQGQRQWALYGAGDTDPHAGRQKPDKGRQDSPDLRHDAVGTGEARNADA

SEQ ID NO: 36905 - DNA, 456 bp, Unknown
  Obtained from environmental sample
  misc_feature (1)..(456): n is a, c, g, or t
atgagaagagacattctccacccgggagcgggaaaactcaggtacgaaatccgggaaatcgtaggttttgccaaaagtctggcaaaatggaatatccccatccattgggaaaacatcggggacccggttcagaagggcgaacctgtggcggactggattaaggacattgtccgggcaaaagccggggagaacctttcctatgcttattcggaaaccgagggggttcgttccaccagggaattccttgccgacctggcgaacaagcggcccgtcctggaactgcccggtccgaacccgcggcccgttgttaaagccgaggacatacttttttttaacgggcttgggcgacgcggtggcgaaagttttcggtttcctccgcagggaagcgcgggttttggggccttcgccggcgtactccaccttgtcctccgcggaagcggcacattcaggctatga

SEQ ID NO: 36906 - protein, 151 aa, Unknown
  Obtained from environmental sample
  misc_feature (1)..(151): Xaa is any amino acid
MRRDILHPGAGKLRYEIREIVGFAKSLAKWNIPIHWENIGDPVQKGEPVADWIKDIVRAKAGENLSYAYSETEGVRSTREFLADLANKRPVLELPGPNPRPVVKAEDILFFNGLGRRGGESFRFPPQGSAGFGAFAGVLHLVLRGSGTFRL

SEQ ID NO: 36907 - DNA, 792 bp, Unknown
  Obtained from environmental sample
  misc_feature (1)..(792): n is a, c, g, or t
ttgacttcaacagacggcgtaatatggacggcagtaaaggacaacacattaggattaaacgacatctacgcgatcgcctatggcaacagcaagtttgtcgtgggtgacaggaacggtgacgcggcgacttcaactgacggtacaacatggacagcagcaggaaataaaattctcggttattatacgtataacgactggaaaaccggctacatcatcaacgcaatcgcctatggcaacggcaaatttgtcgcattggccaaaggcagtaaaatggcgtattcaacagacggtgaaacatggacagtcgtaaaggaataccccgcaaacgttggcctcatggcaatcgcctggggtaaagacaagtttgtcgccgggggcttgggcctggcgtattcgtctgacggcgtaaaatggacatccttggaccttaacccccaaaatacaggatttctcgcaatcgcctggggtaaagacaagtttgtcgcggttggcatgggcattgcgtattcgtctgatggtaaaacctggacaaccgtagtggaccccaacgcgaatctcttcctcggagcaatcgcctatggcaaggacaagtttgtcgcggtgggcaatggacgcatagcgtattcgtcagatggcgtaaaatggactacggtagatgtctcaggcatattcggcacaaggggcccaaaggcaatcgcatacggcaacaacaagtttgtcgcggggggcgagaaaggcaaaatggcgtattcaagcgacggcataaaatggactgcggaaaggacagcataa

SEQ ID NO: 36908 - protein, 263 aa, Unknown
  Obtained from environmental sample
  misc_feature (1)..(263): Xaa is any amino acid
MTSTDGVIWTAVKDNTLGLNDIYAIAYGNSKFVVGDRNGDAATSTDGTTWTAAGNKILGYYTYNDWKTGYIINAIAYGNGKFVALAKGSKMAYSTDGETWTVVKEYPANVGLMAIAWGKDKFVAGGLGLAYSSDGVKWTSLDLNPQNTGFLAIAWGKDKFVAVGMGIAYSSDGKTWTTVVDPNANLFLGAIAYGKDKFVAVGNGRIAYSSDGVKWTTVDVSGIFGTRGPKAIAYGNNKFVAGGEKGKMAYSSDGIKWTAERTA

SEQ ID NO: 36909 - DNA, 504 bp, Unknown
  Obtained from environmental sample
  misc_feature (1)..(504): n is a, c, g, or t
atgaacgagatactggagggcgtacaccagataaacgtctcggtgagccatgtcaacgaaatgggccaggaaaacaacaaaaactttgaagcgttaaaacaggaaacggagaaatttattgactcttccggcaacgagaagcagaagatcctcctggtggacgacgacagcatccatcttgaaatggtggaatcagtattacagaatgagtatgaaatatctaccgccaaatcgggcaaagaagcgcttggtttattctaccaggggcttgttcccaacttaatattactggatctgataatgccgggtatggacggatggaatacgtataacagaataaaagcgataagcaacctgcacgatactcctatagcgtttttcacggcttcaaacgatccgaaagacatacagcacgcgcatgatatgggcgcggttgattatatcaaaaagccgtttgacgcaaacgatctgataaggaggataaggaaactcgtcaggaaatga

SEQ ID NO: 36910 - protein, 167 aa, Unknown
  Obtained from environmental sample
  DOMAIN (48)...(162): Response regulator receiver domain
  misc_feature (1)..(167): Xaa is any amino acid
MNEILEGVHQINVSVSHVNEMGQENNKNFEALKQETEKFIDSSGNEKQKILLVDDDSIHLEMVESVLQNEYEISTAKSGKEALGLFYQGLVPNLILLDLIMPGMDGWNTYNRIKAISNLHDTPIAFFTASNDPKDIQHAHDMGAVDYIKKPFDANDLIRRIRKLVRK

SEQ ID NO: 36911 - DNA, 609 bp, Unknown
  Obtained from environmental sample
  misc_feature (1)..(609): n is a, c, g, or t
atggataaagatagaaaaacgctccgcagatttgggcaaaattttttggataacgaaatgtccaaaaaaatcgcagacgacctgccttgctcaacgcgggattgcattttggaaataggccccgggcacggtgccttgaccgaatggctgctccccaaatgctcaaaactaaccgcagttgagatagacgatttttgcatcccaaaattgaaagaaaaatttaaaagccacgggaatttcaaccttgtccatgaaaattttttgaaattcgacattgaaaaatggatagacgagcatcccggctcatggatagcgggcaacttgccatataatatggcaaccgcaataataacacgcatattgccgtacatatcaaaaataaaaggctgtatgtttatgacccaattagaggtagcgcagaggataaccgcacactcaggctcaaagagctacgggagcctttcggtattttgcgcctgccatgccaaaagccgcatagaaaggcttataagcccggagcattttagccctaaacccaaagtgaacagcgcaaccataattcttgagccatggaaaagccccttagcctggatacgctcgtcgatctga

SEQ ID NO: 36912 - protein, 202 aa, Unknown
  Obtained from environmental sample
  DOMAIN (1)...(200): Ribosomal RNA adenine dimethylase
  misc_feature (1)..(202): Xaa is any amino acid
MDKDRKTLRRFGQNFLDNEMSKKIADDLPCSTRDCILEIGPGHGALTEWLLPKCSKLTAVEIDDFCIPKLKEKFKSHGNFNLVHENFLKFDIEKWIDEHPGSWIAGNLPYNMATAIITRILPYISKIKGCMFMTQLEVAQRITAHSGSKSYGSLSVFCACHAKSRIERLISPEHFSPKPKVNSATIILEPWKSPLAWIRSSI

SEQ ID NO: 36913 - DNA, 1188 bp, Unknown
  Obtained from environmental sample
  misc_feature (1)..(1188): n is a, c, g, or t
atggcttccgtctttagtgaatacccgcaggcggtcgccaatacagtaagaatagcgcggaggtgcaatgccgatattcccaagattaccgtaaaggagcttcccggctatctgcccgaatatgaaatccccgcgggctttcagtcccccgacaagtacctgcgccatcttgccgccgaagggcttgcgaagcgttatgcgaaggaaatggaagaaggcggcgcgcagtgggaaggaatacggaaaagggctgattacgagcttgacacaataatcaacatgggctttacaggctacttcttgatagtctgggacttcattcactacgcgtacgagcataacattcccgtagggccggggcgcggttcgggagcaggctctattgtcgcttacgcgttgcggataacaaacataaacccgctgaagtacaacctgctctttgagcgtttcctcaaccctgagcgcgtttctatgcctgactttgacattgatttcgccaacgaagggcgtgaagacgttatcagatatgttactgaaaagtacggcaaggaacgtgtcgggcagataataacattcggtactttgggagcgaaggcggttataaaggatgtcgcccgtgttttgggcatatctatccctgagtcggatatgctcactaaattaataccgcgcgaccccaagataacattggagactgccgttaatgacgagcctaaactacaggagcttgaggctgacccgcgttatacggaactctttaaacacgcgcgtaaacttgaaggtcttaacagacattccagcatacacgccgcgggaattgtaatcggcaagacagcccttattgattttgtgcctctctatcaggaaagagatgatgcaaaaagcggcaagggcgggagcatagctacgcagtacagtatgaactaccttgaaccgtgcgggcttgtgaagatggactttctggggttaaaaacccttgacgttatcaaaaactcacaggagctaatccgccagcgcggcggcaagtacgctaacttcaatatagaggacatacctgagaacgacaaaaagacttttaaaatgctgggagcgggaaagagctttgaggtctttcagtttgagtctgacggaatgcagaatatccttaaacagacaaagccgacttccatagaagaccttaccgcgtga

SEQ ID NO: 36914 - protein, 395 aa, Unknown
  Obtained from environmental sample
  DOMAIN (1)...(395): Bacterial DNA polymerase III alpha subunit
  misc_feature (1)..(395): Xaa is any amino acid
MASVFSEYPQAVANTVRIARRCNADIPKITVKELPGYLPEYEIPAGFQSPDKYLRHLAAEGLAKRYAKEMEEGGAQWEGIRKRADYELDTIINMGFTGYFLIVWDFIHYAYEHNIPVGPGRGSGAGSIVAYALRITNINPLKYNLLFERFLNPERVSMPDFDIDFANEGREDVIRYVTEKYGKERVGQIITFGTLGAKAVIKDVARVLGISIPESDMLTKLIPRDPKITLETAVNDEPKLQELEADPRYTELFKHARKLEGLNRHSSIHAAGIVIGKTALIDFVPLYQERDDAKSGKGGSIATQYSMNYLEPCGLVKMDFLGLKTLDVIKNSQELIRQRGGKYANFNIEDIPENDKKTFKMLGAGKSFEVFQFESDGMQNILKQTKPTSIEDLTA

SEQ ID NO: 36915 - DNA, 777 bp, Unknown
  Obtained from environmental sample
  misc_feature (1)..(777): n is a, c, g, or t
gtgcaaatactgggcgggaaagcatcgcggggacgagttcctcatagcggtacccttttcaacaaatgggcgaaggaactggtcaggggggagcggggccggatagagagggcggcgaacctgatcaaaacgtccggcccgccctaccgcggggtaagccgccctgttaatcttttagacctgcagctgaccgcgcatgttttatataaccctgaacgcgccttaagcgaacgcaacgatctgtacagccatgtggcatggcttaaggatatggcggaatccggaaaaaagactttcgcttttcaacgggagatagagaaatatctgtcggtaagaaaaggcagggcggtacacgcgcggatcagggaagacgtgatagaacaggaacttgaaacgtcaggatggcttgtcattctggggaatgggaaattaacggctcagaaggcgcatgacatctaccggaaaaaagacgtggttgagaaagcgtttatgaaatataaaaatctacttggccttcaacggctgcgtgttcacagtgatgagaggatgaggaataaattgtttacggcgtttttagctttgacgcttgtttcctacatacacaaggtgatgaaagaaaaaaatctgtaccgaaagatgacgatggagaaaatgttcataaccttgtcgaaactgagaaaagtgacaataaacggttatgacattcttcgtccaacaaccaaagaacagcgggaaatattttccgccttttctatccctcagcctcttgtaggttaa

SEQ ID NO: 36916 - protein, 258 aa, Unknown
  Obtained from environmental sample
  misc_feature (1)..(258): Xaa is any amino acid
MQILGGKASRGRVPHSGTLFNKWAKELVRGERGRIERAANLIKTSGPPYRGVSRPVNLLDLQLTAHVLYNPERALSERNDLYSHVAWLKDMAESGKKTFAFQREIEKYLSVRKGRAVHARIREDVIEQELETSGWLVILGNGKLTAQKAHDIYRKKDVVEKAFMKYKNLLGLQRLRVHSDERMRNKLFTAFLALTLVSYIHKVMKEKNLYRKMTMEKMFITLSKLRKVTINGYDILRPTTKEQREIFSAFSIPQPLVG

SEQ ID NO: 36917 - DNA, 504 bp, Unknown
  Obtained from environmental sample
  misc_feature (1)..(504): n is a, c, g, or t
atgccgacgaacgatattcaaactttgccaatgaacggcgagtgcagaattcttacatggctgtaccaccgcgaagatcaaatgaagcttttcggcttttgcaatgaaaaccgtcggaatacatttttggaacttattaaagttgagggtatcggtcccaagggcgcgttaaaaataatgagcggaataagccaggacgatcttgagcgcgcccttgaaaacggagaccttgcgcggttagaggcggttccgggacttggtaaaaaaacagcgcaaaaaatgctgctttctttaaaaggcaaacttgttcaaacacaggaaataggcgatgattcttccccctacaatgatcttgttgaagcgcttgtaggcatgggctatgacagaaggcaggcggcgcaagcgctcgccaaggcggagagttccgtaacttccgatttacccgccgatgaaaaagaaaaaataatatttaaagaagcggttgtaaggttaagcggcgagtaa

SEQ ID NO: 36918 - protein, 167 aa, Unknown
  Obtained from environmental sample
  misc_feature (1)..(167): Xaa is any amino acid
MPTNDIQTLPMNGECRILTWLYHREDQMKLFGFCNENRRNTFLELIKVEGIGPKGALKIMSGISQDDLERALENGDLARLEAVPGLGKKTAQKMLLSLKGKLVQTQEIGDDSSPYNDLVEALVGMGYDRRQAAQALAKAESSVTSDLPADEKEKIIFKEAVVRLSGE

SEQ ID NO: 36919 - DNA, 975 bp, Unknown
  Obtained from environmental sample
  misc_feature (1)..(975): n is a, c, g, or t
ttgataggctctcaggcgcgcgcgaacacacnggctgtttgtaaattgcctgacattctttgcggcgaaagatttttaagcgccagcggcgaaaagccgctgttggtttttaacgacacaaaagtacgcaaggcgcgtcttgccgcctctcatgagaaaacaggcgcgcagactgaatttttgcttttagacgatattaatggagacggtattttgtggaaggttatgacaaagcgcgcgcgccgcaagagggaaaatgatgtttatgttttttcctccggtacacaggagcggacaaaagccgcgatacggggctttgaagacgagtatttattgcttgaatttgaaaatcctataaacgacgcgtggcttgaaaaaaacggtcatgttccgttgccgccgtatatcaaaaggaaagacgctcccgcggattcggagcgttatcagactatttacgcgaatcaaaccggttctacggcggctcccacggcgggactgcattttacaaaagatattttagacgcttttaccgcctgcggaatagagagcgtatttattactttgcatgtggggttaggtacgtttctccctgttcgcagtgaaaatattgaaaatcataaaatgcacagcgaagtttttaacattgatgacaataccgccgtaaaaatagaatctgcgaaagaagcggggcggaaaattatcgctgtgggaacaacaagcgtaagaactcttgaaagcgcgtggattgacggaaaacttaatcgcgggggaaacaagacttcaatttttatttacccgggttataaatttaaagcagtggacgcgctttttacaaattttcacactcccgaatcaactttgctgatgttagtatcagcgttcgccggcagagagttaattcttgaaagctacgccgaagccatacgcgaaggataccgttttttcagctacggcgacgcgatgttgatttattaa

SEQ ID NO: 36920 - protein, 324 aa, Unknown
  Obtained from environmental sample
  DOMAIN (15)...(200): Queuosine biosynthesis protein
  misc_feature (1)..(324): Xaa is any amino acid
MIGSQARANTXAVCKLPDILCGERFLSASGEKPLLVFNDTKVRKARLAASHEKTGAQTEFLLLDDINGDGILWKVMTKRARRKRENDVYVFSSGTQERTKAAIRGFEDEYLLLEFENPINDAWLEKNGHVPLPPYIKRKDAPADSERYQTIYANQTGSTAAPTAGLHFTKDILDAFTACGIESVFITLHVGLGTFLPVRSENIENHKMHSEVFNIDDNTAVKIESAKEAGRKIIAVGTTSVRTLESAWIDGKLNRGGNKTSIFIYPGYKFKAVDALFTNFHTPESTLLMLVSAFAGRELILESYAEAIREGYRFFSYGDAMLIY

SEQ ID NO: 36921 - DNA, 402 bp, Unknown
  Obtained from environmental sample
  misc_feature (1)..(402): n is a, c, g, or t
atgcttgagccttttatgggtgaactggggcgactgtgggatatgaacgagggtcgctggcagaaagttaactttgatatttttaaaaaatttgcggaacttttacaaaaagatatatctttacaggaacttgccgaaatactggggcggatgcggcaagcggagcgtgaatacgaggaagaagtttttgccgaaatagtcgttaagccagcatggaaagccgaacacgccgctaagtcggaacttgtcggtatccacgaaagcgatgacatcagtagtatgcttccagccgaaaccgccttgcttgccgataagacaacagaactgctgttctataaaaatttgcagagaaaaagctgcaaacttttgagtaacaggcaaaaagtctttctagagaggtag

SEQ ID NO: 36922 - protein, 133 aa, Unknown
  Obtained from environmental sample
  misc_feature (1)..(133): Xaa is any amino acid
MLEPFMGELGRLWDMNEGRWQKVNFDIFKKFAELLQKDISLQELAEILGRMRQAEREYEEEVFAEIVVKPAWKAEHAAKSELVGIHESDDISSMLPAETALLADKTTELLFYKNLQRKSCKLLSNRQKVFLER

SEQ ID NO: 36923 - DNA, 306 bp, Unknown
  Obtained from environmental sample
  misc_feature (1)..(306): n is a, c, g, or t
ttgcaaaaactggttttagcgcgtgagattgaccagttcagggactattttgttttttccgaaccgacctggagcctggatattatagccggcggttttgtctggtctgaaatcgccgccctgcgcgaaaaaggcgcggcaatcatacttatatccaccaaccttgacgaaattcttgcccttgccgaccggatcatcgtaatgttccggggcggcgcgattgcggaattcgacaattttgttgataacgatattaaagaaaaaatcggtaactgcatgcaggggcttttgccaaagagcaaatag

SEQ ID NO: 36924 - protein, 101 aa, Unknown
  Obtained from environmental sample
  misc_feature (1)..(101): Xaa is any amino acid
MQKLVLAREIDQFRDYFVFSEPTWSLDIIAGGFVWSEIAALREKGAAIILISTNLDEILALADRIIVMFRGGAIAEFDNFVDNDIKEKIGNCMQGLLPKSK

SEQ ID NO: 36925 - DNA, 360 bp, Unknown
  Obtained from environmental sample
  misc_feature (1)..(360): n is a, c, g, or t
atgtggcctattgaatatactccaaaatatgaagactggttttcgcttcaggaagaggatagtaaaatagctataaatgcaaaggtcattgtactctcggaattcggaccgcagttgggcagaccttatgttgatacaattcatggctcaaaatataaaaacttaaaagaattaaggattaaatttaaaaatactgtttttagagtattattttgttttaacaaaaatcgtaattgttggttaattattggaggagataaaaaaggtaaaaacgaagatgatttttacgtaaagttaattaagaaagcggaagatttaatagataaatatccggaaattttggaggaaaaaaatgcgtga

SEQ ID NO: 36926 - protein, 119 aa, Unknown
  Obtained from environmental sample
  misc_feature (1)..(119): Xaa is any amino acid
MWPIEYTPKYEDWFSLQEEDSKIAINAKVIVLSEFGPQLGRPYVDTIHGSKYKNLKELRIKFKNTVFRVLFCFNKNRNCWLIIGGDKKGKNEDDFYVKLIKKAEDLIDKYPEILEEKNA

SEQ ID NO: 36927 - DNA, 1224 bp, Unknown
  Obtained from environmental sample
  misc_feature (1)..(1224): n is a, c, g, or t
atgncgaaaaaaaattcaataatgtggtatactgttctaggggaagttttgaccatattcgacattttntgctatgggcatggcattttttttgtggcactacagacttcgttgatgtttggcttctttctggaatggctccgtgacaggaaagcatgcaaaacagacaggcaggcggcgcccccaaaagtgtcgctaatcgtccccatccacaacgaaggccggcgcatggaagcgctactgaaaagccttctggaacaagattaccgacagggtatctgtcaccttacgggtgacttggtggaaataatctttgttgatgaccgttcggttgacgaaagtcccgccatgctcgccaaattcgtacaggacgctgcgaaacggggcatggaaaattgcaaaataatcactctgaaggagaaccctggcccaaactacaaacagtacgccctgtcggcaggcataacccaggcgcggggggattacttcctgtttaccgacggcgactgcgaggttccgcccggctggatccgcgccatgtcccgccgcatgggcgacccggaagtcggcgcggttatcgggccggtgtttaaaaaaaaacagggaaagggcttcttctccctgtaccaatgctatgaccacgcggtgcgctacaactaccttgccggggcaataggactgggcgcggcaggcggcggctttgggaacaacatcatcctaaggcgttcctgcctggacgcggtaggcggctacgaaaacgtccccccctcgcccaccgaagacgcggcccttatttccagaatacgatcctgctcaggctttaaaatccgcgcggccaccggcatggacgtgcacgtaattacacagggcgagaacacctggaaggccatgattaatcagaccttgcgctggaacaacggcggcctttttagtcctgatctttctacgcggctaaattacaactttctgatgattactatcgccatgggggtaattgctttcccattactgccgtttttccccttcctttggccgctcccggcaggggtgctgacatccatgctttttaacaattacgcgaatttgcgccttttcggctgttcgctcccgaaaggaaaatttgcctatgtgcttaccctgctttttacgccggtgtatttttcatttttaacgatacttggctacctgggctttaagccaaaatggaaagggcaggatacttaa

SEQ ID NO: 36928 - protein, 407 aa, Unknown
  Obtained from environmental sample
  DOMAIN (65)...(249): Glycosyl transferase family 2
  misc_feature (1)..(407): Xaa is any amino acid
MXKKNSIMWYTVLGEVLTIFDIXCYGHGIFFVALQTSLMFGFFLEWLRDRKACKTDRQAAPPKVSLIVPIHNEGRRMEALLKSLLEQDYRQGICHLTGDLVEIIFVDDRSVDESPAMLAKFVQDAAKRGMENCKIITLKENPGPNYKQYALSAGITQARGDYFLFTDGDCEVPPGWIRAMSRRMGDPEVGAVIGPVFKKKQGKGFFSLYQCYDHAVRYNYLAGAIGLGAAGGGFGNNIILRRSCLDAVGGYENVPPSPTEDAALISRIRSCSGFKIRAATGMDVHVITQGENTWKAMINQTLRWNNGGLFSPDLSTRLNYNFLMITIAMGVIAFPLLPFFPFLWPLPAGVLTSMLFNNYANLRLFGCSLPKGKFAYVLTLLFTPVYFSFLTILGYLGFKPKWKGQDT

SEQ ID NO: 36929 - DNA, 504 bp, Unknown
  Obtained from environmental sample
  misc_feature (1)..(504): n is a, c, g, or t
atgatacaaaaaaaagctcttgcgttactaaaaagcggggcgaaacatatattactgtttggcggctctcgttcagggaaaactaccgtactggttatggcgattatttaccgcgctttgatgtatgcgggtagccgtcatttgatttgccgttatcgggctaaagacgctcgttcatcggtactgcgggagactttgataccgtggcttgataataccatcggaaaaagcggttacacctatttagcccatgaaagtatgataacgctttataacggctctgaaatttggattggtgggcttggggatagagagcaagcggataaaattctaggacacgagtattgcacaatttattttaatgagattagccaattaagttatgccgctgttactaccgcctattcaagattggcaatgagagttaagggctgtaggaacttgttttattatgactgcaatccgggtagccctttgcattgggcttacaagatttttgtttga

SEQ ID NO: 36930 - protein, 167 aa, Unknown
  Obtained from environmental sample
  misc_feature (1)..(167): Xaa is any amino acid
MIQKKALALLKSGAKHILLFGGSRSGKTTVLVMAIIYRALMYAGSRHLICRYRAKDARSSVLRETLIPWLDNTIGKSGYTYLAHESMITLYNGSEIWIGGLGDREQADKILGHEYCTIYFNEISQLSYAAVTTAYSRLAMRVKGCRNLFYYDCNPGSPLHWAYKIFV

SEQ ID NO: 36931 - DNA, 720 bp, Unknown
  Obtained from environmental sample
  misc_feature (1)..(720): n is a, c, g, or t
ttgggcttacaagatttttgtttgaaacggacatttcttactggcgacccattggggaagccagagctatatcaagcaatgctccttaatccagaggataacaaagacaacctgccggaagattatatatctgacattctcgatacgcttcctgaaaaacaaaaggcaaggtttagggatgggctttgggttaaagccgagggcgttatctatgacaagtttgacgagacgatgattgtcaacgcttctgacttgcctgaacgctttgaccgttacgccgccgggcaagatttcggtttgaatattactttcgtgaaaatcggctggcttggagatgtgattttcgtcctgggcgattacggcgcatacaacatgactacccaaagttttaacgaagaagtaaccgcaaggggcttgatggattgccctgacgggatggggcttcctgtttactgcgacccagccggaggggagaggatacaggaaataacaggcggtacaaaagctaacaattcggttgaaagcgggattgattatataaacgcaaaaatagaacgccatcaattttatgtttcggaaaagtgtaccggggtgctttctgaaatatgggattactgccgagacgaagccggggagattgtcaaagtaaacgaccatttccttgatgccctgcggtatgcggtgttctcggatgttcagcaaggagtaatccttttatga

SEQ ID NO: 36932 - protein, 239 aa, Unknown
  Obtained from environmental sample
  misc_feature (1)..(239): Xaa is any amino acid
MGLQDFCLKRTFLTGDPLGKPELYQAMLLNPEDNKDNLPEDYISDILDTLPEKQKARFRDGLWVKAEGVIYDKFDETMIVNASDLPERFDRYAAGQDFGLNITFVKIGWLGDVIFVLGDYGAYNMTTQSFNEEVTARGLMDCPDGMGLPVYCDPAGGERIQEITGGTKANNSVESGIDYINAKIERHQFYVSEKCTGVLSEIWDYCRDEAGEIVKVNDHFLDALRYAVFSDVQQGVILL

SEQ ID NO: 36933 - DNA, 900 bp, Unknown
  Obtained from environmental sample
  misc_feature (1)..(900): n is a, c, g, or t
ttggcggacggggcgccgtgtccggtctgcggttcaaccgaacatcccgccccggcgaaattgacggacggcggcgtgacggaggccgggcttaaaaacgcgaagacggcggttgacagggcgcaaaacggacgcggtcaaaagagcgacgagtgcgcgaggttgaagagtgaaatcgatacacgcgaaaatcgttttgttgacgacttattgatgatcattccgaatattgatagggataccgcaggaagattattggcggacgcttttacccgtgcgcagagccttgtgaatgagttggccgtcaacaaacaaaacgcggagaagaacctatccgaactcgccgcccgaagagaaaaggtaactaagcgaagcgtcgatgccgaaacatcatacaaatccgcgctgacgcttgcggatgaacgcggcgcgcgcgagggtgaacaaagagccgctcacgataaggcgcgtacggactacatcaattcgctgacggtcaatggatttaaggatgaagccgagtatacagccgtgcttgtcacggaggaaacgctctccggcatggccaaacggcttgccgattacgagaaaataggcgagcaactgaaacgcgacatcaatcgcttagaaggcgagacggcggccaaagagagaccggatatggaaaagttggccgccgaaagcaacgcgataatgagcgcgataggcgagttgaacaagagccgggacgaggtcaaaatcagaaatgagcagacaaagcgcgtacttggcgaactacgccgtagcgccgagacgtttgtcgaactggacaaagaatatgccgcagcaaaacaactctccgacgcggcgaacggacgccttgattttgagacctacgcccccagcggcgtatttcgatag

SEQ ID NO: 36934 - protein, 299 aa, Unknown
  Obtained from environmental sample
  misc_feature (1)..(299): Xaa is any amino acid
MADGAPCPVCGSTEHPAPAKLTDGGVTEAGLKNAKTAVDRAQNGRGQKSDECARLKSEIDTRENRFVDDLLMIIPNIDRDTAGRLLADAFTRAQSLVNELAVNKQNAEKNLSELAARREKVTKRSVDAETSYKSALTLADERGAREGEQRAAHDKARTDYINSLTVNGFKDEAEYTAVLVTEETLSGMAKRLADYEKIGEQLKRDINRLEGETAAKERPDMEKLAAESNAIMSAIGELNKSRDEVKIRNEQTKRVLGELRRSAETFVELDKEYAAAKQLSDAANGRLDFETYAPSGVFR

SEQ ID NO: 36935 - DNA, 552 bp, Unknown
  Obtained from environmental sample
  misc_feature (1)..(552): n is a, c, g, or t
ttggacggcgaaaatatttacgcccccatgaatgtcagcgaactcaggacgcgggtgggtatggtattccagaaaccaaatccctttaacatgagcatttttgacaacgtggcttacggcaggcgcatgcagggcatgaaagataaaaagaaactggcggaactggtggagcagtctttaataaaggcggcgttatgggacgaggtcaaggaccggctgaaaaaatcagcgcagagtctttccggcggacaacagcagagactctgcatcgcgcgcagtatttccatgtccccggaaataattctgatggacgaaccgaccagcgcccttgaccccattgccaccggaagaatcgaagaacttatcggcgaactcaaacgggacttcagcatcatcattgtcacccattccatgaaccaggccgcccggatcagcgaccggacagctttttttctgttgggagaacttatagaatgcgctgaaacaacaaaggtgtttacccatcctaaggataaacgcaccgaagattatatttcaggccgtttcggttaa

SEQ ID NO: 36936 - protein, 183 aa, Unknown
  Obtained from environmental sample
  DOMAIN (3)...(154): ABC transporter
  misc_feature (1)..(183): Xaa is any amino acid
MDGENIYAPMNVSELRTRVGMVFQKPNPFNMSIFDNVAYGRRMQGMKDKKKLAELVEQSLIKAALWDEVKDRLKKSAQSLSGGQQQRLCIARSISMSPEIILMDEPTSALDPIATGRIEELIGELKRDFSIIIVTHSMNQAARISDRTAFFLLGELIECAETTKVFTHPKDKRTEDYISGRFG

SEQ ID NO: 36937 - DNA, 408 bp, Unknown
  Obtained from environmental sample
  misc_feature (1)..(408): n is a, c, g, or t
gtgcgtttatccttaggatgggtaaacacctttgttgtttcagcgcattctataagttctcccaacagaaaaaaagctgtccggtcgctgatccgggcggcctggttcatggaatgggtgacaatgatgatgctgaagtcccgtttgagttcgccgataagttcttcgattcttccggtggcaatggggtcaagggcgctggtcggttcgtccatcagaattatttccggggacatggaaatactgcgcgcgatgcagagtctctgctgttgtccgccggaaagactctgcgctgattttttcagccggtccttgacctcgtcccataacgccgcctttattaaagactgctccaccagttccgccagtttctttttatctttcatgccctgcatgcgcctgccgtaa

SEQ ID NO: 36938 - protein, 135 aa, Unknown
  Obtained from environmental sample
  misc_feature (1)..(135): Xaa is any amino acid
MRLSLGWVNTFVVSAHSISSPNRKKAVRSLIRAAWFMEWVTMMMLKSRLSSPISSSILPVAMGSRALVGSSIRIISGDMEILRAMQSLCCCPPERLCADFFSRSLTSSHNAAFIKDCSTSSASFFLSFMPCMRLP

SEQ ID NO: 36939 - DNA, 495 bp, Unknown
  Obtained from environmental sample
  misc_feature (1)..(495): n is a, c, g, or t
ttgtttttctgccgctttctgcgtttgggtcagtccataatcgcgggcgggcttaccctgagcatcatgattctcccggtgatcatcagaacgacagaagaagcgcttaagacagtgccgggttcttttcgggaaggctccctttctctgggggctaccaagtttcaaaccatactccacgttgttctgccgcccgcgatgccgggaattcttaccgcggcgattcttggcgcgggacgcgtggtgggcgaatcagcgccggtgctgctaaccgtcggaattgcgcgtaaccttccaaaaacaatctttgagtcaggccgcactttgacaattcatctatattatcttacaaaagaagcaatcgaagccgacgattttgcccacgcttttaccgccgccgcggtactgatcgtggtggtgcttattatcaatacgttggtaaagttattgtacagaggcgctgccggaagcggcattggagaaaacgcggattaa

SEQ ID NO: 36940 - protein, 164 aa, Unknown
  Obtained from environmental sample
  misc_feature (1)..(164): Xaa is any amino acid
MFFCRFLRLGQSIIAGGLTLSIMILPVIIRTTEEALKTVPGSFREGSLSLGATKFQTILHVVLPPAMPGILTAAILGAGRVVGESAPVLLTVGIARNLPKTIFESGRTLTIHLYYLTKEAIEADDFAHAFTAAAVLIVVVLIINTLVKLLYRGAAGSGIGENAD

SEQ ID NO: 36941 - DNA, 516 bp, Unknown
  Obtained from environmental sample
  misc_feature (1)..(516): n is a, c, g, or t
atgagtcttgaacgggcattgcgggttgtcccggaaaatgacggcagggtaatcgttgtttccggaaaggcccacatgccctttgtcatcactgcctgttcctcgttgagtaaggccgataaaaaacgccttgtgctgattccggaaccggaagctaaaaacacagcgccggcaattgcctgcgccattgcatacgccggaataaccggcggccgggaccgtaccatgctggtgcttacaagcgatcatattattaagccgcttgatgtttttctgaaaaactcaggcacagccgcgcagtacgcggagcaggacaagcttgttgtttttggcatttccccgtcagggccggaaaccggttacggttatattgaagctgagccaggacttgccggggatgtttatgctgtcgccgcatttcatgaaaaacccgatcggaaaacagcggaaaaatttttagcttccaaaaacatttctggaattccgggatgtttgcctttcgctgtgattttttag

SEQ ID NO: 36942 - protein, 171 aa, Unknown
  Obtained from environmental sample
  DOMAIN (1)...(170): Nucleotidyl transferase
  misc_feature (1)..(171): Xaa is any amino acid
MSLERALRVVPENDGRVIVVSGKAHMPFVITACSSLSKADKKRLVLIPEPEAKNTAPAIACAIAYAGITGGRDRTMLVLTSDHIIKPLDVFLKNSGTAAQYAEQDKLVVFGISPSGPETGYGYIEAEPGLAGDVYAVAAFHEKPDRKTAEKFLASKNISGIPGCLPFAVIF

SEQ ID NO: 36943 - DNA, 525 bp, Unknown
  Obtained from environmental sample
  misc_feature (1)..(525): n is a, c, g, or t
atgtttgcctttcgctgtgattttttagctgatgaataccgccgtctggcttcagaagtaatctgcccctttgaaactcttaaaactccggacaaaaagtcatatactaaaaaaaatgatttcttagttttaaataaatggacagaattggacaatgcttataatcaggcaaaacctatttcttttgattacgccattgccgaaaagtgtactcaaactgttatgcttcgtgcttcttttgactggattgatataggcagttgggacgattatgcccgcctcctttcagataattcctctgcaaataataccggtactgatgttttttctgccggggcaggcagttgttttgtcgattccgacattcccgttgcccttgccggagttgaaaaccttattgtcgtaatccgctcaggtaaagatggttctcctccttcggcgctgattacccaaaagggtaaaacccagcttgtgcgtgatattgtcgaaaaaataaaacaatcggacagaagagatattttatga

SEQ ID NO: 36944 - protein, 174 aa, Unknown
  Obtained from environmental sample
  misc_feature (1)..(174): Xaa is any amino acid
MFAFRCDFLADEYRRLASEVICPFETLKTPDKKSYTKKNDFLVLNKWTELDNAYNQAKPISFDYAIAEKCTQTVMLRASFDWIDIGSWDDYARLLSDNSSANNTGTDVFSAGAGSCFVDSDIPVALAGVENLIVVIRSGKDGSPPSALITQKGKTQLVRDIVEKIKQSDRRDIL

SEQ ID NO: 36945 - DNA, 1008 bp, Unknown
  Obtained from environmental sample
  misc_feature (1)..(1008): n is a, c, g, or t
ttgggaaaaatggaaggtattctaccgaaaaaataccagtctccaagggaaacgtaccgtgtaaatgacaggataaaagcccttatcgcagaggtaaaaaaagattcttcgggacttcatgtcgtactttccaggacacacacagaatttgtacgtgccatttttgagcttgaaattcccgaaatttatgacaagacggttgaaattcataaaattgtccgtgagccaggattccgtacaaaactagcagtttattcaaaccgtgaagatgttgatcctgtaggcgcatgcgtaggtcttaagggtgtgcgtattcaggcagtaatcaaggaactggaaggcgaaaaaatcgacattcttaaatatgatcccgatccgcgccgctttataaagaatgcgctttcaccggcggaagtgcgtgatgtgataattcttgacgaaggcaaacatcaagctcttgcagttgttagcgattcaatgttatcgcttgcaatcggcaaacaggggcttaatgtgcgtcttgcgaacaggcttgttgactggaacatcgatgtaaaaacggagactcagttttccgagatggatattgcagcggaatcgcgccgtgcggtttccgaattattcggcgatacggaatcctacgaaaaagaaattacaagaatcagcgaattgcctaatgttgacagccgcgccgctcagattctccttgacaatggaattgatttaatcgaagacttcatcgccctgaatcaggaagaacaggaagcaaaaggattgtctttgtcagaacttaacacgcttagaaaggttattgatgattatgttgagattgtggaagaagaaaatgaatatgatgaagaagaagcaaaacaggaagaaatagacgaagaaagcgctgaggcggaagagtatgaatgtccggagtgcggagcaaagataactgttgacatgacaacctgcccaagctgcggaatcggccttagttttgaataccaagaggaggagtaa

SEQ ID NO: 36946 - protein, 335 aa, Unknown
  Obtained from environmental sample
  misc_feature (1)..(335): Xaa is any amino acid
MGKMEGILPKKYQSPRETYRVNDRIKALIAEVKKDSSGLHVVLSRTHTEFVRAIFELEIPEIYDKTVEIHKIVREPGFRTKLAVYSNREDVDPVGACVGLKGVRIQAVIKELEGEKIDILKYDPDPRRFIKNALSPAEVRDVIILDEGKHQALAVVSDSMLSLAIGKQGLNVRLANRLVDWNIDVKTETQFSEMDIAAESRRAVSELFGDTESYEKEITRISELPNVDSRAAQILLDNGIDLIEDFIALNQEEQEAKGLSLSELNTLRKVIDDYVEIVEEENEYDEEEAKQEEIDEESAEAEEYECPECGAKITVDMTTCPSCGIGLSFEYQEEE

SEQ ID NO: 36947 - DNA, 885 bp, Unknown
  Obtained from environmental sample
  misc_feature (1)..(885): n is a, c, g, or t
atgcctcagtgggcgggctcgtgctggtactacatacgttacctcgatccgaaaaacagcaaagaatttgccgccaaagagaaaatcaactattggctgcctgtggatttatatgtcggaggcgcggaacacgcggtgcttcatcttctttacagccgcttctggcacaaggttctctacgatctcggtcttgtgaatactgtcgaaccatttcagcggctgatcaatcagggaatgatcctcggcgaggacaaccagaaaatgagtaagagccgcggcaatgtaattaatcccgacgatgttatcaaagaatacggaacagattcgcttcgcctctacgagatgtttatggggccgttggaagtcagcaagccgtggaatatgtcgggcgtttcgggggtgtcgcgttttcttgagaggctttgggcgattggcgaaaaacctctgtgcgacgcggaaccgggaagcgacgcggccggcggtgccgctatgcaaaaacttttgcaccgtaccataaaaaaaattacgcacgataccgaaaacctctgttttaatacggctatcagccagatgatgatctactcaagcgaactcgcgaaactcgcggaaattccccgttcaatgtggcagccgtttgttataatggcaagcgtttacgctccgcatcttggcgaggagctttgggaaaaactcggcaataaaaataccgtctccgcctgccaatggccggtttttgacgacgctttaacgcgcgatgacgaagtgaatatcgtagtgcaggtaaacggaaaaattcgcgataaatttacggctcctgtcggaacatccaaagatgaaattggaaaaaaccgcattttctttgcccgatgtaaagaaatggcttga

SEQ ID NO: 36948 - protein, 294 aa, Unknown
  Obtained from environmental sample
  DOMAIN (161)...(285): Anticodon-binding domain
  misc_feature (1)..(294): Xaa is any amino acid
MPQWAGSCWYYIRYLDPKNSKEFAAKEKINYWLPVDLYVGGAEHAVLHLLYSRFWHKVLYDLGLVNTVEPFQRLINQGMILGEDNQKMSKSRGNVINPDDVIKEYGTDSLRLYEMFMGPLEVSKPWNMSGVSGVSRFLERLWAIGEKPLCDAEPGSDAAGGAAMQKLLHRTIKKITHDTENLCFNTAISQMMIYSSELAKLAEIPRSMWQPFVIMASVYAPHLGEELWEKLGNKNTVSACQWPVFDDALTRDDEVNIVVQVNGKIRDKFTAPVGTSKDEIGKNRIFFARCKEMA

SEQ ID NO: 36949 - DNA, 333 bp, Unknown
  Obtained from environmental sample
  misc_feature (1)..(333): n is a, c, g, or t
ttgaacggtttttatggttatcttgacagaagtttatatctgctgaataataacaggattatgagaatttatttagatcattgcgcttataatagaccgtttgatgaccaaaataacataaaaaatcagttggaaacatcggcaaaattacatatacaagatcagataagacaaggaaaatatgacttagtttggtcttatatgtcggattttgaaaatgataataatccaaatattgaaaataagaaatctatacaagtatgggaaaatatatcaaaatataaatgtaaatcatctgaaactattttaatacgagggagtaaaattgcgtaa

SEQ ID NO: 36950 - protein, 110 aa, Unknown
  Obtained from environmental sample
  misc_feature (1)..(110): Xaa is any amino acid
MNGFYGYLDRSLYLLNNNRIMRIYLDHCAYNRPFDDQNNIKNQLETSAKLHIQDQIRQGKYDLVWSYMSDFENDNNPNIENKKSIQVWENISKYKCKSSETILIRGSKIA

SEQ ID NO: 36951 - DNA, 453 bp, Unknown
  Obtained from environmental sample
  misc_feature (1)..(453): n is a, c, g, or t
ttgcgcggggtcagcattcggcacgagataaatatgcttgaaactatgtacaaagccaatggcattggtatggctgccccgcaagttggcaaaagcattcgtcttgttgtgatagacctctcaaaagaagaagaggaacgcaagcccattgtgcttttcaaccctgaagttgtgcccgaagaaagcgaaaatccagttgaatcagatgaagaaggctgcctatccgtgccagatatttgggcaaatgtttcaagacccagccgtgtgcgcataacctacacaaacgaaaatggcgaaaaaattgaactgcaaaatataaccggaaaatttgcccgttgcgccctgcacgaacaagaccacttgaacggaattttattcacagacaaaatatccatcgcagacaaagcgatgaacgcatctaaattgaaaaaaatggcaaaggaaaataagtag

SEQ ID NO: 36952 - protein, 150 aa, Unknown
  Obtained from environmental sample
  DOMAIN (3)...(136): Polypeptide deformylase
  misc_feature (1)..(150): Xaa is any amino acid
MRGVSIRHEINMLETMYKANGIGMAAPQVGKSIRLVVIDLSKEEEERKPIVLFNPEVVPEESENPVESDEEGCLSVPDIWANVSRPSRVRITYTNENGEKIELQNITGKFARCALHEQDHLNGILFTDKISIADKAMNASKLKKMAKENK

SEQ ID NO: 36953 - DNA, 312 bp, Unknown
  Obtained from environmental sample
  misc_feature (1)..(312): n is a, c, g, or t
gtggtggtggactcctctgcttgccccgaagacaaaattatggatttggttttggaagctggtgcaaacgacctcacaacagaagacggagtttacgaaattgaaacaacaccggaaacttttgaagctgttaccaaagccttggaaaatgcaaaaatagaaatgctttcggcagacataacctacgctccagaaaacaccgttaagctggaaggcgaagatgtccagaaactgctcaaaatgattgataagctagaagacaacgaagacgttcaagatgtctatcacaatgcggagttgccggaagaatag

SEQ ID NO: 36954 - protein, 103 aa, Unknown
  Obtained from environmental sample
  DOMAIN (2)...(99): Domain of unknown function DUF28
  misc_feature (1)..(103): Xaa is any amino acid
MVVDSSACPEDKIMDLVLEAGANDLTTEDGVYEIETTPETFEAVTKALENAKIEMLSADITYAPENTVKLEGEDVQKLLKMIDKLEDNEDVQDVYHNAELPEE

SEQ ID NO: 36955 - DNA, 681 bp, Unknown
  Obtained from environmental sample
  misc_feature (1)..(681): n is a, c, g, or t
ttgcattgggcttgccatagtggttctgattttccgaaatcaagaaacaatagactcagacgaatactcgcaaatgcaaggttaaaattcaaggagcaaataaatatgtctggacattcaaagtgggctaccattaaacgcaaaaaggcaaaaaccgatgttggcagggcaacagcttggaataaattgataaaagaaatttccgttgccgcaaaaatgggcggcggaaatccagatgccaaccctcgccttagaacagcaatactaaaagccaaggggcaaagcctgcccgcaaaaaacatagagagcgcaatagccaaaggcattggcggaaattccggtgcaaatatggaagagcctatgtacgagggctatggccccgcgggttgcgcaattcttgtgcaatgcttaaccgataaccgcactcgctccgttgcagacataagaaacatattcagcaagaacggcgggaacatgggcaccgaaggctctgttagctggaatttcaaaagaaagggattgtggtggtggactcctctgcttgccccgaagacaaaattatggatttggttttggaagctggtgcaaacgacctcacaacagaagacggagtttacgaaattgaaacaacaccggaaacttttgaagctgttaccaaagccttggaaaatgcaaaaatag

SEQ ID NO: 36956 - protein, 226 aa, Unknown
  Obtained from environmental sample
  DOMAIN (40)...(218): Domain of unknown function DUF28
  misc_feature (1)..(226): Xaa is any amino acid
MHWACHSGSDFPKSRNNRLRRILANARLKFKEQINMSGHSKWATIKRKKAKTDVGRATAWNKLIKEISVAAKMGGGNPDANPRLRTAILKAKGQSLPAKNIESAIAKGIGGNSGANMEEPMYEGYGPAGCAILVQCLTDNRTRSVADIRNIFSKNGGNMGTEGSVSWNFKRKGLWWWTPLLAPKTKLWIWFWKLVQTTSQQKTEFTKLKQHRKLLKLLPKPWKMQK

SEQ ID NO: 36957 - DNA, 312 bp, Unknown
  Obtained from environmental sample
  misc_feature (1)..(312): n is a, c, g, or t
atgttttctcctttatacattcaaattctagcggcagtgctgttttgcattggcattgccacagttatttccaaaaggaacatattttttgcctttatgggggttgagcttgcggtgaatgctgcaaacctcagctttattggattttctaaaaccttgcctgcgcttcaaagcgtggctgggcaaatagtgcctatatttgttatagctgttgccgctgctgaggcttgcattgggcttgccatagtggttctgattttccgaaatcaagaaacaatagactcagacgaatactcgcaaatgcaaggttaa

SEQ ID NO: 36958 - protein, 103 aa, Unknown
  Obtained from environmental sample
  DOMAIN (6)...(103): NADH-ubiquinone/plastoquinone oxidoreductase chain 4L
  misc_feature (1)..(103): Xaa is any amino acid
MFSPLYIQILAAVLFCIGIATVISKRNIFFAFMGVELAVNAANLSFIGFSKTLPALQSVAGQIVPIFVIAVAAAEACIGLAIVVLIFRNQETIDSDEYSQMQG

SEQ ID NO: 36959 - DNA, 819 bp, Unknown
  Obtained from environmental sample
  misc_feature (1)..(819): n is a, c, g, or t
atgacggaggtgtacgtccccaacagtgaggccaacagcgccgacaaatggcctgaggccttagacgtggcgcagcacgtgcacaacgcaatggtcgaagcggagttccaaatgtacgtatggtggtacatccgtaggtcatacagcccgcttaaagaagacggcaccataagcaagcgcggttatatgatggcccacttttcaaagttcgtccgccccggatacgtgagaatcgacgccacaaaaacaccggaaacaaacgtcttcgtatccgcctataagagcggaaacaaggtcgttatcgttgcggtcaataagaagacctccgcatcgagcatgaattttaccgtaagcggaggcgccgcgacgggcgcggtggagtcttggcggacgtccggtacggaaaacatgttaaaggcgacaggcacaattaccgtgagcggcggaaagttttccgccaccctgccggcgcaaagcgtcacgacgttcgtcgggacgttggacggcggcggcaacaccaacgtcaacgtaacgtgcaacgtaaataatctcgaggcgagttacatttccggaagcagtgttccgaggccaaacgtaggctgcggggagggaattgcggcgggcgcggcgtcgttcagcatcaacggtacggaagtgacgggatggagttctcccggcggcactcataaactgtataacgacggcacgagaacggtcttattgaacagccttgagtgcggcggcgtcaacgtaaccccgcccacgccggtatcctgcggcgccattgaattataccggacacgccgacctccgtcgtaa

SEQ ID NO: 36960 - protein, 272 aa, Unknown
  Obtained from environmental sample
  misc_feature (1)..(272): Xaa is any amino acid
MTEVYVPNSEANSADKWPEALDVAQHVHNAMVEAEFQMYVWWYIRRSYSPLKEDGTISKRGYMMAHFSKFVRPGYVRIDATKTPETNVFVSAYKSGNKVVIVAVNKKTSASSMNFTVSGGAATGAVESWRTSGTENMLKATGTITVSGGKFSATLPAQSVTTFVGTLDGGGNTNVNVTCNVNNLEASYISGSSVPRPNVGCGEGIAAGAASFSINGTEVTGWSSPGGTHKLYNDGTRTVLLNSLECGGVNVTPPTPVSCGAIELYRTRRPPS

SEQ ID NO: 36961 - DNA, 426 bp, Unknown
  Obtained from environmental sample
  misc_feature (1)..(426): n is a, c, g, or t
atggacagcgggctgccgctgagccggacgatggtcatatacgacgacaaggatctgccactgggcactggccgcctgagcctagatggcggctccggcggacacaggggcatccaggggataatagatggaaccggcagcgaagccttcgcccgcctgcggctcggcataggcccatacgctaggcccttgcaagattgggtgctgggcgaatggcaggccgaagagatggacgccatagagggcatggacggccctttcgccgatgccctttccctcctcgccaaagggactcccctgccctccctgcagagccaggtcaacgctaaggggttctggcgcatttctagaggggtgcagggaacagggatcagtcgaattgccaaaggagtcttgcagccccaaattggctcaattttgcgatag

SEQ ID NO: 36962 - protein, 141 aa, Unknown
  Obtained from environmental sample
  DOMAIN (1)...(108): Peptidyl-tRNA hydrolase
  misc_feature (1)..(141): Xaa is any amino acid
MDSGLPLSRTMVIYDDKDLPLGTGRLSLDGGSGGHRGIQGIIDGTGSEAFARLRLGIGPYARPLQDWVLGEWQAEEMDAIEGMDGPFADALSLLAKGTPLPSLQSQVNAKGFWRISRGVQGTGISRIAKGVLQPQIGSILR

SEQ ID NO: 36963 - DNA, 906 bp, Unknown
  Obtained from environmental sample
  misc_feature (1)..(906): n is a, c, g, or t
atggtcagattggccgagttcgctgacagtgataattttctgcatccaaaggcgtggctggataaacgttctttcgtgactctgacgggaaaagccagccgggaacgagagatgatcgattccaaagggaccaccattctgggtaacgccttttgtctgctctgttgccttatcatcctgttgttttacgtcttcgttgtgctgggtgccttcttcaaaacctggggggcggactacacgctcgtgctgacccacttcaagtacatcttcgatcgtggcagtaaacccgtaacggataccctgatgattgccctgctcgccgccccaatcgggggggtcttggcaatggtggtagcgtacctggttgtccggaaacgctttttgggccgtaccctcgtggaatactcctcaatgctgggaatggccgtcccggggacggtattcggcctgggatacatcctcagctttaacactaggccccttgtcctcacaaacaccctggctattctcgtgatcgtgctggtgatgacaaggctccctgtgggcgtgcgctccggggtcgctgccctgaaacagattgaccccagcattgaggaagcggcctcagatttgggggcggacacgtccaaggtttttcgttccataaccatccccctcataaagcccgcgtttttcagtggactcgtgttcagctttatcaagagtatgaccgccatcagcgccgtaattttccttgtgtccgccaattacaacctcctcaccgtgcgggtcatgcagtacgttgacaaggggctgatgggaaacgcttccgccatggccaccattctgatcgtcattgtattccgcgggttgtgggaagtcatgttccttccttgctggggcagggatgggtatcattcangatga

SEQ ID NO: 36964 - protein, 301 aa, Unknown
  Obtained from environmental sample
  DOMAIN (100)...(295): Binding-protein-dependent transport system inner membrane component
  misc_feature (1)..(301): Xaa is any amino acid
MVRLAEFADSDNFLHPKAWLDKRSFVTLTGKASREREMIDSKGTTILGNAFCLLCCLIILLFYVFVVLGAFFKTWGADYTLVLTHFKYIFDRGSKPVTDTLMIALLAAPIGGVLAMVVAYLVVRKRFLGRTLVEYSSMLGMAVPGTVFGLGYILSFNTRPLVLTNTLAILVIVLVMTRLPVGVRSGVAALKQIDPSIEEAASDLGADTSKVFRSITIPLIKPAFFSGLVFSFIKSMTAISAVIFLVSANYNLLTVRVMQYVDKGLMGNASAMATILIVIVFRGLWEVMFLPCWGRDGYHSX

SEQ ID NO: 36965 - DNA, 804 bp, Unknown
  Obtained from environmental sample
  misc_feature (1)..(804): n is a, c, g, or t
atggtgaccttttctcttgctggcaaggaatatggggtggacataatgaatgtcaaagaaatcgccaaggcggacaagtttaccttcgtccccaatgcggcttcctttgtccagggtgtttataacctcaggggtgatatcatcccgattatagaccttcgtctgttttttcatttaccggccgaaaagaagaaggacggtattgagaacatgctgattctccgcatacaggatcgtgtttacggcacgattgtcgacaagatcgacaaggtcgtagggataaattccgaaaatatccagccgcctcatcctatttttggggatattaacattaagtttataagcggggtagtggaaaaaaacgagaccctctacattattctggatgtaatacggatattctctctgagcgaggaagacaaacagaagcccaggggcgtcgttgaaaccaccggaggcagtgaagttcccgccagagtaaccagcgaaattacccttgatcccagaacggcgactgccgattcggctttgagctttataaaagaaagccttccagctctcaagcaattttatcccagcgaattaaacgacaaatggttgcgccgccgctattcggaatggagcagtacccatacaggagacgcgctgcagcttagaaacattgaggaagcggaagaatttctttctgatttctactccccggatatagacaggttctggtcggaggactacgcttcccaagtaaaatcagttttgcctcctatgagttccaataatatccaggttgggctcgtgccgatctga

SEQ ID NO: 36966 - protein, 267 aa, Unknown
  Obtained from environmental sample
  DOMAIN (1)...(138): CheW-like domain
  misc_feature (1)..(267): Xaa is any amino acid
MVTFSLAGKEYGVDIMNVKEIAKADKFTFVPNAASFVQGVYNLRGDIIPIIDLRLFFHLPAEKKKDGIENMLILRIQDRVYGTIVDKIDKVVGINSENIQPPHPIFGDINIKFISGVVEKNETLYIILDVIRIFSLSEEDKQKPRGVVETTGGSEVPARVTSEITLDPRTATADSALSFIKESLPALKQFYPSELNDKWLRRRYSEWSSTHTGDALQLRNIEEAEEFLSDFYSPDIDRFWSEDYASQVKSVLPPMSSNNIQVGLVPI

SEQ ID NO: 36967 - DNA, 303 bp, Unknown
  Obtained from environmental sample
  misc_feature (1)..(303): n is a, c, g, or t
ttgctcaggttaaaccggcttttcggtatcaggagcgaagcacagcaggagtatcacttcatcgtcattgttggatcagcagacaagaaaatgggatttatggtggacagtttaattggcgaagaagatgtggttataaagccgctgagggatcagtacaccaattctcccggaatcgccggagcttcaattttgggagacggttcagtgtccctcatcattgatgtaggtcagcttctggaactgggtcttaaaaaggaaatggaaaaccgccgggcccgggaagcttccagccggtggtag

SEQ ID NO: 36968 - protein, 100 aa, Unknown
  Obtained from environmental sample
  DOMAIN (1)...(84): CheW-like domain
  misc_feature (1)..(100): Xaa is any amino acid
MLRLNRLFGIRSEAQQEYHFIVIVGSADKKMGFMVDSLIGEEDVVIKPLRDQYTNSPGIAGASILGDGSVSLIIDVGQLLELGLKKEMENRRAREASSRW

SEQ ID NO: 36969 - DNA, 456 bp, Unknown
  Obtained from environmental sample
  misc_feature (1)..(456): n is a, c, g, or t
ttgaacgctgaagcagataggcaagattgtcatagactatctgaacaagaagtactcgcgctcggctcctggagcccgtggagccgccgcggcggctcccgctccccctccggcccaagcggcgcctatggccggatatcagccgcaacaggctttcgctccgccgccgcaacagccgtggggcgctccgccgccgcaacagtatcagccgcagcagggcttccaacagcaacagccgggtacgggggcgtttccagcctatcagccgccgccgcaacagtctttcgcgccgccgcccgcgcaacagccgtggggcgctccgccgccgcaacagtaccagccgcagcagggcttccaacagcagaagccgggcggtaccggggcgtttccggcctatcagccgccgccgcagcagcagactttcgcgccgcccacgccggcctacgattcatttga

SEQ ID NO: 36970 - protein, 151 aa, Unknown
  Obtained from environmental sample
  misc_feature (1)..(151): Xaa is any amino acid
MNAEADRQDCHRLSEQEVLALGSWSPWSRRGGSRSPSGPSGAYGRISAATGFRSAAATAVGRSAAATVSAAAGLPTATAGYGGVSSLSAAAATVFRAAARATAVGRSAAATVPAAAGLPTAEAGRYRGVSGLSAAAAAADFRAAHAGLRFI

SEQ ID NO: 36971 - DNA, 648 bp, Unknown
  Obtained from environmental sample
  misc_feature (1)..(648): n is a, c, g, or t
gtggagccgccgcggcggctcccgctccccctccggcccaagcggcgcctatggccggatatcagccgcaacaggctttcgctccgccgccgcaacagccgtggggcgctccgccgccgcaacagtatcagccgcagcagggcttccaacagcaacagccgggtacgggggcgtttccagcctatcagccgccgccgcaacagtctttcgcgccgccgcccgcgcaacagccgtggggcgctccgccgccgcaacagtaccagccgcagcagggcttccaacagcagaagccgggcggtaccggggcgtttccggcctatcagccgccgccgcagcagcagactttcgcgccgcccacgccggcctacgattcatttgagatggcggctccgcctcctccgccaccacctcctcctccgccgccgccgacaccggcctacgactcctttgaaatggcgtcgccgccgccggctccggctcagcaacagccgtggggggccgcgcagcagcagcagtatcagccgcaacagagtttcccgccgcaacagcccggcaccgggacgtttccggcctatcagccgccgccgcaacaacagcctttcgcgccgcctccgcctccgcctcctcctccgccgccgagtcagataa

SEQ ID NO: 36972 - protein, 215 aa, Unknown
  Obtained from environmental sample
  misc_feature (1)..(215): Xaa is any amino acid
MEPPRRLPLPLRPKRRLWPDISRNRLSLRRRNSRGALRRRNSISRSRASNSNSRVRGRFQPISRRRNSLSRRRPRNSRGALRRRNSTSRSRASNSRSRAVPGRFRPISRRRSSRLSRRPRRPTIHLRWRLRLLRHHLLLRRRRHRPTTPLKWRRRRRLRLSNSRGGPRSSSSISRNRVSRRNSPAPGRFRPISRRRNNSLSRRLRLRLLLRRRVR

SEQ ID NO: 36973 - DNA, 870 bp, Unknown
  Obtained from environmental sample
  misc_feature (1)..(870): n is a, c, g, or t
ttgcgccgaagtggggccggcggccccgttttttgggttgttgtttggcggcggcgcgggcagccgcgcggcttccgcccgatttcgcaccagccgaaggctgacgtccaggagatggcgtgggcgtgggcgccatctcagtcgagaaaggggactgctggtagcctccctgatttccgttttgcggcgggaaccctccgggcgccggtgccggcggcggcggtggaggcggaggcgcggtcggtcccaccaaaaacatatcgtcataatttatctgactcggcggcggaggaggaggcggaggcggaggcggcgcgaaaggctgttgttgcggcggcggctgataggccggaaacgtcccggtgccgggctgttgcggcgggaaactctgttgcggctgatactgctgctgctgcgcggccccccacggctgttgctgagccggagccggcggcggcgacgccatttcaaaggagtcgtaggccggtgtcggcggcggcggaggaggaggtggtggcggaggaggcggagccgccatctcaaatgaatcgtaggccggcgtgggcggcgcgaaagtctgctgctgcggcggcggctgataggccggaaacgccccggtaccgcccggcttctgctgttggaagccctgctgcggctggtactgttgcggcggcggagcgccccacggctgttgcgcgggcggcggcgcgaaagactgttgcggcggcggctgataggctggaaacgcccccgtacccggctgttgctgttggaagccctgctgcggctgatactgttgcggcggcggagcgccccacggctgttgcggcggcggagcgaaagcctgttgcggctgatatccggccatag

SEQ ID NO: 36974 - protein, 289 aa, Unknown
  Obtained from environmental sample
  misc_feature (1)..(289): Xaa is any amino acid
MRRSGAGGPVFWVVVWRRRGQPRGFRPISHQPKADVQEMAWAWAPSQSRKGTAGSLPDFRFAAGTLRAPVPAAAVEAEARSVPPKTYRHNLSDSAAEEEAEAEAARKAVVAAAADRPETSRCRAVAAGNSVAADTAAAARPPTAVAEPEPAAATPFQRSRRPVSAAAEEEVVAEEAEPPSQMNRRPAWAARKSAAAAAADRPETPRYRPASAVGSPAAAGTVAAAERPTAVARAAARKTVAAAADRLETPPYPAVAVGSPAAADTVAAAERPTAVAAAERKPVAADIRP

SEQ ID NO: 36975 - DNA, 537 bp, Unknown
  Obtained from environmental sample
  misc_feature (1)..(537): n is a, c, g, or t
gtggggccggcggccccgttttttgggttgttgtttggcggcggcgcgggcagccgcgcggcttccgcccgatttcgcaccagccgaaggctgacgtccaggagatggcgtgggcgtgggcgccatctcagtcgagaaaggggactgctggtagcctccctgatttccgttttgcggcgggaaccctccgggcgccggtgccggcggcggcggtggaggcggaggcgcggtcggtcccaccaaaaacatatcgtcataatttatctgactcggcggcggaggaggaggcggaggcggaggcggcgcgaaaggctgttgttgcggcggcggctgataggccggaaacgtcccggtgccgggctgttgcggcgggaaactctgttgcggctgatactgctgctgctgcgcggccccccacggctgttgctgagccggagccggcggcggcgacgccatttcaaaggagtcgtaggccggtgtcggcggcggcggaggaggaggtggtggcggaggaggcggagccgccatctcaaatga

SEQ ID NO: 36976 - protein, 178 aa, Unknown
  Obtained from environmental sample
  SIGNAL (1)...(20)
  misc_feature (1)..(178): Xaa is any amino acid
MGPAAPFFGLLFGGGAGSRAASARFRTSRRLTSRRWRGRGRHLSRERGLLVASLISVLRREPSGRRCRRRRWRRRRGRSHQKHIVIIYLTRRRRRRRRRRRRERLLLRRRLIGRKRPGAGLLRRETLLRLILLLLRGPPRLLLSRSRRRRRHFKGVVGRCRRRRRRRWWRRRRSRHLK

SEQ ID NO: 36977 - DNA, 366 bp, Unknown
  Obtained from environmental sample
  misc_feature (1)..(366): n is a, c, g, or t
gtgacggacatgacgataatggttcctgtcgataagggcgtggagcttgggattcgtcctactgtttccagagatgaggcgaataaggcgcttgagttagtcagcgaagactacgatccgattcccacagactggaaaatgcgctaccagatgaaccttgaacttttaaaaaagggaagcatcagggatatagcgagtattgtccgctcattgtaccaccgaagtcaagttaaagaactgcctatcttagagcgtaaactttatgactcggcgatgaagctgttggaagatgaaatgtcgatctcgcttaaaaagcccaaagaagatgtacaagctatgattttagctcgtctggacgttgaatag

SEQ ID NO: 36978 - protein, 121 aa, Unknown
  Obtained from environmental sample
  misc_feature (1)..(121): Xaa is any amino acid
MTDMTIMVPVDKGVELGIRPTVSRDEANKALELVSEDYDPIPTDWKMRYQMNLELLKKGSIRDIASIVRSLYHRSQVKELPILERKLYDSAMKLLEDEMSISLKKPKEDVQAMILARLDVE

SEQ ID NO: 36979 - DNA, 504 bp, Unknown
  Obtained from environmental sample
  misc_feature (1)..(504): n is a, c, g, or t
atgggcgccgcgataaacatagcggttgttatttgcgccgcgggcgcgtcttcaagaatgaaaagtgaaggttcggcagtgcgcaagaaagagtatgaaaaattgagtaacggaaataccgtacttggaacggcggtaaacgcttttgcttctgtttccgatgtgcaggtgattgtgatttccgtccccgaagacggcgagaacgccgcccgttccgcgttatctgcaaatttattatcaagccaaaaaccaaaaatactttttgttacaggcggcagtacgcgccaacgctcggtctttaacgctctttccgttctcgccgatttttcccccgattacgcgctaatccatgacggcgcaagaccgtgggtaagctcctcgcttatagaaaatattattacagcggtaaaaaaatataacgcccgttatcccatctcctggccgcttacncgacacgnccgaaggaaatgcgaaatctttattgggaaagcgcaagacaaataa

SEQ ID NO: 36980 - protein, 167 aa, Unknown
  Obtained from environmental sample
  SIGNAL (1)...(21)
  DOMAIN (7)...(163): Uncharacterized protein family UPF0007
  misc_feature (1)..(167): Xaa is any amino acid
MGAAINIAVVICAAGASSRMKSEGSAVRKKEYEKLSNGNTVLGTAVNAFASVSDVQVIVISVPEDGENAARSALSANLLSSQKPKILFVTGGSTRQRSVFNALSVLADFSPDYALIHDGARPWVSSSLIENIITAVKKYNARYPISWPLTRHXRRKCEIFIGKAQDK

SEQ ID NO: 36981 - DNA, 825 bp, Unknown
  Obtained from environmental sample
  misc_feature (1)..(825): n is a, c, g, or t
atgtgccgtggggtaatgaggtacggcaaccgcgattggcactgccacctgcgctcagggcatggcagggtaaatttggtgactgctttaggccagtcatgtaacatttactttatgacggtgggaagggattatgtgggagccgaaagaatcgtatcctacgccagggattttggttacggtgaagcgacgggcatagatattccaggggaattttcgggatttataccgaccccacagtggaaagaacgccgttaccacgaaaaatgggtgttaggtgacacaatgaacatgtcaatcggacaggggtatacccttgtaactccgcttcaaatgagcaatttggtcagtatgattgtgaataacggaatatatttcaaaccttatgtttttaaaaggaagtgcggggatctggttagaaacgcgatggaaaaaactactgttcccgaagtaattcatcaaagcagtataagcctttcggtttatgaaactgtgcgccgcgatatgagatatgttgtaagccagggaaccgcgcaatatcctttgaatataaaaactgtgcagattgcgggaaaatcaggaacggcggaaatggggcttgtggatagatggcattcatggtttacggcatttgctccgtataacagcacaaatcccaatgaccaaatagtagttacggttattattgaagcttctacttatcaagtatggatggcttccgccgtaagcgctattatatttcaggggtactttggaaagcagaattttgaagacgcggtaagctcacttggatttcaatatatggtgacggcgaggggacaatag

SEQ ID NO: 36982 - protein, 274 aa, Unknown
  Obtained from environmental sample
  DOMAIN (2)...(252): Penicillin binding protein transpeptidase domain
  misc_feature (1)..(274): Xaa is any amino acid
MCRGVMRYGNRDWHCHLRSGHGRVNLVTALGQSCNIYFMTVGRDYVGAERIVSYARDFGYGEATGIDIPGEFSGFIPTPQWKERRYHEKWVLGDTMNMSIGQGYTLVTPLQMSNLVSMIVNNGIYFKPYVFKRKCGDLVRNAMEKTTVPEVIHQSSISLSVYETVRRDMRYVVSQGTAQYPLNIKTVQIAGKSGTAEMGLVDRWHSWFTAFAPYNSTNPNDQIVVTVIIEASTYQVWMASAVSAIIFQGYFGKQNFEDAVSSLGFQYMVTARGQ

SEQ ID NO: 36983 - DNA, 381 bp, Unknown
  Obtained from environmental sample
  misc_feature (1)..(381): n is a, c, g, or t
atgaaaagcagtccagacatacgctcacctgtgcctttcaacccattggacaaaaaacatctgggtgacagcgttgcagaagcaatgcttcgcacagacatacatccgctgccgccagaaccattcattggcgcagggatttacgccatatactacatcggcggattcgatctctatgaaacgatagcgaaggcaaacataggcaaccgtttttccaagcccatctacgttgggaaggccgtgcccgctggtgcgaggaagggcggattcggtctcggcgcagaccctggcatggcactacagcgcagattggctgagcacgctgagtccattaggcaagtgtcgaacctttccctagggcgtgtcgtcaataggttttag

SEQ ID NO: 36984 - protein, 126 aa, Unknown
  Obtained from environmental sample
  misc_feature (1)..(126): Xaa is any amino acid
MKSSPDIRSPVPFNPLDKKHLGDSVAEAMLRTDIHPLPPEPFIGAGIYAIYYIGGFDLYETIAKANIGNRFSKPIYVGKAVPAGARKGGFGLGADPGMALQRRLAEHAESIRQVSNLSLGRVVNRF

SEQ ID NO: 36985 - DNA, 351 bp, Unknown
  Obtained from environmental sample
  misc_feature (1)..(351): n is a, c, g, or t
ttgcccgaccccgaatccgcaacggcaaagcgcgtcccaaaccacgagcccagactgggcgctagggcgtatccaggtcacacaggcagtttgctggatgagccgtccaagacgctcaaggccggcgaccacggcgtgcctggcggcgagaacactgtggtcatggacaacggcgaaatcaggtactacacggtcagggaaagcgcgagaatccagacgtttcctgatgactacgtctttcatgggccttggactgaaaacatgaggcagttgggaaatgcagtccccgtgcggcttgcagccgtcataggtgaatctgttaaaaagcaactggacgcggtgggcagatga

SEQ ID NO: 36986 - protein, 116 aa, Unknown
  Obtained from environmental sample
  misc_feature (1)..(116): Xaa is any amino acid
MPDPESATAKRVPNHEPRLGARAYPGHTGSLLDEPSKTLKAGDHGVPGGENTVVMDNGEIRYYTVRESARIQTFPDDYVFHGPWTENMRQLGNAVPVRLAAVIGESVKKQLDAVGR

SEQ ID NO: 36987 - DNA, 966 bp, Unknown
  Obtained from environmental sample
  misc_feature (1)..(966): n is a, c, g, or t
ttgggttttgcccttaccctcggaaacgtggtggatttccaactcgcccccggttggattaatccgttttcggggaccaattttcgaattggtggcagggggggcggccatgccagcctttttcattcggcggcaggcaccaggggaattccgacccaccgcgacatgttccccgaagctgtgagggcggtcagggaactgaagccagaagcattcatctttgaaaacgtgaagggcctgctccgcaagtcctntgcgacgtacttcaactacatactgttgcagctcacgcacccagagcagccacgcgaaccgtgcgagggatgggaggcgcacctgtcaaggcttgagcggggccacgtgaagggcaaagggacagggctgaaatacaacatcgtgtttcgtctgctgaacgcggccgactacggcgtgccgcagtcgcggcacagggtggtgatcgtgggcttcaggagcgatctgggcgtcagttggtcattcccagcggagacccactcgcaggacgctctgctttatgcacagtgggtttcaaaggattactgggatgaacacagtattcccaaaagcaggcgcccgccaaccccaaaaaactacgaaagccgtttggacaggctgcgatccagcggcgatgttccgcttttccccttgcgtcgctggcggactgtcagggacgcgatttcgggttgcccgaccccgaatccgcaacggcaaagcgcgtcccaaaccacgagcccagactgggcgctagggcgtatccaggtcacacaggcagtttgctggatgagccgtccaagacgctcaaggccggcgaccacggcgtgcctggcggcgagaacactgtggtcatggacaacggcgaaatcaggtactacacggtcagggaaagcgcgagaatccagacgtttcctgatgactacgtctttcatgggccttggactgaaaacatga

SEQ ID NO: 36988 - protein, 321 aa, Unknown
  Obtained from environmental sample
  DOMAIN (2)...(305): C-5 cytosine-specific DNA methylase
  misc_feature (1)..(321): Xaa is any amino acid
MGFALTLGNVVDFQLAPGWINPFSGTNFRIGGRGGGHASLFHSAAGTRGIPTHRDMFPEAVRAVRELKPEAFIFENVKGLLRKSXATYFNYILLQLTHPEQPREPCEGWEAHLSRLERGHVKGKGTGLKYNIVFRLLNAADYGVPQSRHRVVIVGFRSDLGVSWSFPAETHSQDALLYAQWVSKDYWDEHSIPKSRRPPTPKNYESRLDRLRSSGDVPLFPLRRWRTVRDAISGCPTPNPQRQSASQTTSPDWALGRIQVTQAVCWMSRPRRSRPATTACLAARTLWSWTTAKSGTTRSGKARESRRFLMTTSFMGLGLKT

SEQ ID NO: 36989 - DNA, 351 bp, Unknown
  Obtained from environmental sample
  misc_feature (1)..(351): n is a, c, g, or t
atggcgaatatttactggccgcaatctttgccctccgggctgcttgcggaagggtttacccaaaaaccccagagcaacgtaattcgtacacgaatggacgcgggacctcaaaagactcggaggcgttacaccgcgagaacagtcaaatataccggcaaacaacggtttaacgccgaggaacttatcatctttaagcggttttaccataacgagttagcggacggcgcgctgcgctttaattttgaagactccgttacaatggaaaccgccgaattccgttttaccgaagattataacgtctccgaatttgagggatattttgaagttacattgccgctggagcgtctatga

SEQ ID NO: 36990 - protein, 116 aa, Unknown
  Obtained from environmental sample
  misc_feature (1)..(116): Xaa is any amino acid
MANIYWPQSLPSGLLAEGFTQKPQSNVIRTRMDAGPQKTRRRYTARTVKYTGKQRFNAEELIIFKRFYHNELADGALRFNFEDSVTMETAEFRFTEDYNVSEFEGYFEVTLPLERL

SEQ ID NO: 36991 - DNA, 657 bp, Unknown
  Obtained from environmental sample
  misc_feature (1)..(657): n is a, c, g, or t
atggggtcaaatattgaaaaaactgaaaaggtggtgcaggacttgtccgggcgtcgcgccgccattgtagaagctttaaacaaatcggttgagatatttgccgtccataaagaagaaacatttgaagaggtaatgaccaacggcatacggccttttgcggaggctgttggccttgaccgcgtagtcttttataagctagtggacgttgaaggtggcaaacgccttgggcaaatctaccgctgggacaagtcggaaggcggccttatgtctcttgccgatgaattaaaggttttgcctaatcttccgtttttagaaaactatatttcaataacatcccagggtggctgtgtacggctccggaaaagcgattatacagaagagatggatgccttcatgcgtagctatggcatactatcaatattgatagtgcccatttttatgcatggtgaactttggggcgatataagttttcaggatcacaccaacgaccgttattttgacgaggactgctccgacttgctgtatactgcggcacgtatattttcagccgaggttgtcagggaggaaatgaaacgccgcggaaaaatggaagccgcgctgaacagagccgctattatatttatctcgcaaatgaagaaacgtttgaagccaccatga

SEQ ID NO: 36992 - protein, 218 aa, Unknown
  Obtained from environmental sample
  DOMAIN (40)...(185): GAF domain
  misc_feature (1)..(218): Xaa is any amino acid
MGSNIEKTEKVVQDLSGRRAAIVEALNKSVEIFAVHKEETFEEVMTNGIRPFAEAVGLDRVVFYKLVDVEGGKRLGQIYRWDKSEGGLMSLADELKVLPNLPFLENYISITSQGGCVRLRKSDYTEEMDAFMRSYGILSILIVPIFMHGELWGDISFQDHTNDRYFDEDCSDLLYTAARIFSAEVVREEMKRRGKMEAALNRAAIIFISQMKKRLKPP

SEQ ID NO: 36993 - DNA, 510 bp, Unknown
  Obtained from environmental sample
  misc_feature (1)..(510): n is a, c, g, or t
atgacgaccggcattagggaaatcgccgacgtgttcaagttggacagattttccatttggcgcaattcacttaagcctgacgcgatacatgtaacccagatataccgctgggacagggagtccggcgggactaccatgccgacaaaaggcctggaggatgtaacctatgcccagcttgcgccgagatgggaaaaacttttagcgtcaggcgaaacaattaacagtccggtaaggtttctgcccgaagcggctatgctgaaatcatttggttgtgtgacggcttttattacgcctttgtttatcaacaacagtttttggggctttgcccttcttgaagaccgcagaaatgaacgtttttttgaaaaagacgacattggaatgcttcgctcggcggcgtttctgtgcgcgaacaccgtcatacgcgccgacatggaacgtgaaatagccgacgctaacgaatttaacagcgcgacccttgatgcctcgcctttgtgttttaaccgtctttga

SEQ ID NO: 36994 - protein, 169 aa, Unknown
  Obtained from environmental sample
  misc_feature (1)..(169): Xaa is any amino acid
MTTGIREIADVFKLDRFSIWRNSLKPDAIHVTQIYRWDRESGGTTMPTKGLEDVTYAQLAPRWEKLLASGETINSPVRFLPEAAMLKSFGCVTAFITPLFINNSFWGFALLEDRRNERFFEKDDIGMLRSAAFLCANTVIRADMEREIADANEFNSATLDASPLCFNRL

SEQ ID NO: 36995 - DNA, 726 bp, Unknown
  Obtained from environmental sample
  misc_feature (1)..(726): n is a, c, g, or t
gtgtatatagaaaaagaaatacctattttcgattttgtgtccgcaatatcggaaaccgttgatttagtctttccgccgctgcgcatgcatcatcaaaaagttgcatgcatcgcgtacaggatcgctcaaaaaatgggattaccgaaggaagaaatacaggatattatccttgcgtccatgctgcatgacattggcgctttttccgccggagaacgcatgaacgaactaacgtacaggccggaagaaaacgaattatgccaacatcccctgttgggatataaattattaaaaaatttagcgccgctttccaatgccgcgagactgataaaatttcatcataaaaattatgcccggtcagatcattgtataccggttggcagttacgttatacatctggcggattatatatgtgttttttccaatgaacgggatgaattcaggctctgggttccggatattctggaaaagataagtttgatgaagaacaaatttcttcctgacgcgcttaacgctttttttcagatagcggggctggattttttctgggaggaagcgttttctccttcacatagcgaaagcgccctgaaaagagcgctgcttccaaaaaagattacaggcatggaaacccttaaagactttgccagggttgccgcgaggttaattgactttaggagcagattcacggcagcccattcaagcagcgtcgccgcggtagccagcgagtaa

SEQ ID NO: 36996 - protein, 241 aa, Unknown
  Obtained from environmental sample
  DOMAIN (27)...(139): HD domain
  misc_feature (1)..(241): Xaa is any amino acid
MYIEKEIPIFDFVSAISETVDLVFPPLRMHHQKVACIAYRIAQKMGLPKEEIQDIILASMLHDIGAFSAGERMNELTYRPEENELCQHPLLGYKLLKNLAPLSNAARLIKFHHKNYARSDHCIPVGSYVIHLADYICVFSNERDEFRLWVPDILEKISLMKNKFLPDALNAFFQIAGLDFFWEEAFSPSHSESALKRALLPKKITGMETLKDFARVAARLIDFRSRFTAAHSSSVAAVASE

SEQ ID NO: 36997 - DNA, 1359 bp, Unknown
  Obtained from environmental sample
  misc_feature (1)..(1359): n is a, c, g, or t
ttgagaacaaacgtgtcagttgacttaccgtctctaaaggtaggcaatgattccggcgtaacatggacaataatgctcccgtcctctgataattaccttttaagagaaatagatgaaattaccatgtttgtcctccttttatcgctgatagcccttatcgtggcggcggtaattgtatactttacccttcactacactacaaaaccgatcgttcacgtggccgaaaccctcaaggacatatccgaaggcgaaggcgatttaacgcggcacattgacgtcaattccaaagacgagatcggcgaccttgcccattacttcaacaaaacgctggaaaagatcaaaaacctcgtcctgatcatcaagagagaagcggcgggcctccaaaccatcggcaatgatctcgcgagcaacatgaccgaaaccgccgccgcggttaatcagatcaccgccaatatccagagcatcaagggcagggtcattaaccagagcgccagcgttacggaaaccaacgccaccatggaacaggttatcgccaacatcaacaaactcaacggccatgtggataaccagagcaggaacgtctcgcaggcctcgtccgccattgaggaaatggtagccaatatcagttcggttaccgaaacccttattaaaaacgccggtaacgtaaatacgttacaagaagcttccgaagtaggacgcggcggcttgcaggaagtagcatcggatattcaggaaatcgcccgcgaatcagaaggcttattggaaatcaacgcggtaatggaaaacatcgccagccagaccaacctgctttcgatgaacgccgctatcgaagctgcgcacgccggagaagcgggcaagggcttcgcggtagtagccgatgaaatccgcaaacttgccgagagttcaagcgaacagtccaagacaatcggcaacgtgttaaagaagataaaagaatcaatcgacaagataaccaaatcgaccgagagcgttcttaacaaattcgaagctattgattcaaacgtaaagacggtagctcagcaggaagaaattatccgcaacgccatggaagaacaaggcgaaggaagtaaacaaattcttgacggtatcggcaatgtaaataacatcacacgggcggtaaaaaccagttctgaagaaatgcgcgaaggcagtaaggaagttataaccgaaagccagaaccttgaaagagcgacgcaggaaatcacaggcggtatgaacgagatgtcatcgggagcggaacagataaacgtagctgtaaaccaagtcaacgaattaagcgcaaagaaccgcgaaggtataagctccttaatcaaggaagtatcacggttcaaggtagaatga

SEQ ID NO: 36998 - protein, 452 aa, Unknown
  Obtained from environmental sample
  DOMAIN (188)...(452): Methyl-accepting chemotaxis protein (MCP) signaling domain
  misc_feature (1)..(452): Xaa is any amino acid
MRTNVSVDLPSLKVGNDSGVTWTIMLPSSDNYLLREIDEITMFVLLLSLIALIVAAVIVYFTLHYTTKPIVHVAETLKDISEGEGDLTRHIDVNSKDEIGDLAHYFNKTLEKIKNLVLIIKREAAGLQTIGNDLASNMTETAAAVNQITANIQSIKGRVINQSASVTETNATMEQVIANINKLNGHVDNQSRNVSQASSAIEEMVANISSVTETLIKNAGNVNTLQEASEVGRGGLQEVASDIQEIARESEGLLEINAVMENIASQTNLLSMNAAIEAAHAGEAGKGFAVVADEIRKLAESSSEQSKTIGNVLKKIKESIDKITKSTESVLNKFEAIDSNVKTVAQQEEIIRNAMEEQGEGSKQILDGIGNVNNITRAVKTSSEEMREGSKEVITESQNLERATQEITGGMNEMSSGAEQINVAVNQVNELSAKNREGISSLIKEVSRFKVE

SEQ ID NO: 36999 - DNA, 750 bp, Unknown
  Obtained from environmental sample
  misc_feature (1)..(750): n is a, c, g, or t
ttgaaaaatatattaaaaattgacaaaagccctgtaatattgtatattggtgatgtgaagaacacgctggaacatatctcgtttataaaaaactggaaattgagcaaaagagccgtaaatctgctgggacaatgctacgcctatatagattcaatgctgaatatccctatccggccggactatcaccgggagttgcttaccgtgtcattgaataagggtgcgctggctacaacagccattgagggaaataccctgacggaagaagaactggcccaaatacgcagcggtaaggatcttgcgtccagtaaaaaatatcagcagagggaagttgagaatattattgatgcctttaatatcatccttaaggaattggtcagagaaaaatccgccacggttatatcgccggaattgataaagcgtttcaatggcatggtcggcaaagatataggcgaagcttttaacggtaatcccggccaactgcgcaggcggaatgtaacggtaggcgcttaccgaccgccttcttttgaagaggtggaaaacctggttgagaaattatgcgactggttgatgcgtgaatttcattacgggcatgaacagaattttgatgaagcggtgattgaggctgttgtcacccatgtgtatattgcgtggatacacccatttcttgacggtaacggaagaacagcccgccttctggaattttatctactgctgcgggccggggttcccagctcggccattctgtcatga

SEQ ID NO: 37000 - protein, 249 aa, Unknown
  Obtained from environmental sample
  DOMAIN (138)...(249): Fic protein family
  misc_feature (1)..(249): Xaa is any amino acid
MKNILKIDKSPVILYIGDVKNTLEHISFIKNWKLSKRAVNLLGQCYAYIDSMLNIPIRPDYHRELLTVSLNKGALATTAIEGNTLTEEELAQIRSGKDLASSKKYQQREVENIIDAFNIILKELVREKSATVISPELIKRFNGMVGKDIGEAFNGNPGQLRRRNVTVGAYRPPSFEEVENLVEKLCDWLMREFHYGHEQNFDEAVIEAVVTHVYIAWIHPFLDGNGRTARLLEFYLLLRAGVPSSAILS

SEQ ID NO: 37001 - DNA, 777 bp, Unknown
  Obtained from environmental sample
  misc_feature (1)..(777): n is a, c, g, or t
atggcggagcgaaaaatccccctatccgtatttcactttgactgcttctggatgaaagcctttcaatgggtagattttaagtgggatgaggacaaatttcccgatcctcccgccatgctcgaccggcttaaaaagaaagggcttaagatctgcgtgtggataaatccctatatcgcccagaaatcctgtctttttgacgaaggtatggaaaagggattcctggttaaaaaagcaaacggcgacatttggcaatgggaccgctggcaggcaggaatggcccttgtggattttaccaattccaaagccgccgcgtggtatcaggaaaaactaaaagagcttcttgacatgggagtggatactttcaagaccgattttggcgagaggatacctgttgacgtggtctggcataacggcgccggcggcgaggggatgcataattattacacctacctttacaacaagacggtttttgatctattggagaatgtaaggggaaaaggcgaggctctggtttttgcccgttccgcgacagcgggctgccagcaattcccggtgcattggggcggcgactgttccgcgacctacgagtccatggcggaaagcttgcgcggcggcctttcgctcggtttttcgggcttcggtttctggagccacgacatcagcggatttgagagcaccgccactgcggatctctttaagcgctggaccgcgtttggcctattaagttcccattcaaggcttcacggaaacgaatcgtaccgcgttcccggaatttga

SEQ ID NO: 37002 - protein, 258 aa, Unknown
  Obtained from environmental sample
  DOMAIN (1)...(258): Glycosyl hydrolases family 31
  misc_feature (1)..(258): Xaa is any amino acid
MAERKIPLSVFHFDCFWMKAFQWVDFKWDEDKFPDPPAMLDRLKKKGLKICVWINPYIAQKSCLFDEGMEKGFLVKKANGDIWQWDRWQAGMALVDFTNSKAAAWYQEKLKELLDMGVDTFKTDFGERIPVDVVWHNGAGGEGMHNYYTYLYNKTVFDLLENVRGKGEALVFARSATAGCQQFPVHWGGDCSATYESMAESLRGGLSLGFSGFGFWSHDISGFESTATADLFKRWTAFGLLSSHSRLHGNESYRVPGI

SEQ ID NO: 37003 - DNA, 741 bp, Unknown
  Obtained from environmental sample
  misc_feature (1)..(741): n is a, c, g, or t
gtgagcagaggtacggcggcaagcagcgaagtgcgtatacccgcctgtcatcttaataatgccaccggtgaatacctgcccgtaacgtctatcggcgacaacgcattccgggattatagcagccttaccggcattaccatccccgattgcgtaacgtctatcggcggcatggcattccagggttgcagcagccttaccagtatcactattcccgatagcgtaacatctatcggcggcatggcattccagggttgcagcagccttgccgatatcagcctccccgcaggcataccgtctatcggctatggagcattcggcaataccgcgtggttaaataaccagccggacggattggtatatatcaacaaagttttatatgcttataaaggaacaatgtccgccaacaccgtaatagacaacatacaagaggatactatatcaatagctatcggcgcgttctacggcttcgcaagacttaccggcatcaccatccccgagggcgttaagtttataggcgctacggcgttcgccgattgcagcggccttaccgttataaacctccccgcaggtgtaatgtctattggcaacggggcgttctacggctgcggcaagacttcccagcatcaccattcccgcaagtgtaagttctattggcttaagcgcgttttccggctgcaccggtcttaccagcgtaacgctctccgaaggtttgacgtctatcggcgaatgtttgtttgttga

SEQ ID NO: 37004 - protein, 246 aa, Unknown
  Obtained from environmental sample
  misc_feature (1)..(246): Xaa is any amino acid
MSRGTAASSEVRIPACHLNNATGEYLPVTSIGDNAFRDYSSLTGITIPDCVTSIGGMAFQGCSSLTSITIPDSVTSIGGMAFQGCSSLADISLPAGIPSIGYGAFGNTAWLNNQPDGLVYINKVLYAYKGTMSANTVIDNIQEDTISIAIGAFYGFARLTGITIPEGVKFIGATAFADCSGLTVINLPAGVMSIGNGAFYGCGKTSQHHHSRKCKFYWLKRVFRLHRSYQRNALRRFDVYRRMFVC

SEQ ID NO: 37005 - DNA, 843 bp, Unknown
  Obtained from environmental sample
  misc_feature (1)..(843): n is a, c, g, or t
atgaagccgatgccgaagcggtggcgcgctctttataataaaagaacggaacttactaccaacttacagtcattacagcaaaaacgtaacgccaacgcggacgccatgaagggcaagcttgcacaggaagatagaaatgttcttatagaagagggaaaaaaattaaaagaggggattgccgcggcggaaaacgaattggcggctgttgaggcggagcttttaactgaagcgcggaagatcccgaacatggcgcatcctgacgcgccggttggcaaggaagacaaggacaatcttgaagtaaaaagggtaggggagcctgctaaatttgattttacccccgccgaccatgttaagcttgggcaggaccttgatattatcgactttgattcaggaacaaaggtgtcaggcaccaaattttactatttaaaaaacgaaggcgtctatctggaacttggccttatccgttacgcgcttgatattttgcagaaaaagggatttactccttttattactcctgatatcgcacgcgaagaaattctcgagggcattggttttaatccgcgcggggcggagtccaatgtttatacgcttgagggcgaagaaacctgtcttgtaggcactgcggaaattacccttggcggttattactccaacatgattcttccgaaagacaagcttcccttgcggatggcgggtctttcccactgtttccgtcgtgaagcgggcgccgccggtcagttttccaagggactctaccgcgttcatcaatttacaaaacttgaaatgtttgtttactgtctgcccgaagatcggggcgtttccatgaagaactgcgttcaatag

SEQ ID NO: 37006 - protein, 280 aa, Unknown
  Obtained from environmental sample
  DOMAIN (4)...(84): Seryl-tRNA synthetase N-terminal domain
  misc_feature (1)..(280): Xaa is any amino acid
MKPMPKRWRALYNKRTELTTNLQSLQQKRNANADAMKGKLAQEDRNVLIEEGKKLKEGIAAAENELAAVEAELLTEARKIPNMAHPDAPVGKEDKDNLEVKRVGEPAKFDFTPADHVKLGQDLDIIDFDSGTKVSGTKFYYLKNEGVYLELGLIRYALDILQKKGFTPFITPDIAREEILEGIGFNPRGAESNVYTLEGEETCLVGTAEITLGGYYSNMILPKDKLPLRMAGLSHCFRREAGAAGQFSKGLYRVHQFTKLEMFVYCLPEDRGVSMKNCVQ

SEQ ID NO: 37007 - DNA, 327 bp, Unknown
  Obtained from environmental sample
  misc_feature (1)..(327): n is a, c, g, or t
gtggtggatacctgcaccggcgaccttggcgcgcccgcttaccgtaaatgggacttggaagcgtggatgcccggacgcaacggcggcgagtggggcgaggtaacatccacgtcaaactgcaccgattatcaggcgcgcaggcttaacatccgctttaaggacgacgacggaaaaaataaatttgtccatatgttgaacggaacggcaattgccatttcccgcgcgattatcgcccttctggaaaatttccagcaggcggacggctccgtgcgcattccccgcgcgcttgtgccttactgcgggtttgacgttataaagaggaagtga

SEQ ID NO: 37008 - protein, 108 aa, Unknown
  Obtained from environmental sample
  misc_feature (1)..(108): Xaa is any amino acid
MVDTCTGDLGAPAYRKWDLEAWMPGRNGGEWGEVTSTSNCTDYQARRLNIRFKDDDGKNKFVHMLNGTAIAISRAIIALLENFQQADGSVRIPRALVPYCGFDVIKRK

SEQ ID NO: 37009 - DNA, 447 bp, Unknown
  Obtained from environmental sample
  misc_feature (1)..(447): n is a, c, g, or t
ttgatcgtaataatttgcgatcgaacaaaaatcggcctgggaaccgttgccgccattgcgcttacaggttatgtgtccgacctgggagtattcctgtgcaatttcatattgattgaaggaacggctttatttattttacgcgccggattaataatttcaggaattttgttaatcgctataggttcgggaatgtattttaatactaatgtaggcgtttcgccttatgacggcatcgggcttataatggcagataaaaccggaaatcaaaatatgtaccgctggattaggataggaatggacttaatctgcgttactatcgggtttgtattgggaaatatgccgggagtaggaactataatcatggcgttatttacagggcctttatttacgttcttccgaaaccggatatcggtatggggaaaaaatctggggattatcacttggtaa

SEQ ID NO: 37010 - protein, 148 aa, Unknown
  Obtained from environmental sample
  DOMAIN (47)...(129): Uncharacterized BCR, YitT family COG1284
  misc_feature (1)..(148): Xaa is any amino acid
MIVIICDRTKIGLGTVAAIALTGYVSDLGVFLCNFILIEGTALFILRAGLIISGILLIAIGSGMYFNTNVGVSPYDGIGLIMADKTGNQNMYRWIRIGMDLICVTIGFVLGNMPGVGTIIMALFTGPLFTFFRNRISVWGKNLGIITW

SEQ ID NO: 37011 - DNA, 723 bp, Unknown
  Obtained from environmental sample
  misc_feature (1)..(723): n is a, c, g, or t
ttgaataacttatcttcgctggtttttgacgaagccgaccgccttgtaagcggtgaaatgatagacgacacaacggaactatgttcgctaatccgcaaattcgcaaagaccgatagtattcttcttgccgcgtgttccgctactataaacaaaaaatgtgtggaaaaagtacaaaccgttttctttggcgatggggagagcaggggagtctcctttattgaatccgaggataatgaaattctgcgcgataaaattgaacattgggctattttcagcgaaaaacggcgcaaggatcaaactttgcgctcattgttagccgccattaaaacaaaaaaatcccgcgttaaagcgctggtgttcataagcaagggcgatgaagccgcgttagttctctcgcgcctccagtaccatcatgtctcggctgccggactttttggaaaaataggcaataaacctctctccggcgcggaacgcaaagagtcgctcgatttattcagaagcggaagcgtagatgtgcttgtctccacagatttagccgcccgcggtttggatattcccgatattacccatgtaatcgctcttgatgttcccgccgacagtgaagtgtacatacaccgctgcggcagaacgggacgcgccggaaaacgcggaataatggtaacaatcggcgatgaaacccagatgcgtcttctttcattgctcgaaaaanaattaaagaattag

SEQ ID NO: 37012 - protein, 240 aa, Unknown
  Obtained from environmental sample
  DOMAIN (133)...(214): Helicase conserved C-terminal domain
  misc_feature (1)..(240): Xaa is any amino acid
MNNLSSLVFDEADRLVSGEMIDDTTELCSLIRKFAKTDSILLAACSATINKKCVEKVQTVFFGDGESRGVSFIESEDNEILRDKIEHWAIFSEKRRKDQTLRSLLAAIKTKKSRVKALVFISKGDEAALVLSRLQYHHVSAAGLFGKIGNKPLSGAERKESLDLFRSGSVDVLVSTDLAARGLDIPDITHVIALDVPADSEVYIHRCGRTGRAGKRGIMVTIGDETQMRLLSLLEKXLKN

SEQ ID NO: 37013 - DNA, 450 bp, Unknown
  Obtained from environmental sample
  misc_feature (1)..(450): n is a, c, g, or t
atgataaaagacgtaacctttgaacgcacagtatacaatgccgcaccctcaaagtttgaagccggaaccggcaatattgccgacgcggtcggccttggcgcggctcttgattacgtttccgccataggaatagcgaacatcagcgcatacgaacacgaactgcttgattacgctacccgtgaactgaaacgcataaacggcctgcacctaatcggcaccgccgcagaaaaagcgagcgttctttcttttgtccttgacaacgcaagcgttgaacaagtcggcaaacatctggcaagcaaaggaattgcagtccgcgccggccaccactgcgcccaaccaattttacgccgcttcggcttggaagcaacagtacgcccgaccattgctttctataacacagccgaagaaattgataaattggtatgcgcgattaaagaactggcaatataa

SEQ ID NO: 37014 - protein, 149 aa, Unknown
  Obtained from environmental sample
  DOMAIN (1)...(140): Aminotransferase class-V
  misc_feature (1)..(149): Xaa is any amino acid
MIKDVTFERTVYNAAPSKFEAGTGNIADAVGLGAALDYVSAIGIANISAYEHELLDYATRELKRINGLHLIGTAAEKASVLSFVLDNASVEQVGKHLASKGIAVRAGHHCAQPILRRFGLEATVRPTIAFYNTAEEIDKLVCAIKELAI

SEQ ID NO: 37015 - DNA, 552 bp, Unknown
  Obtained from environmental sample
  misc_feature (1)..(552): n is a, c, g, or t
atgatacggattgacacaacaaatatcctttttatctgcggcggggcgtttgtgggactggacaaattaatcgcgcgccgcgttgtgaatcacccgttggggtttggatccgagggaggtggggaaaaatcattaaaagagctttatgacgcgttgcatcctgacgatttaatccgtttcggtatgattcccgaatttatcggaaggcttcccattatcgtcggtcttgaagaattaaaactcgaagatttaaagcggatcatcaccgaaccgcgtaacgccatagtgcgccagtatcaggcgtccctgtcttatgacaacgtaaaacttgagtttacggaaaaagcgattgacgctatagcggacaaggcaattaagcaaaaaacaggcgcgcgcggtttaagggcgattgttgaaaaattaatgaccgatataatgtttgacattccttcaataccaggcgataaaaaaataataatttcccatgatacagtggaaaaatcagaaccgccgcagataatatatctggagcaaagtcaaaagagcgcgtaa

SEQ ID NO: 37016 - protein, 183 aa, Unknown
  Obtained from environmental sample
  misc_feature (1)..(183): Xaa is any amino acid
MIRIDTTNILFICGGAFVGLDKLIARRVVNHPLGFGSEGGGEKSLKELYDALHPDDLIRFGMIPEFIGRLPIIVGLEELKLEDLKRIITEPRNAIVRQYQASLSYDNVKLEFTEKAIDAIADKAIKQKTGARGLRAIVEKLMTDIMFDIPSIPGDKKIIISHDTVEKSEPPQIIYLEQSQKSA

SEQ ID NO: 37017 - DNA, 906 bp, Unknown
  Obtained from environmental sample
  misc_feature (1)..(906): n is a, c, g, or t
ttgtgcgtatttcattgggcggcgtgcgcgacgaagcggaaatcagggggcaccgaaagacttacgtgggagcccttccccggtaaaataattcaatccatgtgcaaggcgggaacgaccaatcccgtgtttttgttagatgaaattgacaagctttcaagcgattttcgcggagatcccgcgtccgcccttcttgaagtgcttgaccctgaacagaactcaacttttaccgaccactatcttgaagttcaatacgatctttccaaagtgatgtttttaactacggcaaactctcttcactccattccgtatcccctgcttgaccgcatggaaataatcgaagttcccggttatggagaaaatgaaaagctgagtatcgcaaaacaattcctcgtgccaaaagagttacgagaaaatggattatcctcggcaaaaattacgtttagggacgatacgataaaaaatattatccgttactggacaatggaatcgggagtgcgtaatcttgagcgcgagacggcgcggtgcatcaggcgcatagcaagagacgcggtaaacaaaggttacgggaaagacaagcccgtaaaggaatttaataaaatcataacgccagcaaacttggaaaaattacttggaaagaaaaaatataaaagggatgtcgtattcagggaagcgcgtgtaggcgtaacatatgggcttgcgtggacggaaactggcggaaccattctgcctgtcgagacaatccgctattctggaaccggggagcttgtcattactggaaatcttggcgacgtgatgaaagaaagcgcacgtatcgccctttcttacctgcgcagtaccggaaacaaatacaatttcctcgcgaaagaccttttaaaatctgacttcatatctcggccgatctga

SEQ ID NO: 37018 - protein, 301 aa, Unknown
  Obtained from environmental sample
  DOMAIN (2)...(166): ATPase family associated with various cellular activities (AAA)
  misc_feature (1)..(301): Xaa is any amino acid
MCVFHWAACATKRKSGGTERLTWEPFPGKIIQSMCKAGTTNPVFLLDEIDKLSSDFRGDPASALLEVLDPEQNSTFTDHYLEVQYDLSKVMFLTTANSLHSIPYPLLDRMEIIEVPGYGENEKLSIAKQFLVPKELRENGLSSAKITFRDDTIKNIIRYWTMESGVRNLERETARCIRRIARDAVNKGYGKDKPVKEFNKIITPANLEKLLGKKKYKRDVVFREARVGVTYGLAWTETGGTILPVETIRYSGTGELVITGNLGDVMKESARIALSYLRSTGNKYNFLAKDLLKSDFISRPI

SEQ ID NO: 37019 - DNA, 1266 bp, Unknown
  Obtained from environmental sample
  misc_feature (1)..(1266): n is a, c, g, or t
ttggtcttggacgtcagcggcaacgagcgcgagcgctacaaagtgcccccaggcgccatcatccacgtcagcgatggcgaaaaggtggaacccaagacagccttggccgagtgggatccatacaatgactacctgataaacgaaaaggaaggcatagccgatttcaaagaattcgagctgaacatcagctaccaagaagaaaaagaccagatcacgggccgcttccgcaagcgcatcattgacgccattgacgacaagctgtacccccacatcaacatcaaaggcgacaaccacaaggttctccagcgctacaacatacctactggcgcctatctggaagttgaaaacgaccaagagcttatgcctggcgatgtccttgccaagatgccgcgccagcaggccaagactcttgacatcacgggcggcctgccgcgcgtgtccgagctgttcgaaggccgcaggccaaaagagccggcgatcatcagcaaggtgacgggcgtggtcaagtacggcaacagggtgcgcggcaaccaaaaggtcatagtcgagggactgaatggagagcgcgaggagtacttagtgccgcgcggcaagcagatacaggttcacgatggcgatgagatcagcgccggcgaanaactgacagaaggcgcagtgagcccacacgacatactagaaatacacggcgaanaggcccttcaagcgttcctgctcaacgaagtgcaggaagtgtaccgcgcacagggcgtgaccatcaacgacaagcacatagaaaccatcatccgccagatgatgcgctgggtgcaggtcaccgatgtcggcgacacgccgctcatagtcgaggaaaaggttgacaagcaccggttcaagatgataaacgaggacaccgtaaaggcgaacggggcgccggcaacctgcgagccgctgctgctggggatcaccaaggcggcgctcacgtccgagtcgttcatctccgcagcatcgttccaggagacggcccgcgttctcaccgaggccgcgctggaggggcgcatcgattacctgaggggcctcaaggaaaacgtcatactcggtcgcctgatacccgcgggcacaggtcttgccaagtaccgcaacatccacatagaggaaggccagtaccctgtgccagtcgagccggtggaagacgagacggacgacttcgacgacgagtacagccgcatggccgttcgcgtcgaagagttgcaggggcagggactgaccgaggctgatttcgaccagatttag

SEQ ID NO: 37020 - protein, 421 aa, Unknown
  Obtained from environmental sample
  DOMAIN (4)...(326): RNA polymerase Rpb1, domain 5
  misc_feature (1)..(421): Xaa is any amino acid
MVLDVSGNERERYKVPPGAIIHVSDGEKVEPKTALAEWDPYNDYLINEKEGIADFKEFELNISYQEEKDQITGRFRKRIIDAIDDKLYPHINIKGDNHKVLQRYNIPTGAYLEVENDQELMPGDVLAKMPRQQAKTLDITGGLPRVSELFEGRRPKEPAIISKVTGVVKYGNRVRGNQKVIVEGLNGEREEYLVPRGKQIQVHDGDEISAGEXLTEGAVSPHDILEIHGEXALQAFLLNEVQEVYRAQGVTINDKHIETIIRQMMRWVQVTDVGDTPLIVEEKVDKHRFKMINEDTVKANGAPATCEPLLLGITKAALTSESFISAASFQETARVLTEAALEGRIDYLRGLKENVILGRLIPAGTGLAKYRNIHIEEGQYPVPVEPVEDETDDFDDEYSRMAVRVEELQGQGLTEADFDQI

SEQ ID NO: 37021 - DNA, 1398 bp, Unknown
  Obtained from environmental sample
  misc_feature (1)..(1398): n is a, c, g, or t
ttgagatttattcttggataccgcctcttacgggatattcgaaaaggctggcgttataataatccgtctttggaagcgttagaactgataaaaattgaatatgaaggattaagcaaataccttgaaaccgacgaagacggactattacctgaaatatctattcttccacaatcaaagaaattaaaattatttatgttggtatttgacgaaatgaaaaaaaatctttgtatctcctctcgttatttatctcgcattgagcaggagaaatacaggtcgttgtccaaaaatgcccttaaagaaccttgggcgtttttacctgatgaaatactgactacaaccaattatttgacattaaagattgatgacaattggcatggaagacaaggtgaaataataagcgccggaccgcgatcaagaatcgtgcaattaatcaaacgagaacttttttggaacgaaaccggagttgattacagcaaatggaaaggagatgattatactgccattatagaaaatatgcttagatgggcagcgcaatatgggtttgtcatgacacaatcacttagttcttccatgacagggttctgccttaacagtaatactttagtatggcttttaatagcagataaaaaacctgaaaagaatgtaaataatttttttaggactctttatattcaaaccgcaaaatctttaacaaatggtaattacaaactttttgattatgaatcacatgaacatacagctcaggttgaatcacgtgaacgtgaaatacttgaggctcgtttccgttttggtgaaaaagataaagaatggtggaatactcagcctgaagctaacggaaaaacattacaacggctccctgttttatactgttctccaaccatggaattgggtattgatatttcttcgcttaataccgtatatatgcgtaatgttccccctacacctgcaaattacgctcaaaggggcgggcgagccggtcgttccgggcaggcggcattgattgttacatattgcacagcattaagccctcatgatcaatggttttttgccaataagagtgatatggtatacggaaaagtaagaacacctctctttgatcttgcaaataaagaacttattgttagtcatttacattcaatctggcttcaatctttgggtgttaatttaccgcaaggcatcaaagaaattcttgatatggaaaaagatagtcttccaattcgttctgaatatatagaattaatgaaaaataaagaagctattgaaaaatcaattaaccacgcaaaaaacatttttaatgtattacgcaattcaataaaaattgttccttcatggcttgatgataagttaatagaaagcagagtattcacatatttttatatctcgatctcggccatctga

SEQ ID NO: 37022 - protein, 465 aa, Unknown
  Obtained from environmental sample
  DOMAIN (234)...(329): Helicase conserved C-terminal domain
  misc_feature (1)..(465): Xaa is any amino acid
MRFILGYRLLRDIRKGWRYNNPSLEALELIKIEYEGLSKYLETDEDGLLPEISILPQSKKLKLFMLVFDEMKKNLCISSRYLSRIEQEKYRSLSKNALKEPWAFLPDEILTTTNYLTLKIDDNWHGRQGEIISAGPRSRIVQLIKRELFWNETGVDYSKWKGDDYTAIIENMLRWAAQYGFVMTQSLSSSMTGFCLNSNTLVWLLIADKKPEKNVNNFFRTLYIQTAKSLTNGNYKLFDYESHEHTAQVESREREILEARFRFGEKDKEWWNTQPEANGKTLQRLPVLYCSPTMELGIDISSLNTVYMRNVPPTPANYAQRGGRAGRSGQAALIVTYCTALSPHDQWFFANKSDMVYGKVRTPLFDLANKELIVSHLHSIWLQSLGVNLPQGIKEILDMEKDSLPIRSEYIELMKNKEAIEKSINHAKNIFNVLRNSIKIVPSWLDDKLIESRVFTYFYISISAI

SEQ ID NO: 37023 - DNA, 777 bp, Unknown
  Obtained from environmental sample
  misc_feature (1)..(777): n is a, c, g, or t
ttggggaggtacaaaatgaaaagaaacatcataaaaagcctcggtgcttggaaaaattccaatatgagaaagcctcttattctctatggagctaggcaggtaggcaaaacttggttgctcaaagagtttggaaaacgtgaatacaagcaaaccgtatatctgaattttgacgaagattcggaactctgtacttattttgaaaaaaatttagataccgagcggataataggtgctttggaaagccattttagcgttaaaataaagccagaagacaccctgctcatatttgacgaattgcaagaatgccagagggcaaaggattctttgaagtattttaacgaaaacgctccacaataccatattgccgctgcaggcagttttttgggcgtagccagcggaaaattccctgttgggcaagtggacagatttacgctttacccgatgtctttttatgaatttttagaggcaacggaacatagcatcttattggaaaacataaataaactgaaccctgcactggaaaatatgcacaatttgctaaccgatatgttgaaaacatatctttatgtaggcggaatgcctgccgctgtgaatgtttttgtgcaaacaaagaatttggcaaacgtaagggaaactcaaaatatgatactctccgattacaaaaacgatttttccaaacatatagctccaaacgatattccaaaagttagaatgctctgggattcaatacctactcatttggcacgggaaaagaaaaaatttattacaaagatataa

SEQ ID NO: 37024 - protein, 258 aa, Unknown
  Obtained from environmental sample
  misc_feature (1)..(258): Xaa is any amino acid
MGRYKMKRNIIKSLGAWKNSNMRKPLILYGARQVGKTWLLKEFGKREYKQTVYLNFDEDSELCTYFEKNLDTERIIGALESHFSVKIKPEDTLLIFDELQECQRAKDSLKYFNENAPQYHIAAAGSFLGVASGKFPVGQVDRFTLYPMSFYEFLEATEHSILLENINKLNPALENMHNLLTDMLKTYLYVGGMPAAVNVFVQTKNLANVRETQNMILSDYKNDFSKHIAPNDIPKVRMLWDSIPTHLAREKKKFITKI

SEQ ID NO: 37025 - DNA, 645 bp, Unknown
  Obtained from environmental sample
  misc_feature (1)..(645): n is a, c, g, or t
atgaggagcaatgggttaagcgagttgcgcattgttcgcaaatcgcagccgttgcccagaaagtgctataacacggctcactccagcgcggaaattttggataaggcaaaacttttcccaaccttaaaagaagctatagcggattgctcttatacaatagcttttagccgccgccaattcgacaccattgtcccgcatataggtctgccagaattaccagctatttgcaaagataaaaatggcatagtcgctttgatttttgggcgcgagtctcgcgggcttgcctttgaagagtttgagatgtgcgccgttcagtgcgaaattcccgttgcggggcttatgagtttgaatttatcccacgcggttagcgttgccagctatgagctttgccgtgctggtttgctgggcgagggtttggcgtttagaaacaagctgccaataacgcacagaaaagctgcgacaacggagcaatttgagagcatagaaaacttcattttggaaaatttaacggatagatacaaaaattatccgtggataaacgcttccatacgcacctggctccaaaaactgaatcctagccaagcagaattatccgctttgtttggcatgctgagagcgttggctaagaaaaacgctagggactga

SEQ ID NO: 37026 - protein, 214 aa, Unknown
  Obtained from environmental sample
  DOMAIN (5)...(127): SpoU rRNA Methylase family
  misc_feature (1)..(214): Xaa is any amino acid
MRSNGLSELRIVRKSQPLPRKCYNTAHSSAEILDKAKLFPTLKEAIADCSYTIAFSRRQFDTIVPHIGLPELPAICKDKNGIVALIFGRESRGLAFEEFEMCAVQCEIPVAGLMSLNLSHAVSVASYELCRAGLLGEGLAFRNKLPITHRKAATTEQFESIENFILENLTDRYKNYPWINASIRTWLQKLNPSQAELSALFGMLRALAKKNARD

SEQ ID NO: 37027 - DNA, 786 bp, Unknown
  Obtained from environmental sample
  misc_feature (1)..(786): n is a, c, g, or t
atgacagatcggccgagattcggttcgaatctggggcagccaaaggatcgccattttatgatccgccttcaggataagggaaaagaaacttccgccgaaggcgaaactgccgccgcagagggcggggctgccgaagcccccggcgagaggatcaccagggttctggaaaattatttcggaaccggcgaggtagtggtactccgttccgattatgtcggctcgcgtttctccaaaaacctcaccgatcaggcggggattctgatagcctgtaccctgctgttggtattgatttacgcgtccatccggtttaagccgcaatacgccataggcgcggtgctaggcattatccatgactgccttgttataatatcctttgtcgtctggacaagaatggaattcaacaccacaaccatcgccgccattctcacgatactcggttattcgatcaacaacaccattgttattttcgacaggatgagggagaaccgccgcctataccccgatgatgtttttgtaaccgtgcttaaccgttctttgtcggaaacgctgagcagaacaattataacaacattaacaacaatgctggcggtattgtcactgttcatctttacaaccggttccatgaaggactttgccctggccctgcttgtcggccttgtttcaggcgtatacacgacaactttcatcgccaccggctttgtgtatttctgggacaaagaaaaaacaaaacgggccaagaagaaagcccttgctccgcaagttaaaggcgcgcttgcaaaagcgtaa

SEQ ID NO: 37028 - protein, 261 aa, Unknown
  Obtained from environmental sample
  DOMAIN (54)...(240): Protein export membrane protein
  misc_feature (1)..(261): Xaa is any amino acid
MTDRPRFGSNLGQPKDRHFMIRLQDKGKETSAEGETAAAEGGAAEAPGERITRVLENYFGTGEVVVLRSDYVGSRFSKNLTDQAGILIACTLLLVLIYASIRFKPQYAIGAVLGIIHDCLVIISFVVWTRMEFNTTTIAAILTILGYSINNTIVIFDRMRENRRLYPDDVFVTVLNRSLSETLSRTIITTLTTMLAVLSLFIFTTGSMKDFALALLVGLVSGVYTTTFIATGFVYFWDKEKTKRAKKKALAPQVKGALAKA

SEQ ID NO: 37029 - DNA, 633 bp, Unknown
  Obtained from environmental sample
  misc_feature (1)..(633): n is a, c, g, or t
atgaaaaatttttgtaagttaatcacggttcttattttatttgccgccttttccccgctttttgcccttgaaaccgatccggacgttgaattcagcattcgttttcttgaccgtaaaatttactatgttttatccgaccctgtttttatacagatcacaattaacaataaatcaccttccacataccgttttaaactcgcggacgaaagggtgttttcccttgattttgacatcaggactatgacaaaccgccgtcttcaggaggcggacaaccttatcaggaaacggacagaatatcagcagatttatttccgcgaaatatctattgaaagcggagagtccttttcttttgtggaaaatctgcgcgattacgtaaagataaaccaagccggctcatacagaataaaagcgcttgtttatcccgagctttacaaggcgtcaaactttgtttttgaatcaaattatctggcgcttaacttacgcccgtccgccattcccgggcctgacggcattcctcttgaaatggacgtagacacaggcgctgttcttgtctgccagcctattccgccggacgaagttgtatcatacatgattaccgcgcgccagcagtcccaatggaaagctcggcgataa

SEQ ID NO: 37030 - protein, 210 aa, Unknown
  Obtained from environmental sample
  SIGNAL (1)...(22)
  misc_feature (1)..(210): Xaa is any amino acid
MKNFCKLITVLILFAAFSPLFALETDPDVEFSIRFLDRKIYYVLSDPVFIQITINNKSPSTYRFKLADERVFSLDFDIRTMTNRRLQEADNLIRKRTEYQQIYFREISIESGESFSFVENLRDYVKINQAGSYRIKALVYPELYKASNFVFESNYLALNLRPSAIPGPDGIPLEMDVDTGAVLVCQPIPPDEVVSYMITARQQSQWKARR

SEQ ID NO: 37031 - DNA, 1233 bp, Unknown
  Obtained from environmental sample
  misc_feature (1)..(1233): n is a, c, g, or t
atgaccaaacaaagctttacaaaaacggcttatcagaaccttgacgattttgttttcgggaaggccctgtatcctgtcgcgctgaaaaacggcatggcaatcgggggaggcgttgtgtatccggagataaattttacgctgcccacgatgtccatagaaaaagataccatgagcgaagtaatcgcgaactaccgcgagataattgccggaatatgcgacagggcaaaagaattgcacattccaggttttgtagcggaaatagaaactctgccgcctatgacgttcaaccctgaatggggaattgaagtatgcaaagtcgtagtagatataataaaagagcacgaagcaaagcacggcataaaaggggcggtaaggataacgcctaacgacatccgcgaaggcaaagatctggagcatatgtggcgcggcaggcattgggaagacatactgcgtacttttgagggctgcgcaaaggcgggcgcggatttccttgcgatagaatcaataggcgggaaggaagtgcatgacgacgcgattatgtactgcgacatagcaaaatcaattttcgcgctgtccgttcttggctgcgccgatatgaacaggctctggacagaaatagtgcgcatcgcgggtgaaacaaatacaatcgctagtggcgatacggcttgcgggtttggcaatacggcgatggttctcgcggacagaaactacattcccaaagtttttgcggcgacagtcagggtcgtgacggcggtaagaagccttgtcgcgcttgagtgcggcgcgaagggcccccacaaagactgcggctacgagggcgtttatataaaggcaataacaggaacgcctatttcaatggaaggcagaacagcggcctgcgcccatctttcgccggtcggaaacatagccgcctgtgtcgcggatttgtggagcaacgagtctatacaaaacatcaagctcttgggaggcatggccccgacagtttctttcgagcagttgggctacgattgcaggttgatgaacgaggcggcagccagaggaaaacagcaggcgcttttgctccgcgatttgcacgccgacagtgacagcaggcttgatccacaggcttatgtactgcgccccgatgtagtgcttgagatttccaaggaacttgtcaaggttgacggctattatccaaggtcaaagaaagccgcaagccttgcgttggcgtatattaaaaaagnggtacgataa

SEQ ID NO: 37032 - protein, 410 aa, Unknown
  Obtained from environmental sample
  misc_feature (1)..(410): Xaa is any amino acid
MTKQSFTKTAYQNLDDFVFGKALYPVALKNGMAIGGGVVYPEINFTLPTMSIEKDTMSEVIANYREIIAGICDRAKELHIPGFVAEIETLPPMTFNPEWGIEVCKVVVDIIKEHEAKHGIKGAVRITPNDIREGKDLEHMWRGRHWEDILRTFEGCAKAGADFLAIESIGGKEVHDDAIMYCDIAKSIFALSVLGCADMNRLWTEIVRIAGETNTIASGDTACGFGNTAMVLADRNYIPKVFAATVRVVTAVRSLVALECGAKGPHKDCGYEGVYIKAITGTPISMEGRTAACAHLSPVGNIAACVADLWSNESIQNIKLLGGMAPTVSFEQLGYDCRLMNEAAARGKQQALLLRDLHADSDSRLDPQAYVLRPDVVLEISKELVKVDGYYPRSKKAASLALAYIKKXVR

SEQ ID NO: 37033 - DNA, 813 bp, Unknown
  Obtained from environmental sample
  misc_feature (1)..(813): n is a, c, g, or t
atgaccgccgcttccgtagcggtaggggcggcccttgtcggcattatcgcttatatactaatccaagccttgggcatatcggcggcggccgatcatgcagatgccgcaaagattgagtttcttagaatacgaaacctcgttccaatgattgtgtctaccgcatggacagtggtcgtgtctctggttattagtctgccagtcggggttatgaccgccgtttatttgcatgagtacgcgttaaaatcttccataagccgctttcttgggcttgccattgacaccctagcaggaattccttctatcatctatggacttttcggacttttatttttctgccgctttatgaatctgggacaatccattatcgcgggcggacttaccttaagcattatgattcttccggtaattatcagaaccacggaagaggcccttaaaacagtgcccgtttctttccgcgaaggctcgctctccctgggtgcgacaaaattccagacaatactccatgtggttctgcccccagccctgcccggcatccttaccgcggcgatccttgccgtgggccgcgtggtcggcgaatccgccccggttctccttaccgtagggcttgcccgcaaccttcccaaaacgatttttgagcccggccgcaccctgacaatacatctttattaccttaccaaagaggctattgaagctgacgattttgcccaggcatttaccgccgccgcggtgttgattgttgtggtattatttatcaataccgtagtaaagataataggcaggagctttggcggaagcgcttcagtggaggaataa

SEQ ID NO: 37034 - protein, 270 aa, Unknown
  Obtained from environmental sample
  SIGNAL (1)...(28)
  DOMAIN (46)...(264): Binding-protein-dependent transport system inner membrane component
  misc_feature (1)..(270): Xaa is any amino acid
MTAASVAVGAALVGIIAYILIQALGISAAADHADAAKIEFLRIRNLVPMIVSTAWTVVVSLVISLPVGVMTAVYLHEYALKSSISRFLGLAIDTLAGIPSIIYGLFGLLFFCRFMNLGQSIIAGGLTLSIMILPVIIRTTEEALKTVPVSFREGSLSLGATKFQTILHVVLPPALPGILTAAILAVGRVVGESAPVLLTVGLARNLPKTIFEPGRTLTIHLYYLTKEAIEADDFAQAFTAAAVLIVVVLFINTVVKIIGRSFGGSASVEE

SEQ ID NO: 37035 - DNA, 423 bp, Unknown
  Obtained from environmental sample
  misc_feature (1)..(423): n is a, c, g, or t
atgggcggagaaaaactgctggtacgcaatcttaacctcttttacggcgattttcatgcgcttaaaaatatttttttcgatttaagcaataacgaggccgccgcccttatcggcccgtccggctgcggaaaatcaacttttatccgcgttattaacaggatgaacgatcttataccttcctgccggattaccggggatatcatacttgacggagaggacatctacggccctatggacgtgagcgcgttgagaacgcggatagggatggtatttcaaaaaccgaatccctttaacatgagcatctttgacaatgtggcttacggcaggcgtatgcagggcatgaaagataaaaagaaactttccgaactggtggaacagtctttacgaaaagcggctttatgggacgaggtaaggaccggctaa

SEQ ID NO: 37036 - protein, 140 aa, Unknown
  Obtained from environmental sample
  DOMAIN (31)...(140): ABC transporter
  misc_feature (1)..(140): Xaa is any amino acid
MGGEKLLVRNLNLFYGDFHALKNIFFDLSNNEAAALIGPSGCGKSTFIRVINRMNDLIPSCRITGDIILDGEDIYGPMDVSALRTRIGMVFQKPNPFNMSIFDNVAYGRRMQGMKDKKKLSELVEQSLRKAALWDEVRTG

SEQ ID NO: 37037 - DNA, 411 bp, Unknown
  Obtained from environmental sample
  misc_feature (1)..(411): n is a, c, g, or t
ttgggagccgatgattatgtggttaaaccgtacagcccccgcatactggcggccaggatacgcgccgctctcaggcggaatgaaaacgctaaaacccagagcgaaggttcacaaaataaaacactccggtatggtaaaatcaacctggacattgaacggcatacagttcatctggataaaaaacccctcgatcttttccccaccgaattcgcgctacttgtacagtttatgagcaaccccgatattgttttttcccgccaaaggcttataaccgccatacgcggaaacgattatcccgtaacggatcgttccattgacgttcagataatgggattaagaaaaaaactgggagactcaggcgatatgatagaaaccatccggggcatcggctaccggttcaaaacggaatga

SEQ ID NO: 37038 - protein, 136 aa, Unknown
  Obtained from environmental sample
  DOMAIN (60)...(133): Transcriptional regulatory protein, C terminal
  misc_feature (1)..(136): Xaa is any amino acid
MGADDYVVKPYSPRILAARIRAALRRNENAKTQSEGSQNKTLRYGKINLDIERHTVHLDKKPLDLFPTEFALLVQFMSNPDIVFSRQRLITAIRGNDYPVTDRSIDVQIMGLRKKLGDSGDMIETIRGIGYRFKTE

SEQ ID NO: 37039 - DNA, 774 bp, Unknown
  Obtained from environmental sample
  misc_feature (1)..(774): n is a, c, g, or t
ttgattgagtgtaatcttaaaaaaaaagggtctaaagcctatacgtaccttgaccacgcctattgtatcaccacgcataaatcacagggatcgagttatgacaaggccattcttgacggtgatacgtccgatttacgcatgaactacaatgccttttatgttcaggctacccgcgctaaattagacgtagaaatcgtaaccgacaacgaggagaagctcttcgaactggcgcaggagaagcagaataaactttctacattagattttgaggatattgacgatataattaacgccaaaattgatacaaatatccgcaatatggccgaaatgacccaaataagcgaagaattagacaaagaagaagcagattactgggatagttgttgccaagaggaattaacacaagataacttgatagaaaagattaactatttgcaagaatactggcgtaaagagcaaaagatagagattaaaccacaaaaaaccatgtgtgaatgggttgaggccgacaaattacacttcgtcaaagggctaacgccgccaattattagggtattgcgtaacgtgcatgatgacgatgttgtaacaatatccaaaataaccaataatgacggtgaaaaaaaattcttgtgtacgcatacttataacggtaaaaccgtcaacgatgaacaagagacctttcaacaggcgtgttcacttgccgtatcttacggtattcgcgacacaagggagaagatcatggagaaggaaaaaacattaagttttggaggataa

SEQ ID NO: 37040 - protein, 257 aa, Unknown
  Obtained from environmental sample
  misc_feature (1)..(257): Xaa is any amino acid
MIECNLKKKGSKAYTYLDHAYCITTHKSQGSSYDKAILDGDTSDLRMNYNAFYVQATRAKLDVEIVTDNEEKLFELAQEKQNKLSTLDFEDIDDIINAKIDTNIRNMAEMTQISEELDKEEADYWDSCCQEELTQDNLIEKINYLQEYWRKEQKIEIKPQKTMCEWVEADKLHFVKGLTPPIIRVLRNVHDDDVVTISKITNNDGEKKFLCTHTYNGKTVNDEQETFQQACSLAVSYGIRDTREKIMEKEKTLSFGG

SEQ ID NO: 37041 - DNA, 849 bp, Unknown
  Obtained from environmental sample
  misc_feature (1)..(849): n is a, c, g, or t
atgcccgttgcggcccgcgaagcctccgtttacaccgccgtgacccttgccgagtactacaggcagatgggcctgaatgtcctactgctggcggactcaacaagccgctgggcgcaggctatgcgtgaaatgtcaggccgccttgaggaaatacccggcgaggaagccttccccgcgtaccttgaatcaacgattgccagcttctatgaaagggcgggtatcgtcaggctcaaagacggcaatttaggctcggtcaccattggcggcacggtcagcccggcgggcggtaactttgaggaaccggtaacccaggccacgctgaaagtcgtcggggccttccacggcctgtcccgtgaacgttctgatgcccgcaaattccccgctatccatccgatggactcatggtcaaagtacaagggcatcattagtgaagaaaaagtcggttacgcccacggatttatgcgccgcggcaccgaagtcgagcagatgatgaaggttgtcggcgaagaaggcaccagcatagaagactatgtagtctacctgaaaggcgaccttatcgactccgtgtacttccagcaaaattcgtttgacgaggttgacgctgcggtcaagccggaacggcagatatacacttttaacaaactgctggcgatcctcgcttcgcagttcagtttcccggataaaaacgaggcccgcgtctggttcaacaggctcaggcagaaattcctggactacaatggttcgcattggcaggacgcccgctttaaggaactggagaaggaaatcgaagacgcggtgaaaaagcagtcaaagggcctggacaaggccgctgagcatattttggcatag

SEQ ID NO: 37042 - protein, 282 aa, Unknown
  Obtained from environmental sample
  DOMAIN (1)...(136): ATP synthase alpha/beta family, nucleotide-binding domain
  misc_feature (1)..(282): Xaa is any amino acid
MPVAAREASVYTAVTLAEYYRQMGLNVLLLADSTSRWAQAMREMSGRLEEIPGEEAFPAYLESTIASFYERAGIVRLKDGNLGSVTIGGTVSPAGGNFEEPVTQATLKVVGAFHGLSRERSDARKFPAIHPMDSWSKYKGIISEEKVGYAHGFMRRGTEVEQMMKVVGEEGTSIEDYVVYLKGDLIDSVYFQQNSFDEVDAAVKPERQIYTFNKLLAILASQFSFPDKNEARVWFNRLRQKFLDYNGSHWQDARFKELEKEIEDAVKKQSKGLDKAAEHILA

SEQ ID NO: 37043 - DNA, 417 bp, Unknown
  Obtained from environmental sample
  misc_feature (1)..(417): n is a, c, g, or t
ttgacttccaaaacggcaatgcgtaatttatatgttgtggagaaaaaaataaatgttcttcttaccgccggaaacgatgaagataaaaaaataatttttgcggccattacaatgcaggatgacatacgaataatcggcgttgaaaaagacgaaaccggcgcaataataaagtcggaacagctaaaacccgacattttaatcatgaatttacagccgccgggaattgacggaacagtgcttgctcccattatacgcagaaaatcgcctgacacgtccattatcatgatgtgcgacagggatgaaaataattaccccggcacggcgctgaaagcgggaaattcaggttttttgctgagagaagtagatatgaacaatttacttttccatgtccagaaccgtaaatatgggagggtataa

SEQ ID NO: 37044 - protein, 138 aa, Unknown
  Obtained from environmental sample
  DOMAIN (17)...(131): Response regulator receiver domain
  misc_feature (1)..(138): Xaa is any amino acid
MTSKTAMRNLYVVEKKINVLLTAGNDEDKKIIFAAITMQDDIRIIGVEKDETGAIIKSEQLKPDILIMNLQPPGIDGTVLAPIIRRKSPDTSIIMMCDRDENNYPGTALKAGNSGFLLREVDMNNLLFHVQNRKYGRV

SEQ ID NO: 37045 - DNA, 855 bp, Unknown
  Obtained from environmental sample
  misc_feature (1)..(855): n is a, c, g, or t
ttgcgtgacggctacaccgctcccaaaattctagggcttaaaaacacaaaacctgcggcttccgcgaaactgcggcatattcttctgcctcacaattacatcaactttttgtgnaccgangaatattgggcggaatacggcgacgcgtccggaaccgctctttttaacgttaacgaacgcaaatggtcttctgccgtttgcaggctaatttcccccgatttggaaaaatatctgccgccgcttacaccttccgacaaaacagccggaaaggtaagcaaggccgcggctgaattatacggcattaacgaaggagtattggtttcctccggcggcggcgacaatatgatgagcgcgattggcacaggcgccgtacgcgacggttttcttacaatgagccttggcacttcggggacgcttttcggtttttcaaaaaagccggtaattgatcctacgggaaaccttgccgctttctgttcatcttcaggcggatggcttccgctgttgtgtaccatgaactgtaccgtcgcaagcgaagaattccgcaaactgatggagttagacgtaaaggcgtttgacgcggaagcggaaaaatccccaatcggcgcggacggcgttgtaatcctgcccttctttaacggagagcggactcccaatctgcccaacggcagggcgagcgtaaacggcattaccgccgcaaactttaagcgcgaaaatttagcgcgcgccgcgcttgagtccgctattttcgggatgaggatcgggcttgacggatttaaagcgcttgggtttaagccgaaagaaataaggcttacaggcggcggcgcaaaaagcccgcttggcagaacatgcggctaa

SEQ ID NO: 37046 - protein, 284 aa, Unknown
  Obtained from environmental sample
  DOMAIN (1)...(120): FGGY family of carbohydrate kinases, N-terminal domain
  misc_feature (1)..(284): Xaa is any amino acid
MRDGYTAPKILGLKNTKPAASAKLRHILLPHNYINFLXTXEYWAEYGDASGTALFNVNERKWSSAVCRLISPDLEKYLPPLTPSDKTAGKVSKAAAELYGINEGVLVSSGGGDNMMSAIGTGAVRDGFLTMSLGTSGTLFGFSKKPVIDPTGNLAAFCSSSGGWLPLLCTMNCTVASEEFRKLMELDVKAFDAEAEKSPIGADGVVILPFFNGERTPNLPNGRASVNGITAANFKRENLARAALESAIFGMRIGLDGFKALGFKPKEIRLTGGGAKSPLGRTCG

SEQ ID NO: 37047 - DNA, 636 bp, Unknown
  Obtained from environmental sample
  misc_feature (1)..(636): n is a, c, g, or t
ttgacgaatatgccaaaaatatatgcagcaaaattttcagatggaactcattggttgggtgataattggcccgattgcgaaaagcgtgttgctgggaaacaaggcgttaaatataagtcctttataaaaatggaggatgccaaagcctggattaccgggaaaaaggtggtgaaaaaagggcttcgcatatacatagatggttcttttatgcctacgagcgaatatgcgggctggtcttggattgcggttgagaacggagttcaaatagcttgcgagttcggcaaaactccacacccagctttgagcaggaacatagacggggagcttcacgctgcttggaaggctatggaatatttggcaaagaataaacgtaagggcactatttgctacgattatcaaggcgttgagagctgggctattggtgattggaaggcaaacagtgcggtttcaataatatatatgaacagaattgcagagataaaagagtgggcaagttttgaaagggtagcagggcacagcggagatgaatggaacgataaagcggacgagttagcaaagggtgctttaaaaaatccttctgtagagaagaaaacaatagaaaagaaaacggtagaaaagaaaaagaaaaaatcttaa

SEQ ID NO: 37048 - protein, 211 aa, Unknown
  Obtained from environmental sample
  misc_feature (1)..(211): Xaa is any amino acid
MTNMPKIYAAKFSDGTHWLGDNWPDCEKRVAGKQGVKYKSFIKMEDAKAWITGKKVVKKGLRIYIDGSFMPTSEYAGWSWIAVENGVQIACEFGKTPHPALSRNIDGELHAAWKAMEYLAKNKRKGTICYDYQGVESWAIGDWKANSAVSIIYMNRIAEIKEWASFERVAGHSGDEWNDKADELAKGALKNPSVEKKTIEKKTVEKKKKKS

SEQ ID NO: 37049 - DNA, 699 bp, Unknown
  Obtained from environmental sample
  misc_feature (1)..(699): n is a, c, g, or t
gtggtgccgatgaaacacggtaaaaagtacaatgccgtatacgagaaggttgataagctgaaagagtacggcgccattgaggcgcttgactttttgaaagccaattcgacggtgaagtttgacgagacggtggagatagccttccgcctcggcgttgatccgcgtaagagcgaccaggccgttcgcggcgccgccgtgctccctcacggccttggcaagagcgtgcgcgtccttgtcttcgcgcagggcgagaaagaggccgaagccaaagaggccggcgccgattacgtcggcggtgaagatttggccgacaaaataaaagacggctggttagagtttgacgccgtagtcgccacgccggacatgatgaaggtggttggaaaactcggtaagatattaggaacgagaggcttgatgcccaaccccaaagtaggaaccgttacggcggacataggcaaagccgttcgcgagttgaagaagggcaaagtggagttccgcgttgaaaaaggcgcgataatccacgcccctttaggcaagttgtcgttcgacagccaaaaactctttgagaacgcccacgcgttaatggacgcggtagtcaaagccaagcctactaccgctaaggggcagtacctgaagaaggtttccgtctccagtacgatgggccaagggcttaaaattaatatgaatgatttgaagtag

SEQ ID NO: 37050 - protein, 232 aa, Unknown
  Obtained from environmental sample
  DOMAIN (17)...(223): Ribosomal protein L1p/L10e family
  misc_feature (1)..(232): Xaa is any amino acid
MVPMKHGKKYNAVYEKVDKLKEYGAIEALDFLKANSTVKFDETVEIAFRLGVDPRKSDQAVRGAAVLPHGLGKSVRVLVFAQGEKEAEAKEAGADYVGGEDLADKIKDGWLEFDAVVATPDMMKVVGKLGKILGTRGLMPNPKVGTVTADIGKAVRELKKGKVEFRVEKGAIIHAPLGKLSFDSQKLFENAHALMDAVVKAKPTTAKGQYLKKVSVSSTMGQGLKINMNDLK

SEQ ID NO: 37051 - DNA, 423 bp, Unknown
  Obtained from environmental sample
  misc_feature (1)..(423): n is a, c, g, or t
gtggctaagaaagttgtgggtcaggtaaagttgcagatcacgggcggggcggcgacgccggcccctccggtcggtccggcgctgggccagcagggcgtgaacatcatggagttctgcaaggcgttcaacgccaagaccaaggactctcagggtatgacgatcccggtggtcattacggtctactccgacaagtcgttcaccttcatcaccaagacgcctccggcggcggtgctgattatgaaggagctcggaaaggataagggttcgggcgttccgaacaaggagaaaatcggcacgcttaccaaagcgcagctgaaaaagatcgccgagatgaagttggccgatctgaacgccgcgagcgttgaggccgcgatgaatatcattgccggaaccgcccgcagcatgggcgtcaatgtagagtaa

SEQ ID NO: 37052 - protein, 140 aa, Unknown
  Obtained from environmental sample
  DOMAIN (71)...(139): Ribosomal protein L11, RNA binding domain
  misc_feature (1)..(140): Xaa is any amino acid
MAKKVVGQVKLQITGGAATPAPPVGPALGQQGVNIMEFCKAFNAKTKDSQGMTIPVVITVYSDKSFTFITKTPPAAVLIMKELGKDKGSGVPNKEKIGTLTKAQLKKIAEMKLADLNAASVEAAMNIIAGTARSMGVNVE

SEQ ID NO: 37053 - DNA, 1176 bp, Unknown
  Obtained from environmental sample
  misc_feature (1)..(1176): n is a, c, g, or t
gtggcaatttcggcaagccaattctgcaccttggccatcaaggccgatgggagcctttggatatggggcgatgatgacgcttggaatatgcccgaaatggccgaggactgccggaacgatagaaacgcccctattcaggtgggcgcagacaaaaactgggcggcagtggcggcggatggagaccacgccgttgccatcagggccgacggcagcctttgggcatgggggaacaatagctgcggccaattcggcgatggaacaaagacatcccagagctcccctgtccgcgttggctcggacagggactggaaggcgatttcggctggtagcggatacaccgttgccatcagggccgacggcagcctttgggcatggggctccaattaccgcggccagcttggcgacggcacaaacacaggcatattcctgctcgtcaacaagaactcggacaaggcgcggaaggcggtttcggctggcattgaccacatcgtggccgccagcgccgaaatgctagaacccatcgtagtgggcgatgacattgacaagggcaagaattggagagaggtttggggaagcggtgactacgcgaccatcacgaccgaaaaatccatccctgtccaagtgggcaaggacagtgactgggcggcggtttcggctggcctttcgcacacacttgccataaaggccgatggcagcctttgggcatggggggacaattattacggccaactcggcgatggcaccgatacaagcaggaacactccagtccaagttggtaattcaaaggactgggcgaccgtgtcggcaagcatgtggcacacgatggccatcaagaacgatggcagcctttgggcttggggaagcaatgaatacggccagctcggtgacggcacaactacaatcagatacgttccagttcaagtgggtactgcgaaagattgggctgctgtctcgacagggtatatctacacgcttgccatcaagaacgatggcagcctttgggcttggggggccaatagttttggccagcacggcgatggcaccactacaggcaaaaatgcccctgccagggtgggtacggcaagcaactgggttgctgtgtcaactagccatggccacacgcttgccgtcaagaacgatggcagccttgggcttgggataactcggcccatctga

SEQ ID NO: 37054 - protein, 391 aa, Unknown
  Obtained from environmental sample
  DOMAIN (230)...(277): Regulator of chromosome condensation (RCC1)
  misc_feature (1)..(391): Xaa is any amino acid
MAISASQFCTLAIKADGSLWIWGDDDAWNMPEMAEDCRNDRNAPIQVGADKNWAAVAADGDHAVAIRADGSLWAWGNNSCGQFGDGTKTSQSSPVRVGSDRDWKAISAGSGYTVAIRADGSLWAWGSNYRGQLGDGTNTGIFLLVNKNSDKARKAVSAGIDHIVAASAEMLEPIVVGDDIDKGKNWREVWGSGDYATITTEKSIPVQVGKDSDWAAVSAGLSHTLAIKADGSLWAWGDNYYGQLGDGTDTSRNTPVQVGNSKDWATVSASMWHTMAIKNDGSLWAWGSNEYGQLGDGTTTIRYVPVQVGTAKDWAAVSTGYIYTLAIKNDGSLWAWGANSFGQHGDGTTTGKNAPARVGTASNWVAVSTSHGHTLAVKNDGSLGLGITRPI

SEQ ID NO: 37055 - DNA, 402 bp, Unknown
  Obtained from environmental sample
  misc_feature (1)..(402): n is a, c, g, or t
ttgttcacagcacgtttttgggtgttttgcaaatttttggtttatgcaggcgcggttatgatgctcatagtgtttgtgattatggtgcttaacggagcaagggaaacaatgctgccgagaatggataggcttggtgctagttctgtttttgcggttttgtgcggcgggttgcttttgctctctgctgttttcaaagcgaacttgcaagaaaacccagaagctgttaccggaagcgttgctatgatttctgaacacctctntgatacaagttatagaatttctatgaatatgcctggcgggtatttcattttgtttgagattgttggttttattttgctttctgcaatggttggtgctgtgtttttggtgaaaagaaaaaaattaacaggaaaggatgaataa

SEQ ID NO: 37056 - protein, 133 aa, Unknown
  Obtained from environmental sample
  misc_feature (1)..(133): Xaa is any amino acid
MFTARFWVFCKFLVYAGAVMMLIVFVIMVLNGARETMLPRMDRLGASSVFAVLCGGLLLLSAVFKANLQENPEAVTGSVAMISEHLXDTSYRISMNMPGGYFILFEIVGFILLSAMVGAVFLVKRKKLTGKDE

SEQ ID NO: 37057 - DNA, 459 bp, Unknown
  Obtained from environmental sample
  misc_feature (1)..(459): n is a, c, g, or t
atgccgcgtgtggttaaacatcccgaaaaaacgctttggataagctcttatgtacccgaagctattcgcggtttatacaccacgctcaggcattttttgcgcgggctttttaaatacgaaactctgcccaccattccataccccaccataaaaccgccaatcccagaaaactataggggcaagcatcgtctgctaaaaagaacagacggttccacccgttgcgttgcctgtggaatgtgtgccgccgcttgccctgcccgttgcataaaggtggatgcaggtgaatccccaaacggactggtggaaaaaaaggcggttcgctttgaggtggattacttggcatgcgtgttctgcggtctttgcgtggaagcgtgcccagttgacgcaataaggatggacaccggggaaacttcttttgtgcatagctcgcgggagaagtttgtggtgaaatacgtttaa

SEQ ID NO: 37058 - protein, 152 aa, Unknown
  Obtained from environmental sample
  DOMAIN (67)...(90): 4Fe-4S binding domain
  misc_feature (1)..(152): Xaa is any amino acid
MPRVVKHPEKTLWISSYVPEAIRGLYTTLRHFLRGLFKYETLPTIPYPTIKPPIPENYRGKHRLLKRTDGSTRCVACGMCAAACPARCIKVDAGESPNGLVEKKAVRFEVDYLACVFCGLCVEACPVDAIRMDTGETSFVHSSREKFVVKYV

SEQ ID NO: 37059 - DNA, 1296 bp, Unknown
  Obtained from environmental sample
  misc_feature (1)..(1296): n is a, c, g, or t
atgaaggacatgaaagaaaaaccggaaaattttactgacggtatccataatgacgactacgaagacgaatatcttcaaacgcgccttaacgcttcacggcttgtaaatattacgggacgggaaacggagtctctgaacggcaagtggaatttcggagttgatctttacgatacctgccgccgttcccattggtggagggaagagcgtttcggcgcggacggacgtgagcttccggttgattacgactgggaaagctgggaatatattactgttccttcctgctggaatctgcaaaaagacgagctttgttattatgagggctgcggcgtctacacaagaactttccggtattttccgcgggcacagggcgaacgtttgctgctccggtttgagggagccgcatacaggacaacggtttttctgaacggaactatagtcggaacgcatgacggtgcgtccaccccgtttaacgccgatattacggacattgtcagaaaagataaccggattgtcgtgtcagttgacgcgagcagaagtcctgtccgtgtcnccatggataatacggactggtttaactacggcggcatataccgcgacatttttcttgtccgccttcctcccatatatatcagagactggtttgtgcggctcgcgcccgacggaaatttctcgacggttttggctgatgtttatttggagggaacggacgtggcgccggttaacggaaaagcacgtatggaaattcccgaactgggaatatgccgggatattcccgttgagaacggaagaggggaggcgtcagtttccgtcaagccggaattgtggagtcccgaaaatccgaaactgtatgacgttatctttacatataacgcgggaacgcatactgattcgacgcgggatcgtattggtttcaggacgattagcgtaaaagggcaggaaatattccttaacggtaagaaaatatttttaaggggagtttgcgttcacgaagatcattttgcctcaggtaaaacaactaacgaagagataatacgcgcggcaatccgggacttaaaggacatgaacggaatatatttcaggcttgcccattatccccatgacgcgcgtttcgcgcgcattgccgatgaggaaggcgtgttgttatgggaagaaatccccgtcttctgggcgatatcttttggcaattctagaaacttacaacgtcgcggcaaactcatctttcggacctacttatgcgggactcgcaacccccgtgagcctcctcatcaggtcaatacggaaacgaaaagcgcctga

SEQ ID NO: 37060 - protein, 431 aa, Unknown
  Obtained from environmental sample
  DOMAIN (208)...(305): Glycosyl hydrolases family 2, immunoglobulin-like beta-sandwich domain
  misc_feature (1)..(431): Xaa is any amino acid
MKDMKEKPENFTDGIHNDDYEDEYLQTRLNASRLVNITGRETESLNGKWNFGVDLYDTCRRSHWWREERFGADGRELPVDYDWESWEYITVPSCWNLQKDELCYYEGCGVYTRTFRYFPRAQGERLLLRFEGAAYRTTVFLNGTIVGTHDGASTPFNADITDIVRKDNRIVVSVDASRSPVRVXMDNTDWFNYGGIYRDIFLVRLPPIYIRDWFVRLAPDGNFSTVLADVYLEGTDVAPVNGKARMEIPELGICRDIPVENGRGEASVSVKPELWSPENPKLYDVIFTYNAGTHTDSTRDRIGFRTISVKGQEIFLNGKKIFLRGVCVHEDHFASGKTTNEEIIRAAIRDLKDMNGIYFRLAHYPHDARFARIADEEGVLLWEEIPVFWAISFGNSRNLQRRGKLIFRTYLCGTRNPREPPHQVNTETKSA

SEQ ID NO: 37061 - DNA, 765 bp, Unknown
  Obtained from environmental sample
  misc_feature (1)..(765): n is a, c, g, or t
ttgctttccagcgatattctggcttattacggccatcccaattcgcgcaacatgggcatattagggcgttactcgatagaagagctggataaactgctcacggagaaggcggcggagtacgaagaagtgagcgacggaagaagggttgtaaaagcgttttatataatttacggaactgtatggccgggcggcgacatagggattttaagcaatgaaattctcatgaaatatattgattacggcctaaaaaacgacattcttgtttttattgatcatcaaatcggaaagtacgatcccgttgattctcttaaaaaaatgctgccgtacctgaaatatcccaatgtacatcttgcccttgatcccgaatggcgcacattaaaaccgctggtagaaatagggtctgtaaccgcggaagagattaacaccgcgcagcaggttatggaagaatatattattaaaaacaacattctgggcgagcggatgcttgtaatccaccaatttaattataaaatgatagaaaaccgaaaagcggtaaaagccgatttcaacagggtgcgtcttgtccactgcgccgacggcttcggaggcccgggaatgaagcgcgacacttatgcctttaacgcacttgcgagtaacatgccggttaaagggtttaaattgttttataattttaacattcccggcgcggggtatgatgatccgattatgacgccgaaacaggtttatgaattaaatccgcggccttatgtgattatgtatcagtag

SEQ ID NO: 37062 - protein, 254 aa, Unknown
  Obtained from environmental sample
  misc_feature (1)..(254): Xaa is any amino acid
MLSSDILAYYGHPNSRNMGILGRYSIEELDKLLTEKAAEYEEVSDGRRVVKAFYIIYGTVWPGGDIGILSNEILMKYIDYGLKNDILVFIDHQIGKYDPVDSLKKMLPYLKYPNVHLALDPEWRTLKPLVEIGSVTAEEINTAQQVMEEYIIKNNILGERMLVIHQFNYKMIENRKAVKADFNRVRLVHCADGFGGPGMKRDTYAFNALASNMPVKGFKLFYNFNIPGAGYDDPIMTPKQVYELNPRPYVIMYQ

SEQ ID NO: 37063 - DNA, 894 bp, Unknown
  Obtained from environmental sample
  misc_feature (1)..(894): n is a, c, g, or t
atgaagatcttaataataggcggcgcgggctatataggaagccatgtaacaagggaatttctggacaatggacataactgcgccgtatttgacaacctttcaagcggtctgcgtgaaaatctttttaaacaggcgggttttattcacggggacattcacgactacaccctccttcttgaaaccatgaaaaacggcgattatcaggctgtcattcatcttgcggcgttcaaggcggcgggggaatcaatgttaaaaccggaaaaatattcgcataacaatatatcaggaaccataaacatattaaacgccgcaagcgaggcgggaattaaaaacataatcttttcttccagcgccgccgtttacggcagtcctcaatatctgcctattgatgagaagcaccctactctgcccgaaaattactacggttttaccaaacttgagatcgagcgttttctgtactggtacgaaaaacttaaaggcataaattacgcctgcctccgctattttaacgccgcgggttacgacataaaggggcgcataaaaggacttgaacaaaacccggcgaatttaattcccgttatcatggaaaccgcctgcggcataagagaagaaatgcaaatattcgggaacgattacgacacccccgacggaacctgtatccggggttatgtgcatgtaagcgatctggccgccggccatatccttgcgttagactacatcaacaaaaacaacaagagcctgactgtaaatcttggaagtgaaacaggtttttccgtaacggaagtaattgaagcggcgcgaaaagttacgggcaaaactatacccgcgaaaatcacgggaagaaggcagggcgacccccgcgccctttacgattcatcatcccagggcgtttga

SEQ ID NO: 37064 - protein, 297 aa, Unknown
  Obtained from environmental sample
  DOMAIN (5)...(195): Male sterility protein
  misc_feature (1)..(297): Xaa is any amino acid
MKILIIGGAGYIGSHVTREFLDNGHNCAVFDNLSSGLRENLFKQAGFIHGDIHDYTLLLETMKNGDYQAVIHLAAFKAAGESMLKPEKYSHNNISGTINILNAASEAGIKNIIFSSSAAVYGSPQYLPIDEKHPTLPENYYGFTKLEIERFLYWYEKLKGINYACLRYFNAAGYDIKGRIKGLEQNPANLIPVIMETACGIREEMQIFGNDYDTPDGTCIRGYVHVSDLAAGHILALDYINKNNKSLTVNLGSETGFSVTEVIEAARKVTGKTIPAKITGRRQGDPRALYDSSSQGV

SEQ ID NO: 37065 - DNA, 1125 bp, Unknown
  Obtained from environmental sample
  misc_feature (1)..(1125): n is a, c, g, or t
atgacagctaacattcattcggtgagaaatacgctgattgaaaatggcaaaaacgtcagcgaattggctacggcttccgaaaacggaaaaaccggccttcagactgttgctgaaaagatacgggaaatcgcccgtgactccgaaggccttctggaaataaacgcggccatagacaatatcgccagccagaccaatctgctttccatgaacgcggctatcgaggcggcgcacgccggagaggcggggaaaggctttgccgttgtcgccgatgaaatccgcaaactcgcggaatcgtcaagcgaacagtcaaaaacgaccgcgacgatgcttaaaaagataaaaacttccatagacagcataaccgtctcttccaatgaggttctttcgggttttgaggtcattgattcaggggtaaagaccgttttacaccatgaagaaaatatccggggcgcgatggaagagcaggaagtaggcggcaagcaaatagtggaatcgatggatcggttgaaagagataagcgtatctgtaaagaaaggcgcacaagacatgctggcgtcgggcgacaagttgaaccggcagaccagcgaatttataaatatcagcaatgaatcgatggccggcatgaacagaatagtgaatggggcgatgcgggagataaaagccgcggtagtcaccgtggacgaaatgagcgccgagaacaacaggaactttgaagacctaaagaaggaatcaataaaattcaaagtagaatcgggcagcgagaagaaaaaggtcatagtggttgatgatgaagataccgtccttattatgacaaaaaaatcgctggaaaatgattatgatgttactgctgtcagttctggcaaacaggcattgaaattgttcttccagggatatgttccccatttggtgctgcttgacttgagtatgcctgaaatgggcggttgggatacattaatcaagatacgcgacatcagcaagcttcaccaaaccccgatagcgatatacacgacatctgaagacccgaaagacaaggcaaaagcgcgggaacttggcgcggttgaatacatacacaaaccaatcaataaaactgaaatgcttcaaaaggtggcaaagttagtaagttaa

SEQ ID NO: 37066 - protein, 374 aa, Unknown
  Obtained from environmental sample
  DOMAIN (1)...(250): Methyl-accepting chemotaxis protein (MCP) signaling domain
  misc_feature (1)..(374): Xaa is any amino acid
MTANIHSVRNTLIENGKNVSELATASENGKTGLQTVAEKIREIARDSEGLLEINAAIDNIASQTNLLSMNAAIEAAHAGEAGKGFAVVADEIRKLAESSSEQSKTTATMLKKIKTSIDSITVSSNEVLSGFEVIDSGVKTVLHHEENIRGAMEEQEVGGKQIVESMDRLKEISVSVKKGAQDMLASGDKLNRQTSEFINISNESMAGMNRIVNGAMREIKAAVVTVDEMSAENNRNFEDLKKESIKFKVESGSEKKKVIVVDDEDTVLIMTKKSLENDYDVTAVSSGKQALKLFFQGYVPHLVLLDLSMPEMGGWDTLIKIRDISKLHQTPIAIYTTSEDPKDKAKARELGAVEYIHKPINKTEMLQKVAKLVS

SEQ ID NO: 37067 - DNA, 678 bp, Unknown
  Obtained from environmental sample
  misc_feature (1)..(678): n is a, c, g, or t
atgacctttttcttctcgctgcccgattctactttgaattttattgattccttctttaggtcttcaaagttcctgttgttctcggcgctcatttcgtccacggtgactaccgcggcttttatctcccgcatcgccccattcactattctgttcatgccggccatcgattcattgctgatatttataaattcgctggtctgccggttcaacttgtcgcccgacgccagcatgtcttgtgcgcctttctttacagatacgcttatctctttcaaccgatccatcgattccactatttgcttgccgcctacttcctgctcttccatcgcgccccggatattttcttcatggtgtaaaacggtctttacccctgaatcaatgacctcaaaacccgaaagaacctcattggaagagacggttatgctgtctatggaagtttttatctttttaagcatcgtcgcggtcgtttttgactgttcgcttgacgattccgcgagtttgcggatttcatcggcgacaacggcaaagcctttccccgcctctccggcgtgcgccgcctcgatagccgcgttcatggaaagcagattggtctggctggcgatattgtctatggccgcgtttatttccagaaggccttcggagtcacgggcgatttcccgtatcttttcagcaacagtctga

SEQ ID NO: 37068 - protein, 225 aa, Unknown
  Obtained from environmental sample
  misc_feature (1)..(225): Xaa is any amino acid
MTFFFSLPDSTLNFIDSFFRSSKFLLFSALISSTVTTAAFISRIAPFTILFMPAIDSLLIFINSLVCRFNLSPDASMSCAPFFTDTLISFNRSIDSTICLPPTSCSSIAPRIFSSWCKTVFTPESMTSKPERTSLEETVMLSMEVFIFLSIVAVVFDCSLDDSASLRISSATTAKPFPASPACAASIAAFMESRLVWLAILSMAAFISRRPSESRAISRIFSATV

SEQ ID NO: 37069 - DNA, 1083 bp, Unknown
  Obtained from environmental sample
  misc_feature (1)..(1083): n is a, c, g, or t
gtgatcttcctgtttgcctataccatttacgcttcctcaagcatcaaagcctgcggcaccctgttcaacaccgtgcttggcattgataccaatctctcaatgtacataggcgcgtttataattatcgggtatacgttcatgggcggttttcaggccgtatgctggacggattttttccaggggctgctcatgctggccgctctccttatcgcgccaattttcgctctggcgctggtcaacgccggccataccgccgcttccgtcactttccccgcaaactactggaatttcatgagcagcggaaagatggactggaaaagctgggcggacattcttacaggattcgggtggggactcggctatttcggaatgccgcatataattatcagattcatggcgatccgttcccaaaaagaggttaaaaagagcgcgattgtcggcatatcatggaccgtgttgattctgctcttctctgtcgcggttgccgccgtcggccgcttattccttggcaatctcgaagacagttcgttggtttttatcacgatggtgcgcagaatattcccgggggttatctccggcatcctgttatccgcaattctggccgccgccatgagtaccgcggactcccagcttcttgcttccgcttccgccttcgcggcagatgtgtataaccctgtactgcgtaagggaaaaggcactgaagaagagatgttctggtcaggtcgttttgttgtcgcgattatcgcgcttttagcgattattatcgcctcaaatccgggcagcggcactattatgagccttgtcggtaacgcgtggggcgtattcggcgccgcctttggcccggctattttactgtctttgttctggaaacgctttaccttttcaggcgctatagcgggcattatcgccggcgcggcggcggatgtgatttggctcgcgtttttttccagcacgggcctgtacgagattatccctggctttattgtaggtttactcgcggccgtaattgttactctgtgcggcaaaggccccggcgccgatgtcgaagcgctgtttgataaatctgtagcttttaaggattaa

SEQ ID NO: 37070 - protein, 360 aa, Unknown
  Obtained from environmental sample
  DOMAIN (1)...(304): Sodium:solute symporter family
  misc_feature (1)..(360): Xaa is any amino acid
MIFLFAYTIYASSSIKACGTLFNTVLGIDTNLSMYIGAFIIIGYTFMGGFQAVCWTDFFQGLLMLAALLIAPIFALALVNAGHTAASVTFPANYWNFMSSGKMDWKSWADILTGFGWGLGYFGMPHIIIRFMAIRSQKEVKKSAIVGISWTVLILLFSVAVAAVGRLFLGNLEDSSLVFITMVRRIFPGVISGILLSAILAAAMSTADSQLLASASAFAADVYNPVLRKGKGTEEEMFWSGRFVVAIIALLAIIIASNPGSGTIMSLVGNAWGVFGAAFGPAILLSLFWKRFTFSGAIAGIIAGAAADVIWLAFFSSTGLYEIIPGFIVGLLAAVIVTLCGKGPGADVEALFDKSVAFKD

SEQ ID NO: 37071 - DNA, 387 bp, Unknown
  Obtained from environmental sample
  misc_feature (1)..(387): n is a, c, g, or t
ttggataaaaaacggcggcaaactgataaatttgtctttttctcaatcggcgtcaagatggtaacgataattaccctgatcgtgctcacatcccttggatcaattaccgctctggtgtcatggctggtacgggaagacctgcaaataacggcggaagacaataactttgaaacaaaccggcgcggagctttggaagcggaaaatactctggcaaaaatgcgttctgacgctatgatactaatccataccattatatccgttggaaagcagccgaaccttgcccgtaataacgccgattatttttttcggcaaaacccccttatcgcggcttttctttttaccaatagccgggaagcggaatttccggcgaagatttttggtcaatga

SEQ ID NO: 37072 - protein, 128 aa, Unknown
  Obtained from environmental sample
  misc_feature (1)..(128): Xaa is any amino acid
MDKKRRQTDKFVFFSIGVKMVTIITLIVLTSLGSITALVSWLVREDLQITAEDNNFETNRRGALEAENTLAKMRSDAMILIHTIISVGKQPNLARNNADYFFRQNPLIAAFLFTNSREAEFPAKIFGQ

SEQ ID NO: 37073 - DNA, 462 bp, Unknown
  Obtained from environmental sample
  misc_feature (1)..(462): n is a, c, g, or t
atgggcatcgcagatggttgggattccaaccggggcatagtcctcttaagatcgcccgacctgactaactggcgacacagcaggataaacctccggacaaaatacgggtcggcaaatagcaactggagaaatattttgtccgcatgggctcctgaaattgtctacgaccgccgggcgaacaaatatatggttacatggtcgactttccgcaacgttaccccggaggatcatattatctactgggtctatgccaacaacgattttactgatcaccagtataacaagaatcctccggcctgggggtattgggtaagcgatgacggttttaagacctggaagacgcaaaaccagtctttaacggtgaacgggttctaccccaggcacggccacatcatccccataacccgcgcagagtatgatatgctgaacaattacaggaactggcctgtaaacattcagtag

SEQ ID NO: 37074 - protein, 153 aa, Unknown
  Obtained from environmental sample
  misc_feature (1)..(153): Xaa is any amino acid
MGIADGWDSNRGIVLLRSPDLTNWRHSRINLRTKYGSANSNWRNILSAWAPEIVYDRRANKYMVTWSTFRNVTPEDHIIYWVYANNDFTDHQYNKNPPAWGYWVSDDGFKTWKTQNQSLTVNGFYPRHGHIIPITRAEYDMLNNYRNWPVNIQ

SEQ ID NO: 37075 - DNA, 504 bp, Unknown
  Obtained from environmental sample
  misc_feature (1)..(504): n is a, c, g, or t
ttgcgtgacgagagcgttattcgccgccgtcttgccgatctattcctggaattgattgttgaccgcgacttgcaggtcgcttttacccgtcaggctgacacagacgatttagacgcgccaacattacttcgccgcgcccagttgacatttattgattcggtgctgcttctctatctgcggcagcaactggcgcaggccgcctcacacggcgaacgcgccgttgtatcaaaaacagatattgtagaacatctcagactgtatgatcgccagggaaatactgacagagcgggatttgacaagcgtgtttatgcgtcaattgagaagataaaaaaatataacatcatacaaaagattcgcgcaagcgatgatcgctttgaggtatcgccgactctgaaattactgttctccgcggaggaaattcaggaactgacaaaacaatatcagcgcatggccgcgggcggactgcaggacatcggcgaggatccgccccaggaggaggaatga

SEQ ID NO: 37076 - protein, 167 aa, Unknown
  Obtained from environmental sample
  misc_feature (1)..(167): Xaa is any amino acid
MRDESVIRRRLADLFLELIVDRDLQVAFTRQADTDDLDAPTLLRRAQLTFIDSVLLLYLRQQLAQAASHGERAVVSKTDIVEHLRLYDRQGNTDRAGFDKRVYASIEKIKKYNIIQKIRASDDRFEVSPTLKLLFSAEEIQELTKQYQRMAAGGLQDIGEDPPQEEE

SEQ ID NO: 37077 - DNA, 315 bp, Unknown
  Obtained from environmental sample
  misc_feature (1)..(315): n is a, c, g, or t
atgagttcaaaacaaacgcaaatgctgtttgaaaaagaacaatttcggatgtccggactccaggtctttaattggggaacattctccgggctgcacaaggtgcccatttcgccgaaaggctttttatttgtcggaggatccggaaccggcaagactaccctgctggacgcgttttccgcattgctcatccctccccgctggattgattttaacgcggcagcccgcgagtcggatcgtaaaggcaaggatcgcaatatcgtcagttacatacgcggagcctgggcggaaaagaagatgaagtgtcaggcgatataa

SEQ ID NO: 37078 - protein, 104 aa, Unknown
  Obtained from environmental sample
  misc_feature (1)..(104): Xaa is any amino acid
MSSKQTQMLFEKEQFRMSGLQVFNWGTFSGLHKVPISPKGFLFVGGSGTGKTTLLDAFSALLIPPRWIDFNAAARESDRKGKDRNIVSYIRGAWAEKKMKCQAI

SEQ ID NO: 37079 - DNA, 852 bp, Unknown
  Obtained from environmental sample
  misc_feature (1)..(852): n is a, c, g, or t
gtgattttgcgggatttgggaaaaaaatcgtttcggcattggggtttcagtcacagcattgccgtttgccgggagaggttattgaaagtcaaacagggcggggctccatggcagggggcaattgaacgggttttacacggcttggcgttatccctcctggttgatgaacgctactattcagcgctgtcaaaccatataaacagcactcatcttggacaacgtcttgtttattatcgcaccggacgcgtagagtcctggcaggagaaacctgtcccgtccgattcaatggtttttaaactcaatattaaagaagggagttacgccgaatggttgaaggccgaattacgccagcgttttaattatacatgcgtagagtcggttcaagccttcagagcggcggagcgggcaataacgcgcgagggtcaggtaaagcacagcaaaacccgtcatgaaaaagacgacagacgcgccgtaggcgacagaaggaactgggtactgggcttcgataaccacgaaaaattgtacctgtttcagcagcaggctcaggagctggcggacgcaatttcagccctgactgagaagatcaacgtattatccgaacaggacaacctgagcaggaaacgggcccttcattgccaaacactcgtcaatatgcagtggcaggaaattgatgtgcttccgataatagaacgtatctccgccattgagaaacaaattcgtgaaatgcgtgatggcaataaagtgttgcgggaaatttcagaacaaatcagcaggcagaagtccatcgtctcacgggctgatgatgacctgcgtgaagccaggcttgaacatgacaagacgctaggcagctaa

SEQ ID NO: 37080 - protein, 283 aa, Unknown
  Obtained from environmental sample
  misc_feature (1)..(283): Xaa is any amino acid
MILRDLGKKSFRHWGFSHSIAVCRERLLKVKQGGAPWQGAIERVLHGLALSLLVDERYYSALSNHINSTHLGQRLVYYRTGRVESWQEKPVPSDSMVFKLNIKEGSYAEWLKAELRQRFNYTCVESVQAFRAAERAITREGQVKHSKTRHEKDDRRAVGDRRNWVLGFDNHEKLYLFQQQAQELADAISALTEKINVLSEQDNLSRKRALHCQTLVNMQWQEIDVLPIIERISAIEKQIREMRDGNKVLREISEQISRQKSIVSRADDDLREARLEHDKTLGS

SEQ ID NO: 37081 - DNA, 879 bp, Unknown
  Obtained from environmental sample
  misc_feature (1)..(879): n is a, c, g, or t
ttgatcccggaatcctgccttgaggtttttgaaacaaagcgcgttatgccgggaggcaacgccgttccgtattggctgatcccctcgccggaaatctggatgaaaaaaattatcgctaaacactatacaaatgtttatcaaatctgcaaatgcttccgaaacggggaatcatcaggttttatccacagtcccgaatttacaatgcttgaatattacaccatggacgcgggctacatggattcacttgcgcttactgaagaattatttcgtaacattgccgcgaacgcaagttcgccgaacgcaggttcgcccttttgccttccttttgagcgcataacggttgccgaagccttttcacgttacgccggttttgaccttttcgccgctgttgaaacgcctaaggggctggaaaaagaggcccgcaggctcggtcttgatcccgggcattgcggcgggcaaagcgcgccggcgttatacgatttaatttttattcacgcggttgaaccgaaactaaagcagaaccggcccattgccctgctggactacccggcctttgtccccacgcttgcccgaaaaagcgcggacggaaaaaccgtggagcgctgggaactgtacttcaacggcatagagctggccaactgctacaccgaggaaactgaaccgcagcgtgtaaaagaattttttgaaagcgaagctgcggaaaaagagcggcgggcattggtgcaacacaaagcggacaacggctactggaaaattttcagcggaaaggaaataaaattctccggcgtggcaatgggcattgatcggctgataatggcgttatggggacggtcaaccattgacggcgtgttggcgtttgcgatgggagttattacataa

SEQ ID NO: 37082 - protein, 292 aa, Unknown
  Obtained from environmental sample
  DOMAIN (1)...(291): tRNA synthetases class II (D, K and N)
  misc_feature (1)..(292): Xaa is any amino acid
MIPESCLEVFETKRVMPGGNAVPYWLIPSPEIWMKKIIAKHYTNVYQICKCFRNGESSGFIHSPEFTMLEYYTMDAGYMDSLALTEELFRNIAANASSPNAGSPFCLPFERITVAEAFSRYAGFDLFAAVETPKGLEKEARRLGLDPGHCGGQSAPALYDLIFIHAVEPKLKQNRPIALLDYPAFVPTLARKSADGKTVERWELYFNGIELANCYTEETEPQRVKEFFESEAAEKERRALVQHKADNGYWKIFSGKEIKFSGVAMGIDRLIMALWGRSTIDGVLAFAMGVIT

SEQ ID NO: 37083 - DNA, 813 bp, Unknown
  Obtained from environmental sample
  misc_feature (1)..(813): n is a, c, g, or t
atgttaaaagcgctttctacaaaacgctgtaacgaacctacaaaagcgtcccgtccctttgacgcggatcgcgacgggtttgtaatgggagaaggagcgggcatattaattcttgaaagcgaagaaagcgcgaaaaaacgcggcgtaaaaattctcgccgagtttgccggttacggcgcaagcgcggacgcttatcatatcacctcgcctgatcctacgggcttgggcggctcaactgccgtaaaaaaagccattgccgacgcggatttaaaaccggaagacatacaatattacaacgcgcacggtacttcaactgaaataaacgatcctaccgaaacaaaaatgctgaaaatcgctttcggcgatcacgcttacaaattgaaagtttccagcaccaagagcatgcacggccattgtgtcgcgggcggcggcggcttggaagccatcgcctgtattctcgcaatcaacgaaggcttttatccgccgaccatcaacttggacaatcccgatcccgaatgtgatcttgattatgtgccgaacaaagttcagtacggcgaaataaacgccgcagcttcaggctctctcggcttcggcggacacaacggtgttgtagttttcaagaagtacaaagggctaataaagggaaataatatgagccgaattgaaaatcttttccgcaccgcgagccctttttgtttgtggacgaaattattcaggccgacaatgaaaaaattatcgcaaagcatgtgttcactgaaaaagaatatttctttaagggacactttcctcagtacccggttgtacccggcgtaa

SEQ ID NO: 37084 - protein, 270 aa, Unknown
  Obtained from environmental sample
  DOMAIN (52)...(209): Beta-ketoacyl synthase, C-terminal domain
  misc_feature (1)..(270): Xaa is any amino acid
MLKALSTKRCNEPTKASRPFDADRDGFVMGEGAGILILESEESAKKRGVKILAEFAGYGASADAYHITSPDPTGLGGSTAVKKAIADADLKPEDIQYYNAHGTSTEINDPTETKMLKIAFGDHAYKLKVSSTKSMHGHCVAGGGGLEAIACILAINEGFYPPTINLDNPDPECDLDYVPNKVQYGEINAAASGSLGFGGHNGVVVFKKYKGLIKGNNMSRIENLFRTASPFCLWTKLFRPTMKKLSQSMCSLKKNISLRDTFLSTRLYPA

SEQ ID NO: 37085 - DNA, 378 bp, Unknown
  Obtained from environmental sample
  misc_feature (1)..(378): n is a, c, g, or t
ttgtttgtggacgaaattattcaggccgacaatgaaaaaattatcgcaaagcatgtgttcactgaaaaagaatatttctttaagggacactttcctcagtacccggttgtacccggcgtaatccttgtggaaacaatggcccaatcgggcggcgcggggcttcgcaaatgcggcgctctcggcgcggattctcttttctttttcgcgtctgttgacaaagtaaagttccgccgccaggttcgtccgggcgacgaagtccgctgcgagattaaaaatctgcgggtatcccagaaaatgatcaaacaatcaggcatagcatacgtcggcgatgaagtcgccgccgaagccgaatggatgtgccttgtggggaacgcttag

SEQ ID NO: 37086 - protein, 125 aa, Unknown
  Obtained from environmental sample
  DOMAIN (34)...(115): Thioesterase superfamily
  misc_feature (1)..(125): Xaa is any amino acid
MFVDEIIQADNEKIIAKHVFTEKEYFFKGHFPQYPVVPGVILVETMAQSGGAGLRKCGALGADSLFFFASVDKVKFRRQVRPGDEVRCEIKNLRVSQKMIKQSGIAYVGDEVAAEAEWMCLVGNA

SEQ ID NO: 37087 - DNA, 423 bp, Unknown
  Obtained from environmental sample
  misc_feature (1)..(423): n is a, c, g, or t
ttggggggaggccattccgaccttggccgctcggccgaggggacgggcttttactgcgactggaatttggtatgcggaaataacgattacttgtccaccgtcccggaagccgccgtttttaatttctgcgattaccgtttttttatgtgccacggacaccgccacagcctttacggcggttttcatacgctgattgccgccgccagacaatcgcaggcaaatgttgtgttatacggtcatacccatgtcccttcatataaaaacatagacggcctgttgtttataaacccgggaagcgtaggaagacctcggagcaaagtaggggcatcatttgccgttattgagtgtatgcctaacgaacagttaaccgtgcaattctggggaataggggacaaagggaagataaaaatgttgaaaatttaa

SEQ ID NO: 37088 - protein, 140 aa, Unknown
  Obtained from environmental sample
  misc_feature (1)..(140): Xaa is any amino acid
MGGGHSDLGRSAEGTGFYCDWNLVCGNNDYLSTVPEAAVFNFCDYRFFMCHGHRHSLYGGFHTLIAAARQSQANVVLYGHTHVPSYKNIDGLLFINPGSVGRPRSKVGASFAVIECMPNEQLTVQFWGIGDKGKIKMLKI

SEQ ID NO: 37089 - DNA, 525 bp, Unknown
  Obtained from environmental sample
  misc_feature (1)..(525): n is a, c, g, or t
atgtttgcctttcgctgtgattttttagtggatgaataccatcgtctttcatcagaagtaataagcccctttgaaaatctaaaacctcccgataaaaagtcatactcaaaaatgaaagggctgtgtatattggacgcgtgggcaggattagacaaggcgtataaccagacaaaacaaatttcttttgattatgccatcgccgaaaaatgcaacaagactgttatgatccgcgcgtcttttgactggattgatataggcagttgggatgattatgcccttcttctttcggataattcatccgccaataatactgatactgaagttttttcagccgggtcgaacgcatgttttgtggattctgatattcccgttgctcttgcaggagttgaagatcttattgttgtaatccgttcaggtaaagatggctctccgccctcggcgttgattacccaaaaaggtaaaacccagcttgtgcgtgatattgtcgaaaaaataaaacaatctgacaaaaaagatattttatga

SEQ ID NO: 37090 - protein, 174 aa, Unknown
  Obtained from environmental sample
  misc_feature (1)..(174): Xaa is any amino acid
MFAFRCDFLVDEYHRLSSEVISPFENLKPPDKKSYSKMKGLCILDAWAGLDKAYNQTKQISFDYAIAEKCNKTVMIRASFDWIDIGSWDDYALLLSDNSSANNTDTEVFSAGSNACFVDSDIPVALAGVEDLIVVIRSGKDGSPPSALITQKGKTQLVRDIVEKIKQSDKKDIL

SEQ ID NO: 37091 - DNA, 633 bp, Unknown
  Obtained from environmental sample
  misc_feature (1)..(633): n is a, c, g, or t
ttggtacagggatttcattgcccaaaaaagatagtcattaaaaaggagaaaaaaatgaaagtagtactagtcaacggaagcccaaacgccaatggatgcacattcaccggacttagcattattaaagaacagctggcaaagcatggcgttgattctgagatatttcaggttgggaaaaaaccaatcataggctgtactggttgcaggacttgtagacaaccagaaaaaggcggacgatgcgtgtttgataatgacttggtgaacacagtagcacaggcgatggaagaagctgacgggatcatcattggttctccagtgcattttgccagtgcatctggagcagccacttccttttttgatcgcttgttttattgcaggtttggaatgaacaggttaaaattcggcgcttgtattgtcagttgcaggagagcaggctcaaccgccacattcgaccaattgaataaatacttcacaatttcgcaaatgcccatcgtatcatcttgttattggaatggcatacatggatatacaccggaagacgtataccccgataaagaaggcgtccgtacattaacaatattggcaaacaaatatggcatatctcatcaaatgcaaacatcaaagcaatgttga

SEQ ID NO: 37092 - protein, 210 aa, Unknown
  Obtained from environmental sample
  DOMAIN (19)...(196): NADPH-dependent FMN reductase
  misc_feature (1)..(210): Xaa is any amino acid
MVQGFHCPKKIVIKKEKKMKVVLVNGSPNANGCTFTGLSIIKEQLAKHGVDSEIFQVGKKPIIGCTGCRTCRQPEKGGRCVFDNDLVNTVAQAMEEADGIIIGSPVHFASASGAATSFFDRLFYCRFGMNRLKFGACIVSCRRAGSTATFDQLNKYFTISQMPIVSSCYWNGIHGYTPEDVYPDKEGVRTLTILANKYGISHQMQTSKQC

SEQ ID NO: 37093 - DNA, 1332 bp, Unknown
  Obtained from environmental sample
  misc_feature (1)..(1332): n is a, c, g, or t
gtgggaccgcccggcgtcgggaagacctcggtcggcagatccattgcccgcgctctgggcaaacaatttttccgcttttcagtgggtgggatgcgcgatgaggctgagataaagggccaccgccgcacttacataggcgcgatgccgggcaagatcattcagggacttaaaatcgtcaaaaccaaagacccggtgttcatgatcgatgagattgacaaaatgggggcaagctatcagggtgatcccgccagcgccctgctggaagtgctggacccggaacagaactcggcgtttcgggatcattacctggatctcccctttgatatttctcatgtcttttttattgtcaccgccaatacgctggatacaattccccagccgctggtggatcgtatggaaattatacaactgcccggttacattgacacggaaaaactggaaatagccaaacggtatctggtgcccaagagcctggaaaaaaacggcctgaaaaaaaatcaggtaaagtataccaaggacagccttttgcatattgccaacgcctatgcccgcgaagccggtgtgcggaattttgaaaaaaatcttgacaaaattcaccgcaaattggcaatgcagatagttgaaagtgaagaggccgggaataatgccgtcgtttcgacagataccgtttcgccggatgccgctccgaaagaagcgagaaacatacagtttactatcgacaaaaaactcattgaaaaacatttgggtaaaccactgtttcccgaaagcggcatcaaaacggctgaacggcccggcatgtcggtggggcttgcctggacgagcatgggcggcgacactctggtaattgaggcgacctcggttccgggcaaggaagggctgacccttaccggtaaaatgggtgacacgatgaaggaaagcgccgctatcgccatgactgtggcgcgcaagatggcaatagaacgctaccgtatcgcgcaggactggtttgatttcaaccatatacacctgcatataccggaaggcgcgacgcccaaagacggcccctcggccggaataacaatggccacggccctgctctctcttatgcgggacaagatagtcaccgagcggctggtaatgacgggcgagctttccctgacaggccatgtgcttcccattggcggtctgaaggaaaagacagtagccgcgaggcggaacaaagcccggcacattataatccccaggcagaacgagcgcgatcttgacgagattcccgatcatgtaaagaaaggcatcagctttcatcccgtggaacgtttcgaggaagtgctcgcgttagctttgccggaataa

SEQ ID NO: 37094 - protein, 443 aa, Unknown
  Obtained from environmental sample
  DOMAIN (2)...(140): ATPase family associated with various cellular activities (AAA)
  misc_feature (1)..(443): Xaa is any amino acid
MGPPGVGKTSVGRSIARALGKQFFRFSVGGMRDEAEIKGHRRTYIGAMPGKIIQGLKIVKTKDPVFMIDEIDKMGASYQGDPASALLEVLDPEQNSAFRDHYLDLPFDISHVFFIVTANTLDTIPQPLVDRMEIIQLPGYIDTEKLEIAKRYLVPKSLEKNGLKKNQVKYTKDSLLHIANAYAREAGVRNFEKNLDKIHRKLAMQIVESEEAGNNAVVSTDTVSPDAAPKEARNIQFTIDKKLIEKHLGKPLFPESGIKTAERPGMSVGLAWTSMGGDTLVIEATSVPGKEGLTLTGKMGDTMKESAAIAMTVARKMAIERYRIAQDWFDFNHIHLHIPEGATPKDGPSAGITMATALLSLMRDKIVTERLVMTGELSLTGHVLPIGGLKEKTVAARRNKARHIIIPRQNERDLDEIPDHVKKGISFHPVERFEEVLALALPE

SEQ ID NO: 37095 - DNA, 1206 bp, Unknown
  Obtained from environmental sample
  misc_feature (1)..(1206): n is a, c, g, or t
atgaaagctgatgcctttctttacatgatcgggaatctcgtcaagatcgcgctcgttctgcctggggattataatgtgccgggctttgttccgcctcgcggctactgtcttttccttcagaccgccaatgggaagcacatggcctgtcagggaaagctcgcccgtcattaccagccgctcggtgactatcttgtcccgcataagagagagcagggccgtggccattgttattccggccgaggggccgtctttgggcgtcgcgccttccggtatatgcaggtgtatatggttgaaatcaaaccagtcctgcgcgatacggtagcgttctattgccatcttgcgcgccacagtcatggcgatagcggcgctttccttcatcgtgtcacccattttaccggtaagggtcagcccttccttgcccggaaccgaggtcgcctcaattaccagagtgtcgccgcccatgctcgtccaggcaagccccaccgacatgccgggccgttcagccgttttgatgccgctttcgggaaacagtggtttacccaaatgtttttcaatgagttttttgtcgatagtaaactgtatgtttctcgcttctttcggagcggcatccggcgaaacggtatctgtcgaaacgacggcattattcccggcctcttcactttcaactatctgcattgccaatttgcggtgaattttgtcaagatttttttcaaaattccgcacaccggcttcgcgggcataggcgttggcaatatgcaaaaggctgtccttggtatactttacctgattttttttcaggccgtttttttccaggctcttgggcaccagataccgtttggctatttccagtttttccgtgtcaatgtaaccgggcagttgtataatttccatacgatccaccagcggctggggaattgtatccagcgtattggcggtgacaataaaaaagacatgagaaatatcaaaggggagatccaggtaatgatcccgaaacgccgagttctgttccgggtccagcacttccagcagggcgctggcgggatcaccctgatagcttgcccccattttgtcaatctcatcgatcatgaacaccgggtctttggttttgacgattttaagtccctgaatgatcttgcccggcatcgcgcctatgtaagtgcggcggtggccctttatctcagcctcatcgcgcatcccacccactga

SEQ ID NO: 37096 - protein, 401 aa, Unknown
  Obtained from environmental sample
  misc_feature (1)..(401): Xaa is any amino acid
MKADAFLYMIGNLVKIALVLPGDYNVPGFVPPRGYCLFLQTANGKHMACQGKLARHYQPLGDYLVPHKREQGRGHCYSGRGAVFGRRAFRYMQVYMVEIKPVLRDTVAFYCHLARHSHGDSGAFLHRVTHFTGKGQPFLARNRGRLNYQSVAAHARPGKPHRHAGPFSRFDAAFGKQWFTQMFFNEFFVDSKLYVSRFFRSGIRRNGICRNDGIIPGLFTFNYLHCQFAVNFVKIFFKIPHTGFAGIGVGNMQKAVLGILYLIFFQAVFFQALGHQIPFGYFQFFRVNVTGQLYNFHTIHQRLGNCIQRIGGDNKKDMRNIKGEIQVMIPKRRVLFRVQHFQQGAGGITLIACPHFVNLIDHEHRVFGFDDFKSLNDLARHRAYVSAAVALYLSLIAHPTH

SEQ ID NO: 37097 - DNA, 801 bp, Unknown
  Obtained from environmental sample
  misc_feature (1)..(801): n is a, c, g, or t
gtgggttttccattcttgttcccgcaacggcggcgggagggcaatacggccaattcgaacacatacggatctctagccgatttcagcggtaaaaaaatcgccagcgagtccggcaccatattcgcccaatttatcgaccgcgtaattccgaaagtggaacacaggtactactttaccttcgaggacatagtagccgccctgcataccgacgcggtagacgccatagccctcgatatgcccgtagcgctctacttagcggcgcacaacagggggtttgcggtctttccgtacgtggtctcggttgacacatacggtttcgccgtcgccaaggggtcgcagctctgcgagaccggcaacgagatcctattcaaattcaaggaaaccggggtgatcaccgacgcggagatgtactggttcaacgccgattccgacaccgataaagtaataccgcagctaacccaccggagcgacttcaacgggtcggccggcaccataaggttcggttgcgagaacacgctcttccccatgagctacgcgtcgtccggcggcgagacggtggggttcgacatagacatcgtaaataggatggcctacgaaatgaacatgaatgtggaggttaaagcaatgcccttcggcgatttgctcccggcgctgctggcggggaggcttgatatggcgggggggagtatgacgattacggaagggcgcgaagaattagtggattttatcgggccttattttgagggggggacggcgctggttgtaaaaaaagatagggttttaaaaaatcaaaatctttaa

SEQ ID NO: 37098 - protein, 266 aa, Unknown
  Obtained from environmental sample
  misc_feature (1)..(266): Xaa is any amino acid
MGFPFLFPQRRREGNTANSNTYGSLADFSGKKIASESGTIFAQFIDRVIPKVEHRYYFTFEDIVAALHTDAVDAIALDMPVALYLAAHNRGFAVFPYVVSVDTYGFAVAKGSQLCETGNEILFKFKETGVITDAEMYWFNADSDTDKVIPQLTHRSDFNGSAGTIRFGCENTLFPMSYASSGGETVGFDIDIVNRMAYEMNMNVEVKAMPFGDLLPALLAGRLDMAGGSMTITEGREELVDFIGPYFEGGTALVVKKDRVLKNQNL

SEQ ID NO: 37099 - DNA, 1170 bp, Unknown
  Obtained from environmental sample
  misc_feature (1)..(1170): n is a, c, g, or t
atgccgcgcgtgagatggaagttgaaaaaatttattacttatcgtaaaggcgctaagacgcgaagcgtcggcgccttcggcgcggtgccgttgctattcctctcgcaaaggcgcaaaggacgcgaaggacgcggagggaagaaaagattcttcctctgcgatctctgcgtgatgatattcttcattcctttttactcctacgcaaccgctggtgtcgccgacaaatcagcgacgccagatgattcgggggtcaggtactttgcaccgctagaaatcagcagcatcaaattcggagacggccagcgtatcctggatattagatacgatccggtatttaagggtgtttttaccaaagataccgtaaaatcgagaggcgccctctccggcctcatttccgcgcttatcaggcgcactgtcacggtggaggccatcatcgccaatgaaccggccgttgacgataccaggcaacggtacctccgtttcgacgtagcctgcaaaaccacaaaaggcgaaccggtaaatgttgaaatggcattcaaccctaaagcacatgaacctatacgccttgagtaccatacggcaaagctttttaccggacaggatcttcacggggaagacaaaatttataatgatttgaaagaaacatatcaaatcgccattctggcaaaagaaaaatttttccccgatgaaaatttcgcgcataatttcctgtattatgatcctgacaaccgtgtcccacttggtggaagaacccgaataatcaccgtagaactggtaaagacggaaccggcagccggaaagccggttgaagagatgacgaacgcggaactatgggcggtattttttcaatatttgacagatgaggagaaaagggataaaataattgagataatcaagagggaggaaggaatagcaatggcggtagaaactttggtaaacatcacgcaggacgagatagaatacgcgcgtatgtgtaatctgataaagagccaacttgactatcaaagcggcatggtagacgccgagcgcaaaggccatgccgaaggccgtgcggaaggccgtgcggatgaaaaacttgatattgcccggaagatgaaagatatgggtgattccattgaaaagatacaaataataaccggccttccaccagaaactattgagcaggtgtaa

SEQ ID NO: 37100 - protein, 389 aa, Unknown
  Obtained from environmental sample
  misc_feature (1)..(389): Xaa is any amino acid
MPRVRWKLKKFITYRKGAKTRSVGAFGAVPLLFLSQRRKGREGRGGKKRFFLCDLCVMIFFIPFYSYATAGVADKSATPDDSGVRYFAPLEISSIKFGDGQRILDIRYDPVFKGVFTKDTVKSRGALSGLISALIRRTVTVEAIIANEPAVDDTRQRYLRFDVACKTTKGEPVNVEMAFNPKAHEPIRLEYHTAKLFTGQDLHGEDKIYNDLKETYQIAILAKEKFFPDENFAHNFLYYDPDNRVPLGGRTRIITVELVKTEPAAGKPVEEMTNAELWAVFFQYLTDEEKRDKIIEIIKREEGIAMAVETLVNITQDEIEYARMCNLIKSQLDYQSGMVDAERKGHAEGRAEGRADEKLDIARKMKDMGDSIEKIQIITGLPPETIEQV

SEQ ID NO: 37101 - DNA, 594 bp, Unknown
  Obtained from environmental sample
  misc_feature (1)..(594): n is a, c, g, or t
gtgcaacgagtctgcggtccgcaaggcgttcgcgaagctgaagatcacgcggaaaaaaaaaccaagaggttcagggagcagaggccggagcaggcagggcggtacctggcggagctggcgaaatgcgcgggccggccggtcgcctacgtggacgagacggggatagacacatggctgtgccgcgagtacggctggtccgtgcgcggggcccccgtggtcggggaggtctgcgggcgcaagtatgaaagggcgggcgtcgtcgccgcgctcctcggggattcggtcatcgagccgtgccaatactggcagaccatgggatcctgtttttttgaggcatggtttgagcacaggctgctgccggccctgcccccgaactctgtgatagtgatggacaacgcgtctttccaccgcaagtccaggctgccggggcttgcggagggggcggggcacatcgtgcttttcctgccgccgtactcccccgagctgaatcccatcgaaaactactggagctggctcaagaggcagctccgaaaaattctgcccggcttcctgactttcaacgatgcactgtgctctatttttgaagggcgttga

SEQ ID NO: 37102 - protein, 197 aa, Unknown
  Obtained from environmental sample
  misc_feature (1)..(197): Xaa is any amino acid
MQRVCGPQGVREAEDHAEKKTKRFREQRPEQAGRYLAELAKCAGRPVAYVDETGIDTWLCREYGWSVRGAPVVGEVCGRKYERAGVVAALLGDSVIEPCQYWQTMGSCFFEAWFEHRLLPALPPNSVIVMDNASFHRKSRLPGLAEGAGHIVLFLPPYSPELNPIENYWSWLKRQLRKILPGFLTFNDALCSIFEGR

SEQ ID NO: 37103 - DNA, 585 bp, Unknown
  Obtained from environmental sample
  misc_feature (1)..(585): n is a, c, g, or t
atggatcttttccgccgttacgctctgattgccgccgccggagacaggcatcttgcggaattttgccctcattcatggtatctgtcatcgccgcaaaccgcggaaagctggggctttgcccttactcccgtttcatggagagtcaaagaccgtgaaagattaaaactaaaggcaaaagcgtaccgcgacggaacagaagaactgtctcccgttgaatccggcgaagaaggcataaaaataatcaaggcgctgacagggcttggggaccttactacaaatgtaaattttccaaataacgggcagacgccggatcttccaaaaggggttgtagttgaaacaaacgcggtttttaagagcgataaaattgaacctgtaacaagtaacggacttcctgttgatataagagcgcttgtaatgcaccacatactcagtcaggagggaattgtagaagctgtatttgagggcgatacggaaaaagcgtttcgcgttttttcacatgatcttgcggttcaaaaattgcctcttgattccgcgcgttctctttttaatgaaatgcgccgtgcaaccggcgtaataagcggataa

SEQ ID NO: 37104 - protein, 194 aa, Unknown
  Obtained from environmental sample
  misc_feature (1)..(194): Xaa is any amino acid
MDLFRRYALIAAAGDRHLAEFCPHSWYLSSPQTAESWGFALTPVSWRVKDRERLKLKAKAYRDGTEELSPVESGEEGIKIIKALTGLGDLTTNVNFPNNGQTPDLPKGVVVETNAVFKSDKIEPVTSNGLPVDIRALVMHHILSQEGIVEAVFEGDTEKAFRVFSHDLAVQKLPLDSARSLFNEMRRATGVISG

SEQ ID NO: 37105 - DNA, 963 bp, Unknown
  Obtained from environmental sample
  misc_feature (1)..(963): n is a, c, g, or t
atgatagaccgccgattggtattacagcggcataatccccattataaaactttgaataaatccgcgccgttttccgcaggcaacggcgctttttgctttactgccgattttaccggcctgcaaactttttttgacgattactgcgcggcgcaggacgcattccccctctgcacaatggcagaatggggctggcattcgtatcctcaaacagaagacgaatctcttttgcagctaacgccttatgatacttatggcaggattgtttattacgccacagacgataagggacagaaagaactctttaagaagattagggtcaacgcgcataaattcaacctgggactgattggctttgaattacaggataaaaaacttacgcttgaaaattgcgcgcctgtaagccaactgctttctttatgggaagggatattattttccgaatttaagattgacggcagtatcgttaagaccgaaacctttgtccaccccaaagaggacacattgtatgtccgcgcgcagtctccgctgttaaaagaaaataaattgcgcataacaataaaatttccctatggcagccataaaaaaacaggcgcggacttctcttcccctcatctgcataaaagcaaagttttaaaaaacaacgacggttcagtttatatagaaagagaacttgataacacaatttataaagttacagtcagcggcgcgggatttacagtttcatttaacgaaaatccgcacgctttacaattaattccgtccaatgaatgtatagatttcagcgtcagatttgaacctgtcagcatcccttctttttcaaaaacaggaattacattggataaattacaaaataaagacgccgtcccttttgaagaagcaaaaacaaaatgtctgttgttttgggaacattactggacatcaagcggttttatgacttacaggatcaaccgttccctgtcataa

SEQ ID NO: 37106 - protein, 320 aa, Unknown
  Obtained from environmental sample
  misc_feature (1)..(320): Xaa is any amino acid
MIDRRLVLQRHNPHYKTLNKSAPFSAGNGAFCFTADFTGLQTFFDDYCAAQDAFPLCTMAEWGWHSYPQTEDESLLQLTPYDTYGRIVYYATDDKGQKELFKKIRVNAHKFNLGLIGFELQDKKLTLENCAPVSQLLSLWEGILFSEFKIDGSIVKTETFVHPKEDTLYVRAQSPLLKENKLRITIKFPYGSHKKTGADFSSPHLHKSKVLKNNDGSVYIERELDNTIYKVTVSGAGFTVSFNENPHALQLIPSNECIDFSVRFEPVSIPSFSKTGITLDKLQNKDAVPFEEAKTKCLLFWEHYWTSSGFMTYRINRSLS

SEQ ID NO: 37107 - DNA, 1191 bp, Unknown
  Obtained from environmental sample
  misc_feature (1)..(1191): n is a, c, g, or t
atgagcgttaataataaacatggtttcaatccgttaaccgatagaattattgaagaactcagaacgattgtgggaaagggcaatgtcgttatcgaaaaagaaaaacttgaagcctattctcacgacgaaacagacgcgcgcgaatacggacacgatcccgaagcggtgatcttcccttctacaaccgaagagaccgcccgcatcgttaagctggccaaccgtgagcgtatacccataacccccagaggcgcgggatcagggctttcgggtggggcaattcccgaatacggagggcttgtcctttccctggaaaaaatgaaccgcataatcgaaattgacagggaaaatatgcttgctgtagtagaagcaggcgtggttaccaatgatttcgccaaagcggtagaggcgcaaggcctgtttttcgcaggttacccaatgagccttcagacttgtgtcataggcggcaacatcgcggaaaacgccgggggcggcaaggcggtaaagtacggcgttacaggccgctatatactgggtcttaccttggttactcccctgggagaaattgtggaacttgggggaaagatcgtaaaggatgtttcaggttacgacctaaaatccctgattatcggttcggagggaaccctgagcatagttactcaggctataatccggctcatcggctacccgtcgtcaaagtcagacctcctctcgctctttaagactcccaaagacgccatagacctggtgcctgaaattctgggtaaaggccttacccccacaagcatcgaattcatggacaagctttcgatagaaacaagctgtaaataccttaacgagagcctgccctatgaagactgcggggccatgctcctcatcgaactggacggctcaaatcctgaacaggttgaggcggatcttgttgaaacaggaaaactctgcgaaaaccggggcgctttggaagtctacgttgccgaagatcggaacaacattgagcgtatatggaacgtcaggagaaacattgccgaggcctttaaggtctttagccccatccaaagcctggaagacatagtcgttccgatttcccgcatcccctcaataatcccggaacttgaaaggcttgggacaaaataccaaatgcaaatcccctgttacggccatgccggagacggcaatctccacgccacttggtaa

SEQ ID NO: 37108 - protein, 396 aa, Unknown
  Obtained from environmental sample
  DOMAIN (228)...(395): FAD linked oxidases, C-terminal domain
  misc_feature (1)..(396): Xaa is any amino acid
MSVNNKHGFNPLTDRIIEELRTIVGKGNVVIEKEKLEAYSHDETDAREYGHDPEAVIFPSTTEETARIVKLANRERIPITPRGAGSGLSGGAIPEYGGLVLSLEKMNRIIEIDRENMLAVVEAGVVTNDFAKAVEAQGLFFAGYPMSLQTCVIGGNIAENAGGGKAVKYGVTGRYILGLTLVTPLGEIVELGGKIVKDVSGYDLKSLIIGSEGTLSIVTQAIIRLIGYPSSKSDLLSLFKTPKDAIDLVPEILGKGLTPTSIEFMDKLSIETSCKYLNESLPYEDCGAMLLIELDGSNPEQVEADLVETGKLCENRGALEVYVAEDRNNIERIWNVRRNIAEAFKVFSPIQSLEDIVVPISRIPSIIPELERLGTKYQMQIPCYGHAGDGNLHATW

SEQ ID NO: 37109 - DNA, 930 bp, Unknown
  Obtained from environmental sample
  misc_feature (1)..(930): n is a, c, g, or t
atgaccgcgtccctgaggtactcgactgttggtttgaatccggggcgatgccctacgcgcagaaccattatccnctttgaaaacaaagaattctttgacagccacttcccatcggactttatcagtgaggggctggatcaaacacgcggttggttttacacgctcaccgtccttgcggcggctctccttaaaaagccggcttttaaaaactgcatagtcagcggccttgtcctggcgagcgacggcaagaaaatgagcaagagcctgcgcaactacacggacccaaccgaagtgataaactcgttcggcgcggacgctctgcgcctctttttagtacattccgcggtagtaaaagccgaagacctccgttacaccgatgaaggcgtgcgcgaaataatgaaaagcattatcatccccctgtggaacgcgtacagtttctttgtcacttacgctaacatcgacaaaatcaccgcgacaggcgttcccgaaaaacccgccaaccccctggatcaatggatactttcagaagcgcaaacccttgtagaaaaaaccaccgtcgcgcttgacgcttatgacctaagccgcgccatagaccacatcctgcgcttcatcgatcttttgaacaactggtacatccgccgttcccgccgccgtttctggcgcanagagcaagacagcgacaaaatcgaagcctacggctcactctactacgctctcaaaacactgataactgtcgcatcccccttcatgccctttaccacggacgctattgggcaaacctccgcaatgagaccgatcccgaatcggttcatctggctgactttccaagccccaaagaaagccgccgcgaccgcgcgctggaattccgcatggcctcggtgcaaagggccgtctccatgggccgcgccctgcgctcgcagtacaatataa

SEQ ID NO: 37110 - protein, 309 aa, Unknown
  Obtained from environmental sample
  DOMAIN (170)...(307): Anticodon-binding domain
  misc_feature (1)..(309): Xaa is any amino acid
MTASLRYSTVGLNPGRCPTRRTIIXFENKEFFDSHFPSDFISEGLDQTRGWFYTLTVLAAALLKKPAFKNCIVSGLVLASDGKKMSKSLRNYTDPTEVINSFGADALRLFLVHSAVVKAEDLRYTDEGVREIMKSIIIPLWNAYSFFVTYANIDKITATGVPEKPANPLDQWILSEAQTLVEKTTVALDAYDLSRAIDHILRFIDLLNNWYIRRSRRRFWRXEQDSDKIEAYGSLYYALKTLITVASPFMPFTTDAIGQTSAMRPIPNRFIWLTFQAPKKAAATARWNSAWPRCKGPSPWAAPCARSTI

SEQ ID NO: 37111 - DNA, 708 bp, Unknown
  Obtained from environmental sample
  misc_feature (1)..(708): n is a, c, g, or t
atggcctcggtgcaaagggccgtctccatgggccgcgccctgcgctcgcagtacaatataaaagtccgccagcccctgcgcatggcggagctcgttacgcgagacgcggctgaaaaaagcgcccttctggaaatgacggagattatccgcgaggagcttaacgtaaaaaacgtttctttcagggacaacgaggaagaccttgtcgaatacggcgtaaaagccaatttccgcgtgctgggcaaggaactgggaaaggacatgtccgccgccgccgcgaagatagaggccctgagccaggacgaaatccgcggcctgattgagggagcttctctttcgctggagcttgcgggcggaagaacggttgtactcaccgcggacaaactcgacatcaggcgcaatgaaaaggcgaatctccgcatactcaacgaggggaccctcaccgtgggccttgacacggaattatccccggagctgagcatggaaggcgacatccgcgacctcatccgcggcgttcagaacagccgcaaggaaatgggactgttagtcctcgaccggatcaaactgactgtctttggctctgaaaaactgaaacaggcatgggacaagatgggcgcaagcgtcgccaaggagacactggcgatacaaaccctctgggcaaaagttgaaggacaaataccgctgaagccggcgatgagacatggctggtga

SEQ ID NO: 37112 - protein, 235 aa, Unknown
  Obtained from environmental sample
  misc_feature (1)..(235): Xaa is any amino acid
MASVQRAVSMGRALRSQYNIKVRQPLRMAELVTRDAAEKSALLEMTEIIREELNVKNVSFRDNEEDLVEYGVKANFRVLGKELGKDMSAAAAKIEALSQDEIRGLIEGASLSLELAGGRTVVLTADKLDIRRNEKANLRILNEGTLTVGLDTELSPELSMEGDIRDLIRGVQNSRKEMGLLVLDRIKLTVFGSEKLKQAWDKMGASVAKETLAIQTLWAKVEGQIPLKPAMRHGW

SEQ ID NO: 37113 - DNA, 309 bp, Unknown
  Obtained from environmental sample
  misc_feature (1)..(309): n is a, c, g, or t
gtgcctgtgaattttaaaggttttcctgttactgttttcaacgagagcgccgcgccgccgcgtgtgtcggagtcgaacttgcttaggattactcccgtaagccctaccttttcgtcaaatgttttagcgatgtcagcggcggcttgtcccgtcattgagtcggctacaaggagcatttcatcggggattacaacgtttttaaggcgggaaagttcctccatcatcggctcgtcaatttgcatacggcctgtagtgtctataatgacggtatcgatcatgtttttgtttgcccatgacaaggcgttttga

SEQ ID NO: 37114 - protein, 102 aa, Unknown
  Obtained from environmental sample
  misc_feature (1)..(102): Xaa is any amino acid
MPVNFKGFPVTVFNESAAPPRVSESNLLRITPVSPTFSSNVLAMSAAACPVIESATRSISSGITTFLRRESSSIIGSSICIRPVVSIMTVSIMFLFAHDKAF

SEQ ID NO: 37115 - DNA, 672 bp, Unknown
  Obtained from environmental sample
  misc_feature (1)..(672): n is a, c, g, or t
gtgtacatagccggacccagccatgccgaggaggtttcacggggcaaaatcactggccttatcgcggccagcgagaacgcgaagaattccttccggtttcgtgacctcctgaagagcaagggcctgtttgtcttttcatcgcttgacgtgcgcggggttcaggtagccgccgccgccaagaacgtcatcgccatcgcgttcgggatgctcgacgcctttaagaccatggaaggtaactcaagcggcgcttccgagtatacgaatctgtttggcgacggaaccgaatccatgcttttggccgcgggcctgaacgaaatacaaagcctgggtatggcgatgggctctacccatccagaaacttttacctccatttccggcatcggcgacctggatgtcacctgccgttccgtctttggcagaaaccggcgtttcggaaaagatattatcgagaaaaaaattcttgagccattcaaagaccttgacgatcttctggcgcgtataaacgagcttggctatctgccggaaggcgttgcggcggcaaaatatgtcaaggttcttgccgaaaaatacaagctaagaatgcccatcgctgcaggcatgtataatattttaaaccgcgagatcgagccggccgattttctggagaattttttgaatgatttaggccggtaa

SEQ ID NO: 37116 - protein, 223 aa, Unknown
  Obtained from environmental sample
  DOMAIN (48)...(217): NAD-dependent glycerol-3-phosphate dehydrogenase C-terminus
  misc_feature (1)..(223): Xaa is any amino acid
MYIAGPSHAEEVSRGKITGLIAASENAKNSFRFRDLLKSKGLFVFSSLDVRGVQVAAAAKNVIAIAFGMLDAFKTMEGNSSGASEYTNLFGDGTESMLLAAGLNEIQSLGMAMGSTHPETFTSISGIGDLDVTCRSVFGRNRRFGKDIIEKKILEPFKDLDDLLARINELGYLPEGVAAAKYVKVLAEKYKLRMPIAAGMYNILNREIEPADFLENFLNDLGR

SEQ ID NO: 37117 - DNA, 834 bp, Unknown
  Obtained from environmental sample
  misc_feature (1)..(834): n is a, c, g, or t
ttgatggccgagcattggacaaacattgaggactgcgccgctttactatcgatcatttcagggccggattcgcgggacagtacctgcgttatagaaaagccttttgaatttggcgaagcaaaatcaaaaccggaaaatgtgaagatagggcttccacgcaactattacggcagcggtattgacgatgaggtaaagaacgctgtcctggctgtcgcgaaagaacttgaggcgtcaggcgcaactatagaagaatttgaaatgccgctcatggattatatgatccccacttattacatcattgcctgcgccgaagcatcgtcaaacctttcgcgttacgatggcttgaaatacggttaccgcagccccaacgcccagtctctttccgaagtgtaccgtctttcccgcaacgagggcttcgggctggaagtaaaaagaagaataatgctcggctcgtttgtgctttcatcggggtattacgacgcgtattacaaaaaagcattacaggtgcgcgctcttatcaaagacgcttacacaaagctgttcactaaatatgacatgatactctccccggtcgcgcctacaaccgcgtacaagataggtgacaacatcggcgacccaatgaaaatgtacatgggcgacatttacaccgtgtcgattaaccttgcgggccttccttccgcggcattgccctgcgggtttgattcaacgggtttgcccataggcttccagcttatcggcgacgctttctcggaaaacaaacttatcaacgcggcgcgggtctaccaatcgcggacaatatatcattcagaaagacctgagggtacagaagcatga

SEQ ID NO: 37118 - protein, 277 aa, Unknown
  Obtained from environmental sample
  DOMAIN (3)...(255): Amidase
  misc_feature (1)..(277): Xaa is any amino acid
MMAEHWTNIEDCAALLSIISGPDSRDSTCVIEKPFEFGEAKSKPENVKIGLPRNYYGSGIDDEVKNAVLAVAKELEASGATIEEFEMPLMDYMIPTYYIIACAEASSNLSRYDGLKYGYRSPNAQSLSEVYRLSRNEGFGLEVKRRIMLGSFVLSSGYYDAYYKKALQVRALIKDAYTKLFTKYDMILSPVAPTTAYKIGDNIGDPMKMYMGDIYTVSINLAGLPSAALPCGFDSTGLPIGFQLIGDAFSENKLINAARVYQSRTIYHSERPEGTEA

SEQ ID NO: 37119 - DNA, 822 bp, Unknown
  Obtained from environmental sample
  misc_feature (1)..(822): n is a, c, g, or t
atgcccggcgtattgcccgtgcttaatcgctcggtggtggagtacgctcttcggcttgggcttgcgcttggatttaacattacccaatactgcaagtttgatcgtaaaaattatttttaccccgacttgccgaaagcctaccaagtatcgcagttgtacgcgccgatttgccgcgacggtcatcttgacatagaagtcgaaggcaaaaaaaagacgattaacatacgcgagatacacatggaagaagacgcgggaaaattgatacacgacgcaaacggcaggggcactttcatggattttaaccgctgcggagtgccgctgttggaaattgtttcacagcccgacttcagcagcgccgcggaagtaatcgcctaccttgaaaaaatgcgcgaaactcttttgtaccttgatatttgcgactgcaaaatgcaggaaggctccatacgcgccgacatcaatctgtccgtgcgccccgcaggcggcgaacttggcgtgcgcaccgaaacaaaaaacatgaattcatttaaagcgattgcgcgcgccattgaatatgaaaccgcgcgtcagattgaaatactggaagacggcggtaagattgttcaggagacgcgccgttgggacgacgaaaaacttgagtcctacggtatgcgttcaaaggaaaacgcgcaggactaccgctatttccctgagcctgatcttctgccgatggagattgacgacgaatggcttgcaaacgttaagaaaaatttgccggagttagcgtatcaaaaaagggagnncggtactatcgcgactttaagatacctgaatccgagtcgatga

SEQ ID NO: 37120 - protein, 273 aa, Unknown
  Obtained from environmental sample
  DOMAIN (213)...(269): PET112 family, C terminal region
  misc_feature (1)..(273): Xaa is any amino acid
MPGVLPVLNRSVVEYALRLGLALGFNITQYCKFDRKNYFYPDLPKAYQVSQLYAPICRDGHLDIEVEGKKKTINIREIHMEEDAGKLIHDANGRGTFMDFNRCGVPLLEIVSQPDFSSAAEVIAYLEKMRETLLYLDICDCKMQEGSIRADINLSVRPAGGELGVRTETKNMNSFKAIARAIEYETARQIEILEDGGKIVQETRRWDDEKLESYGMRSKENAQDYRYFPEPDLLPMEIDDEWLANVKKNLPELAYQKREXGTIATLRYLNPSR

SEQ ID NO: 37121 - DNA, 930 bp, Unknown
  Obtained from environmental sample
  misc_feature (1)..(930): n is a, c, g, or t
ttgagcgacgccttcatgggcagttatgacggaggcggatataccataagcaatctcaccattaacaattcaagtactaattatcaaggcttgtttagctttgttacaggtactacggcgattgtgaaaaacgtcggcattgtaaactgcaatattaccggtcaagccaatgtcggcggcatagcgggggtgacaaacggcactgtgcaaaactgctacgtcacgggctttgtttcaggaaccggcaataatgtaggcggagttgtggggcagatcatgagtaacggtaaggtagaaaactgttataccgcatgtactgtttcaggaaccgggagctatgtcggcggtgttgtgggagataacggcgaaacggttcaaaattgctacgccaccggcgatgtttcaggaacaggaaccagcagtcaatatattggcggcgttgtaggacagagcagtaaattggtgcaaaactgctacgccacaggcagtgtttcaggaagtaactatgtcggcggtgtggtgggaaataacggaggaggtacgctggaaaattgtgtagcactgaacccgaatatcaacggtttgattacgtccggtgttggacgtgttgttggattgtcaggcaacaataagacaaataactacggactgtacatagtgaaaaggaatagtgtttcaccgggagggggggggaatagtgcttattattggggaaatagcttaaacggtaatgacggcgcaacaataatgaatgaagagtggaacagtacaatttacagtccagcttggtggaccggaacccctttccaagcaccaaactgggaaggaacagctaactttagtacgacggtgtggaatattgaagccaacaaattgccaacattgaaagatatgcccggtgaagtgaatcagaccccggcgataaaataa

SEQ ID NO: 37122 - protein, 309 aa, Unknown
  Obtained from environmental sample
  DOMAIN (166)...(193): The GLUG motif
  misc_feature (1)..(309): Xaa is any amino acid
MSDAFMGSYDGGGYTISNLTINNSSTNYQGLFSFVTGTTAIVKNVGIVNCNITGQANVGGIAGVTNGTVQNCYVTGFVSGTGNNVGGVVGQIMSNGKVENCYTACTVSGTGSYVGGVVGDNGETVQNCYATGDVSGTGTSSQYIGGVVGQSSKLVQNCYATGSVSGSNYVGGVVGNNGGGTLENCVALNPNINGLITSGVGRVVGLSGNNKTNNYGLYIVKRNSVSPGGGGNSAYYWGNSLNGNDGATIMNEEWNSTIYSPAWWTGTPFQAPNWEGTANFSTTVWNIEANKLPTLKDMPGEVNQTPAIK

SEQ ID NO: 37123 - DNA, 621 bp, Unknown
  Obtained from environmental sample
  misc_feature (1)..(621): n is a, c, g, or t
gtgacggcggagggggcgtcgggcgttttcattggcttggcggggggcggcataggtgtgttgaggggtatttctgcggggtacgtgtcgggggttagggtttggtcgggcggttttgcggggacgctgggcggaggcggttacgggggtgcgggcggcgccgtgtcgatagggagctgctactgggatgtcggacggtcgttgaggggcgtgtctgccgccggagtcggcaggtcaacggcggagatgctgcggacggatacatatacagggtgggattttgaggatgtttgggagatcggctacgggtatccgcggttgcgcggtcttgagccggattcggttcctgacctctcttttgagcagcgccgcgtatcggcttccgttcacgacaagcccattgcgcgggtggccggcggggttgtctacgtgaacgcgcctaagggcgagtcggtgcggattaggctggttgacatgagggggagggtcgtcgcgaggtatagcgttgtcggtacggcgaggctgtcgatcggcggcaaggtgtcgtccggcaggtacatattggaagcgcggcggggcggcgggcgtgtttttacgtcgtccgtgagggttttgaagtga

SEQ ID NO: 37124 - protein, 206 aa, Unknown
  Obtained from environmental sample
  misc_feature (1)..(206): Xaa is any amino acid
MTAEGASGVFIGLAGGGIGVLRGISAGYVSGVRVWSGGFAGTLGGGGYGGAGGAVSIGSCYWDVGRSLRGVSAAGVGRSTAEMLRTDTYTGWDFEDVWEIGYGYPRLRGLEPDSVPDLSFEQRRVSASVHDKPIARVAGGVVYVNAPKGESVRIRLVDMRGRVVARYSVVGTARLSIGGKVSSGRYILEARRGGGRVFTSSVRVLK

SEQ ID NO: 37125 - DNA, 726 bp, Unknown
  Obtained from environmental sample
  misc_feature (1)..(726): n is a, c, g, or t
gtgagcctaaaaatgatcccgttcgacctgcacgtccacaccatattcagccagtgcggcatccataccgccttggagatactcgcccgcgccaatgagctcggcatgaagggtatcgcgataaccgaccacggccccgccctccccgacgaacgcataaacagcccgttcttcgaacgctttaaatcgccgtaccccgatttgatattcctgaaagggatggagtgcaacttggcggacgatagcggcaaaatcgatatcccggtaaggttcaaagagtgtatggacgtggtgctcttgggcatccaccccaatacgcctatgggcaaaagcgcgtcggcttacactgatatgctgatcgccgcgatagaaaagaatccgtgtatagacataataacccacccgaacgacccgaactatccggtcgattacaaacgcttggccaaagccgccaaagccgccggggtcgccttagagctcaacaactcaaaaattctgtacgccagagcggaggcgcaaagcgcggtggatttggtgacagtctgccgcgacgaaggctgtaaaatggcggtgaacagcgatacccacgctatacatgagttagggttggacgattcggtcaggccgatattaaagtcggttggatttccggaggaaatgatcgttaatagggatgaggcgtctacgatggaatttattgattcgaggcgggggaataagatgtga

SEQ ID NO: 37126 - protein, 241 aa, Unknown
  Obtained from environmental sample
  DOMAIN (8)...(199): PHP domain
  misc_feature (1)..(241): Xaa is any amino acid
MSLKMIPFDLHVHTIFSQCGIHTALEILARANELGMKGIAITDHGPALPDERINSPFFERFKSPYPDLIFLKGMECNLADDSGKIDIPVRFKECMDVVLLGIHPNTPMGKSASAYTDMLIAAIEKNPCIDIITHPNDPNYPVDYKRLAKAAKAAGVALELNNSKILYARAEAQSAVDLVTVCRDEGCKMAVNSDTHAIHELGLDDSVRPILKSVGFPEEMIVNRDEASTMEFIDSRRGNKM

SEQ ID NO: 37127 - DNA, 711 bp, Unknown
  Obtained from environmental sample
  misc_feature (1)..(711): n is a, c, g, or t
atgaaaatacttggaatatttttattactattttctttttcaataattttttctcccgctgtatattcatcggataaagtttttccggaagaaatattatcatttgcttatagtcatgacaataattatattgccgccggaacagtcggaggaataataaatatttataattcaagtacactggatattgaaaaaacatttttcgtgcatgacggcgattttgactatggaagcaataataaaattgaattcagcccggatgataattatatcgcttctttttcagataatgtaatttatataaatgatattgaaaacgggaatacggtatcaagaataacatctcctgatcgttatttatcatctttttcctatagacccgacggtcaaagaattgtttcggtatcgactatcggcgtaataagagtctgggacgtgacaaacggagaagagataatgaaaatagatgaaaatatgtttattgaaattcgtaaaacaagtgataataaagaattgtggccaacattatattacgatattttttatgctggtaatgtttcatacagtccggatggaaataagcttattggacgcctatattcatacattattatatgggacgcagactccggcgcagaaattaccagaatagaatgcccggactggcatgtaatttctgcgtcatttagttcagatgggaaaaaaatatag

SEQ ID NO: 37128 - protein, 236 aa, Unknown
  Obtained from environmental sample
  SIGNAL (1)...(23)
  misc_feature (1)..(236): Xaa is any amino acid
MKILGIFLLLFSFSIIFSPAVYSSDKVFPEEILSFAYSHDNNYIAAGTVGGIINIYNSSTLDIEKTFFVHDGDFDYGSNNKIEFSPDDNYIASFSDNVIYINDIENGNTVSRITSPDRYLSSFSYRPDGQRIVSVSTIGVIRVWDVTNGEEIMKIDENMFIEIRKTSDNKELWPTLYYDIFYAGNVSYSPDGNKLIGRLYSYIIIWDADSGAEITRIECPDWHVISASFSSDGKKI

SEQ ID NO: 37129 - DNA, 831 bp, Unknown
  Obtained from environmental sample
  misc_feature (1)..(831): n is a, c, g, or t
atgagcagtcgaaggcacgggattgacccgcttgaacttgtgaacgaattcggcgcggacgcgatgaagtttacgcttgcctttatgtgcgctcaggggcaggacatgcttgtagacaaggaatcctttaaaatggggacaaagttcgcgaacaagatatggaacgcaagccgctatatactaatgaaccttgaagggcgcgagcttgttaaaaacccgcagttgtcctccgcggacaagtggatttactcccgtctgaacaacgcggcaaaaaacatgagggaggcgttcttttcctaccgttttaatgacgcggctcaggcctcatacgagtttttttggaatgatttttgcgactggtatgtggaagcgacgaaactttccataaaaggcggagataatcctgagaaagatcgcgtaactaccgtcttgctggacgtgctggcgcagtcgctgaaactgcttcacccgcttctgccctttgtgacggaggaaatttatctgaaattaccgcaaacagaaggcaaatccttgcttatcatctccgaatatcctgattatgacgtaaaacgcgatgatccgcttcaagagaaaaatttcgcggatatgcagacgcttgtgggcatggtgcggactatgcgaagcgaatgcgggataacgccggaaaagaaactgcgcgttcttgtccgtaccgcgggcgtacaggcgcaagtcttcaatcaaaacattgatttgattaaactgctggccggaataggggaactgggcattgagggcgccaaagaagacaaaccttcaggttccatagggcttgccggcccggggttttga

SEQ ID NO: 37130 - protein, 276 aa, Unknown
  Obtained from environmental sample
  DOMAIN (79)...(230): Anticodon-binding domain
  misc_feature (1)..(276): Xaa is any amino acid
MSSRRHGIDPLELVNEFGADAMKFTLAFMCAQGQDMLVDKESFKMGTKFANKIWNASRYILMNLEGRELVKNPQLSSADKWIYSRLNNAAKNMREAFFSYRFNDAAQASYEFFWNDFCDWYVEATKLSIKGGDNPEKDRVTTVLLDVLAQSLKLLHPLLPFVTEEIYLKLPQTEGKSLLIISEYPDYDVKRDDPLQEKNFADMQTLVGMVRTMRSECGITPEKKLRVLVRTAGVQAQVFNQNIDLIKLLAGIGELGIEGAKEDKPSGSIGLAGPGF

SEQ ID NO: 37131 - DNA, 582 bp, Unknown
  Obtained from environmental sample
  misc_feature (1)..(582): n is a, c, g, or t
atgacgacagaacaaatgctgcacatgagaggtatccaccttgcgccttatattcaggttgccacattgcttataggaaaatcacgagcaggcggcggaaatatgttccgccaccagcttgatacaatggcaatcttgattgattacggttttatcgacgccgtcctcttaaaagcctcgattgtgcatgatttgatcgaagacatacacgaccttgatcataatatactgctttcaattgattccgacagcaaggctgtttacgatctggtgctggaagtatcaaggcgcaatggcgaaaccaaagcggatttccttatgcgtgtcagggcgaaaggctcttattacgcgaaaatccttaaagtggccgaccgtatttccaacatgatatctttaggctttgtaaataatcttgattttgtagaacggtacatcaatgagacaattgagtatgtgcttccaatcgcgtgggatgtcaaccagtatatgacgcgggaacttacggatttactggagtcaagaaaaaaatatctggaaagattacgggatcagcctgtaatcataaacggtaacaagaaataa

SEQ ID NO: 37132 - protein, 193 aa, Unknown
  Obtained from environmental sample
  DOMAIN (35)...(129): HD domain
  misc_feature (1)..(193): Xaa is any amino acid
MTTEQMLHMRGIHLAPYIQVATLLIGKSRAGGGNMFRHQLDTMAILIDYGFIDAVLLKASIVHDLIEDIHDLDHNILLSIDSDSKAVYDLVLEVSRRNGETKADFLMRVRAKGSYYAKILKVADRISNMISLGFVNNLDFVERYINETIEYVLPIAWDVNQYMTRELTDLLESRKKYLERLRDQPVIINGNKK

SEQ ID NO: 37133 - DNA, 471 bp, Unknown
  Obtained from environmental sample
  misc_feature (1)..(471): n is a, c, g, or t
atgaaacgttttttgccggcgctgatcctgtggtggtgttgctgtgcgccttgtttcgcggggagcgcggaagagccgggcataggcgccatgttgcttctgaacgagatagaccagcaccggggcaaggtcgtggtgctgaatttttttgccacctggtgcgcgccctgtcaggaggaggttcccggcctggtgaacttgcgccggcgctatcccgtggacagggtggccatcctcggcatttccctggatgacgatctgagcctgttgccggcctttgtcgccaaacacaagatcaactatccggtgaaacaggcgagcatggacgtgctgcacatgttcaacgtgcgttccttgccgcataacgtggtatatgacgttacggggcgtcttgcggccaatcagccgggacttatcacggaagaagctttgcagtccgccatcgaccggctcttggggcggaaagaatga

SEQ ID NO: 37134 - protein, 156 aa, Unknown
  Obtained from environmental sample
  SIGNAL (1)...(20)
  DOMAIN (19)...(151): Redoxin
  misc_feature (1)..(156): Xaa is any amino acid
MKRFLPALILWWCCCAPCFAGSAEEPGIGAMLLLNEIDQHRGKVVVLNFFATWCAPCQEEVPGLVNLRRRYPVDRVAILGISLDDDLSLLPAFVAKHKINYPVKQASMDVLHMFNVRSLPHNVVYDVTGRLAANQPGLITEEALQSAIDRLLGRKE

SEQ ID NO: 37135 - DNA, 981 bp, Unknown
  Obtained from environmental sample
  misc_feature (1)..(981): n is a, c, g, or t
ttgatggccgaggtggggcttatacgaagaatacccagggtggccataaaaataatcctgcaattttccaaacgtctcaggtatctgaacgaaactctcgcaaggcttaccctgaaaaacaccgccgatgtcggccctttacatctttatgacgtggcggaatattacctgggccaaaaacagtataaccaggccggacacgcctatgcccaatacgtcaagtattgccccaacggagaaaaagcggcttcagccagggataagctggcgaggctggcaagccgtatcgagcagccgaaattcgccgcgaatgatgtaaaccggacttaccgcaaggatacaatgctctttgccgaaggggagccgggagacgagctttttatcattcaaaaaggctccataaaaattacaaagatcgttgaccataaagaggttcttcttgcgatgttgaaacccggtgatattcttggagaaatggcggtattggaaggcaaaccccgggccgccagcgcgttggctcatgaggactgtgacgtgatggtgatgaacaaggcaaactttgaattgatgattaaagaccagccccaacttatcgccaagatcacaaccctccttgcggaccggctctggctgatttacaagcagttggccaatactctgatcgaaaatccaatgggccggatgtatgacgcgctgcttatccagcttgaaaagaaccgtattaccctggacagcaatacctcttatctctttacctttgggatgcctgaactgattaacatggtcgggcttcccgagaagaagggcaatatagtttttaatgagatgctgganaacaaggaacttcagataataggcaacaaaatccgcactacatctacgcaggaaatccttaaacagtccgaatactttcgcaagatggataaaatagaaaaggccaaacaggaaagccgcctggcaagggaacagggaacagggtag

SEQ ID NO: 37136 - protein, 326 aa, Unknown
  Obtained from environmental sample
  DOMAIN (107)...(196): Cyclic nucleotide-binding domain
  misc_feature (1)..(326): Xaa is any amino acid
MMAEVGLIRRIPRVAIKIILQFSKRLRYLNETLARLTLKNTADVGPLHLYDVAEYYLGQKQYNQAGHAYAQYVKYCPNGEKAASARDKLARLASRIEQPKFAANDVNRTYRKDTMLFAEGEPGDELFIIQKGSIKITKIVDHKEVLLAMLKPGDILGEMAVLEGKPRAASALAHEDCDVMVMNKANFELMIKDQPQLIAKITTLLADRLWLIYKQLANTLIENPMGRMYDALLIQLEKNRITLDSNTSYLFTFGMPELINMVGLPEKKGNIVFNEMLXNKELQIIGNKIRTTSTQEILKQSEYFRKMDKIEKAKQESRLAREQGTG

SEQ ID NO: 37137 - DNA, 726 bp, Unknown
  Obtained from environmental sample
  misc_feature (1)..(726): n is a, c, g, or t
gtgaatatggaacagactgagaccaaagaaatagccggtaaggcggcagtggatgcccttgttaaaagcggcatgaagctggggcttggaaccggttccacggcaattacggcggtaaggtacataggcgcgcttataaaagaaggaaagctctccggcatattggctgtttctacaagttttcaaacttcaatagaatgtgaaacattgggcatcccgcttttcactttgaattcgagggagataaacgcgaagctcgatctgaccattgacggcgctgacgaagttgacggcgaaaacaggctgataaaaggcggcggcggcgctcaattaacggaaaaaatcgtagcctacgcttcggcttcttacgcaatcgtagtcgatgaatcgaaaaccgttgaaaacctgggcgttaaatttcctgtgccggtagaggtggtcggcgaggcgagggtaagtgcaacgctggcccttgaaaagcttggcgcggaggtaacgcttaggcaggcccttcgcaaggccgggccggtcgttaccgaccacggcaatcttattttggacatacgcttcgcaaaagcccccgatccggttctaatggaaagggaaattaaccgcatccccggcgtggtagaaaacggtttcttcaccggcccgctcgacaggcccttgcgtccggttgtttttatcgcccatgcggacggtagggttgagaaacgggtttattag

SEQ ID NO: 37138 - protein, 241 aa, Unknown
  Obtained from environmental sample
  DOMAIN (54)...(236): Ribose 5-phosphate isomerase A (phosphoriboisomerase A)
  misc_feature (1)..(241): Xaa is any amino acid
MNMEQTETKEIAGKAAVDALVKSGMKLGLGTGSTAITAVRYIGALIKEGKLSGILAVSTSFQTSIECETLGIPLFTLNSREINAKLDLTIDGADEVDGENRLIKGGGGAQLTEKIVAYASASYAIVVDESKTVENLGVKFPVPVEVVGEARVSATLALEKLGAEVTLRQALRKAGPVVTDHGNLILDIRFAKAPDPVLMEREINRIPGVVENGFFTGPLDRPLRPVVFIAHADGRVEKRVY

SEQ ID NO: 37139 - DNA, 1002 bp, Unknown
  Obtained from environmental sample
  misc_feature (1)..(1002): n is a, c, g, or t
atgaaaattcgtttcaaaattattcttgtggtactgccggtggtggtacttgccctctgcatcgcccaggatgcctccttttttgccgcccggagcggcttgatgcgcctggctcagtcattttttctttttaaaacttccgaattaaaaaaatacgctgaaggccagtgggatctacttttggaaaacaatttttcaggccgcccggagatggtagaggcggcaaaaaattcgctgcttctttacggacagagcattatccttagcgaaaccgaaataatccttgccctggacgacgaaggtaaaatagccatgtctacttctcccttacaaatatcgcagattgaaagagaaaatatcattaaacttttaataaatgagagagaggggctatatagcgcctctctgggcgggacagaacgggtttttacctctttttattttacgcccttcagctggtacattctccttaccgaagaagaagccagtttttacagggacgcgtacaagattcgcttccagaccagcatagtgctcgcgattactttggttcttactacggtgttgctgatattttttgccctgcatcttaccaatcccctgaaaagggtggtagacgcgatgaacggcattacatccaacggagacctttcttcgagggtggaggtggagtataacgacgaaacagggaaactggccgccacttttaacctgatgatctcggagctggaaaaagcctacgcccagataaagcgctacgctttgaagcggttttggctggtaaaaaagaacagaggatccgccagattttccagaagtacgtccccaaagaccttatcgacaaattttttgcctccccggaatccatgctggttggcgaaaacaggacgctggcaatacttttntcagacatccggagtttcacaaccatttctgaaaacatggccccggatgatctcgttaattcgctcaataggtatttttccggccaggttgacataa

SEQ ID NO: 37140 - protein, 333 aa, Unknown
  Obtained from environmental sample
  SIGNAL (1)...(22)
  DOMAIN (175)...(245): HAMP domain
  misc_feature (1)..(333): Xaa is any amino acid
MKIRFKIILVVLPVVVLALCIAQDASFFAARSGLMRLAQSFFLFKTSELKKYAEGQWDLLLENNFSGRPEMVEAAKNSLLLYGQSIILSETEIILALDDEGKIAMSTSPLQISQIERENIIKLLINEREGLYSASLGGTERVFTSFYFTPFSWYILLTEEEASFYRDAYKIRFQTSIVLAITLVLTTVLLIFFALHLTNPLKRVVDAMNGITSNGDLSSRVEVEYNDETGKLAATFNLMISELEKAYAQIKRYALKRFWLVKKNRGSARFSRSTSPKTLSTNFLPPRNPCWLAKTGRWQYFXQTSGVSQPFLKTWPRMISLIRSIGIFPARLT

SEQ ID NO: 37141 - DNA, 423 bp, Unknown
  Obtained from environmental sample
  misc_feature (1)..(423): n is a, c, g, or t
atgggagcgcgggttcttctcgcgttgatcaaccgcgcccagccgcgtggcggcaaagttttttccgaacaccatgccgaacgggctgttgaaaccgaagcaatgacctgcatcaattccatggaaaccgggtttaattttctggtcgctttgggttccctctcaccccttaccggctttttgggaaccgtatcggggatgattggcgcgttcaaatccatagccgaggcaaccgaagtaaacgcccaaatcgtcgccaacggcatttacgaggcgctgatcaccacggttttcggtttgatcatcgccattatcgccatgatcttccattcggttttcagccacattgtcgataaatttgccgccgaaattgagacaacctgctccgatctgatagcggaaatcgccgacaatcagccatag

SEQ ID NO: 37142 - protein, 140 aa, Unknown
  Obtained from environmental sample
  DOMAIN (1)...(129): MotA/TolQ/ExbB proton channel family
  misc_feature (1)..(140): Xaa is any amino acid
MGARVLLALINRAQPRGGKVFSEHHAERAVETEAMTCINSMETGFNFLVALGSLSPLTGFLGTVSGMIGAFKSIAEATEVNAQIVANGIYEALITTVFGLIIAIIAMIFHSVFSHIVDKFAAEIETTCSDLIAEIADNQP

SEQ ID NO: 37143 - DNA, 486 bp, Unknown
  Obtained from environmental sample
  misc_feature (1)..(486): n is a, c, g, or t
gtggctgatgatagacgcgacacacgtcaagtttcatcagcacggcgcaggtgccagggggggcagccaggagattgccggtacaaaagggggctcaacacaaaggtacatctggccgtggattcgcatggtatgccggtcagagtcattgttacggctggcaacgtcgctgactgcacacaggctggcgggcttgttgggggcatagaggcggaggccctgatagcggacaggggctacgacaccgacgcgatagtggagatggcgaaggcggccggcatggtgcccgtgataccccccaaggcgaacaggaaggagcagcgaaggtacgacgagtacatctaccgcctccgccacctcgtcgagaacgcctttgccgagatgaagcggtggaggggcatagcaacgcggtacgccaagaacgcggcctcgtacctggcggccgtccatttccgctgcatcatgatgtgggctaaaatctattga

SEQ ID NO: 37144 - protein, 161 aa, Unknown
  Obtained from environmental sample
  DOMAIN (9)...(158): Transposase DDE domain
  misc_feature (1)..(161): Xaa is any amino acid
MADDRRDTRQVSSARRRCQGGQPGDCRYKRGLNTKVHLAVDSHGMPVRVIVTAGNVADCTQAGGLVGGIEAEALIADRGYDTDAIVEMAKAAGMVPVIPPKANRKEQRRYDEYIYRLRHLVENAFAEMKRWRGIATRYAKNAASYLAAVHFRCIMMWAKIY

SEQ ID NO: 37145 - DNA, 1227 bp, Unknown
  Obtained from environmental sample
  misc_feature (1)..(1227): n is a, c, g, or t
atgcgaaagctgaattccaaaatgactggagcgatgaacgaggggattaccggctccaaaacggtcaaggtgcttgtcgcggaagagcggagcctgaaagagtattccgcgattaccggagaatacaggcatcacgccacgcacatggcgcatctccgctctaccttcatcccgcttgtcctttttgtcgggtcagccgcgacagctacggttctgggttacggcggatacgaaatcgcctttatgggggcggatcttgcaatcctcgcgatttttttgcagtacgccggaggcttcttcgatcccatccagaacatcgccaacatcttcacggaattcgtttccacccaggccaacattgagcgcgtgagcgggcttctcgagcagactcccggtatagttgacaggcccgatgtaatcgagaaatacggcgataatttttcggggaaaaaagaaaactgggaacctatcacaggcgacatagaatttaaggacgtgacttttatgtatccggacgggactgaaaacgtgcttgagcgtttcagcctgcatgtgcccgccggaacctacattgccattgtgggggaaaccggcgcgggcaagtccaccctggtgaatctggtctgccgtttctttgagccgaactcaggcgaaatcctggttgacggccgggactacagggagcggagccagctatggcttcacagcgccctcggttacgtgctgcagagtcctcacctttttaccggcacgatcagggacaacatacgctacggcaggcttgaagcgagcgacgaggaagttgaagccgccgccaggatagtccacgcggacagggtgatcaacaaactggaaaagggttttgacaccgaagtgggggagggcggcgaccggctttccaccggggagaaacagctcatctcatttgcaagggcggttcttgcggatcccaggctcttcattctcgacgaggccacaagctcgattgacactgaaatggaaatgcttctgcaagaggccattcacacgcttttggagaaccggacgagttttgtcatagcgcacaggctttctaccatcaggaacgcggacattatccttctggtggataacggcaagatcgtcgagcgcggaacccacagcgagcttatgaattcgagggggaagtactacggcctttacacgcgtcagtttgaggaagaagcggaggaagaggttttgagatag

SEQ ID NO: 37146 - protein, 408 aa, Unknown
  Obtained from environmental sample
  DOMAIN (188)...(372): ABC transporter
  misc_feature (1)..(408): Xaa is any amino acid
MRKLNSKMTGAMNEGITGSKTVKVLVAEERSLKEYSAITGEYRHHATHMAHLRSTFIPLVLFVGSAATATVLGYGGYEIAFMGADLAILAIFLQYAGGFFDPIQNIANIFTEFVSTQANIERVSGLLEQTPGIVDRPDVIEKYGDNFSGKKENWEPITGDIEFKDVTFMYPDGTENVLERFSLHVPAGTYIAIVGETGAGKSTLVNLVCRFFEPNSGEILVDGRDYRERSQLWLHSALGYVLQSPHLFTGTIRDNIRYGRLEASDEEVEAAARIVHADRVINKLEKGFDTEVGEGGDRLSTGEKQLISFARAVLADPRLFILDEATSSIDTEMEMLLQEAIHTLLENRTSFVIAHRLSTIRNADIILLVDNGKIVERGTHSELMNSRGKYYGLYTRQFEEEAEEEVLR

SEQ ID NO: 37147 - DNA, 642 bp, Unknown
  Obtained from environmental sample
  misc_feature (1)..(642): n is a, c, g, or t
gtgaaaaacgcgcacgccgagcatatcgcccagaccgtcgccaccgtcctcagtctgggcggcgcgaacgcgggcgacgtcacgcacgtggccgtatcggcgggtcccggatcgtttaccggattgcggataggattgtcatttgtcaaaggattttgtatggccgtcgagcgttccgttctcccgttatcatcgctcttggcgctcgcccacgccgccacggccggttgcggcggctgtccatcccaaagaatatttaccgccttggacgcgcgtcaggaacgggtgcattggggtagtttcgtctataacggcgataggaaaattatccgcaggctgaccgaagaccgcctatcgccgccggaagagttgctcggcgaattatcaccgaacgatcttttggttatcgataccatgggatatcagcgcagcgcggtattcagccgattttgcggcgcggcgcaaatcgtcgacgctcgaaagtcttatctgaggcgcggtttgtcgtgcgcgtctatcgcttttgacaatatcgttaacggcggtaatcacgatagcggcgagtttaggtggctctccgcctctttgatcgttcccaactacctgcaggcctccgccgcggaggaaaagagggcctcatga

SEQ ID NO: 37148 - protein, 213 aa, Unknown
  Obtained from environmental sample
  SIGNAL (1)...(24)
  DOMAIN (3)...(211): Glycoprotease family
  misc_feature (1)..(213): Xaa is any amino acid
MKNAHAEHIAQTVATVLSLGGANAGDVTHVAVSAGPGSFTGLRIGLSFVKGFCMAVERSVLPLSSLLALAHAATAGCGGCPSQRIFTALDARQERVHWGSFVYNGDRKIIRRLTEDRLSPPEELLGELSPNDLLVIDTMGYQRSAVFSRFCGAAQIVDARKSYLRRGLSCASIAFDNIVNGGNHDSGEFRWLSASLIVPNYLQASAAEEKRAS

SEQ ID NO: 37149 - DNA, 927 bp, Unknown
  Obtained from environmental sample
  misc_feature (1)..(927): n is a, c, g, or t
ttgtcttccgatcgccttacaggcataactttagatgttaataatcctaatttttcaagcgtagacgggatactgtacaacaaagcaaaaacagaatttgtcttgattccaaaaaatataaccgggaatataaatatacccggcggcattattaacattaaggaaagagcttttgaatctaaaaacattaccggtgtaattatagggaacggtattaccggtatcggagagggcgccttttccgattgcaaaagacttgccggcgtaacaataccgaatagtgtttccgccattggagaaaacgccttttccggctgtatcggcctgaccagaataacatttcccaataacaccggttttacaagcattgcgagtaacgctttttccggctgcagcaaacttaccagcgtaacgatacccaatagtgttaccgtcatcggagagaacgcttttcatggttgtacaagccttgtcagcgtaaccatagggagcagcgttgccagaattgaggagaacgctttttctgaaaccagactgatcggtattatccttcccaacagcgttatttacgtaggtaaatacgcgttttacagcgacagccttatcagcgtaagatttgaaaaaaaagatatcgaaattgataaccctgcgttccccgccgatagtttaccgaacgcgtacaaatcgggaggtgtgggaacatacacaagggcaagcggcggtaacaactgggcgacaacggcgacggcagccagagatgaaaaggaatccaatgcaatatccaagtataacaacttattgaataaagcgacggcacctttctcagaaagtatcgggatacagaacaaaccgcccccaaacaaccgacgttatcaaagacgcggcaaaagaatataccgctcttttaacagaaatggcggagtttag

SEQ ID NO: 37150 - protein, 308 aa, Unknown
  Obtained from environmental sample
  misc_feature (1)..(308): Xaa is any amino acid
MSSDRLTGITLDVNNPNFSSVDGILYNKAKTEFVLIPKNITGNINIPGGIINIKERAFESKNITGVIIGNGITGIGEGAFSDCKRLAGVTIPNSVSAIGENAFSGCIGLTRITFPNNTGFTSIASNAFSGCSKLTSVTIPNSVTVIGENAFHGCTSLVSVTIGSSVARIEENAFSETRLIGIILPNSVIYVGKYAFYSDSLISVRFEKKDIEIDNPAFPADSLPNAYKSGGVGTYTRASGGNNWATTATAARDEKESNAISKYNNLLNKATAPFSESIGIQNKPPPNNRRYQRRGKRIYRSFNRNGGV

SEQ ID NO: 37151 - DNA, 963 bp, Unknown
  Obtained from environmental sample
  misc_feature (1)..(963): n is a, c, g, or t
atgggaaccaaaaaatactacaacaacccggatgcggaaattgaatgggcggaagattacgccaaaaagcgggaaggcgtttacgattacggctttcccaacattaaacccaatcagggaatcaatatagtggcgggtgcgtttggctgtcagtgcaaagtcaacgacgaagccgacccctgggttgactgcatcatccgcgaagaaaacgtcgatgatgttttcaagctgaaagttcccgaccccgtaaataatccctattttgaacaggcgtggaaacacgtcgaggctctacaaagcaaatcgaaaattccgctgagggtcgtcaacgttccttcgccgcttgttacagcgtcccttatttgggaatatacctcatttatagaggcgacgcttgtctaccctgacgaagttcacgcgcttatggataaaatcacggaagcgactatcggctacattaaagaaatgtttaaacggataacaaacctctacggggtgagtcatgaattttggtatgtgccgaaagagatgggcatccgcgtaagcgacgacaccgccgcgcttctttcacctaacctgtaccgcgaattcggcgtaaagtacaattcaatgatagcgaaagaatttaacggcattgtagtacattcctgcggcgacgtatccaatgtcgcggaagcgatgatggaaatccccggactgcgcggcctagatttcactatcccccaggtgcagaattgggaaaaagtccgcgacgcggtatcgggaaaaactcccctctgtctgcgtcacttttactgggatcatcttgacgacggactttcaagcgtagacgaccttgccggttactcaaaaaaactgattgacttctttgggcgcaagggtgtgtttattcaaacatcgacaaagactccggaagaagccgttgcgttaggcgataaaatgcacaaactgatgtcaaaataa

SEQ ID NO: 37152 - protein, 320 aa, Unknown
  Obtained from environmental sample
  misc_feature (1)..(320): Xaa is any amino acid
MGTKKYYNNPDAEIEWAEDYAKKREGVYDYGFPNIKPNQGINIVAGAFGCQCKVNDEADPWVDCIIREENVDDVFKLKVPDPVNNPYFEQAWKHVEALQSKSKIPLRVVNVPSPLVTASLIWEYTSFIEATLVYPDEVHALMDKITEATIGYIKEMFKRITNLYGVSHEFWYVPKEMGIRVSDDTAALLSPNLYREFGVKYNSMIAKEFNGIVVHSCGDVSNVAEAMMEIPGLRGLDFTIPQVQNWEKVRDAVSGKTPLCLRHFYWDHLDDGLSSVDDLAGYSKKLIDFFGRKGVFIQTSTKTPEEAVALGDKMHKLMSK

SEQ ID NO: 37153 - DNA, 435 bp, Unknown
  Obtained from environmental sample
  misc_feature (1)..(435): n is a, c, g, or t
atgggaaggccaaaaataatgcccgcactttttaacttcgaggttcacactccccggcggcttttttattccggcaaagtgcaggcaatcaccctcgttcttgaagacggcgaaatcggaatatacgcaaaccattccccctttaccgcgctctccgttacaggcatactccgcattaaagacgagaacggcaactggcgcaccgcatttgtctgcggcggcgttttggaagtgaaggagcacaagaacgtactgatggcggataacgccgaatggccggaagaaattgacaaagaacatgctcttaaaatcaaacgagaggctgaagaaatattaatggatccacatttaaaatttgaggttgcccaagtaaaagaaagactgcgcagagcggagtgtaaattgaagattttggaaacagaaacaaagaaataa

SEQ ID NO: 37154 - protein, 144 aa, Unknown
  Obtained from environmental sample
  DOMAIN (10)...(92): ATP synthase, Delta/Epsilon chain, beta-sandwich domain
  misc_feature (1)..(144): Xaa is any amino acid
MGRPKIMPALFNFEVHTPRRLFYSGKVQAITLVLEDGEIGIYANHSPFTALSVTGILRIKDENGNWRTAFVCGGVLEVKEHKNVLMADNAEWPEEIDKEHALKIKREAEEILMDPHLKFEVAQVKERLRRAECKLKILETETKK

SEQ ID NO: 37155 - DNA, 705 bp, Unknown
  Obtained from environmental sample
  misc_feature (1)..(705): n is a, c, g, or t
atggcaacgggtaaaaatccccacgtcgtacggcaaagacgcagtgcacggcaacgccggcgtaaagggttacacggtgttccctcacaacataggcctcggcgccacccgcgactccgcgcttgtaaggcgcataggcgaggcgccggccaaagagctgtggacagccggcatagacctaaacttctcgccggccatatcggtagtccgcgacacgcgttggggccgctcctacgaaagctacggggagaccgccgaactcgcggtacagatgggcgcggccatggtgcgcggtttgcagggcgagcgtttcaacgccccctggcgcgtaacggcgaccgccaaacattacgtgggcgacggcggcacaaccgacggcaaggatcgcggaaacacggacattacggacgatcagttgcgagccgtccacctgcccggctacgaggccgtggtggaacagggcgtcctgagcgttatggcgagtttcagccaggtgcgcacggtgcatcagcacatcgactccacccgccttaccggatggctcaagacggaactgggcttcgacggctatatcataagcgactggcagggcatagccaactccaaccaaccaggggtcacctcgccggacggctaccgcccccggcgccaaccccgggcctacgcttacaaaggagcggtgcgcaaggcgataacgccgtatag

SEQ ID NO: 37156 - protein, 234 aa, Unknown
  Obtained from environmental sample
  misc_feature (1)..(234): Xaa is any amino acid
MATGKNPHVVRQRRSARQRRRKGLHGVPSQHRPRRHPRLRACKAHRRGAGQRAVDSRHRPKLLAGHIGSPRHALGPLLRKLRGDRRTRGTDGRGHGARFAGRAFQRPLARNGDRQTLRGRRRHNRRQGSRKHGHYGRSVASRPPARLRGRGGTGRPERYGEFQPGAHGASAHRLHPPYRMAQDGTGLRRLYHKRLAGHSQLQPTRGHLAGRLPPPAPTPGLRLQRSGAQGDNAV

SEQ ID NO: 37157 - DNA, 537 bp, Unknown
  Obtained from environmental sample
  misc_feature (1)..(537): n is a, c, g, or t
atgcacgatattctagttataggcgcaggcattgctggcttaaccgttgctttgaaggcagcagaaagcggcaagagcgttttgcttttaacaaagggtgctagtccagatggttcaacaaattatgcgcaaggaggcattgcatctgtaacatcgccagaagattcttttgaaagccatattgcagacactttagaagccggagatggcttgtgcaaaaaaaggcaggtggaaattttaaccaaaaatgcaccaaaagccatagagcagttgctcaaatggggagttaatttcacaacatcaaaaaatgatgaaaaggcttttgatttgcatttggaaggcgggcatagctttaggcgaattttgcacacagcagacttaaccggcaaagaaataatgagggcactgcttgcagaattaaaacatcattcgcaaggaatagattttattgaacacagcactgttttggagttgataacacaaaaatcacgttgtgttggggaatcgacgttgcgttggggcagtcgtggcaagtag

SEQ ID NO: 37158 - protein, 178 aa, Unknown
  Obtained from environmental sample
  SIGNAL (1)...(20)
  misc_feature (1)..(178): Xaa is any amino acid
MHDILVIGAGIAGLTVALKAAESGKSVLLLTKGASPDGSTNYAQGGIASVTSPEDSFESHIADTLEAGDGLCKKRQVEILTKNAPKAIEQLLKWGVNFTTSKNDEKAFDLHLEGGHSFRRILHTADLTGKEIMRALLAELKHHSQGIDFIEHSTVLELITQKSRCVGESTLRWGSRGK

SEQ ID NO: 37159 - DNA, 747 bp, Unknown
  Obtained from environmental sample
  misc_feature (1)..(747): n is a, c, g, or t
gtgccgcaggatccccttacggcgagtatacgcgaggccctgccgggcgctaactgcggggcctgcggcttccccggctgcgagaattacgcgattgccatagcaagcggaaacgcaggcattagttcctgctcggtcggcggccccgcccttgttgaaaaactcgcccaaatcaccggcaaggcgggggaagcggtgaagtcaaccgtcgcggttcttgcctgccaggggtcatatcttcacaccccgcaaaaaggaatctacacaggcattaaaaactgccgcggcgcgaaaatagcgacaggcggaaccaagttctgttctttcggctgtcttggttttggcgactgcgtgaaggtgtgcaaatttggcgcaattggcatggatattaaaaaaggcctgcctgtgattgatatcgcgaaatgtacaggctgcgggatgtgcataacagaatgtccccagtctattatcaagtctgtcgccagagatcagaaaggcgcgatggtgctctgctcgaacaggagtcttaacaggcagcaggtggcgaaaagctgcaaaatctcctgcatcaaatgcggccagtgcgtgaagcaatgccctcaacagtgcatagagttaggcacaaatattcccgttgtagatctggctaaatgcacatcctgcggaacctgcgtggaaaaatgccccacaaaggtgatgaaaattattgagaaacaattagcaattagcaatgagcaatgggaataa

SEQ ID NO: 37160 - protein, 248 aa, Unknown
  Obtained from environmental sample
  DOMAIN (13)...(47): Putative Fe-S cluster
  misc_feature (1)..(248): Xaa is any amino acid
MPQDPLTASIREALPGANCGACGFPGCENYAIAIASGNAGISSCSVGGPALVEKLAQITGKAGEAVKSTVAVLACQGSYLHTPQKGIYTGIKNCRGAKIATGGTKFCSFGCLGFGDCVKVCKFGAIGMDIKKGLPVIDIAKCTGCGMCITECPQSIIKSVARDQKGAMVLCSNRSLNRQQVAKSCKISCIKCGQCVKQCPQQCIELGTNIPVVDLAKCTSCGTCVEKCPTKVMKIIEKQLAISNEQWE

SEQ ID NO: 37161 - DNA, 912 bp, Unknown
  Obtained from environmental sample
  misc_feature (1)..(912): n is a, c, g, or t
atgaaaaatcttaaagtttcaatgaagttgctggtgggtttcggccttatggtcgcgttaatcctgactatcagtcttgtaagcgttttcaacctgctcggcattgacaccacgtactcggatgtcattacccgtcacgccctgcctttgaatccggctattaacgtcgtcggaaacattcaggccatgcgttccgaaactcggaactgcgtcatcttttccggcaacaaggagaaggtgcgggaggcgaaaaccgcgctggaccgtctcaccaaagagtttgaggacagcgccgcgtctttcggcaagagcattgtgtcgcccgacgccaaggcgaagtttaacgaggctatgagacaatataacgaaatttataaaccgggcgcgtataaacttgtggaagaaggggaaaaaaacacgccgaacgcggaaatgatagaacttttggccgccataaaaaactcgtcggacgtagttacgaataccatggacgaagtggcggacctcaaggtagataatctaaaaacctcctcaaacgactgtaccaaccaatccaagaacagcgctgttatgatggttataattctcgttgccagcgtagtcatcgccgtgattttcggcgtctatataagcacaatgataagcaaaccgttgggcgttaccgtaaacatgataaacgagatgagcaaagggcatttggacaccaggctgcgccttgaccgagaagatgagatcggcgttatggcgaagacgatggattctttcgccgacgacttgcagaataacgtggtgggcaacatgaagaaaatctccgacggcgacttggagataaagatagaccttaaggacagcagggacgaggtatccgccgctctcaaaatacggtggaggccctgcgcgcgcttatcatag

SEQ ID NO: 37162 - protein, 303 aa, Unknown
  Obtained from environmental sample
  SIGNAL (1)...(27)
  DOMAIN (192)...(261): HAMP domain
  misc_feature (1)..(303): Xaa is any amino acid
MKNLKVSMKLLVGFGLMVALILTISLVSVFNLLGIDTTYSDVITRHALPLNPAINVVGNIQAMRSETRNCVIFSGNKEKVREAKTALDRLTKEFEDSAASFGKSIVSPDAKAKFNEAMRQYNEIYKPGAYKLVEEGEKNTPNAEMIELLAAIKNSSDVVTNTMDEVADLKVDNLKTSSNDCTNQSKNSAVMMVIILVASVVIAVIFGVYISTMISKPLGVTVNMINEMSKGHLDTRLRLDREDEIGVMAKTMDSFADDLQNNVVGNMKKISDGDLEIKIDLKDSRDEVSAALKIRWRPCARLS

SEQ ID NO: 37163 - DNA, 774 bp, Unknown
  Obtained from environmental sample
  misc_feature (1)..(774): n is a, c, g, or t
ttgaacgaaaaggcttttttctatcaaaatgacgcgctgctgctgccggaggattttccggagactgaaattgagaaggggcttccgaaagatttagctaaaaattttacaaataccgatatttttgaagtgccgccccttgtctcggcgtctcctatgataaacgcggtatccgtttttccggggacagagcttccttcaggctggaagagcatacctgtccgttatctttttacggcaataagcgccgaaggtatgggaagaattcttcgcgcctgccacatcgcccaatggcgcaacgactcacgcttttgcggaagatgcggcgcgaaaaacacggatgcgggcggaaatcctgaaaggcgctgtcccgcgtgcggaaggatagagttcccgagaatatgcccggccgtaattatcatcatcaccgacagtgaaaacaaaatccttttggctcacaataaaaaatttatcgcgaatgtttacagccacatatccggctttaacgaagcgggcgaaactttggaagaaaccgtagtaagagaaatccgcgaagaagtaaacatagaagtaaaagacattgaatacataaaatcccaaccctggcctttcccctactcactgatggtaggctacaaagccaaatacctatcggggacgcttcaccccgacggcgaggagattgaagatgcgaagtggttcacaaaagacaatctgccggcgttaccaagagaaggctctttatcccgctatctaattcaactgttggattaa

SEQ ID NO: 37164 - protein, 257 aa, Unknown
  Obtained from environmental sample
  DOMAIN (134)...(255): NUDIX domain
  misc_feature (1)..(257): Xaa is any amino acid
MNEKAFFYQNDALLLPEDFPETEIEKGLPKDLAKNFTNTDIFEVPPLVSASPMINAVSVFPGTELPSGWKSIPVRYLFTAISAEGMGRILRACHIAQWRNDSRFCGRCGAKNTDAGGNPERRCPACGRIEFPRICPAVIIIITDSENKILLAHNKKFIANVYSHISGFNEAGETLEETVVREIREEVNIEVKDIEYIKSQPWPFPYSLMVGYKAKYLSGTLHPDGEEIEDAKWFTKDNLPALPREGSLSRYLIQLLD

SEQ ID NO: 37165 - DNA, 834 bp, Unknown
  Obtained from environmental sample
  misc_feature (1)..(834): n is a, c, g, or t
atggcgaggcttttgaggatctttgtactgcggcttgacagggtattctgccatgagattacaaccccctccgcgataaacgatctggtttctaaaaatctggacaaggtttttgaccccgctaaaataaaagcggtgatagatcatgtaacgccggcaaaggattcgcagaccgcattgcagggaaaaaccctgcgcgactgggcgcggcggcataatatcaaggacttttttgacattggacgcaatggtgtttgccacgcgattttcccggaaaaaggatttgtccgcccgggctttacgattatcatgggcgacagccacacctgtacccacggggccttcggcgcttttgccgccggcgtggggaccaccgatcttgaggttggtatattaaaaggcgtttgcgccttcggtaaaccggaaactctgcgtattaatctgctgggagaactgcctaaggacgtttctcccaaggacgtaatcctcgcaatcatttccaaaataagcgtttccggcgcgtcgggaaaagttatggaactgcgcgggcccgtaatttccgccatgagcatggaaggcagaatgacgatctgcaacatggctgtcgaggcgggagccaccagcggcgtatgtatgcccgatatgacaaccgtaaattacctgtggccctttatcggtccaaacggcgataagacttattcaagcaaagaagaggcgcttaaggatttttccaaatggataagcgatgatgacgcggagtattcgggcgttgtcgatattgattgctcaaaactggagccgcttgcgactgtcggatacagcccgacgaagtaa

SEQ ID NO: 37166 - protein, 277 aa, Unknown
  Obtained from environmental sample
  DOMAIN (1)...(277): Aconitase family (aconitate hydratase)
  misc_feature (1)..(277): Xaa is any amino acid
MARLLRIFVLRLDRVFCHEITTPSAINDLVSKNLDKVFDPAKIKAVIDHVTPAKDSQTALQGKTLRDWARRHNIKDFFDIGRNGVCHAIFPEKGFVRPGFTIIMGDSHTCTHGAFGAFAAGVGTTDLEVGILKGVCAFGKPETLRINLLGELPKDVSPKDVILAIISKISVSGASGKVMELRGPVISAMSMEGRMTICNMAVEAGATSGVCMPDMTTVNYLWPFIGPNGDKTYSSKEEALKDFSKWISDDDAEYSGVVDIDCSKLEPLATVGYSPTK

SEQ ID NO: 37167 - DNA, 462 bp, Unknown
  Obtained from environmental sample
  misc_feature (1)..(462): n is a, c, g, or t
ttgctcaaaactggagccgcttgcgactgtcggatacagcccgacgaagtaaaacccctgcgggaacttgagggaacaaaaatcgatcaggtgtacatcggctcctgcaccaacggcagaatcgaagatttacgcgccgccgcaggcgttcttcgcggcagaaaaatcgccgacacggtacgcgcgataatcgcgccggctaccacggacatttacgctcaggccctcaaagaggggcttattcaaacttttcttgacagtggctgctgcgtgacaaacgctacctgcggcgcgtgccttggaatgtccaacggcgtgcttgccgaaggtgaggtttgcgcttccaccactaaccgcaatttttacgggcgcatgggcaaaggcggcatggttcaccttatgggtcccgaatcggcggccgccgctgctgtcgctggcgtgattaccgcgaggaggcagtaa

SEQ ID NO: 37168 - protein, 153 aa, Unknown
  Obtained from environmental sample
  misc_feature (1)..(153): Xaa is any amino acid
MLKTGAACDCRIQPDEVKPLRELEGTKIDQVYIGSCTNGRIEDLRAAAGVLRGRKIADTVRAIIAPATTDIYAQALKEGLIQTFLDSGCCVTNATCGACLGMSNGVLAEGEVCASTTNRNFYGRMGKGGMVHLMGPESAAAAAVAGVITARRQ

SEQ ID NO: 37169 - DNA, 516 bp, Unknown
  Obtained from environmental sample
  misc_feature (1)..(516): n is a, c, g, or t
atgaaagtattcggcggagaagttttatttcttgatcgcggcgatattaacaccgatgaaattatcccggccaagtatttaaccgaggacaccaggacagcgttaaagccccatcttctggaagacttaaaaataaaaggctttgacccagtgaaagacattgccggaaaaggcgcggtgctgactcgggcgaacttcggatgcggttcctcgcgggaacacgccccctgggcgcttgaggtaaacgggattaacatcgttatagctgaaagtttcgcccgcatcttccggcagaacatgtacaactgcggcatgatcgcctgcgaagcgccggccgccgccctggaagaactgtttaaggaattcgcgaatgagaaaacaacattaacggttgatacagtcaagggcagtttgattttaaagcgggcggaaaagaaaacagtttctttttatttaaagattttgaaaagcgctggtggaagcggcggctggtcgagtacgccgcaagcatactag

SEQ ID NO: 37170 - protein, 171 aa, Unknown
  Obtained from environmental sample
  DOMAIN (1)...(113): Aconitase C-terminal domain
  misc_feature (1)..(171): Xaa is any amino acid
MKVFGGEVLFLDRGDINTDEIIPAKYLTEDTRTALKPHLLEDLKIKGFDPVKDIAGKGAVLTRANFGCGSSREHAPWALEVNGINIVIAESFARIFRQNMYNCGMIACEAPAAALEELFKEFANEKTTLTVDTVKGSLILKRAEKKTVSFYLKILKSAGGSGGWSSTPQAY

SEQ ID NO: 37171 - DNA, 852 bp, Unknown
  Obtained from environmental sample
  misc_feature (1)..(852): n is a, c, g, or t
atgaaaaaatacttcgctgatatgattcccaacttctccaccgcgaagagtccccagcagatgatgggggccatgatcaaagcttactgggcggaaaaagcttctgtaaaccctgaaaagattttttccgtttctgtgatgccctgtacagccaaaaagtgggagacacaccggaataatgatatgaaaagtgccgccaagttccttggaaagggcatcggttgggatgttgatattgcaattaccaccagagagctggcccggatgatcaagcaggcggggattgaggttcttaaactggctgacgaagaagcggacaacccgatggggccgtataccggtgcgggaaccatttttggtacaaccggtggggtaatggaagccgccgtaagaagcgcgtactttttggtgactaaaaaagaactgggcgatgtgaactttaagcctgtccgtggtctggaaggagtaaaggaagccgaggttgattttggggtagagcttccaaacggccttggaaaaaagatacgcattgcggttgcccatcagatggggaatatagaagccgtgcttaacaaaatccgcgccgccagagatgctggaaaagaaaccccctaccatttcgtggaagttatggcatgcaggggcgggtgcatagccggtggcggccagccctacggctgtacagacgagatccgcaaacagagagcttccgggctttacgtggatgacgaaaagtccaagtaccgctgttctcaccagaatccgttcatcagccaggtgtacaaggaattcctgggcgagccaaacggccataaggcgcatgaattgctgcataccactcggccgatctga

SEQ ID NO: 37172 - protein, 283 aa, Unknown
  Obtained from environmental sample
  DOMAIN (226)...(282): Iron hydrogenase small subunit
  misc_feature (1)..(283): Xaa is any amino acid
MKKYFADMIPNFSTAKSPQQMMGAMIKAYWAEKASVNPEKIFSVSVMPCTAKKWETHRNNDMKSAAKFLGKGIGWDVDIAITTRELARMIKQAGIEVLKLADEEADNPMGPYTGAGTIFGTTGGVMEAAVRSAYFLVTKKELGDVNFKPVRGLEGVKEAEVDFGVELPNGLGKKIRIAVAHQMGNIEAVLNKIRAARDAGKETPYHFVEVMACRGGCIAGGGQPYGCTDEIRKQRASGLYVDDEKSKYRCSHQNPFISQVYKEFLGEPNGHKAHELLHTTRPI

SEQ ID NO: 37173 - DNA, 819 bp, Unknown
  Obtained from environmental sample
  misc_feature (1)..(819): n is a, c, g, or t
gtgaacataaaaattcccacgctntgctacaccccggatctgcctgcctgggcttcctgcggtctttgcatagtcagaaccgccggtgcgggttctccgcgcatggcaagggcctgttcaactccggtggctgaaaacatggacataattacccacgatcctgagatcattgccacgcggcgggtagtgctggaacttattatgtccaatcacccttcggactgcctccagtgcccgaggaacggaaactgcgagctccaaaccctggccgctgaatttggcatcagggagctgccctttaagcatatttccaacgggctttccattgacgattccaacccggcaattgtgctgaaccctgaaaagtgcatacgctgcggtcgttgcgttaaggtctgccaggatgtgcagaatgtctgggcaattgaattccttggccgaggcattaagggccgcatcgcaagcgcggcggacgcgccccttggcgagagcccgtgcatcaagtgcggccaatgcgccgcccattgccctgtcggggccatttacgaaagggacgacaccgtaaaggtctgggccgccctgcaaaatcccgactgccaccctgtggtgcagattgccccggcggtgcgggtagccctagcggaagaattcggcctggagcccggaacggtttttaccaaaaagatatatgccgccttgaggcgtctgggctttaaaacggtttttgatactaacttttccgccgaccttaccatcatggaggaaggcacagagctggtgaaacgccttnagaaaagaaaagcgacattccgcttataa

SEQ ID NO: 37174 - protein, 272 aa, Unknown
  Obtained from environmental sample
  DOMAIN (187)...(271): Iron only hydrogenase large subunit, C-terminal domain
  misc_feature (1)..(272): Xaa is any amino acid
MNIKIPTLCYTPDLPAWASCGLCIVRTAGAGSPRMARACSTPVAENMDIITHDPEIIATRRVVLELIMSNHPSDCLQCPRNGNCELQTLAAEFGIRELPFKHISNGLSIDDSNPAIVLNPEKCIRCGRCVKVCQDVQNVWAIEFLGRGIKGRIASAADAPLGESPCIKCGQCAAHCPVGAIYERDDTVKVWAALQNPDCHPVVQIAPAVRVALAEEFGLEPGTVFTKKIYAALRRLGFKTVFDTNFSADLTIMEEGTELVKRLXKRKATFRL

SEQ ID NO: 37175 - DNA, 1071 bp, Unknown
  Obtained from environmental sample
  misc_feature (1)..(1071): n is a, c, g, or t
ttgtatatcattattgacaaccattcctttgatccggtggcgcccaccgctgatgacatagacgggattctcctgaaggtatgggcgcagatcgcggaacattataaaaaccggactcaatatgttgtttatgagattctcaacgagccccacggcatttccgacagccggtggggtgaaatccagggcgcggtaatcgacgcgataagaaaaattgactcgacgcacgccataattgtcggcggcactgaatacaattccattaataaactgtcctctataccggagtattcggatcccaacctcatctatacgtttcatttttatgatccccatttatttacccaccagggcgcctcctggggggagccctcattggtgtcattggccggggttccctttccggcggacgtcttacgcatacccaaaactcccgatgatcttaaaggcacatgggttgaaggctctctaagaaattacaagaatgacgccgctttttccacgctcctgggaaggcttgataaaacggtggccttttcaagagaacggaaggctcccgtattttgcggcgaattcggcgtttatatgatccaaagtcccgcgaaagaccgggtaaaatggtacgaatttgtcgtgggcgcgctgagaaagcggaagatcgcccgcacaagctgggattatttcggcggtttcggaatattcaatgaccaaattggacgggattttcactccgacgtcaatgccgacattgtccgcgctttaggttttctccctcctccccagcgggcgcggattcaaaacccgctcaattccgggtttttcctgtatggcgattatccgtccaatgatttttcatggggtactggggtgaggatgccgttttcagcatgtatgatactaatgctgccgaaggggattacgccatttactggggaaacgccggccaatacgacattttctggattgaatttaaccgtaacggcgatttcagttatctggcggaggcggggtactgccttgaattcagggcaaggacggaaaaaccggcaagttttgacgtccgctttgtaa

SEQ ID NO: 37176 - protein, 356 aa, Unknown
  Obtained from environmental sample
  DOMAIN (1)...(232): Cellulase (glycosyl hydrolase family 5)
  misc_feature (1)..(356): Xaa is any amino acid
MYIIIDNHSFDPVAPTADDIDGILLKVWAQIAEHYKNRTQYVVYEILNEPHGISDSRWGEIQGAVIDAIRKIDSTHAIIVGGTEYNSINKLSSIPEYSDPNLIYTFHFYDPHLFTHQGASWGEPSLVSLAGVPFPADVLRIPKTPDDLKGTWVEGSLRNYKNDAAFSTLLGRLDKTVAFSRERKAPVFCGEFGVYMIQSPAKDRVKWYEFVVGALRKRKIARTSWDYFGGFGIFNDQIGRDFHSDVNADIVRALGFLPPPQRARIQNPLNSGFFLYGDYPSNDFSWGTGVRMPFSACMILMLPKGITPFTGETPANTTFSGLNLTVTAISVIWRRRGTALNSGQGRKNRQVLTSAL

SEQ ID NO: 37177 - DNA, 741 bp, Unknown
  Obtained from environmental sample
  misc_feature (1)..(741): n is a, c, g, or t
ttggaattcagacgccctgttcatgccgcagttccattcggcgcgggacatacacgacagctacagccttaccgatcccgcanaacccggcgaaatcgcaaaggcaaaatcgatagaggaaccctggctttcaacgtggctaatgcccatgaaaacggcggaaaaaacggcagccgcggctggagctacgcttttgaccgtgaatttacccggcggctgatcctccgttcccagggtacggtgctttccgcgaaaaccctgccaaaggcgaaaatccccggcaaatatttcggcattgtacgctgtttccgctatgaccgcgtggacgccacccacctgcctgacttctaccagaccgagggcatcgtgttaggcgaaaacgtaaaccttcgcacccttttgggaatgctggatatgttcgcccgcgaagttgcgggcgcgaaagaggttaaatacgtccccggctatttcccctttaccgagccttcggtggaggtgcatataaaacatccggtgcttggctggttcgagctgggaggttccggcattttccgccccgaggtgacgcagagtctgggcgtggacgttcaggtagcggcctggggcatcggcattgaccgcatggcgctgatggcgcttggccttaatgatctgcgggaccttttcagcggcaatattgaagacgtgcggctgcgccggcttactgaaacaaacaaaatcaaggaaaaagcaaatgcctaa

SEQ ID NO: 37178 - protein, 246 aa, Unknown
  Obtained from environmental sample
  DOMAIN (6)...(232): tRNA synthetases class II core domain (F)
  misc_feature (1)..(246): Xaa is any amino acid
MEFRRPVHAAVPFGAGHTRQLQPYRSRXTRRNRKGKIDRGTLAFNVANAHENGGKNGSRGWSYAFDREFTRRLILRSQGTVLSAKTLPKAKIPGKYFGIVRCFRYDRVDATHLPDFYQTEGIVLGENVNLRTLLGMLDMFAREVAGAKEVKYVPGYFPFTEPSVEVHIKHPVLGWFELGGSGIFRPEVTQSLGVDVQVAAWGIGIDRMALMALGLNDLRDLFSGNIEDVRLRRLTETNKIKEKANA

SEQ ID NO: 37179 - DNA, 399 bp, Unknown
  Obtained from environmental sample
  misc_feature (1)..(399): n is a, c, g, or t
ttggccttaatgatctgcgggaccttttcagcggcaatattgaagacgtgcggctgcgccggcttactgaaacaaacaaaatcaaggaaaaagcaaatgcctaaaatagaagtaaacgaagaagttttttattcgcttatcggcggcaaacgctggaacacaaaagatggattcgaggaggccctgacctgcgccaaggcggagcttgatgaagacagcgataaaagcttgcccgttgctgaacgtgtccttaaaatcgagcttaacgacaccaaccgccccgacctgtggggaacagcgggctgcgccagacagcttaaggtataccaggacggcaaaattcccgaatacccgtttttctcgcggcccggtgatgtaaaaaatgcgcgcataaggtaa

SEQ ID NO: 37180 - protein, 132 aa, Unknown
  Obtained from environmental sample
  misc_feature (1)..(132): Xaa is any amino acid
MALMICGTFSAAILKTCGCAGLLKQTKSRKKQMPKIEVNEEVFYSLIGGKRWNTKDGFEEALTCAKAELDEDSDKSLPVAERVLKIELNDTNRPDLWGTAGCARQLKVYQDGKIPEYPFFSRPGDVKNARIR

SEQ ID NO: 37181 - DNA, 543 bp, Unknown
  Obtained from environmental sample
  misc_feature (1)..(543): n is a, c, g, or t
ttgcctgtatgcagaaacatactaaaccgtaatttttctgccgagaaaccgggacaaaaatgggtctcggatataacctatcttcgcagattaaacggctttgaatatctgactgtagtgcttgatttatttgaccgcaaggtcgtcggctgggcattaagcgacaatatggaaacatgcaatacaactattccggcgtttgaaatggcggtaaaaaaccgtcagccggaaagcggtttgatatttcattcagacagaggcgtccagtattgcgcgtattcattcggtgacgttatgcgcaatctatgtccgtctgtccgccagagcatgagccgtaaaggcaactgctgggacaatgcatgcgccgaatcgtttttcaaaacattaaaatcagaggaggaaaaacttaacggaaaatattctgccaatgatgtaaggcaggctgtatttttctatgtcgaaggttattataaccgcgaacggattcattcggtacttgactatcttacacctaatgaatattatttaagtaaagttgcttaa

SEQ ID NO: 37182 - protein, 180 aa, Unknown
  Obtained from environmental sample
  DOMAIN (13)...(176): Integrase core domain
  misc_feature (1)..(180): Xaa is any amino acid
MPVCRNILNRNFSAEKPGQKWVSDITYLRRLNGFEYLTVVLDLFDRKVVGWALSDNMETCNTTIPAFEMAVKNRQPESGLIFHSDRGVQYCAYSFGDVMRNLCPSVRQSMSRKGNCWDNACAESFFKTLKSEEEKLNGKYSANDVRQAVFFYVEGYYNRERIHSVLDYLTPNEYYLSKVA

SEQ ID NO: 37183 - DNA, 588 bp, Unknown
  Obtained from environmental sample
  misc_feature (1)..(588): n is a, c, g, or t
ttgcgtgtaatagccggattagaaaaagcttcggatggggaaatttcgctttttggcgaacctgttaagtcaaatgaatggactgctctttcaatggcgcaaaagggtattggttttgtgtttcaaaacagtgctttgatttccgatttaaccgtgaaagaaaatatagctattccactgctttatcacaatatgggaactaatgaggagattgagcaaaaagtgaaccgcgctcttttgctgatgctcgcaaacggttttgcaaatgaatatccctacaccctttcccttggaatgcgaaagagagttgccgttgcgcgctcttgggcaatggatgcaaaaattcttcttttggacgaacccacagcaggtttggatagaaacagccgcataaattttttatcgctgatgaataatctcagagagctttataaaaccactattataatggtagtaagcgatttgcagatagcttacgacacaaatagcaaaatatcttttttaatggacaaaaagctaacccctcccatgcatttcaatcaactcaaagatagcccggatctacgtattagagcgatggctaggtag

SEQ ID NO: 37184 - protein, 195 aa, Unknown
  Obtained from environmental sample
  DOMAIN (1)...(170): ABC transporter
  misc_feature (1)..(195): Xaa is any amino acid
MRVIAGLEKASDGEISLFGEPVKSNEWTALSMAQKGIGFVFQNSALISDLTVKENIAIPLLYHNMGTNEEIEQKVNRALLLMLANGFANEYPYTLSLGMRKRVAVARSWAMDAKILLLDEPTAGLDRNSRINFLSLMNNLRELYKTTIIMVVSDLQIAYDTNSKISFLMDKKLTPPMHFNQLKDSPDLRIRAMAR

SEQ ID NO: 37185 - DNA, 345 bp, Unknown
  Obtained from environmental sample
  misc_feature (1)..(345): n is a, c, g, or t
gtgcgatgttcatttttcaccccaccgtttgcacctgttaaagctgcggttttgccactctcaaaagatgatgaattgatgagcgttgcagaaaatctttacaaacaattattgaaacgtttcccagttgaatacgatgaaactcaaagcataggcaaacgctaccgccgccaagacgagataggcacgccctactgcgttacaatagattttggcacaataggcaaagatagcgaggataaacgtggctttgtgaccattcgcgagcgggactctatgaagcaagacattgttaaaattgagaatgttgagagctatttaatggaaaaaatttgccctacctag

SEQ ID NO: 37186 - protein, 114 aa, Unknown
  Obtained from environmental sample
  DOMAIN (14)...(110): Anticodon binding domain
  misc_feature (1)..(114): Xaa is any amino acid
MRCSFFTPPFAPVKAAVLPLSKDDELMSVAENLYKQLLKRFPVEYDETQSIGKRYRRQDEIGTPYCVTIDFGTIGKDSEDKRGFVTIRERDSMKQDIVKIENVESYLMEKICPT

SEQ ID NO: 37187 - DNA, 465 bp, Unknown
  Obtained from environmental sample
  misc_feature (1)..(465): n is a, c, g, or t
atgaaagcagagtatttgaatccatttctgaaatcgaccgtggagacttttaagatcatggtagatattcctgttgcgcttggcaggatttatctgcttaaagaacctaatgatacagatattgctagtgttatagaattttccggcgatgtgataggcaaagtggctatattatatactaaagatgtagctctaaaaataagttctaaatttttaggcgaaaaaatgacagacctaaatggagacgttgctgactgcattcgcgaaatagccaatataatcgcaggttctgcaaaaaaatatatgcaatccttgcgcttgacaatatcgttgccaaccgttgtgcgtggtccagttaatattgctgaaaagcgaaaagatattccagtgatatgtatcccttttaatagcgaagtcggtagttttattatggaaaccaaaatgacttctcgcagtttattttag

SEQ ID NO: 37188 - protein, 154 aa, Unknown
  Obtained from environmental sample
  misc_feature (1)..(154): Xaa is any amino acid
MKAEYLNPFLKSTVETFKIMVDIPVALGRIYLLKEPNDTDIASVIEFSGDVIGKVAILYTKDVALKISSKFLGEKMTDLNGDVADCIREIANIIAGSAKKYMQSLRLTISLPTVVRGPVNIAEKRKDIPVICIPFNSEVGSFIMETKMTSRSLF

SEQ ID NO: 37189 - DNA, 693 bp, Unknown
  Obtained from environmental sample
  misc_feature (1)..(693): n is a, c, g, or t
ttgatgctggcaaggggaataaccaaggtgtacactgaagacgatctggttcagatttccgcgttgcaacacgcgttgttttgtgagcgccaatacgccctcattcatctggaacagcaatgggaagagaatcgcttcacagctgaaggaagggtgttgcatgaacgggttgatgcggagcaccatgaatcgcgcagattattcaaacaggaatacgggatggctgtgcgttcacttcagcatggtctcattggaaagtgcgaccttgtagaactttggtatggtaaggatggaaacgtagaaagagtatcgccagtagaatttaaacgtggcaaaaagaaagcagacgatacagaccgggtacagctatgtgcgcaggttctgtgtcttgaggagatgtttagtatcgcaattgagggtgggcagttttactatctacaggagcatcgaagaacgaatgaaactgttgacgtaccgcttcgggaaaagactattgagttgatagaacagatcatgaagatccgtgagaccggggaaacgtccgcagcgaaatacgaaaaacgaaaatgtgataattgttcaatgctggattggtgtatgcctaagagtgccggagacgggcacaaaaaagtaagtcgatttattgagactcaactgcggctaacggggaggatcgatgaggaaacttcttaa

SEQ ID NO: 37190 - protein, 230 aa, Unknown
  Obtained from environmental sample
  misc_feature (1)..(230): Xaa is any amino acid
MMLARGITKVYTEDDLVQISALQHALFCERQYALIHLEQQWEENRFTAEGRVLHERVDAEHHESRRLFKQEYGMAVRSLQHGLIGKCDLVELWYGKDGNVERVSPVEFKRGKKKADDTDRVQLCAQVLCLEEMFSIAIEGGQFYYLQEHRRTNETVDVPLREKTIELIEQIMKIRETGETSAAKYEKRKCDNCSMLDWCMPKSAGDGHKKVSRFIETQLRLTGRIDEETS

SEQ ID NO: 37191 - DNA, 1074 bp, Unknown
  Obtained from environmental sample
  misc_feature (1)..(1074): n is a, c, g, or t
atggacaaaaaggcgttaattgcaatgagcggcggtgttgacagctccgtagccgcatacctgctgaaacagcaggggtttgactgtaccggaatcacaatgaagctgttcggaaatgaggatataggcgcgggcggagaaaaaagatgctgttctctggaagatacgacggacgcgcgaaacgtgtcttacgccatgggtataccttactttgtttacaatttcacggaagactttaaaaaacaggttattaatcgttttattgaaagctatcaaaacggcgcaacgccaaatccctgcattgactgcaaccgctatataaaatttgaaagattactctgccgggcaaaacagcttggcatggattgtatcgcaaccggacattatgccaggattgaatatgacgctctgaccggaaggtatctccttaaaaaagctgctgataaaacaaaagaccaaagctatgtgttatacgccatgacacaggagcagttatcgcataccctgtttccgcttggcgnccctaataagcccgaggttcgcggtattgcaagggagcatggttttgtaaacgcagacaaacacgacagccaggacatatgctttgtgcgtgacggcagctatgcggaatttattgagcaatataccggcaaaaaaagtgaatcaggcgattttatcgatgtgcatggcgaagttcttggcaggcataacggcgtgatccgatatacaattgggcagcgcaaggggcttgggctctccctaaaaagaccgttatatgtacatgcaaaaaatgtagatgataatactgtaactctttgtacacgggatggactttttgctaaatcgcttgacgcttttgattttaactttatagcctgtgagaaaattaacaacccaattcgcgttaaaacaaagatacggtacaaccaaaccgagcagtggtcgacagtaacacaaacctcgtacgatacagttcatattgagtttgatgagccgcaatgggcaatagcaaaaggccaggcagccgtactgtatgacggtgatgttgttgttggcggcgggacgattctttag

SEQ ID NO: 37192 - protein, 357 aa, Unknown
  Obtained from environmental sample
  SIGNAL (1)...(19)
  DOMAIN (3)...(356): tRNA methyl transferase
  misc_feature (1)..(357): Xaa is any amino acid
MDKKALIAMSGGVDSSVAAYLLKQQGFDCTGITMKLFGNEDIGAGGEKRCCSLEDTTDARNVSYAMGIPYFVYNFTEDFKKQVINRFIESYQNGATPNPCIDCNRYIKFERLLCRAKQLGMDCIATGHYARIEYDALTGRYLLKKAADKTKDQSYVLYAMTQEQLSHTLFPLGXPNKPEVRGIAREHGFVNADKHDSQDICFVRDGSYAEFIEQYTGKKSESGDFIDVHGEVLGRHNGVIRYTIGQRKGLGLSLKRPLYVHAKNVDDNTVTLCTRDGLFAKSLDAFDFNFIACEKINNPIRVKTKIRYNQTEQWSTVTQTSYDTVHIEFDEPQWAIAKGQAAVLYDGDVVVGGGTIL

SEQ ID NO: 37193 - DNA, 1140 bp, Unknown
  Obtained from environmental sample
  misc_feature (1)..(1140): n is a, c, g, or t
gtgatatgccacggaccgctggtgatggagatgcctgtggctcataagcagttcacggaaatcgccagggagatcagccgcgaccaggtaaagcttctggtgctggatgagccaacggcggtgcttaccgagactgaagccgacatcctccttgaaagcctcaaacgcctttcaggcgagggcataggcataattttcatttcccaccggcttcacgaggttacaaagatctgcaaccgggttctggtgcttagggacggccagttaatacgggatacgccgaacaaggatgtatcggttcaggatattaccacctggatggtaggtcgcgaaatttcccacaggccgacagacagcgccgagcggagccttgagggcgaagcttttaaagttgaaaacctctgggttgatatgccgggcgagaccgtgcgggatgtttcgtttacggtaagaaaaggtgaaattttcggcatagggggccttgcggggcagggcaagctgggcatccccaacggcatcatgggccttttcgcggcgggcggcaaagcctggatagacggcgaaagcctggagctgggctaccccaggaagatccttgatgccggcgccgcttttgtttccgaagaccgccggggcgtgggccttttaatggacgaaagccttgagtggaacatcgcttttggggtaatgcagatcaagggcgggaatttaaagagattcctgggagggcttttcagcctgcgggacgaaaaagccatgcggagccttgccgaggaatacatcaagaaactggaaataaaatgcactgggtcaaagcaggccgccaaggagctttctggcggcaaccagcagaagatctgcctttccaaggcctntgcgctggaacccaagctgctttttgtttccgagcctacccgtggcatagacgtgggggcaaaaaaaatcgtgctggataccctgcgcttctacaatcagagcaagggaaccaccattgtgatgatctccagcgagcttgaagagcttcgctcaatctgcgacagaatcgccattgtcgatgaggggaagatcgccgggatcctgcctccggagtcgcccgctgcggaattcggcttattaatgtcaggagagaaaatagcatga

SEQ ID NO: 37194 - protein, 379 aa, Unknown
  Obtained from environmental sample
  DOMAIN (153)...(354): ABC transporter
  misc_feature (1)..(379): Xaa is any amino acid
MICHGPLVMEMPVAHKQFTEIAREISRDQVKLLVLDEPTAVLTETEADILLESLKRLSGEGIGIIFISHRLHEVTKICNRVLVLRDGQLIRDTPNKDVSVQDITTWMVGREISHRPTDSAERSLEGEAFKVENLWVDMPGETVRDVSFTVRKGEIFGIGGLAGQGKLGIPNGIMGLFAAGGKAWIDGESLELGYPRKILDAGAAFVSEDRRGVGLLMDESLEWNIAFGVMQIKGGNLKRFLGGLFSLRDEKAMRSLAEEYIKKLEIKCTGSKQAAKELSGGNQQKICLSKAXALEPKLLFVSEPTRGIDVGAKKIVLDTLRFYNQSKGTTIVMISSELEELRSICDRIAIVDEGKIAGILPPESPAAEFGLLMSGEKIA

SEQ ID NO: 37195 - DNA, 1644 bp, Unknown
  Obtained from environmental sample
  misc_feature (1)..(1644): n is a, c, g, or t
ttggccgagaaaaaaaaggaagtagccatgcaacttaataatcaggaactaaaaaataaagctcaatgggaaaaggccgggatacaattaccccaatttgacagggaaaccatgatatcagcgacaaaaaaagcccctaaatgggttcatttcggagcggggaacattttccgcgcctttccggcggcattggcgcaaaccctgctggatcaagggcttgagaacaccggcattgtcgtcgcggaagggtacgacggcgaaatcattgaaaaatgcttcgcgccttttgacaatttgtgccttcttgtcacccttaaagccaacggaaccactgaaaaaaaggtaataggatcaatagcctcttcccacaggatagacaatgacataagcgcccttaaacaagttttcgcaagcccgtcgctgcagatggcaagttttaccataaccgagaagggctactcgctgacaggccgcgacggcgcgttagcgcccgaaatcgccgaggatatgaaaaacggcccaactaatccaaaaagctaccttggccgtattgccgcgttgttgcatgaacgcttcgtaagcggggaactgcccctcgcaatggtaagcatggacaactgttcgcataatggcgatttgctttttaacgttatggaagcattcgcgatagactgggttgaaaataatgttacgaatgaaatgtttataagttacgttagaaacaaagaaaaaatttcattcccttggagcatgatagacaagataaccccgcgtccggatgagagcgtcaggaaaatactcgccgacttaaggctggaaaacgtacatgatattgtaactgccaagaacacctttatcgccccctttgttaatgccgaggaaacccagtacctggttattgaagataacttccccaacggcagaccacctcttgaaaaaacaggggtgctgttcaccggaaaagaaaccgtggaaatggtcgaaagaatgaaaatctgcacctgccttaaccccctgcacacggcgctggccattttcggctgtcttttgggctacacgaggatcagcgaggagatgaagaaccccgaccttgtaaagctaatagaaggcattggctacagggagggcctgcccgtagtcaccgatccggggatcatcaagccgaaggaatttctcgatcaggtaataaaggtcaggcttcccaaccccttcatgccggatgccccgcaacgcattgccaccgatacttcgcagaaaattcccatccgctttggcgagacaataaaagcgtaccttgagggcaggttcgttaaaggcgtttcaggcctgacaatagacaatctgacattaatacccctggtgatagccgcatggcttcgttatcttttgggcgttgacgatcacggcaaaaagtttgagataagctccgacccgttatacccgggcctcatacaggtatttgccggaataagtctcggccaaaaaggtcccttccacgaaacccttaaacatattctttcagacagtaaactgttcgccgtaaacctgtacgaagcgggccttggcaagaaggtagaatcttatttcgaggaaatgattgccgggcctggcgctgtagccgcgactctgcacaagtatgtttag

SEQ ID NO: 37196 - protein, 547 aa, Unknown
  Obtained from environmental sample
  DOMAIN (46)...(207): Mannitol dehydrogenase Rossmann domain
  misc_feature (1)..(547): Xaa is any amino acid
MAEKKKEVAMQLNNQELKNKAQWEKAGIQLPQFDRETMISATKKAPKWVHFGAGNIFRAFPAALAQTLLDQGLENTGIVVAEGYDGEIIEKCFAPFDNLCLLVTLKANGTTEKKVIGSIASSHRIDNDISALKQVFASPSLQMASFTITEKGYSLTGRDGALAPEIAEDMKNGPTNPKSYLGRIAALLHERFVSGELPLAMVSMDNCSHNGDLLFNVMEAFAIDWVENNVTNEMFISYVRNKEKISFPWSMIDKITPRPDESVRKILADLRLENVHDIVTAKNTFIAPFVNAEETQYLVIEDNFPNGRPPLEKTGVLFTGKETVEMVERMKICTCLNPLHTALAIFGCLLGYTRISEEMKNPDLVKLIEGIGYREGLPVVTDPGIIKPKEFLDQVIKVRLPNPFMPDAPQRIATDTSQKIPIRFGETIKAYLEGRFVKGVSGLTIDNLTLIPLVIAAWLRYLLGVDDHGKKFEISSDPLYPGLIQVFAGISLGQKGPFHETLKHILSDSKLFAVNLYEAGLGKKVESYFEEMIAGPGAVAATLHKYV

SEQ ID NO: 37197 - DNA, 402 bp, Unknown
  Obtained from environmental sample
  misc_feature (1)..(402): n is a, c, g, or t
ttgggagagcgttttgccgaaaaactgaaaaaaggctcagttattgccctgaaaggcggcttaggcgcgggtaaaacctgcttggtcaagggtatcgcccgcgggctgggggttgccgaaatcgttaccagccccacttatacgattgtcagtgaatataacgcccgcttaaacggggaaccagtccccctgtaccacattgacgcttaccgtctgaacggggacgaagactttgaaaataccggcgcgggggaattaatgggcggcgggggaattgccattatagaatggagcgagcgcgtaccccgttccatcccgccggacgcgataactatggaaattgagattaccggccctcaaagccgtttattcagggtatatgatgaacctgcttgccattga

SEQ ID NO: 37198 - protein, 133 aa, Unknown
  Obtained from environmental sample
  DOMAIN (1)...(124): Uncharacterised P-loop hydrolase UPF0079
  misc_feature (1)..(133): Xaa is any amino acid
MGERFAEKLKKGSVIALKGGLGAGKTCLVKGIARGLGVAEIVTSPTYTIVSEYNARLNGEPVPLYHIDAYRLNGDEDFENTGAGELMGGGGIAIIEWSERVPRSIPPDAITMEIEITGPQSRLFRVYDEPACH

SEQ ID NO: 37199 - DNA, 384 bp, Unknown
  Obtained from environmental sample
  misc_feature (1)..(384): n is a, c, g, or t
atgaaaacactccgcatcacactagaaggcaaaacttacgatgttgccgttgaagttctaggcgaaagcgccgcatctgcgcctgcaccgcaaccgcaatcggttgcgccttccgcaccggtttccgctccggcacccgccgcgtctgcaccagctcctgctgccgcaggcgcaggttccgtgctcagcccaatggcaggccaagttatgaaaataaaggtagccgttggcgcagcagttagcgcaaaccaagaagttgtggttttggaagccatgaaaatggaaactcccatatatgccccaactgctggtaccgttcaggcaataagcgtaaaagaaggcgatgccgttgcagaagggcaaacattgctaacaataggctaa

SEQ ID NO: 37200 - protein, 127 aa, Unknown
  Obtained from environmental sample
  DOMAIN (59)...(126): Biotin-requiring enzyme
  misc_feature (1)..(127): Xaa is any amino acid
MKTLRITLEGKTYDVAVEVLGESAASAPAPQPQSVAPSAPVSAPAPAASAPAPAAAGAGSVLSPMAGQVMKIKVAVGAAVSANQEVVVLEAMKMETPIYAPTAGTVQAISVKEGDAVAEGQTLLTIG

SEQ ID NO: 37201 - DNA, 372 bp, Unknown
  Obtained from environmental sample
  misc_feature (1)..(372): n is a, c, g, or t
atgcgcaaagcntacggcggttcttaccttgccatgtgctccaaagacatggatgcggattttgtttacgctganccctgcgcagaaattgcggttatgggtgcagaaggtgcaattcccgttgtgtataaaaaagaaatagatgctgctctagcggcaggcggagaagctgccgcaaaagcaaaaaaagcagaactcatcgaaaaatatcacgataaattcgcaagcccttggcaggctgccgaaaccaacatgataacagatgtgatagagccttctgaaacgagataccgcatagctttggctttgcgtttttctctaaccaaacgcgctacgcgcccacctaaaaaacacggactcatgccgctatga

SEQ ID NO: 37202 - protein, 123 aa, Unknown
  Obtained from environmental sample
  misc_feature (1)..(123): Xaa is any amino acid
MRKAYGGSYLAMCSKDMDADFVYAXPCAEIAVMGAEGAIPVVYKKEIDAALAAGGEAAAKAKKAELIEKYHDKFASPWQAAETNMITDVIEPSETRYRIALALRFSLTKRATRPPKKHGLMPL

SEQ ID NO: 37203 - DNA, 1137 bp, Unknown
  Obtained from environmental sample
  misc_feature (1)..(1137): n is a, c, g, or t
gtgtcggcgcttacgaacgatttacggagcgtgctctcgtcgggcatcggcaaacggttcggcaggttcgtgaccaccgcgcacggctcggagtactatttcgagacaagcgtcatccccataaaggatgataataccggcgctgtgaccggggtgatcctgactatgcacgacgagaccactctccacgaggcggtgcttagcgcggagcggtcgaatagggcgaagacgaattttttggccaagatcagccacgagatacgcacgccgatgaacgcgatcgccggaatggcggaactcatactgcgcgagcacatttccgggcttgtccgcgaacacgcgctcagcatccggcaggctagcggcaaccttatggcgatcatcaacgacattttggacttctccaagatcgagtcgggcaagctcgaaatagtggagaccgagtaccagttcgcctccctcataaacgatgtgataagtatcataagaatgcgcgtcatagacaagcagatatttttcacgacgaacatcgactgcgatatcccggggcgcctgatcggcgacgagatacggatgcggcagatactcctcaatttgctcagcaacgcttttaaatactgtgaccgcggattcatctccatccacgtgagcagcgagaaggcctctgacggcgcggtgacgatggtcttcgacatatccgacagcggcatcgggataaagccggaggatcacgcgaggctcttcaccgactttgtccagttggacaaggtcgcccacaaggaggtggagggcacggggctgggcctcgtgataaccaagagtttgtgcgaggctatgggcggcagcatagatgtgtacagcgtctacggggagggtagcacgtttacggtgcgcataccgcagaagtttatctcctacgagcggttcgtcaacgtcgacgaccccggcggcaaaaacgttttgatctacgagacgcggttgccgtactcaaattatataatatgttccattgataccataggcgtggagagcacgctcgtgtacaatcagtcgagatttttagaagaagctcaaataaaaataagtacacgcacgtattcgtatgttcgtttctctttgagagttcggagaaaatag

SEQ ID NO: 37204 - protein, 378 aa, Unknown
  Obtained from environmental sample
  DOMAIN (75)...(140): His Kinase A (phosphoacceptor) domain
  misc_feature (1)..(378): Xaa is any amino acid
MSALTNDLRSVLSSGIGKRFGRFVTTAHGSEYYFETSVIPIKDDNTGAVTGVILTMHDETTLHEAVLSAERSNRAKTNFLAKISHEIRTPMNAIAGMAELILREHISGLVREHALSIRQASGNLMAIINDILDFSKIESGKLEIVETEYQFASLINDVISIIRMRVIDKQIFFTTNIDCDIPGRLIGDEIRMRQILLNLLSNAFKYCDRGFISIHVSSEKASDGAVTMVFDISDSGIGIKPEDHARLFTDFVQLDKVAHKEVEGTGLGLVITKSLCEAMGGSIDVYSVYGEGSTFTVRIPQKFISYERFVNVDDPGGKNVLIYETRLPYSNYIICSIDTIGVESTLVYNQSRFLEEAQIKISTRTYSYVRFSLRVRRK

SEQ ID NO: 37205 - DNA, 903 bp, Unknown
  Obtained from environmental sample
  misc_feature (1)..(903): n is a, c, g, or t
ttgccgcgaagttctgagtggggcagggcgcttgatcgaatggcgtctgattgggaaaaggcgacaaataatagtgtgcgcgtagtcgtcagccatgacggcagggaaggcgatgaggcaaaaatgatttcttctctttacagcaacgctattcaagtaggagtttttacttccgcgggaatggcggatatttgtcccgccgtaatgaatttaagcataccctttatgatcaaaaatgaaaccgagcttgatcttgtgcttaatgatatgctgccgcttattagtaaccgtgttaagaaggattttattgttctggcatggtcaaaaggcggatgggtttacatattttcaaaggaaaaagtattatcgccggatgatttacgcaaacaaagactttcaacaagtcccgaacttcgtgatatgaatacggtattcagaggtatggggttccagcttgtagaaactgattttacaaatatgggggccaagcttgcaagtaatgcgataaacgccatatatattattcccgcgtcagtcgctcctttggggctgcataagagtttaaatcatatgcttgaactgcctattgctccaattctgggcgcgattgtcatgaaccgcgttacatggaataaattaaaccagactcaacagcaggaaataataaggtctacgcgaagggttgcggcggagtttgacgcttcggcggtaagggcggaagctaacgcgatagcggcaatgggcagggacggactcagcataaacaagccaaatcaggctcagcaggatatgtggaataatgacataaaaaacaccataccctcgcttgtcgggtcaatttttgaccgcgagttatacaaccgtattaatgacatactggaaaaagcaagaagcggaaaataa

SEQ ID NO: 37206 - protein, 300 aa, Unknown
  Obtained from environmental sample
  DOMAIN (2)...(280): Bacterial extracellular solute-binding protein, family 7
  misc_feature (1)..(300): Xaa is any amino acid
MPRSSEWGRALDRMASDWEKATNNSVRVVVSHDGREGDEAKMISSLYSNAIQVGVFTSAGMADICPAVMNLSIPFMIKNETELDLVLNDMLPLISNRVKKDFIVLAWSKGGWVYIFSKEKVLSPDDLRKQRLSTSPELRDMNTVFRGMGFQLVETDFTNMGAKLASNAINAIYIIPASVAPLGLHKSLNHMLELPIAPILGAIVMNRVTWNKLNQTQQQEIIRSTRRVAAEFDASAVRAEANAIAAMGRDGLSINKPNQAQQDMWNNDIKNTIPSLVGSIFDRELYNRINDILEKARSGK

SEQ ID NO: 37207 - DNA, 510 bp, Unknown
  Obtained from environmental sample
  misc_feature (1)..(510): n is a, c, g, or t
ttgatggccgagaatgctttccgctgccccgattgcggttttgtctattatcacaatacagccgcagctacaggatgccttatcagagtgccggagtctgacggcgacaggtttttatttacaatcaggggcaaggaaccgggaaaaggcttactggatatgccgggcggatttgtcgatccgggagaaggcgctcttgagagcctttaccgcgaactgagggaagaaatcggctggacgccgccaattcccgaaggcgcaaacctcgccggtgttttcaaactttatgcttcatttccgaatgtttatccgtacaagggaataaagtacaatacgtgcgatatgtactttacggtttgcgctcccggtcttacacaaaaggacttgcaacttgaacaggttgaaatttccgaagtccgtttccttaaatctgatgaaattgatcttgagcagtttgcctttgaatctaccaaacgagcggtgaagacctattttgccaatcttgactaa

SEQ ID NO: 37208 - protein, 169 aa, Unknown
  Obtained from environmental sample
  DOMAIN (20)...(163): NUDIX domain
  misc_feature (1)..(169): Xaa is any amino acid
MMAENAFRCPDCGFVYYHNTAAATGCLIRVPESDGDRFLFTIRGKEPGKGLLDMPGGFVDPGEGALESLYRELREEIGWTPPIPEGANLAGVFKLYASFPNVYPYKGIKYNTCDMYFTVCAPGLTQKDLQLEQVEISEVRFLKSDEIDLEQFAFESTKRAVKTYFANLD

SEQ ID NO: 37209 - DNA, 789 bp, Unknown
  Obtained from environmental sample
  misc_feature (1)..(789): n is a, c, g, or t
gtgtggggtgttagtcttcttgcgcgcccaaacgcctcgcggagcaggatgcggagcgtcccgtgcagacaggatgtcgaacagcacggggctactggtgctggtcttcttgcgcgcatcccctggccgatgggcgcgtccgccgggcgcgcgcggggaattaccgggctcatccatgcctggctggatagcgctttcggtcaggatattattggctgtgattatttttcgttgctgcgagacgcgctcgatattccggattcggaggatcggcagaagcaggcttctgacttgctggatattctgggtacgatgcgcatcctggtgtgtacacgccggtcgcttgcggggatggagttctgcaaccaaacggcaagcgcctggctccagaaaggtttatcgaaggcgggtctggcagcgcgcccgaagatatctatgcgcggcaagaccttcgcaagcggcatgccggtgatcatcaccaaaaacgatcataagcgccggctttataatggggatataggcgttcttctgggagaagaagtctggttccgtgatcaatccacggacgccgcagacgatgtgccgtcggcggctggaggtatgcgcgccgtccggctttccgatctccctgattccgatatcgcttttgccatcacggtacacaagagtcagggctcggagtacgagcgcgtgctggttgttctgcctgagctgtcgtcctcgcggcttctcgttcgccagatcgtgtacaccgcgattacgcgcgcgaagcgcgaggcgcttctttag

SEQ ID NO: 37210 - protein, 262 aa, Unknown
  Obtained from environmental sample
  misc_feature (1)..(262): Xaa is any amino acid
MWGVSLLARPNASRSRMRSVPCRQDVEQHGATGAGLLARIPWPMGASAGRARGITGLIHAWLDSAFGQDIIGCDYFSLLRDALDIPDSEDRQKQASDLLDILGTMRILVCTRRSLAGMEFCNQTASAWLQKGLSKAGLAARPKISMRGKTFASGMPVIITKNDHKRRLYNGDIGVLLGEEVWFRDQSTDAADDVPSAAGGMRAVRLSDLPDSDIAFAITVHKSQGSEYERVLVVLPELSSSRLLVRQIVYTAITRAKREALL

SEQ ID NO: 37211 - DNA, 354 bp, Unknown
  Obtained from environmental sample
  misc_feature (1)..(354): n is a, c, g, or t
ttgcatagcgaggtggatatgccagattggttggaaggcttggacgcggccatcaccgtggttgacagaaactacacaataacccacatgaacccaaaggccatggccacatttcagagctacggggggagcgccttgctgggcaaaagccttatggagtgccatagcgagcggtcaagggaactcatgaaaaaaatcatggaaacgggagagccgcacacctacaccatagaaaagggcggaaaaaagaaaatcatccaccaggccagatggaaaaaagatggcgaaataggcggcctagtggaaatatccatagagataccttgggagattgagcatttcaaaagggattag

SEQ ID NO: 37212 - protein, 117 aa, Unknown
  Obtained from environmental sample
  DOMAIN (11)...(112): PAS fold
  misc_feature (1)..(117): Xaa is any amino acid
MHSEVDMPDWLEGLDAAITVVDRNYTITHMNPKAMATFQSYGGSALLGKSLMECHSERSRELMKKIMETGEPHTYTIEKGGKKKIIHQARWKKDGEIGGLVEISIEIPWEIEHFKRD

SEQ ID NO: 37213 - DNA, 795 bp, Unknown
  Obtained from environmental sample
  misc_feature (1)..(795): n is a, c, g, or t
gtgcgcgacctgacgttggaagctcccgacgtggggcagggcgacgcactgctgatacgggtgccaggcgctgacgctacgctgatagacgcagggcctactcctgagtcggctaggcgcgtggctagggttatgagcaggcgcggggtgcgggagccagtccacttgcttatcacgcatccccacgcagaccatgcagggggctggcccaccctggcgcggctgtggccattcgattctataacagtccccgtggtggctcttccagaaaaagcgtggcgaggcgtggctccaaaagggtcaatccaagggatactccaagcaaggcgcggcgattcgtggcaaaggggcgatgcacatttttctgttcactggccgccaaagcccctcaacctgccagacccaaacatggtctcggcggtgctacgcctgaggtggcatagccacgagatatggttcatgggcgacgctcttgcaatacaagagagggacatgatagaccttggagaccctaggccttggcatggaacgcgcctgttaaaagcagggcaccacggcggggccaccgccactggccaggaatggattgacgcgctgcgcccagacgtggttctattcacgtccgaatatccaaaccgctttgatttcccaagggaggaagtgctcaatagatgcaaagacgcaggcgctggcatcttgataacaggcccatacaagggcctaaagatggaagccgttggttacaattggatagtctatccctacgcaccgctgcggcagaaagtgggcagatga

SEQ ID NO: 37214 - protein, 264 aa, Unknown
  Obtained from environmental sample
  DOMAIN (13)...(184): Metallo-beta-lactamase superfamily
  misc_feature (1)..(264): Xaa is any amino acid
MRDLTLEAPDVGQGDALLIRVPGADATLIDAGPTPESARRVARVMSRRGVREPVHLLITHPHADHAGGWPTLARLWPFDSITVPVVALPEKAWRGVAPKGSIQGILQARRGDSWQRGDAHFSVHWPPKPLNLPDPNMVSAVLRLRWHSHEIWFMGDALAIQERDMIDLGDPRPWHGTRLLKAGHHGGATATGQEWIDALRPDVVLFTSEYPNRFDFPREEVLNRCKDAGAGILITGPYKGLKMEAVGYNWIVYPYAPLRQKVGR

SEQ ID NO: 37215 - DNA, 657 bp, Unknown
  Obtained from environmental sample
  misc_feature (1)..(657): n is a, c, g, or t
atgtatgaattaataaatataaaaaaagcaattaaatcaacaatctctgattacgaggagaaaaaccatttaaaaatatggaggaaacctattatcaaaattatttcggcaaagaatgaaaaattacgggaattaaaacaaattgtatttatggaacactttatgccttgcgatattttaccggacgctgaaagcataatcagcttttttattccattcaaaaaatatatcgttaaaagcaatatcagcggaacaatggcttcaaaagaatgggcggcagcatatattaaaacaaatgaattaatagaaaaaattaacaataaaatagaaaaattaatggaaaccaacggatataaaaccggaaaaatcccggctacgcataattttaatgagaaaactctgataagcaattggtcacacaggcatattgcgtacatagcgggtataggtacattcgggataaataatatgcttataaccgaaaaaggatgctgcggacggtttggaagcataataataagttataaaataaaaaaaaataaagaaataaacaaaataaaagaaaaatgtttaaataagtcaaaaggtaactgcggaatatgtcaaaaaagatgtatagtaaacgcatatgaaaacgaccgttttaacaggaaataa

SEQ ID NO: 37216 - protein, 218 aa, Unknown
  Obtained from environmental sample
  misc_feature (1)..(218): Xaa is any amino acid
MYELINIKKAIKSTISDYEEKNHLKIWRKPIIKIISAKNEKLRELKQIVFMEHFMPCDILPDAESIISFFIPFKKYIVKSNISGTMASKEWAAAYIKTNELIEKINNKIEKLMETNGYKTGKIPATHNFNEKTLISNWSHRHIAYIAGIGTFGINNMLITEKGCCGRFGSIIISYKIKKNKEINKIKEKCLNKSKGNCGICQKRCIVNAYENDRFNRK

SEQ ID NO: 37217 - DNA, 615 bp, Unknown
  Obtained from environmental sample
  misc_feature (1)..(615): n is a, c, g, or t
atggaaattgaaagagtactccgagcaggctacgaagcggcggctgtacggcggaaaaaactctgcgtagtggacaaagcaaacgtgcttgaatcgtcccgtttttggcgtgaagtggcggcggtagtttcaaaggactatcccgacatagagacaagttatctctacgttgacaacgccgccatgcagttgatccgcgctcccggacaattcgacgttatcgttacatcaaatctttttggagacatactttccgatgaggcgtccgtgcttacaggttcaatcggtatgctcgcctcggcaagtctcggcgctcctgtgcagggcggaacaagaccgggaatgtacgagcctattcacggctccgcccccgacatcgcggggaaagacttagcgaatccgcttgccacaattctttcggcggcgatgatgctccgctactcattcggtcttgagaaagaagcggctgccattgaaacagcggtaaacaatgtgctggatcaaggattgcggacaggagacatcgcaagcagaagtaatgctaacagcggtgaaaaaattgtagggacaaaagcaatgggcgaagctgtgctcaaagcgttggagaaattatga

SEQ ID NO: 37218 - protein, 204 aa, Unknown
  Obtained from environmental sample
  DOMAIN (1)...(197): Isocitrate/isopropylmalate dehydrogenase
  misc_feature (1)..(204): Xaa is any amino acid
MEIERVLRAGYEAAAVRRKKLCVVDKANVLESSRFWREVAAVVSKDYPDIETSYLYVDNAAMQLIRAPGQFDVIVTSNLFGDILSDEASVLTGSIGMLASASLGAPVQGGTRPGMYEPIHGSAPDIAGKDLANPLATILSAAMMLRYSFGLEKEAAAIETAVNNVLDQGLRTGDIASRSNANSGEKIVGTKAMGEAVLKALEKL

SEQ ID NO: 37219 - DNA, 600 bp, Unknown
  Obtained from environmental sample
  misc_feature (1)..(600): n is a, c, g, or t
atgaaaagcgattctgtaaacaagggtattgccaaagcgcctcatcgttcgctctttaaggcgttgggttttattgaagaagaatttaaaagaccgttaatagggattgcctgcgccaaaagcgaaatagtgccgggtcatctgcaccttgacaacatcgcacgcgccgccgccgacggcgttcgcatggcaggcggtgtgcctgtaacatttccggtaatcggcgtatgcgacggaatagcgatgggtcacgagggaatgagatactccctgccgacaagggaacttatcgccgactcgattgaatgtatggcgaccgctcacgcatttgacgcgcttgtctttatccccaactgcgacaagatagtgccgggtatgctcatggcatcggctcggctcaaccttccgtctgtttttgtttcaggcggaccgatgctcgccgggcgcaaggacggaaaaccgctgacgcttacaacaatgtttgaggcggtaggcgctgtcgccgccggaaaaatcagcgaagcggaacttgaagagcttgaaaacctttcctgcccgggctgcggctcttgcgccggaatgttacggcaaactcgatga

SEQ ID NO: 37220 - protein, 199 aa, Unknown
  Obtained from environmental sample
  DOMAIN (31)...(199): Dehydratase family
  misc_feature (1)..(199): Xaa is any amino acid
MKSDSVNKGIAKAPHRSLFKALGFIEEEFKRPLIGIACAKSEIVPGHLHLDNIARAAADGVRMAGGVPVTFPVIGVCDGIAMGHEGMRYSLPTRELIADSIECMATAHAFDALVFIPNCDKIVPGMLMASARLNLPSVFVSGGPMLAGRKDGKPLTLTTMFEAVGAVAAGKISEAELEELENLSCPGCGSCAGMLRQTR

SEQ ID NO: 37221 - DNA, 1263 bp, Unknown
  Obtained from environmental sample
  misc_feature (1)..(1263): n is a, c, g, or t
ttggccgagggatcattgcgcggcctttgggtaattgtcgtgactgccgacaacgccgatgattttctgaaaaaacttgccgacggaggtttttcttatgcctttatttcggagccaacgctggaaaaagggcggtcagtaattaaagaatattccctcaatacagttttggtactgttgttggaaatcggaaaagtttcccctgcggaaaatatcatgattttatccatgcccgcctatgccgttcctgtagccaatatacttaacggcaaaggtattgtacagcatgaaataaaagattccggtacaaattttatcgcgccttcggcgcggcttctggtagtggacgatataatgcccaatctcgtcgtggcggaggggcttttaacgccgtacaaatcacgggtagacctttgttccagcggggccagagcgctggagcttgtcaaactacagcgttatgaccttgtttttatggatcacatgatgccggaaatggacggcattgagaccgtaaagcgtatacgtaattgggaaaaagaacaaccgaaaggtgaagtcggcgggattcggattgtcgctcttacagctaacgctgtctcaggtatgaaggaaatgtttttgaacgaaggctttgacgatttcctttccaagccgattgagactttaaggcttaaagaaattatgaaaaaatggatccccccggaaaagcaagtagaaaaaaaagaagagagcataatgactgataataataaggaggaaaaagtgngacagccgaatttatttaatggtttcgacattgatggcattgatctgaagaaaggtcaggagacgtttccggagaataaataccttgatgtccttcgcgcctggtgcatgcatactccggcgttattggaaaagctgcgcgctttgaccgatggaccgcttggggatgaagatataggggagtataccattgcggtccacgggcttaaaggctcgtcttacgggatttgcgctcaaagcatcgggaaaaaagcggaagccctggaagccgcgtcccgccggaaggatattgaatttgttaaagaaaataacaaaatattattggaagaagccggcgttatgcatcaaaatcttgaaaaactacttgcaagcgccgcggagcgctcgacggcaaaaccgtccgcaagttcgccggatcccgaattgctcaagcagtttcttgacgcgtgcaagcagttcaagtccagcctaatggaggaaattcttgagaaatga

SEQ ID NO: 37222 - protein, 420 aa, Unknown
  Obtained from environmental sample
  DOMAIN (110)...(230): Response regulator receiver domain
  misc_feature (1)..(420): Xaa is any amino acid
MAEGSLRGLWVIVVTADNADDFLKKLADGGFSYAFISEPTLEKGRSVIKEYSLNTVLVLLLEIGKVSPAENIMILSMPAYAVPVANILNGKGIVQHEIKDSGTNFIAPSARLLVVDDIMPNLVVAEGLLTPYKSRVDLCSSGARALELVKLQRYDLVFMDHMMPEMDGIETVKRIRNWEKEQPKGEVGGIRIVALTANAVSGMKEMFLNEGFDDFLSKPIETLRLKEIMKKWIPPEKQVEKKEESIMTDNNKEEKVXQPNLFNGFDIDGIDLKKGQETFPENKYLDVLRAWCMHTPALLEKLRALTDGPLGDEDIGEYTIAVHGLKGSSYGICAQSIGKKAEALEAASRRKDIEFVKENNKILLEEAGVMHQNLEKLLASAAERSTAKPSASSPDPELLKQFLDACKQFKSSLMEEILEK

SEQ ID NO: 37223 - DNA, 1110 bp, Unknown
  Obtained from environmental sample
  misc_feature (1)..(1110): n is a, c, g, or t
gtgttcaaacaggttgagtcttttaatcccgatatagtccatatcaattccgaaatggtcatcgcagaattcggttttctttatgctaaagcgcataaccttccaactatctatacctttcataccatgtgggaagattacggccccaattatttccccatgttccccgaatttatcgtaaagtcctttatacggggcgttcttaaaaacatactaaggcgatcatacaaggtaattgtgcctacgcagcagattgaggctgtcgtacgcaagtacaatcccgataccgaaacttaccttctgccgaccggcatagacccggcgcttttcgtccatgacaaagcggaaatcgaggcgttcagggaagcgtttaacgcgctttttccggaaacctgcggaaaaaaactcctccttatggcgggcagggtcgtaaaagaaaaaaacatcggttttctccttgaaatacttcccaacattcttaaaaaaaatccggatacgatgcttgtaatcgtaggcagcgggccggaattggaattcttcatgaatgaggcaaaacaatacggcgtggaaaccgcctgcgtttttacgggttatctgaaccgctcccaactttccctgatgtactcaattgccgacgtgtttgttttcccttcccttaccgacactcagggacttgttaccctggaggcgatgttttcgggccttcccgtagtggctatcggcgctttgggaacgcttatggtgatgggcggagacaatggcggctttatggtaaaagacgatccgaaagaatttaccgacagggtactgcagttgttaaatgacgaagatttgtacaggcaaaaatcggaagaagcaaggattcatgccagagcatggtccttaagtgaagttactaaaagacttacggatatttacaaagaaacaatctcttcatatacaaaagattatggtaaacctcgttctcccgtttggaaacttttaatgaataaacgttggtgggaaataaataacaaagttataaagaaaaagactaaaaagaaattacaggaaatccattcaaaaattaaagaaacatctaaaaatattaaaagtttaccccaggaatga

SEQ ID NO: 37224 - protein, 369 aa, Unknown
  Obtained from environmental sample
  DOMAIN (121)...(289): Glycosyl transferases group 1
  misc_feature (1)..(369): Xaa is any amino acid
MFKQVESFNPDIVHINSEMVIAEFGFLYAKAHNLPTIYTFHTMWEDYGPNYFPMFPEFIVKSFIRGVLKNILRRSYKVIVPTQQIEAVVRKYNPDTETYLLPTGIDPALFVHDKAEIEAFREAFNALFPETCGKKLLLMAGRVVKEKNIGFLLEILPNILKKNPDTMLVIVGSGPELEFFMNEAKQYGVETACVFTGYLNRSQLSLMYSIADVFVFPSLTDTQGLVTLEAMFSGLPVVAIGALGTLMVMGGDNGGFMVKDDPKEFTDRVLQLLNDEDLYRQKSEEARIHARAWSLSEVTKRLTDIYKETISSYTKDYGKPRSPVWKLLMNKRWWEINNKVIKKKTKKKLQEIHSKIKETSKNIKSLPQE

SEQ ID NO: 37225 - DNA, 891 bp, Unknown
  Obtained from environmental sample
  misc_feature (1)..(891): n is a, c, g, or t
atggccagcctccgtgacgtgcgcctgcggatgcgggctattgaacagacattaaaagtcaccagggcgatgaaccttatctccacggcgaaactgcgcaaggggcggaaaatgctcgcggataccgtgccgtatttcagcaggattcaaaaatccatgtacgacattctttcaagcgagaaatatatcggaggctcgttcttcagaaagcccgatccttcgaagcccagccacaccgcgataattgtcataaccagctataaggggcttgccggcggttataacgcgaatgttttccgcagcgtaaacgagttatgcgcaaaagtggaaaatccggtgctgatacttatcggcggcaatgtcggctaccgctattttgtccattccccgtatccaattcttgaaaatttttctttccatccggaaatacccaccgtggaacacgccgcggaagtttccgaatatatggtttcgcagtatctgggcaaaatctttgattccatacatatcgcgtatacccatatgttcagcatggtgaaacttatgccgaccatacaccagattattccccttgtaaaagaaaagattcagaatgacctttttgaaatcggcggcgaaaagagggttgacttgaagtttgaattcctgccctcaaccggggcggtttttgacatgctggtcccccagtatataaagggcgttatttacggggcgatggtggaagcccacgccagcgaacagagctcccgcatgaaggcgatggacgaggcctccaaaagcgccgaagacatgctcgccgcgttgaagataagttacaaccgggcgcgtcaggcgggcattacgcaggaaatggcggagataagcgggggcgcgacggccctaaagtcgtag

SEQ ID NO: 37226 - protein, 296 aa, Unknown
  Obtained from environmental sample
  DOMAIN (2)...(294): ATP synthase
  misc_feature (1)..(296): Xaa is any amino acid
MASLRDVRLRMRAIEQTLKVTRAMNLISTAKLRKGRKMLADTVPYFSRIQKSMYDILSSEKYIGGSFFRKPDPSKPSHTAIIVITSYKGLAGGYNANVFRSVNELCAKVENPVLILIGGNVGYRYFVHSPYPILENFSFHPEIPTVEHAAEVSEYMVSQYLGKIFDSIHIAYTHMFSMVKLMPTIHQIIPLVKEKIQNDLFEIGGEKRVDLKFEFLPSTGAVFDMLVPQYIKGVIYGAMVEAHASEQSSRMKAMDEASKSAEDMLAALKISYNRARQAGITQEMAEISGGATALKS

SEQ ID NO: 37227 - DNA, 831 bp, Unknown
  Obtained from environmental sample
  misc_feature (1)..(831): n is a, c, g, or t
ttgatggcgggaaggctccttgcctcgggggctcggtcgcgacaagcgcatggggatttttccagactgttaggcgcaaggcagatatggatcgccggccttgaccttgccttccccggcaataaaacccattaccggggcgctcagtttgaagaaaaagcccttgccgaatcatggcgcctgcggccccctgagtcgtggttgactaaagccatgcgcgacggcataccctgtatcggcccggccctcggcggcggaacagtgccgagcgaccgccgcctttcactctacgccgcctggtttgagaactgtttcagccaataccccgagataaaaaatttcagcctttccggcggcggccttgccatagccggtcttgaagccgccgaacccgaggcgcttctcgcgctgccggatcgccgaggggaaattgacgcgcggcttgaaactctttccggcattgaagcggagttcttcgagccgcaggaaacacagcggaggagccaacgctatgagaacgccattgccgccctgcgttcctcgctggatcaaattaaaacctgctgcgaaaaaggggaaagaatcgcaaaacacgcattgaagcaaaaccccggcccgggcgctcaggagaagatccttgccgaacttgattcgataaaccgcctgatcagttcaagcgaggtgaaggagatcgccggtttccttttcccgccgcagacgaccgaggaacctgtcccaatcgcgcgcaaagacgctttccggggctacatggaatcgtcagccatgttataccgctctcttgccgaagccgcggagataaataataattaa

SEQ ID NO: 37228 - protein, 276 aa, Unknown
  Obtained from environmental sample
  misc_feature (1)..(276): Xaa is any amino acid
MMAGRLLASGARSRQAHGDFSRLLGARQIWIAGLDLAFPGNKTHYRGAQFEEKALAESWRLRPPESWLTKAMRDGIPCIGPALGGGTVPSDRRLSLYAAWFENCFSQYPEIKNFSLSGGGLAIAGLEAAEPEALLALPDRRGEIDARLETLSGIEAEFFEPQETQRRSQRYENAIAALRSSLDQIKTCCEKGERIAKHALKQNPGPGAQEKILAELDSINRLISSSEVKEIAGFLFPPQTTEEPVPIARKDAFRGYMESSAMLYRSLAEAAEINNN

SEQ ID NO: 37229 - DNA, 492 bp, Unknown
  Obtained from environmental sample
  misc_feature (1)..(492): n is a, c, g, or t
gtgtcattgggttgttttgcgtgtcggggtgttgtgccgcatttgcggaattttcgtaggggcgttttgcaaacgccccaaatgcgaaatgatttacgtttatatttgcaacgtgtggcaaaaatattttctacatttacacttatgtcccaagaacgcccacttatatcttttgactatgcagcgaaaacggtgcttagagaccctgctaattttggtattctttcggggtttttgagcgagctacttaataaagatgttgctgtgcaggagattttggagagcgagagccttaaagataatgaatttgagggcactaaccgcgttgatatgaaagtgaaaatagataatgcggagatagttgtggtggaaattcagtttgagcacgaggcggattttttgcagaggactttgttcggtgttagcaaggctgttacttcgcagcacctcaaaggcgaaaagttcaatgacattaaaaaggtttttccatag

SEQ ID NO: 37230 - protein, 163 aa, Unknown
  Obtained from environmental sample
  misc_feature (1)..(163): Xaa is any amino acid
MSLGCFACRGVVPHLRNFRRGVLQTPQMRNDLRLYLQRVAKIFSTFTLMSQERPLISFDYAAKTVLRDPANFGILSGFLSELLNKDVAVQEILESESLKDNEFEGTNRVDMKVKIDNAEIVVVEIQFEHEADFLQRTLFGVSKAVTSQHLKGEKFNDIKKVFP

SEQ ID NO: 37231 - DNA, 954 bp, Unknown
  Obtained from environmental sample
  misc_feature (1)..(954): n is a, c, g, or t
atgaaaacaaggcgtttttgtattatatattttgctgttactctgttgtttttgttttacggatgtaaatctgtttcaaagaatgtcgattataatcagggtttccctgccaggcgtgttgggatgggcgttgatttagataaccttcatacagaacaggaacgttttgacaacttgtctttgaaataccccgttgtattggttcatgggattgccatacgtgatcgtgatgttgcctacgccccatggggcagaattccgcgtatattgagggagaacggggttgaagtatattttggaaatacggacgcgtggggcactattgaatcaaacgcggaaatgttaaaagcaactgtagataaaatactgaatgaaacaaggaaagaaaaagttaatataatagcgcattccaaaggcggtcttgattcccgttatatgatatggaaatatgactatgggaacaaggtagcaagcctgacgacaatatcaacgccgcataatggcgcggttcttgcggatatgattctaaatttaaaatctgttcacaccaaagccacagaaaaaagtctggaagacctgtcaaaattgtataacgatttatatcctgatatttatacagcaggctatgatttaacaacggcaaaaatgaaagaatttaacaaaatcgtaacaatggatgacagggtatactatcaaagtatttattcgataatgaacaatgccgcggatgatctcttttttaccgccagttataatttaattaaaaaagaagcagggggaaacgacggtctggtaagtgaatattccgcaagatggggaaataatattaccaaagtagaaggcggaatatcccatggacaaattattgatataatggggaaagatctgtttgatatgaaaattccaaacatctatttgagaattgtaaatgatttaaaaaataaaggcttttaa

SEQ ID NO: 37232 - protein, 317 aa, Unknown
  Obtained from environmental sample
  SIGNAL (1)...(26)
  DOMAIN (59)...(237): PGAP1-like protein
  misc_feature (1)..(317): Xaa is any amino acid
MKTRRFCIIYFAVTLLFLFYGCKSVSKNVDYNQGFPARRVGMGVDLDNLHTEQERFDNLSLKYPVVLVHGIAIRDRDVAYAPWGRIPRILRENGVEVYFGNTDAWGTIESNAEMLKATVDKILNETRKEKVNIIAHSKGGLDSRYMIWKYDYGNKVASLTTISTPHNGAVLADMILNLKSVHTKATEKSLEDLSKLYNDLYPDIYTAGYDLTTAKMKEFNKIVTMDDRVYYQSIYSIMNNAADDLFFTASYNLIKKEAGGNDGLVSEYSARWGNNITKVEGGISHGQIIDIMGKDLFDMKIPNIYLRIVNDLKNKGF

SEQ ID NO: 37233 - DNA, 672 bp, Unknown
  Obtained from environmental sample
  misc_feature (1)..(672): n is a, c, g, or t
atgtatgtcgcgttttctggttccgtgttccgccgtccgttaaaaagcctgaaaggatttacccgtcttgctataaaacctggcaaagaacatgttgttcacttttctctgcctgttgaagaattggcggtttgggacagttttcaaaaccgtttttatgtggaaacaggccaatgcgtagttaagattggcgcctcttctgcggacatacggctttcaggcggttttaaggtttatggcaagaatgtattcccccgaaaaattcccgatcatatttacgcccaaagttttgacgattattcaggctgttttctgcacgaaaagcggggcagcgacattcccgcagtattcaacagttctgaaggcggctggatacgttttgccgcgctggattttgccggtggccgcggattgatttccgccattgtacaaggcgcgccgggcagccgcgttgaaattcgtctggacgcgccgggcgacgcattggcgggaacactccttatcccaaacaccggcgacatatccttttatcctctgacagaaaaaaacagcccccgtcgccgtccggtctgggcttacgctgaaacccaaatagaaaaaatacgcggcgttcatgatctgtatctggtgttttatgggaaaaccggtctctggcgaattgatattcaatag

SEQ ID NO: 37234 - protein, 223 aa, Unknown
  Obtained from environmental sample
  DOMAIN (95)...(223): Carbohydrate binding module (family 6)
  misc_feature (1)..(223): Xaa is any amino acid
MYVAFSGSVFRRPLKSLKGFTRLAIKPGKEHVVHFSLPVEELAVWDSFQNRFYVETGQCVVKIGASSADIRLSGGFKVYGKNVFPRKIPDHIYAQSFDDYSGCFLHEKRGSDIPAVFNSSEGGWIRFAALDFAGGRGLISAIVQGAPGSRVEIRLDAPGDALAGTLLIPNTGDISFYPLTEKNSPRRRPVWAYAETQIEKIRGVHDLYLVFYGKTGLWRIDIQ

SEQ ID NO: 37235 - DNA, 375 bp, Unknown
  Obtained from environmental sample
  misc_feature (1)..(375): n is a, c, g, or t
ttgcttgatgccgtaggcaaaaccatcaacgatgtcgggaaaaggctcggcgaaacgcctgaaaatttaaggccaggcaaggtaatcttcgttatcaccaccgacggccttgaaaacgcaagcagggaattcagttacgatgcggttcaaaagatgattgctcatcagactgaaaaatacagctgggagtttgtctttatgggcgctaacattgacgtcgcgaaagaaggaagcaagctcggcataagggcagaccgttctttctgctttgcggcaagcccagcgggcattggctccatgtacgccaaagttgcatgcctttgcgggaatatcaggaatgacaagcctaagcagcataaaaaggcaaaagcatag

SEQ ID NO: 37236 - protein, 124 aa, Unknown
  Obtained from environmental sample
  misc_feature (1)..(124): Xaa is any amino acid
MLDAVGKTINDVGKRLGETPENLRPGKVIFVITTDGLENASREFSYDAVQKMIAHQTEKYSWEFVFMGANIDVAKEGSKLGIRADRSFCFAASPAGIGSMYAKVACLCGNIRNDKPKQHKKAKA

SEQ ID NO: 37237 - DNA, 540 bp, Unknown
  Obtained from environmental sample
  misc_feature (1)..(540): n is a, c, g, or t
atggatcgcagcatgaattacaggatgggaatgagacccggccttttcggcctgtatcccaccatttggatcgctcttgttattttagccgtaagctggtttgtgctgtacaaacgcccgtgggggctaaggctgcgcgccgccggcgaacatccgcaggctttagcgtccgccggagtaaatgtggttaaactccggtatgcagccgtaattatttccggccttctcgcggggttagcgggcggctgtatcgttcttacacaggatattcaatttacggtaagcacgattaacggaaaaggttttatcgcccttgccgccgtttctttcggacgatggctgccgttgggcatactcggctcaagtttccttttcggcgtatcctcaagtatggcggttaacattgttaatatcaaaaaacttcagtttctgccttcggaaatgttcagcatgctgccgtttttaattactttgataacccttgttttgttcagcggaaaagagacggcgcctaaggctttggggcagaaggatttttaa

SEQ ID NO: 37238 - protein, 179 aa, Unknown
  Obtained from environmental sample
  misc_feature (1)..(179): Xaa is any amino acid
MDRSMNYRMGMRPGLFGLYPTIWIALVILAVSWFVLYKRPWGLRLRAAGEHPQALASAGVNVVKLRYAAVIISGLLAGLAGGCIVLTQDIQFTVSTINGKGFIALAAVSFGRWLPLGILGSSFLFGVSSSMAVNIVNIKKLQFLPSEMFSMLPFLITLITLVLFSGKETAPKALGQKDF

SEQ ID NO: 37239 - DNA, 723 bp, Unknown
  Obtained from environmental sample
  misc_feature (1)..(723): n is a, c, g, or t
gtgctttatcagaccggaagcaatataaaatacaaatattacttttatgaaatcagaatttttgaaatttataaaaatattgcccatcttatagggcttcctatcgatgaaagccagagtttttggcaaaatgtctggggtcaacagggaattcggacatgggttcagcaattttccgtttctttttcaaaaatctttctgggtttcctatccagcgccggcctggtaattcttttcatggtttttattctgctggaggcaagctattttaaggataaactggaaaccgcgtttaaaaaccattcggaacggattaacagaatggggcacgacttgatgtcccaggttacccggtatcttacggcaaaattcttcttttccctggcaaacggcatcgttttttacattgcattccgatttatcgggctcgattttgccatcggctggagcgttatccaatttgtcatgaattttattccaactttgggcagtattgttacagccgtgggaatctccctttttgcccttatccagttctggcccagcccggctcccataattctggttatcgccgtaattttggccgtaaatattatcggaactattctggatcccaaagtcataggcgaacatgtggggatttcgccctttgtggttctggtttctttaggggtttggagctggctgtgggggtttgccggaatggttctggcggtcccatga

SEQ ID NO: 37240 - protein, 240 aa, Unknown
  Obtained from environmental sample
  DOMAIN (2)...(240): Domain of unknown function DUF20
  misc_feature (1)..(240): Xaa is any amino acid
MLYQTGSNIKYKYYFYEIRIFEIYKNIAHLIGLPIDESQSFWQNVWGQQGIRTWVQQFSVSFSKIFLGFLSSAGLVILFMVFILLEASYFKDKLETAFKNHSERINRMGHDLMSQVTRYLTAKFFFSLANGIVFYIAFRFIGLDFAIGWSVIQFVMNFIPTLGSIVTAVGISLFALIQFWPSPAPIILVIAVILAVNIIGTILDPKVIGEHVGISPFVVLVSLGVWSWLWGFAGMVLAVP

SEQ ID NO: 37241 - DNA, 996 bp, Unknown
  Obtained from environmental sample
  misc_feature (1)..(996): n is a, c, g, or t
ttggagctggctgtgggggtttgccggaatggttctggcggtcccatgancgttattatcagaattatatgcgagaacatcccgctcctggagccgatttcaattatgataggntcgcgaaaatccgtacttgcgaaaaaagccgagcttgaaaaagcgaagaagaacatgaccgntccttgttatcccgattttgttccatttagcattgagttaaaagacgccatgcatccgcgcctgtcccttaccgcggacggcgtttcggaatttaccttttccggcctttaccttttcagaagcaagtacgattaccgcatttcgcgtaacatttcacgtcccgacggggaggaaggcggctttattatttccggcaagcaaaacggcaaaacttttttttcaactccctgcgagccgccgaatgacgaaatactggactctctttttgaaacccacgattactggaaaaatatttcacaatccgtactgagtcccgtcaaagaaaagtttgaaaagaggggcatagtttttgccgaggacagggacaattttgattatttgtactatcgaaacgatttggcggaacttgccgggaagaagtatcacaaaaagaaaaaccatgttaacaattttttagccgcctatcccgatcacgaactgcgccagatgaataaagattatgttccggcggctattgaaattctggaccgatggcggcaagacaaaaacgaagacggcgattacaaggcggcaagggaagcgcttgatttatttgatacgcttacgctgagaggcgcgatttttttcatagccggaaaaccggccgcctattgtcttggtgagagcatcgcgaggggcaaaatgtttgccgtccattttgagaaagcgattgaggagtacaagggcatttaccagtttgtaaacaaaacgttcgccgcgtccttgccgcggttttttactcttataaaccgcgagcaggatttgggaacgaaggattag

SEQ ID NO: 37242 - protein, 331 aa, Unknown
  Obtained from environmental sample
  misc_feature (1)..(331): Xaa is any amino acid
MELAVGVCRNGSGGPMXVIIRIICENIPLLEPISIMIGSRKSVLAKKAELEKAKKNMTXPCYPDFVPFSIELKDAMHPRLSLTADGVSEFTFSGLYLFRSKYDYRISRNISRPDGEEGGFIISGKQNGKTFFSTPCEPPNDEILDSLFETHDYWKNISQSVLSPVKEKFEKRGIVFAEDRDNFDYLYYRNDLAELAGKKYHKKKNHVNNFLAAYPDHELRQMNKDYVPAAIEILDRWRQDKNEDGDYKAAREALDLFDTLTLRGAIFFIAGKPAAYCLGESIARGKMFAVHFEKAIEEYKGIYQFVNKTFAASLPRFFTLINREQDLGTKD

SEQ ID NO: 37243 - DNA, 597 bp, Unknown
  Obtained from environmental sample
  misc_feature (1)..(597): n is a, c, g, or t
atgctcttttttattgctggttcggaaaaagttgcggcaactgcgatggggcatttgcgtttggagattgctcgcataaaaggtttgatggatccaaagctgcgtaaatttgcttggataaccgagttcccaatgtttgaatacagtgatacagaaaaacgctatatgtctatgcaccacccattcacaagccctctacccgaacacttggatatgatgctcggtggcaacctcaaagactgcaatgcgcaggcttacgatttggttttgaacggcgtggaaataggcggcggctctgtgcgtattcacaacccagaagttcaggaaaaagtgtttcgtttattaggtctttcagaagaacaagtgaagcaaaagtttggcttttttgtggacgcttttaaattcggcgcaccccctcacggcgggcttgctcttggcttggatagggttgttgcaactttagagggtcaagattccattcgtgattttattgccttcccaaagaacacaagcgcaagttcgccaatggatcaaagcccaagcgaagtggacccaattcagttgcttgaaactcacatctctcttaatatatcgtag

SEQ ID NO: 37244 - protein, 198 aa, Unknown
  Obtained from environmental sample
  DOMAIN (1)...(171): tRNA synthetases class II (D, K and N)
  misc_feature (1)..(198): Xaa is any amino acid
MLFFIAGSEKVAATAMGHLRLEIARIKGLMDPKLRKFAWITEFPMFEYSDTEKRYMSMHHPFTSPLPEHLDMMLGGNLKDCNAQAYDLVLNGVEIGGGSVRIHNPEVQEKVFRLLGLSEEQVKQKFGFFVDAFKFGAPPHGGLALGLDRVVATLEGQDSIRDFIAFPKNTSASSPMDQSPSEVDPIQLLETHISLNIS

SEQ ID NO: 37245 - DNA, 513 bp, Unknown
  Obtained from environmental sample
  misc_feature (1)..(513): n is a, c, g, or t
ttgtcgatgaaaatcttagcgcttaacccgccgtttctgcccaagtactcgcgcgagtcgcgttctccggcggttacgaagagcggcacgctctactatcctatgtggctctgctacgcggtcggttatttggagaaggccggtcacgaggttatgctgatcgacgcgccggcggccgggatgtcggcggcggaggtgatcttcgccgtacgcgagtttgagccggatatggcggtgctcgacacttcaacgccgtcgatatacggcgacgtcgccgtcggcgaggaacttaagcgcgtattcccggacatcttcatagtgctcgtgggcgtccacgtgtcggcgctgcccgccgaaacgcttgccttgtcgcccaagatagacgccgtggcctttggggagtacgacgagacgctcgttgagcttgccgcggcgctgtcgaaggtcaatgccgataccccggcggccgacgcctcaaacgccgcgccgccggtcggcctcggccgatcctga

SEQ ID NO: 37246 - protein, 170 aa, Unknown
  Obtained from environmental sample
  DOMAIN (21)...(145): B12 binding domain
  misc_feature (1)..(170): Xaa is any amino acid
MSMKILALNPPFLPKYSRESRSPAVTKSGTLYYPMWLCYAVGYLEKAGHEVMLIDAPAAGMSAAEVIFAVREFEPDMAVLDTSTPSIYGDVAVGEELKRVFPDIFIVLVGVHVSALPAETLALSPKIDAVAFGEYDETLVELAAALSKVNADTPAADASNAAPPVGLGRS

SEQ ID NO: 37247 - DNA, 342 bp, Unknown
  Obtained from environmental sample
  misc_feature (1)..(342): n is a, c, g, or t
atggataacgcanaagactcattattggagttcaacgaccaaaacttcgccgactccgtcctggccaaccccaaacccgtagtggttgacttttgggctccgtggtgcgggccgtgcaagatgcttaccccgatcatacacgagcttgcggcggagtacgcggggcgcgtcgtcgtcggcaagctcaatatagataacgctccggctgttgcggccaagtacggcatagagaccatcccgacgctgcttttcttcagtaagggcggcattgtgggccgacaggtggggcttttggcgaaagcgccgctcaaggccaaaattgacgacgcgtttaaggtttaa

SEQ ID NO: 37248 - protein, 113 aa, Unknown
  Obtained from environmental sample
  DOMAIN (7)...(110): Thioredoxin
  misc_feature (1)..(113): Xaa is any amino acid
MDNAXDSLLEFNDQNFADSVLANPKPVVVDFWAPWCGPCKMLTPIIHELAAEYAGRVVVGKLNIDNAPAVAAKYGIETIPTLLFFSKGGIVGRQVGLLAKAPLKAKIDDAFKV

SEQ ID NO: 37249 - DNA, 696 bp, Unknown
  Obtained from environmental sample
  misc_feature (1)..(696): n is a, c, g, or t
atggccgaggaggcctcgattgataggctatccaccgaaaaccggttgttagccgccgaaaatcggaaaacctcggaggcggttcggaatctgcatgaggcggttcggaatctgcatgagacggttcggaatctgcatgccgaagtcagtgaaacctctgcgtcggttagggaactgcgtgccgaagtcagtgaaacctccgccaaagtcagtgaaacctcggaggccgtccggcaactgaacgacacgctcggcgggatgggcggacacctcggcgaagtgatagagtttatcgtcatccccaagatacgccccgccataaacgctttgggtaaccactcgtttaaagagatcacggcgaggaaaatcgtcgagatcgttattaacgatagaaagagaaaactcaccgaggtagacgtgctgctgtacggcgacaccgaggttatggccgttgagataaagacctgtttgcagacaagcgacgtcgataaacatttggatcgtctgcaaaaactgcgcgaccacgaagtagacgccgaggtcaaaggcaagacgcttttcggcgcggtggtaggcgcaatcgtacacgatcctatcagaacctacgcccttaaaaagggtctatacgtcatagagatccgcgaagaagaggataaattagacatagacaaacccgacacctgccggacatggtaa

SEQ ID NO: 37250 - protein, 231 aa, Unknown
  Obtained from environmental sample
  misc_feature (1)..(231): Xaa is any amino acid
MAEEASIDRLSTENRLLAAENRKTSEAVRNLHEAVRNLHETVRNLHAEVSETSASVRELRAEVSETSAKVSETSEAVRQLNDTLGGMGGHLGEVIEFIVIPKIRPAINALGNHSFKEITARKIVEIVINDRKRKLTEVDVLLYGDTEVMAVEIKTCLQTSDVDKHLDRLQKLRDHEVDAEVKGKTLFGAVVGAIVHDPIRTYALKKGLYVIEIREEEDKLDIDKPDTCRTW

SEQ ID NO: 37251 - DNA, 882 bp, Unknown
  Obtained from environmental sample
  misc_feature (1)..(882): n is a, c, g, or t
ttggcctcgtatatccccgaaggaaccggcgctgtcaactcaaagggtattgacttctacgacaggcttatcgacgctttgctcgccgccggcatagacccttgggtcaccttgtatcattggaatcttccgcaaacgctgcaacagcgcggcgggtggatgaatccggagtcacctaaatggttcggggattacagcgccgtcgtcattgacaaattttctgatcgtgtgactaattggatgactattaacgaaccgcaggttattatcaatcacggtatgttcaccggcgttcacgccccgggttacaagctcactatggccgaggcgcttgccgccggacacaacttgcttttggcgcacggccgcgctgtttcggttatcaggggtaaggctaagaagccggcctctattggtttcgcgccggttggctggctgcgccgtccggcgagcgatgatcctcgcgacgttgacgcggcgagaaccgcctcctttgaggttgatcccgcgaatctgtggaatagcgcttggtggcttgacccggtctatctgggcaggtatccgcaacagggggtcgaggcttacggcaaagatgttccgaaatataccgatgaggacatgtcgatcatctcgcaggaacttgacttcttcggcgtcaacatctacacgggcgccgccgttaaagcgggcgcggacgggcgggctgaattggttcctaatcaagtcggctgtaggatgaacagttatgactggcctatcgtccccgacgtgctttattggggggggaaattcttttatgagcgttataaaaagccgttggttataaacggaaaatgggacgtgcataaccgagtgcctgtccaaggacgggcgagtgcatga

SEQ ID NO: 37252 - protein, 293 aa, Unknown
  Obtained from environmental sample
  DOMAIN (2)...(293): Glycosyl hydrolase family 1
  misc_feature (1)..(293): Xaa is any amino acid
MASYIPEGTGAVNSKGIDFYDRLIDALLAAGIDPWVTLYHWNLPQTLQQRGGWMNPESPKWFGDYSAVVIDKFSDRVTNWMTINEPQVIINHGMFTGVHAPGYKLTMAEALAAGHNLLLAHGRAVSVIRGKAKKPASIGFAPVGWLRRPASDDPRDVDAARTASFEVDPANLWNSAWWLDPVYLGRYPQQGVEAYGKDVPKYTDEDMSIISQELDFFGVNIYTGAAVKAGADGRAELVPNQVGCRMNSYDWPIVPDVLYWGGKFFYERYKKPLVINGKWDVHNRVPVQGRASA

SEQ ID NO: 37253 - DNA, 549 bp, Unknown
  Obtained from environmental sample
  misc_feature (1)..(549): n is a, c, g, or t
atgggggacattgacatccgccactacacccacatattcagacgctacgtttgggcgaatcgcctggttctaggcgcgagcgtcaacttaggcgacagcgccaaagcggccagaaggtactttttgggcggcaacgacaactggttcaactacggcgtcaacgtcgaaaactacaacaacaacatcggctacagctactactcaagcctggtatccccgctgcgcggctggaactacttcgacctcaccggcgaccgcgtgctgctgatgaactcggaattccgcttccccttcatccgcgaggtatcgaccgtatggcctatcccgatgcaaatacgctacataaacggcgccctattcatagacgccggatacgcctggacgggtaacgaggcgctcccgccaaagatggcgggcggatacgggttcggaatgcgggcgaacttggggattttcgtactgcgctatgatcgcggctggccgacagaattcagaagaggcccgtcacgcgggccgattaattacttctcattaggggcggaattctaa

SEQ ID NO: 37254 - protein, 182 aa, Unknown
  Obtained from environmental sample
  misc_feature (1)..(182): Xaa is any amino acid
MGDIDIRHYTHIFRRYVWANRLVLGASVNLGDSAKAARRYFLGGNDNWFNYGVNVENYNNNIGYSYYSSLVSPLRGWNYFDLTGDRVLLMNSEFRFPFIREVSTVWPIPMQIRYINGALFIDAGYAWTGNEALPPKMAGGYGFGMRANLGIFVLRYDRGWPTEFRRGPSRGPINYFSLGAEF

SEQ ID NO: 37255 - DNA, 693 bp, Unknown
  Obtained from environmental sample
  misc_feature (1)..(693): n is a, c, g, or t
atgagatttaacgaatttaaccttcatcccgatttgcaaaaagggattgacgaagccggatatgttaactgcatgcccgttcaggaacaggtgctgacccacgcttttggcggtcaggacatgtatgtgcagtcccagacaggaacgggcaagaccgccgctttcctggttgtgattttccagcgaatcttgaccgaagaagctctaggggggaaaaaagccctgatcatggcccccaccagggagcttgccgtccagattgaggaagagtcaaacatgctgggcaaatatctccctataaaaaccggcagtttctacggcggggtagggtatacccaacaggaaaagctgttacgcgataaggtgcagattatggtcgggacgccgggccgcgttcttgacctgaacaaatcgggcaggatgaatctgatggagatcgcttttcttgtgctggacgaggcggacaggatgttcgacatgggcttctacccggacttgcgtaagctgattaaagtggttccgcctgccgaccgccgccagacatttttgttcagcgcgacgctcaattcatgggtgaagaacctcgcgtgggaatatacaaaaaagccgtttgaaatgaaatcaaaccggaaatcgtcaccgttgaagaagttgatcagatcctctaccatgttccctctgaagaaaaaatga

SEQ ID NO: 37256 - protein, 230 aa, Unknown
  Obtained from environmental sample
  DOMAIN (25)...(195): DEAD/DEAH box helicase
  misc_feature (1)..(230): Xaa is any amino acid
MRFNEFNLHPDLQKGIDEAGYVNCMPVQEQVLTHAFGGQDMYVQSQTGTGKTAAFLVVIFQRILTEEALGGKKALIMAPTRELAVQIEEESNMLGKYLPIKTGSFYGGVGYTQQEKLLRDKVQIMVGTPGRVLDLNKSGRMNLMEIAFLVLDEADRMFDMGFYPDLRKLIKVVPPADRRQTFLFSATLNSWVKNLAWEYTKKPFEMKSNRKSSPLKKLIRSSTMFPLKKK

SEQ ID NO: 37257 - DNA, 747 bp, Unknown
  Obtained from environmental sample
  misc_feature (1)..(747): n is a, c, g, or t
atgacagatcgacgagcgacgaaactccccggcaagctggaggctctgcatgacaagatcagccgactgaagttttttgacccggcctgcggctgcgggaattttttgattattgcctaccgcgaactccggctgcttgagttcgaaattatcaaacgaaaaatatccagggagcatatcgggcaattggttttggatattgcgatgctgcgcaaggtaagcatcgaacagtttttcgggatagagctggaggattttccctgccgggcagcgcgcgcgggcctgtggctgaccgagcaccagatgaaccggcgcctcaaaacgcttggggtgcatgacacacaatttccgccgggaaagggcgcgcggattgagcgcggcaacgcgctgcgcatggactggggaaacatagtgccgcgcggcgagcttttatatatcatgggcaatccgccgtttgtagggtttacatatatgaacggcgatcaaaagagtgatatggaaactatttttccgggaataaaaaatttggattatatttccgcttggtattacaaaacggcacagtttatgctanagagagagagagagagagagagagagagagagagagagagagacaatttgtgccgcctttgtttctacaaattcaatatgccagggcgaaacattacccgcgctttggaaaaaattacttgcactcggcgttatcatacactttgcataccgcccctttgtatggagcaatga

SEQ ID NO: 37258 - protein, 248 aa, Unknown
  Obtained from environmental sample
  misc_feature (1)..(248): Xaa is any amino acid
MTDRRATKLPGKLEALHDKISRLKFFDPACGCGNFLIIAYRELRLLEFEIIKRKISREHIGQLVLDIAMLRKVSIEQFFGIELEDFPCRAARAGLWLTEHQMNRRLKTLGVHDTQFPPGKGARIERGNALRMDWGNIVPRGELLYIMGNPPFVGFTYMNGDQKSDMETIFPGIKNLDYISAWYYKTAQFMLXRERERERERERERDNLCRLCFYKFNMPGRNITRALEKITCTRRYHTLCIPPLCMEQ

SEQ ID NO: 37259 - DNA, 1470 bp, Unknown
  Obtained from environmental sample
  misc_feature (1)..(1470): n is a, c, g, or t
gtggaacttgccgacccatacgaaaatatgggagcgcagcttcttaaagaagtagccactaagacaaacgatgtcgccggagacggaaccacaaccgcaacggtactggcttattcgcttgtcaaagaaggacttaaatcagttgccgcaggcatgactccacttgaacttaaacgcggtattgataaagcggttgaaatcgcagttgaagaaatcaagaaaaattccaaagacatcaaggacaaagaagagatttcccacgttgcctctgtttccgccaacaatgacattgaaatcggaaaaacaatcgcggacgcaatggaaaaagtcggcaaggacggggttatcactgtcgaagaatcaaaaacaatggacacttctatcgaatttgttgaaggtatgcagtttgaccgcgggtatatttctgcctattttgttacagaccgtgataccatgacaagcgtctatgaagatgtgttcattctcatacatgacaagaaagtttccagcatgaaggatatgcttccactgcttgaaaaagtcgctcaaagcggcaaacctctccttataattgccgaagactgcgacggcgaagctctttcaactcttgttgtaaacagtttgaggggaactctgcgtacctgcgcggttaaagcccccggtttcggcgaccgccgcaaggccatgctggaagacattgctattcttaccggcggcgaagtcatttccgaggaattgggccttaagctggaaaacaccgatatttcccagctcggcaaggccaagaccgtcaaaatcgacaaggataataccacgattattaacggcgccggaaagcagaaggatatccaggaccgtatcgcccagatcaaggcccagattgaggatacgaccagcgactacgatcgcgagaaactgcaggaacggctggcgaaactggccggtggcgttgccgtgatcaatgtgggcgcggccaccgaagtcgagcttaaagagaaaaagcaccgcgttgaagacgccctgtccgccacccgtgccgctattgatgaaggcattgtccccggcggcgagatcgccttaattcaggcggcaattgccctggacaaagccgatacttccacccttactgacgatgaaaaagtcggctttaagattgtcaaacgggcgctggaagagccaatccgccagatcgccgaaaacgccggacttgacggcgcggttatcgccgagagagccaggaacgaaaagaagggcgtcggctttgacgccgccaaactggaatgggtagatatggttaaagccggtattatcgacccggcaaaggtaacccgctccgccctgcaaaacgcggcgtccatcgccagcctgctcctcaccaccgaatgtgccattacagatattcccgaaaagaaggaagccccggccatgcccggcggcggaatgggcggcatgggaggaatggactactaa

SEQ ID NO: 37260 - protein, 489 aa, Unknown
  Obtained from environmental sample
  DOMAIN (1)...(468): TCP-1/cpn60 chaperonin family
  misc_feature (1)..(489): Xaa is any amino acid
MELADPYENMGAQLLKEVATKTNDVAGDGTTTATVLAYSLVKEGLKSVAAGMTPLELKRGIDKAVEIAVEEIKKNSKDIKDKEEISHVASVSANNDIEIGKTIADAMEKVGKDGVITVEESKTMDTSIEFVEGMQFDRGYISAYFVTDRDTMTSVYEDVFILIHDKKVSSMKDMLPLLEKVAQSGKPLLIIAEDCDGEALSTLVVNSLRGTLRTCAVKAPGFGDRRKAMLEDIAILTGGEVISEELGLKLENTDISQLGKAKTVKIDKDNTTIINGAGKQKDIQDRIAQIKAQIEDTTSDYDREKLQERLAKLAGGVAVINVGAATEVELKEKKHRVEDALSATRAAIDEGIVPGGEIALIQAAIALDKADTSTLTDDEKVGFKIVKRALEEPIRQIAENAGLDGAVIAERARNEKKGVGFDAAKLEWVDMVKAGIIDPAKVTRSALQNAASIASLLLTTECAITDIPEKKEAPAMPGGGMGGMGGMDY

SEQ ID NO: 37261 - DNA, 327 bp, Unknown
  Obtained from environmental sample
  misc_feature (1)..(327): n is a, c, g, or t
ttgatctgggcgatacggtcctggatatccttctgctttccggcgccgttaataatcgtggtattatccttgtcgattttgacggtcttggccttgccgagctgggaaatatcggtgttttccagcttaaggcccaattcctcggaaatgacttcgccgccggtaagaatagcaatgtcttccagcatggccttgcggcggtcgccgaaaccgggggctttaaccgcgcaggtacgcagagttcccctcaaactgtttacaacaagagttgaaagagcttcgccgtcgcagtcttcggcaattataaggagaggtttgccgctttga

SEQ ID NO: 37262 - protein, 108 aa, Unknown
  Obtained from environmental sample
  misc_feature (1)..(108): Xaa is any amino acid
MIWAIRSWISFCFPAPLIIVVLSLSILTVLALPSWEISVFSSLRPNSSEMTSPPVRIAMSSSMALRRSPKPGALTAQVRRVPLKLFTTRVERASPSQSSAIIRRGLPL

SEQ ID NO: 37263 - DNA, 405 bp, Unknown
  Obtained from environmental sample
  misc_feature (1)..(405): n is a, c, g, or t
gtgctttttctctttaagctcgacttcggtggccgcgcccacattgatcacggcaacgccaccggccagtttcgccagccgttcctgcagtttctcgcgatcgtagtcgctggtcgtatcctcaatctgggccttgatctgggcgatacggtcctggatatccttctgctttccggcgccgttaataatcgtggtattatccttgtcgattttgacggtcttggccttgccgagctgggaaatatcggtgttttccagcttaaggcccaattcctcggaaatgacttcgccgccggtaagaatagcaatgtcttccagcatggccttgcggcggtcgccgaaaccgggggctttaaccgcgcaggtacgcagagttcccctcaaactgtttacaacaagagttga

SEQ ID NO: 37264 - protein, 134 aa, Unknown
  Obtained from environmental sample
  misc_feature (1)..(134): Xaa is any amino acid
MLFLFKLDFGGRAHIDHGNATGQFRQPFLQFLAIVVAGRILNLGLDLGDTVLDILLLSGAVNNRGIILVDFDGLGLAELGNIGVFQLKAQFLGNDFAAGKNSNVFQHGLAAVAETGGFNRAGTQSSPQTVYNKS

SEQ ID NO: 37265 - DNA, 702 bp, Unknown
  Obtained from environmental sample
  misc_feature (1)..(702): n is a, c, g, or t
gtggttgatcccccttcgattattgccacgcacctcactgaaattatccggcgtcattccgccgatatactaggtatgcaggacactcaggcgattttggacacgctccgcaaggaataccccgccgtggtggacgaagtgctgcggcctgaactgggtatgccggtgattaaaattcaaaagatactccacggcctactgcgggaacgggtatctatccgcaacatggtcacgatactggaagccatcgccgaatacgcgccgctgtccaaaacggtctggttcctcactgaaaaggcccgtcaggctttgggcagccagatttgccaccagtataccgatgaaaaccataaactgcgggtgctgaccattgcgccggaactggaacaaaaaattattgagtgcaaatatgagaccccctccggcgtaatctgcgcgctggatccgcccacgcaggcggcatggattaaagcggtgagtaaagccgccgccgcggttaagagcaggggcttcctgccggttatactctgttccgaacaggcacgtttcctcgtgcggaattcaaccgaccgggaactgcccgacttggcggttatttccgttcccgaaattacgccggatattgttcccgaagcggtcggcgtgataaggttggaaagcgccgcgccttcacaaggcgcgcctttacaaggcggggggtag

SEQ ID NO: 37266 - protein, 233 aa, Unknown
  Obtained from environmental sample
  DOMAIN (1)...(210): FHIPEP family
  misc_feature (1)..(233): Xaa is any amino acid
MVDPPSIIATHLTEIIRRHSADILGMQDTQAILDTLRKEYPAVVDEVLRPELGMPVIKIQKILHGLLRERVSIRNMVTILEAIAEYAPLSKTVWFLTEKARQALGSQICHQYTDENHKLRVLTIAPELEQKIIECKYETPSGVICALDPPTQAAWIKAVSKAAAAVKSRGFLPVILCSEQARFLVRNSTDRELPDLAVISVPEITPDIVPEAVGVIRLESAAPSQGAPLQGGG

SEQ ID NO: 37267 - DNA, 954 bp, Unknown
  Obtained from environmental sample
  misc_feature (1)..(954): n is a, c, g, or t
atggcaaattacgggaatctgaccagggtcctggaagagcaaataaaaaactggaacagcaaagccgtaaccgagtccacgggatttgtggtgcaggcgggatatggagttgtaaccatacacgggatttccagggcaatctacggggagcttttggaatttgcctccggcgcagttggcattgcccttaaccttgaagaggacggcgtgggatgtgttttgctttcgggggaagacggggtaaaggatggggaagaggttaatggcacaggccgtgtggtgtccgtgccgtcaggtgagtccctnatcggcagggtgctaaacccgctgggcaaacccatagacggcaaagggccaatccagccggaagaatggctgcccgttgaggctccggccgcaccagtaatagaacgcggcaccgtggataccccaatgcagaccggcatcctttcggtagactcgatgatccccatcgggcgcggtcagagggagcttatcataggcgacaggcagaccggcaaaaccgcccttgctatcgatgccatcgtcaaccagaagggcaaagacatgtattgcgtttactgcgccatcggtcaaaagtcgtcttcggttgccgcgataataaaaaacctggaaaaagcgggggccatggcttatacctttgtggtgcttgcctcggcatcggattcggcggcccttcaatacctggccccttattcggcggtggcaatggccgagcactttatgcacaaaggcaaggatgtacttatcgtttacgatgatctttcaaagcacgccgtggcataccgggccataagccttcttttgcgcaggccgccggggcgggaagcttttcccggcgacgtgttttacctgcactccaggcttttggaaagggcggcaaagctttcacaggctcggggaagcggttccattaccgccctgccaatgtag

SEQ ID NO: 37268 - protein, 317 aa, Unknown
  Obtained from environmental sample
  DOMAIN (23)...(91): ATP synthase alpha/beta family, beta-barrel domain
  misc_feature (1)..(317): Xaa is any amino acid
MANYGNLTRVLEEQIKNWNSKAVTESTGFVVQAGYGVVTIHGISRAIYGELLEFASGAVGIALNLEEDGVGCVLLSGEDGVKDGEEVNGTGRVVSVPSGESLIGRVLNPLGKPIDGKGPIQPEEWLPVEAPAAPVIERGTVDTPMQTGILSVDSMIPIGRGQRELIIGDRQTGKTALAIDAIVNQKGKDMYCVYCAIGQKSSSVAAIIKNLEKAGAMAYTFVVLASASDSAALQYLAPYSAVAMAEHFMHKGKDVLIVYDDLSKHAVAYRAISLLLRRPPGREAFPGDVFYLHSRLLERAAKLSQARGSGSITALPM

SEQ ID NO: 37269 - DNA, 432 bp, Unknown
  Obtained from environmental sample
  misc_feature (1)..(432): n is a, c, g, or t
gtgcataaagtgctcggccattgccaccgccgaataaggggccaggtattgaagggccgccgaatccgatgccgaggcaagcaccacaaaggtataagccatggcccccgctttttccaggttttttattatcgcggcaaccgaagacgacttttgaccgatggcgcagtaaacgcaatacatgtctttgcccttctggttgacgatggcatcgatagcaagggcggttttgccggtctgcctgtcgcctatgataagctccctctgaccgcgcccgatggggatcatcgagtctaccgaaaggatgccggtctgcattggggtatccacggtgccgcgttctattactggtgcggccggagcctcaacgggcagccattcttccggctggattggccctttgccgtctatgggtttgcccagcgggtttag

SEQ ID NO: 37270 - protein, 143 aa, Unknown
  Obtained from environmental sample
  misc_feature (1)..(143): Xaa is any amino acid
MHKVLGHCHRRIRGQVLKGRRIRCRGKHHKGISHGPRFFQVFYYRGNRRRLLTDGAVNAIHVFALLVDDGIDSKGGFAGLPVAYDKLPLTAPDGDHRVYRKDAGLHWGIHGAAFYYWCGRSLNGQPFFRLDWPFAVYGFAQRV

SEQ ID NO: 37271 - DNA, 543 bp, Unknown
  Obtained from environmental sample
  misc_feature (1)..(543): n is a, c, g, or t
atgttcatgagcaaacaatgggctgcggcttttgtcaattatatagaaaaagaaggcggcgatatcgaagacagcgtaaacacactcaaagcccttgttggtttcgcggactcgctgcctggcgcggttttcggcagggccgccgctataaggctggaaccgcttgtaagaaacgcaataggtgaagccaagcaaggccaggaaacagccgtcagattttttcttttgatgataaaaaaaaatgcaatccgtcatgccgcttcgattattaatgaaatagataaaatactggataaaaaaggcggcgtaattaaggttattgcggaatacgcatttgaaccggaaaaagattttatttcaggaataaaagaatttattaaaaaacagaccggggcaaaaagcgtggaattaacagggcaaataaatacggaacttatcggaggatacaggcttaaggtgggggatgaaataatcgacgcaagcgtccgccgtcaattgctaaaaatgaaagcctgtctggccgacgtggatggaggaagctaa

SEQ ID NO: 37272 - protein, 180 aa, Unknown
  Obtained from environmental sample
  DOMAIN (8)...(173): ATP synthase delta (OSCP) subunit
  misc_feature (1)..(180): Xaa is any amino acid
MFMSKQWAAAFVNYIEKEGGDIEDSVNTLKALVGFADSLPGAVFGRAAAIRLEPLVRNAIGEAKQGQETAVRFFLLMIKKNAIRHAASIINEIDKILDKKGGVIKVIAEYAFEPEKDFISGIKEFIKKQTGAKSVELTGQINTELIGGYRLKVGDEIIDASVRRQLLKMKACLADVDGGS

SEQ ID NO: 37273 - DNA, 1047 bp, Unknown
  Obtained from environmental sample
  misc_feature (1)..(1047): n is a, c, g, or t
atggtgaacgctttttgtgaacatctgggcggaggaataataaatatcaggaacgaaacggatactttatccgatattggcaatgacctttcttctaacatgagtaacaccgccgtggcggtgaaccagattaccgccaatgtacaaagtatcaaaagccgtataataaaccagagcgccagcgtaaccgaaacacacgccacaatggaacagcttgtggtcaacatcaataaactcaacaaccatgttgaaaaccagagcggcgacatatcccaggtttcgtcttctattgaagaaatgatcgccaacataaactccgttaccggaacccttgtcagcaacgccggtaatgtaagaaccttacaggacgcttcggaagtaggccgcgccggattgcaggaagtagcctccgacattcaggaaattgcccgcgagtccgaagggcttttggaaatcaactcggtcatggcaaacatcgccagccagaccaatctgctttcgatgaacgccgcgatagaggcggcacacgccggggaaactggtaagggattcgccgtagttgccgatgaaatacgcaaactggctgaaaattccagcaagcaatccaaaacgattggcacggtactcaaaaagataaaggggtccattgacaagataaaacattctacggaaaacgtactcaacaaatttgaagcgattgactcaagcgtcaggactgttgcggaacaggaaggaagtatacgaaacgcaatggaagaacagggaacggggagcaaacagatactcgaaggcatcggcagattgaatgaaataacccggcaggtaaaggacggatccaatgaaatgcacgagggcgcgaaggaagttattcgtgaaagcgaaaaccttgaaaaagcgactgcggaaatttcatcaggcatgaacgagatggcagtcggagcaaaacatatcaattccgcggtaaaccatgtcaacgagataagcggcaggaaccgccaagccattgatgtcgtaataagggaagtttcgcaatttaaggcggagtaa

SEQ ID NO: 37274 - protein, 348 aa, Unknown
  Obtained from environmental sample
  DOMAIN (84)...(304): Methyl-accepting chemotaxis protein (MCP) signaling domain
  misc_feature (1)..(348): Xaa is any amino acid
MVNAFCEHLGGGIINIRNETDTLSDIGNDLSSNMSNTAVAVNQITANVQSIKSRIINQSASVTETHATMEQLVVNINKLNNHVENQSGDISQVSSSIEEMIANINSVTGTLVSNAGNVRTLQDASEVGRAGLQEVASDIQEIARESEGLLEINSVMANIASQTNLLSMNAAIEAAHAGETGKGFAVVADEIRKLAENSSKQSKTIGTVLKKIKGSIDKIKHSTENVLNKFEAIDSSVRTVAEQEGSIRNAMEEQGTGSKQILEGIGRLNEITRQVKDGSNEMHEGAKEVIRESENLEKATAEISSGMNEMAVGAKHINSAVNHVNEISGRNRQAIDVVIREVSQFKAE

SEQ ID NO: 37275 - DNA, 636 bp, Unknown
  Obtained from environmental sample
  misc_feature (1)..(636): n is a, c, g, or t
gtgcattactccgccttaaattgcgaaacttcccttattacgacatcaatggcttggcggttcctgccgcttatctcgttgacatggtttaccgcggaattgatatgttttgctccgactgccatctcgttcatgcctgatgaaatttccgcagtcgctttttcaaggttttcgctttcacgaataacttccttcgcgccctcgtgcatttcattggatccgtcctttacctgccgggttatttcattcaatctgccgatgccttcgagtatctgtttgctccccgttccctgttcttccattgcgtttcgtatacttccttcctgttccgcaacagtcctgacgcttgagtcaatcgcttcaaatttgttgagtacgttttccgtagaatgttttatcttgtcaatggacccctttatctttttgagtaccgtgccaatcgttttggattgcttgctggaattttcagccagtttgcgtatttcatcggcaactacggcgaatcccttaccagtttccccggcgtgtgccgcctctatcgcggcgttcatcgaaagcagattggtctggctggcgatgtttgccatgaccgagttgatttccaaaagcccttcggactcgcgggcaatttcctga

SEQ ID NO: 37276 - protein, 211 aa, Unknown
  Obtained from environmental sample
  misc_feature (1)..(211): Xaa is any amino acid
MHYSALNCETSLITTSMAWRFLPLISLTWFTAELICFAPTAISFMPDEISAVAFSRFSLSRITSFAPSCISLDPSFTCRVISFNLPMPSSICLLPVPCSSIAFRILPSCSATVLTLESIASNLLSTFSVECFILSMDPFIFLSTVPIVLDCLLEFSASLRISSATTANPLPVSPACAASIAAFIESRLVWLAMFAMTELISKSPSDSRAIS

SEQ ID NO: 37277 - DNA, 303 bp, Unknown
  Obtained from environmental sample
  misc_feature (1)..(303): n is a, c, g, or t
ttgaataaattcagatatattgggtataatgattatatgccaactatttcaatgttttatggtatattaataaggatgtatttggggaaaaaagagcataatcccccacatatccatgcaatctatcagaacaaaaaggccatttttgatataaaaactggcgagaaaacagaagggaatttacctaatgataaagagaaattggtttccgcttggataattttacacaaagacgaattattggctgattgggaattagcccaaaatggcgaacttccatataatattgacccgttaaaataa

SEQ ID NO: 37278 - protein, 100 aa, Unknown
  Obtained from environmental sample
  misc_feature (1)..(100): Xaa is any amino acid
MNKFRYIGYNDYMPTISMFYGILIRMYLGKKEHNPPHIHAIYQNKKAIFDIKTGEKTEGNLPNDKEKLVSAWIILHKDELLADWELAQNGELPYNIDPLK

SEQ ID NO: 37279 - DNA, 717 bp, Unknown
  Obtained from environmental sample
  misc_feature (1)..(717): n is a, c, g, or t
ttgaatagcttaccttttttctttcttcatttttctcttttcttttgtaaaaggagaattgcaatgtcagacgtatacgaagtcaaagagaaaatgcacaagatgagggcgaagctgtaccccagctacctgcccgggacggagggcaagtacatcgcccgcaccaccaacgaagccacggtcagcgtgtcggaaatctgcgcggacgcggtaaaacggggaggctatgaaggcagccacgatcaaatggtaaaagccgtcgagcactaccataaagaagcacgctaccagctcgccgacggcttttccgtcagcctcggcctctgctccgtccatcccaacatcggcgggctgttcgccaaccccaacgaagcccacaaccacgagaagcaccccctggacttccgcttccatcccctcaagcccctgctcgacctgcggcactccatagaagtgctgatcgatggcgtcgccgacacccacggatacatcatggagttcaccgacgtaaccagcaagtccgtcaacaacatctacacccagacgggaatgttcaccatcaccggctaccggctcaaagtggaaggcgaccaccccgacgtgggcgtgtatttcgagcaggtgggcggccccgccaggctgagagcgggccacctggcggaaaacacctcaagcaaactcatcggcatattcccacccgcccctcgtcacatctga

SEQ ID NO: 37280 - protein, 238 aa, Unknown
  Obtained from environmental sample
  misc_feature (1)..(238): Xaa is any amino acid
MNSLPFFFLHFSLFFCKRRIAMSDVYEVKEKMHKMRAKLYPSYLPGTEGKYIARTTNEATVSVSEICADAVKRGGYEGSHDQMVKAVEHYHKEARYQLADGFSVSLGLCSVHPNIGGLFANPNEAHNHEKHPLDFRFHPLKPLLDLRHSIEVLIDGVADTHGYIMEFTDVTSKSVNNIYTQTGMFTITGYRLKVEGDHPDVGVYFEQVGGPARLRAGHLAENTSSKLIGIFPPAPRHI

SEQ ID NO: 37281 - DNA, 714 bp, Unknown
  Obtained from environmental sample
  misc_feature (1)..(714): n is a, c, g, or t
gtggaacccagcaagcacgtaacagattctgttaaaaatttagccattgcccttatagactccttagacagaggcattcatttttccgtgcttgcaaaaaaccacaaccaaaacgcttcggcagatacctcttcatatttgcgcaggggttctggcgaaccggattacgaaagggcagccatgaggcttggcataggtgagtggacagataaccccgttttaacgaaagatgggtggaatataatccggcttatgggaaaaaaagaagatggcataaaaacagcgagcattcttttgagagtggagccggtcgcagccgattctctacaggttttacacaaattagattctttaaaaagcgaaattgaaaagggcaaaataaatttttcaaaagctgccatcaccttcagcaaagacagagaaacatctttcaaaggcggtagctttggctggcaagagagaaaggctatagacccagtttatgaaaaaataatatcttccttaaaagtaggcgaaatttctagccccgaaattatagagggctcctatagaattctgcgcctagacaacgaagcgcaagttcgcgaatataatttggaagaagattatcccataattgaaagcatggccgccaactatatgtctaacctcaaactcaagtctttgataagtcaatggagaaatgaggtttatattgaaattcaaggtttatag

SEQ ID NO: 37282 - protein, 237 aa, Unknown
  Obtained from environmental sample
  DOMAIN (97)...(190): PPIC-type PPIASE domain
  misc_feature (1)..(237): Xaa is any amino acid
MEPSKHVTDSVKNLAIALIDSLDRGIHFSVLAKNHNQNASADTSSYLRRGSGEPDYERAAMRLGIGEWTDNPVLTKDGWNIIRLMGKKEDGIKTASILLRVEPVAADSLQVLHKLDSLKSEIEKGKINFSKAAITFSKDRETSFKGGSFGWQERKAIDPVYEKIISSLKVGEISSPEIIEGSYRILRLDNEAQVREYNLEEDYPIIESMAANYMSNLKLKSLISQWRNEVYIEIQGL

SEQ ID NO: 37283 - DNA, 855 bp, Unknown
  Obtained from environmental sample
  misc_feature (1)..(855): n is a, c, g, or t
atgagcaaacgctggctcttaaaacttgtgcaggataaccgcgttacaggctgggacgatccgcgtatgcccaccattgccggccttcgccgcagaggttacacaccggaagcgatacgcagttttgtttcacagattggaatcgcgaagacggacagcatggtagacatcgccttccttgaatactgcctgcgcgaagatttgaacaagcgggcattgcgcgtaatggcggtcttgcgccccctcaagctgattatcgaaaattgggaagaaaataaaaccgaggaaatggaagcggtaaacaaccccgaggacgagggcgcgggcaagcgccttgtgcccttctcccgcgaactttggattgagcgcgaggattttgaagaagtccctccccctaaatattaccggctcttccccggcaactccgtccgccttcgatacgcgtacatcgttacctgcaccggttttgacaaagacgcggacggcaatattacagccgtgcgctgcacttatgatcctcaaacaaggggcggtaacgcgcctgataataaaaaaatcaaaagtacaattcactgggtttccgccgcgcattccgtccctatgcaggcgcgtctttacgattaccttttcagcgttgaaaagccgatggaagtctctccccgccccgacggctctcccggcgaatttaccgacaacttaaacccaaattcgcttgaggttattgaaaacgcgcaaggcgaaccttcgctttccgatgtttcgccgggcaaggttttccaatttgagcgcttgggctattttgtccgcgacccggacacagccttggacggacggcccgtcttaacaagactatag

SEQ ID NO: 37284 - protein, 284 aa, Unknown
  Obtained from environmental sample
  DOMAIN (72)...(270): tRNA synthetases class I (E and Q), anti-codon binding domain
  misc_feature (1)..(284): Xaa is any amino acid
MSKRWLLKLVQDNRVTGWDDPRMPTIAGLRRRGYTPEAIRSFVSQIGIAKTDSMVDIAFLEYCLREDLNKRALRVMAVLRPLKLIIENWEENKTEEMEAVNNPEDEGAGKRLVPFSRELWIEREDFEEVPPPKYYRLFPGNSVRLRYAYIVTCTGFDKDADGNITAVRCTYDPQTRGGNAPDNKKIKSTIHWVSAAHSVPMQARLYDYLFSVEKPMEVSPRPDGSPGEFTDNLNPNSLEVIENAQGEPSLSDVSPGKVFQFERLGYFVRDPDTALDGRPVLTRL

SEQ ID NO: 37285 - DNA, 1572 bp, Unknown
  Obtained from environmental sample
  misc_feature (1)..(1572): n is a, c, g, or t
atgacgacgggactactgggtttcttaaaactgtgggatacagccagtggtcgtgaattatacacaagaagactccctaaaggagtactttcattggcattcaggcctgacgggaagcaaatagttttttattgtggttccaaagatagcactgtaatgctttgggatgctgtaaaaggggaggaaattcgtgcttttgaaactaagtcaaatgtaagagattatcttcggcttaggtccataggggtctatcttgggcttgagtttgtcgggttcaaccctaagggtacacaaatagttacagtagaagatgattatacagacgaggagggtaaccctataactagtttaactccatctgataagaaaaaaatagcgtatttagtaaaactgtgggatattggaagcgggaaactcttgaacacatttgagggaacttctcctgtggcttttagtcctgacggtaaatcactatacacgaacggcacaacacaaaagccaaatataagaatatacgataccatgaatggacagttgatcggtgaaattgaagggtcaggaagggggatgggttttaatctcggaaagaatcaattcgctagatttcacgacggtatacagatttgcgacattgccacaggtaaggaactcgcccaattcatctccctatccggcgaagacacccaactcacctctgccagccgtggcctcaccgtggaaacacaaaccgcgtcttcaaccatagacggtgaatggctctctattacgcctgacggttactaccaagcctcccctcgcggcgaccgctacattaacgtgcgggtcaacaacaccgtctccggcattgacagcttccgctccatcttctacaaccccgatgtggtgcaggcgcggttacagggcaggcccgaccccgcctcaaagtcaagttttaccattcaagatgccgccaaatttataccgccggaagtaaccatacaatccccggcgaacttcagtacaaccaacaccgcaaccgcaaacctttccgtaaacatcaccagtcagagccagcctgtcaagaacatcaagatcatcgtcaacggcaggcttatcggcaaagacgaactcgcggcggttaaaggcacgggcctccaggcgcaaaaggcaagccttaccgttacgggcaatcaaaagaccgtcaacttgtcactgccccttgagcttgagccgggcaataaccgcatcgaggtagtcgccttcaacggttactcggaaaaccgccgctttgttgacgttacgcgcaacgcaccggcaggggaaaaatcgccattgccaaacctgtggatagtcgccgtgggagtcaacggctacgacaacgcgggtacaaaactgcaagggcttaccagtcttaactttgccgtggcggacgccaagggcctcgtggattcccttaaagcccaggagggcaaacgttacgcgaaagtgaacagcatgctcatcgctgacggcgaagcggcctcccctactacggcgaacatcaggcagggccttaagtttctggaaggggcagacccacggcgcgatatgtaa

SEQ ID NO: 37286 - protein, 523 aa, Unknown
  Obtained from environmental sample
  misc_feature (1)..(523): Xaa is any amino acid
MTTGLLGFLKLWDTASGRELYTRRLPKGVLSLAFRPDGKQIVFYCGSKDSTVMLWDAVKGEEIRAFETKSNVRDYLRLRSIGVYLGLEFVGFNPKGTQIVTVEDDYTDEEGNPITSLTPSDKKKIAYLVKLWDIGSGKLLNTFEGTSPVAFSPDGKSLYTNGTTQKPNIRIYDTMNGQLIGEIEGSGRGMGFNLGKNQFARFHDGIQICDIATGKELAQFISLSGEDTQLTSASRGLTVETQTASSTIDGEWLSITPDGYYQASPRGDRYINVRVNNTVSGIDSFRSIFYNPDVVQARLQGRPDPASKSSFTIQDAAKFIPPEVTIQSPANFSTTNTATANLSVNITSQSQPVKNIKIIVNGRLIGKDELAAVKGTGLQAQKASLTVTGNQKTVNLSLPLELEPGNNRIEVVAFNGYSENRRFVDVTRNAPAGEKSPLPNLWIVAVGVNGYDNAGTKLQGLTSLNFAVADAKGLVDSLKAQEGKRYAKVNSMLIADGEAASPTTANIRQGLKFLEGADPRRDM

SEQ ID NO: 37287 - DNA, 822 bp, Unknown
  Obtained from environmental sample
  misc_feature (1)..(822): n is a, c, g, or t
ttgccacagccccaagcaaagcattccggcgacagccgccagacaggcagacccggccagtccaagcgccctggggacaaaggtggccgccctggcggttcttcgcggcctagcggcggaacccagcggccaggtgcgctaggctcgcgccccggggcagggtttacccgccctgccgggggaggcatcggccgcacccccaatttgggtgcgctccccccaccagaccccaacatggccaaagggccaggacgtggcggccatttcacaggcaagaaaaaaggcgaaaaacactcgcggatagaccaagagagtgaggcgctggaacaaaaactcaggcagccaaggtctagggcccagcaaatcgccgcagagtttattgaagaagaaataggcatagtgatgctttccgaaggtgtcaccgtcaaagagcttgccgaaaaatgcaatcgccccgccaaggacgttgtcgcaaagctgctgcacaggggcatattcgccaccataaaccagccgctggataccgagttggcgaaagagctggcgcgcgaatttggctacatggccgacatagtttcttttgaagaagatctgcagataatgcaagaagaaaacaccagcgcggaaatgggcgaaaaactcccgcgcccgccagtggtgactatcatggggcacgttgaccacggcaaaacctcccttttggacgccataagaaaatcccgcgtggccgaaggagaagccggcggcataacccaggccataggcgcgtacagggttgacataaaagaccaagagggcaacgacaggtacatgccttcatga

SEQ ID NO: 37288 - protein, 273 aa, Unknown
  Obtained from environmental sample
  DOMAIN (137)...(188): Translation initiation factor IF-2, N-terminal region
  misc_feature (1)..(273): Xaa is any amino acid
MPQPQAKHSGDSRQTGRPGQSKRPGDKGGRPGGSSRPSGGTQRPGALGSRPGAGFTRPAGGGIGRTPNLGALPPPDPNMAKGPGRGGHFTGKKKGEKHSRIDQESEALEQKLRQPRSRAQQIAAEFIEEEIGIVMLSEGVTVKELAEKCNRPAKDVVAKLLHRGIFATINQPLDTELAKELAREFGYMADIVSFEEDLQIMQEENTSAEMGEKLPRPPVVTIMGHVDHGKTSLLDAIRKSRVAEGEAGGITQAIGAYRVDIKDQEGNDRYMPS

SEQ ID NO: 37289 - DNA, 516 bp, Unknown
  Obtained from environmental sample
  misc_feature (1)..(516): n is a, c, g, or t
atggtggcgaatatgcccctgtgcagcagctttgcgacaacgtccttggcggggcgattgcatttttcggcaagctctttgacggtgacaccttcggaaagcatcactatgcctatttcttcttcaataaactctgcggcgatttgctgggccctagaccttggctgcctgagtttttgttccagcgcctcactctcttggtctatccgcgagtgtttttcgccttttttcttgcctgtgaaatggccgccacgtcctggccctttggccatgttggggtctggtggggggagcgcacccaaattgggggtgcggccgatgcctcccccggcagggcgggtaaaccctgccccggggcgcgagcctagcgcacctggccgctgggttccgccgctaggccgcgaagaaccgccagggcggccacctttgtccccagggcgcttggactggccgggtctgcctgtctggcggctgtcgccggaatgctttgcttggggctgtggcaatgtaatgtag

SEQ ID NO: 37290 - protein, 171 aa, Unknown
  Obtained from environmental sample
  SIGNAL (1)...(28)
  misc_feature (1)..(171): Xaa is any amino acid
MVANMPLCSSFATTSLAGRLHFSASSLTVTPSESITMPISSSINSAAICWALDLGCLSFCSSASLSWSIRECFSPFFLPVKWPPRPGPLAMLGSGGGSAPKLGVRPMPPPAGRVNPAPGREPSAPGRWVPPLGREEPPGRPPLSPGRLDWPGLPVWRLSPECFAWGCGNVM

SEQ ID NO: 37291 - DNA, 699 bp, Unknown
  Obtained from environmental sample
  misc_feature (1)..(699): n is a, c, g, or t
atgagcaacaagctgatgctgacctgcgctattacaggggcagagaccaccaggaaacagcagcccgcgctgcctatcacgccggaagagatcgctgcaggagcctttgaggcatgggaggcaggtgcctcaatcctccatttgcacgtcaggaaggacgacggtacgcccactcaggacaaggccgttttcaaaaaggctatagatttggtgcgctccaagtgcgacatggtaattgaaaccaccacaggcggcgcggtgggaatgacgccggaggaaaggctgcaacctgtcacgctaaaaccagaaatggccagcttggactgcggcacggtaaattttggcgacgactacattgtcaacactctgcccatcatgcgcgaatttgccaaggccatgagagacaatggcgtaagaccaactcttgaatgttttgacctcggccatgtgtatgcaagccagatactcatcaaagagggactattggaagagccgtaccactatgggcttgtgctaaatgtacctggggcagtcaagtacgaagtggacgtgctggagttcatggtcagaaaatgccaagggcgccttttggactgctatggggataggcggcaaggccaacctagatgctatctatggcgcattgtcactagagggcaacgtccgcgtgggcttcgaggacaatatctggtactctaa

SEQ ID NO: 37292 - protein, 232 aa, Unknown
  Obtained from environmental sample
  DOMAIN (2)...(227): Prokaryotic protein of unknown function (DUF849)
  misc_feature (1)..(232): Xaa is any amino acid
MSNKLMLTCAITGAETTRKQQPALPITPEEIAAGAFEAWEAGASILHLHVRKDDGTPTQDKAVFKKAIDLVRSKCDMVIETTTGGAVGMTPEERLQPVTLKPEMASLDCGTVNFGDDYIVNTLPIMREFAKAMRDNGVRPTLECFDLGHVYASQILIKEGLLEEPYHYGLVLNVPGAVKYEVDVLEFMVRKCQGRLLDCYGDRRQGQPRCYLWRIVTRGQRPRGLRGQYLVL

SEQ ID NO: 37293 - DNA, 306 bp, Unknown
  Obtained from environmental sample
  misc_feature (1)..(306): n is a, c, g, or t
atgtacctggggcagtcaagtacgaagtggacgtgctggagttcatggtcagaaaatgccaagggcgccttttggactgctatggggataggcggcaaggccaacctagatgctatctatggcgcattgtcactagagggcaacgtccgcgtgggcttcgaggacaatatctggtactctaagggccgcctggccaaaagcaatgcggagctggtcgaaagagcgaccagaatagccaaggactgcggcagggagatagcccgccccgatgacgtgcgctccatgctaaaactgagaaagggatga

SEQ ID NO: 37294 - protein, 101 aa, Unknown
  Obtained from environmental sample
  misc_feature (1)..(101): Xaa is any amino acid
MYLGQSSTKWTCWSSWSENAKGAFWTAMGIGGKANLDAIYGALSLEGNVRVGFEDNIWYSKGRLAKSNAELVERATRIAKDCGREIARPDDVRSMLKLRKG

SEQ ID NO: 37295 - DNA, 300 bp, Unknown
  Obtained from environmental sample
  misc_feature (1)..(300): n is a, c, g, or t
gtgggaacttccccaagagacggctcgcccgtctatgaggtattgacagcttttgtatcccaaagttttgtagatggaaaaaacactggaatccgtgtagccaaaagcattctgggcaaaaccttaaatgtagaacatattaaatctatgctcaacggcgaaaaaaccgaattgataaagggtttccgctcatcaaaaacccgccgcctttttgatgcttttttgaaaatggataagaatgggaagatagggtttgaatttccgcttgtaaaggtaaagccacggaagaaaacagtctga

SEQ ID NO: 37296 - protein, 99 aa, Unknown
  Obtained from environmental sample
  misc_feature (1)..(99): Xaa is any amino acid
MGTSPRDGSPVYEVLTAFVSQSFVDGKNTGIRVAKSILGKTLNVEHIKSMLNGEKTELIKGFRSSKTRRLFDAFLKMDKNGKIGFEFPLVKVKPRKKTV

SEQ ID NO: 37297 - DNA, 819 bp, Unknown
  Obtained from environmental sample
  misc_feature (1)..(819): n is a, c, g, or t
ttgaaagaaatcaaaggttttgggcaaaaggcattcgagcaagccgccggatttttacgcattcacggtgcagaaaaccctttggacaacagtgcggtgcatccagaaaattacaacttggtagagaaaatcgcagagaaagctggcaagcctttgaatgaactcataggcaattccgaggctttacattccattgtggcaaacgatttcaccgatgcggagaacggagttggcaaaaatactgtggcagatattttggcagaacttgaaaaaccaggcagggaccctcgcaaggaatttcattatgccaaattcaatcccaaaatcaaaaccatgcaagatttgattaccggcagttggttggaaggcgttgttagcaacgttacgaattttggcgcatttgtagatattggcgttcatcaagatggcttggtgcatatttccgagatgagtgataattttgtgaaagatgcaaaaacaattttgacaacaggtgatgttgttaaggttagagtagtttccgttgatgcccccaataaacgcatatctctttccatgaagcaggagagcgagcgcagggtaggcggtggtggctttaaaggtggcggcagagatgccaaaggtggacataaaggcaagggcggtttccaacccaagcctatacctcaggctgcaactcttgccgatttaaaagctcgtttttcgggcaaggcacagaagcaggctgctcaaaacattccaaaaaagccagccgctgccgctattaaaaagagcgatgttatgtctaggcttaaaaatgcgatgaaaggcgggttgtga

SEQ ID NO: 37298 - protein, 272 aa, Unknown
  Obtained from environmental sample
  DOMAIN (114)...(187): S1 RNA binding domain
  misc_feature (1)..(272): Xaa is any amino acid
MKEIKGFGQKAFEQAAGFLRIHGAENPLDNSAVHPENYNLVEKIAEKAGKPLNELIGNSEALHSIVANDFTDAENGVGKNTVADILAELEKPGRDPRKEFHYAKFNPKIKTMQDLITGSWLEGVVSNVTNFGAFVDIGVHQDGLVHISEMSDNFVKDAKTILTTGDVVKVRVVSVDAPNKRISLSMKQESERRVGGGGFKGGGRDAKGGHKGKGGFQPKPIPQAATLADLKARFSGKAQKQAAQNIPKKPAAAAIKKSDVMSRLKNAMKGGL

SEQ ID NO: 37299 - DNA, 750 bp, Unknown
  Obtained from environmental sample
  misc_feature (1)..(750): n is a, c, g, or t
atggaagaaggtaagatggaagtttcttcttttttcacttttcccttttcacttttcccttgtggaagcgtcgtggccgtggtgggctgcggggggaagacttctcttattgagcttgcggcggacaggctgcgtgataaaaaggttttgatttcgaccactacaaagatattcccaccaaagatgaaagatattgtgttatgtgaaactttagaggaatgtgaggggcatgagccgcggaccggtggtcagtgtatgggaatgctgaacagcgcaagcgggaaactggaagcgctgcctgaggcgtttctcgcgaaaataaaatcccgctatgatgtgtgtttactggaagccgacggttcgcgggggctgccatgtaagggttggctggcaaatgagcctgtggttcccaattactgcacgcacacggtggggctggtcacgatgggcgctctgggcaaaccggccggagaaaacactgtccaccgcctgccggaatttttcgctttgaccggagtaggggagggggagacaatcacagcggcggcattggaggcaatggtctgcgattcaaaagggatgttcaaaaacagcgcgggacagcggtatgtccttgtcaatcaggttgaggatgacgctactgccgccgccgcgctgtcttttttgcggacaattaaagaaaaatatccggcccgttttgagaaactgttttttggaagcgtccgtcatgacgcgtggcaggaagtataa

SEQ ID NO: 37300 - protein, 249 aa, Unknown
  Obtained from environmental sample
  misc_feature (1)..(249): Xaa is any amino acid
MEEGKMEVSSFFTFPFSLFPCGSVVAVVGCGGKTSLIELAADRLRDKKVLISTTTKIFPPKMKDIVLCETLEECEGHEPRTGGQCMGMLNSASGKLEALPEAFLAKIKSRYDVCLLEADGSRGLPCKGWLANEPVVPNYCTHTVGLVTMGALGKPAGENTVHRLPEFFALTGVGEGETITAAALEAMVCDSKGMFKNSAGQRYVLVNQVEDDATAAAALSFLRTIKEKYPARFEKLFFGSVRHDAWQEV

SEQ ID NO: 37301 - DNA, 576 bp, Unknown
  Obtained from environmental sample
  misc_feature (1)..(576): n is a, c, g, or t
gtggtcgaggcgaaaaagattctgttacaggggcaggatgttacggttctggttgacaacagcatcgcggtacagcacctggaaaaaatggccgccggattgggatatgatttttcctttgagcagaagggagaagcggagtataccgtggcaatcattgtaaaaaactcaggtacccagtcggcttcttgtcaggtgatgtcgcctacggcggcgccggaagcgacaccttcagctgctgggggtcaagtcttccttattacaggcgatcaaataggcataagcgccgaggaagccggcaaaaaattaatgcaaacttttttgtactcattggcgcagcttcccaaagcaccggaaattattcttcttataaatgcaggagtcaaactcgccgcgcaagggtcggatgtgcttgataatttgaagatccttgccgaacatggcgcggacatacgctcatgcggccagtgccttaactattacgggcttaccgaaaaactggctgttggcaagatcaccaatatgatggagatcgtggagtttttaacttcatcaagacgggtaataacaatttga

SEQ ID NO: 37302 - protein, 191 aa, Unknown
  Obtained from environmental sample
  misc_feature (1)..(191): Xaa is any amino acid
MVEAKKILLQGQDVTVLVDNSIAVQHLEKMAAGLGYDFSFEQKGEAEYTVAIIVKNSGTQSASCQVMSPTAAPEATPSAAGGQVFLITGDQIGISAEEAGKKLMQTFLYSLAQLPKAPEIILLINAGVKLAAQGSDVLDNLKILAEHGADIRSCGQCLNYYGLTEKLAVGKITNMMEIVEFLTSSRRVITI

SEQ ID NO: 37303 - DNA, 1515 bp, Unknown
  Obtained from environmental sample
  misc_feature (1)..(1515): n is a, c, g, or t
atgtctgatttgccttcctatcttgaacccctcaaccctgagcagcggcgggctgtcctgcatacggggaacccgctcctgattttggccggcgcgggttccggaaaaaccagggtcattaccacaaaaatcgcatggcttatacgggaaaaaggactcgcgccgcagtcaatactggctgtcacttttaccaacaaggcggcgcgggaaatggccgaacgcgcaaaaagcattgacgagcgggcagcttatgccatgctgaggacttttcattcattcggagcctggttcctcaggcgtaacggacatttgtgcggcctggattccaactttacaatctatgacgatgacgatgttatctcctttctttccactatcctggaagggacgcaaaaatccgaagtcaaacgcgccgcgtataatatttccagagcaaaggattattttctttcccccgaagacccgtcgcttaaattaatcgacagcggtaaaaaattccgcgatatatacgccgagtatgaaaaaaggcttgcccgtaccgganatgtggattttggcgatttgataaaaaagccggtggagattctaaggaaggaacctgatgtccgccgccgtttcagagaccgtttttcagtcataatggtggacgaataccaggacgcgaatgtcgcccagtttgagatgttaaaggaactggcaggacccggcacttatgtctgcgttgtgggggatgacgaccagtccatttaccgtttccggggcgcggaagtgaaaaacatccttgagtttccggaaaaattttccgatgccgacattatccgcctggaaagtaattaccgttccaccgcgtctattttgaaagccgcttcctcggtcgtagatcacaataagggccgtttggggaaaacactcagatcagagcgcggagacgggaagctgccggtgcttgcctttctgccaaatcaggaagaagaagccaatttctgcgcatcgcttatcgaaaagtcagtcaaaagcagcaacgtcggcgtcggcgttaaaacgccgcaaacgccgcagactcaatggtcggattgggcgatattatatcggactaacgcgcaatcgcgcgattttgagacggaattcctggatcggggcatcccttacaaggtagtcggttcgcttaaatttcatgaacgtgaggaaattaaggacgccgtcgcccttctttcgttcatggtgaacccccgcgatgaaatttcctttcgccgtattgtgaacaaacccgcccgaggcattggcgcggtaacggtcgatcgcctgattgacgcgaaccttaccgaagggaaagatcttctggaaacgtcaagaaatatggttcaagcaaaaaaattaagttcaaaagcctcggctgggctggagaaatttataaaagtgatggatgaggggaaatcgcttctgaaaaacatccagcctgtaattgcgattaacgatgaaattactgatgangatgaagattctcggccgatctga

SEQ ID NO: 37304 - protein, 504 aa, Unknown
  Obtained from environmental sample
  DOMAIN (11)...(499): UvrD/REP helicase
  misc_feature (1)..(504): Xaa is any amino acid
MSDLPSYLEPLNPEQRRAVLHTGNPLLILAGAGSGKTRVITTKIAWLIREKGLAPQSILAVTFTNKAAREMAERAKSIDERAAYAMLRTFHSFGAWFLRRNGHLCGLDSNFTIYDDDDVISFLSTILEGTQKSEVKRAAYNISRAKDYFLSPEDPSLKLIDSGKKFRDIYAEYEKRLARTGXVDFGDLIKKPVEILRKEPDVRRRFRDRFSVIMVDEYQDANVAQFEMLKELAGPGTYVCVVGDDDQSIYRFRGAEVKNILEFPEKFSDADIIRLESNYRSTASILKAASSVVDHNKGRLGKTLRSERGDGKLPVLAFLPNQEEEANFCASLIEKSVKSSNVGVGVKTPQTPQTQWSDWAILYRTNAQSRDFETEFLDRGIPYKVVGSLKFHEREEIKDAVALLSFMVNPRDEISFRRIVNKPARGIGAVTVDRLIDANLTEGKDLLETSRNMVQAKKLSSKASAGLEKFIKVMDEGKSLLKNIQPVIAINDEITDXDEDSRPI

SEQ ID NO: 37305 - DNA, 390 bp, Unknown
  Obtained from environmental sample
  misc_feature (1)..(390): n is a, c, g, or t
atgaaccaagagaagcaaaacgctatcgaattcgccaaccaaagtctgcttttggacataatccccgtaatcgacgactttgagcgggctattcaatcgggggaaaaagccgccgatttgaacacctttatcgagggtgtaaaaatgattgaaaaacggctgaccggtcagcttgaaagcaagtgggggcttaaacgcttcaattctgcaggagagccttttgatccgaataagcacgaagcgcttatgatggataaatcccccgatgttacggaagccgtagttcaggaggatttggtaaagggctatctgttgaaagacagggtaattcgcccggcaaaagtaaaagtgttaatgcctgaggcaacaccctcggcggctagtgaataa

SEQ ID NO: 37306 - protein, 129 aa, Unknown
  Obtained from environmental sample
  DOMAIN (1)...(119): GrpE
  misc_feature (1)..(129): Xaa is any amino acid
MNQEKQNAIEFANQSLLLDIIPVIDDFERAIQSGEKAADLNTFIEGVKMIEKRLTGQLESKWGLKRFNSAGEPFDPNKHEALMMDKSPDVTEAVVQEDLVKGYLLKDRVIRPAKVKVLMPEATPSAASE

SEQ ID NO: 37307 - DNA, 366 bp, Unknown
  Obtained from environmental sample
  misc_feature (1)..(366): n is a, c, g, or t
gtgggaatgggtcgtgttacgcgtaatcagttttgtcataacgccgcccaatgtttctatgcccagcgaaaggggagtaacgtccagcaggagcacgtccttcacgtcgcgccccagaattccgccctgaattgccgcgcctaccgcgacagcttcgtccgggttaacgcccttgttaggctctttttgaaaaagttcttttacaacctgctgaaccgcgggaatgcgggtggaaccgccgacaaggataacctcgtcaatcttgtccgcgctaagacccgcgtccgcaagcgcttttttgcacggctctttggaacgctcaagcaaatcttccaccatttgctcgaactttgcgcgtgtaagtga

SEQ ID NO: 37308 - protein, 121 aa, Unknown
  Obtained from environmental sample
  misc_feature (1)..(121): Xaa is any amino acid
MGMGRVTRNQFCHNAAQCFYAQRKGSNVQQEHVLHVAPQNSALNCRAYRDSFVRVNALVRLFLKKFFYNLLNRGNAGGTADKDNLVNLVRAKTRVRKRFFARLFGTLKQIFHHLLELCACK

SEQ ID NO: 37309 - DNA, 393 bp, Unknown
  Obtained from environmental sample
  misc_feature (1)..(393): n is a, c, g, or t
atggaaaccgcctgcggaaagagaaaagaaatgcaaattttcgggaatgattacgacactcgggacggaacctgtatccgcggttatgtgcatgtaagcgatctagccgcaggccatattctggcgttaaactacatcagcaaaaacaacaaaagcctgactgtaaaccttggaagtgaaacaggcttctccgtaacggaagtaattgaagcggcgcgaaaagtaacgggcaaaactataccggttaaaattacgggaagaaggcagggcgaccctgcggccctttacgattcgtcgtctctcgcgtttgaaacacttggctggaaagcgcgttactccgatatggaaacaatacttaatacaagctgggaagcgtacaaaaatgaaagataa

SEQ ID NO: 37310 - protein, 130 aa, Unknown
  Obtained from environmental sample
  misc_feature (1)..(130): Xaa is any amino acid
METACGKRKEMQIFGNDYDTRDGTCIRGYVHVSDLAAGHILALNYISKNNKSLTVNLGSETGFSVTEVIEAARKVTGKTIPVKITGRRQGDPAALYDSSSLAFETLGWKARYSDMETILNTSWEAYKNER

SEQ ID NO: 37311 - DNA, 552 bp, Unknown
  Obtained from environmental sample
  misc_feature (1)..(552): n is a, c, g, or t
atgaacattttagtaatcggcggcgcaggctatatcggaagccatgtaacaagagaatttctggatgcggggcataattgcactgtatatgacaacctttcaagcggtcttcgcgaaaacctttttcctgaagccggattttttcacggggacattcacaactaccctcttcttttggatacgatgaaaaacggaaattttaacgccctcattcatcttgcggcgttcaaggcggcaggcgaatcaatgttaaaaccggaaaaatattcacataacaatatatcgggaaccgtaaacatactgaacgccgcaagcgaggcgggaatcaagaacatcgtcttttcttccacagccgccgtttacggcagtcctcagtacctgccgattgatgaaaagcaccctacccttcccgagaattattacggctttacaaaacttgaaatcgagcgttttttgggctggtacgagaaacttaaaggaataaattacgcctgcctccgctattttaacgccgcgggctacgatataaaggaacgcataaaagggacttga

SEQ ID NO: 37312 - protein, 183 aa, Unknown
  Obtained from environmental sample
  DOMAIN (4)...(182): 3-beta hydroxysteroid dehydrogenase/isomerase family
  misc_feature (1)..(183): Xaa is any amino acid
MNILVIGGAGYIGSHVTREFLDAGHNCTVYDNLSSGLRENLFPEAGFFHGDIHNYPLLLDTMKNGNFNALIHLAAFKAAGESMLKPEKYSHNNISGTVNILNAASEAGIKNIVFSSTAAVYGSPQYLPIDEKHPTLPENYYGFTKLEIERFLGWYEKLKGINYACLRYFNAAGYDIKERIKGT

SEQ ID NO: 37313 - DNA, 918 bp, Unknown
  Obtained from environmental sample
  misc_feature (1)..(918): n is a, c, g, or t
atggccgaggactgcccccgcagatttctcatgaagtaccagcagttgtacctttcccttggattctcgaccggctatcgctggtcaaccgggctgggcaatttgtttctgggagggggcgtcagaaccggttatgttcgcaatgcctatgacaacgacatctatcgtccttttgatcgcgcactcagggaaaggaataacatgtggacgcccaagaattcagtatggactaccatttcccttgatcaacgtgatttatactacgacccttcaaagggatattacctgtacgagcgttttggcgtctacggtatattgggagaagatatcgagcgggaacattacctgcgcagcgacaccaaagcggaacagtattttaccctgatcaatattccggtaacggagaaatggaatttcaaaactatcctggccttccattccggaatctcgtttattttcaaacagccaggcagagatagggacagttttacgccggtcatggaagaaaccaacaaactgtctgttgacggaatgtttatcggcaggggctggagcagtgaataccgcgtcaaaggacttaccctatgggaaaactgggttgagttgagattacccattgtgcagggcctgttggcctgggattttttctttgacgccgccggtgttgagacaatgcagggttactattatggaatcaacagcgagggagaaagaaatttcaccatagaaaatatgcgtttcagttttggcggcggtttgcgttttaccctgccccagttccccttccgcttcagcctggcaaaacggttccgggtgatagacggagaagttatctggcagcgcggcgctttgttccggaatgcggatgatcccacttccggtattgatccagttatttcatttgcgattgcgtattag

SEQ ID NO: 37314 - protein, 305 aa, Unknown
  Obtained from environmental sample
  DOMAIN (1)...(285): Surface antigen
  misc_feature (1)..(305): Xaa is any amino acid
MAEDCPRRFLMKYQQLYLSLGFSTGYRWSTGLGNLFLGGGVRTGYVRNAYDNDIYRPFDRALRERNNMWTPKNSVWTTISLDQRDLYYDPSKGYYLYERFGVYGILGEDIEREHYLRSDTKAEQYFTLINIPVTEKWNFKTILAFHSGISFIFKQPGRDRDSFTPVMEETNKLSVDGMFIGRGWSSEYRVKGLTLWENWVELRLPIVQGLLAWDFFFDAAGVETMQGYYYGINSEGERNFTIENMRFSFGGGLRFTLPQFPFRFSLAKRFRVIDGEVIWQRGALFRNADDPTSGIDPVISFAIAY

SEQ ID NO: 37315 - DNA, 609 bp, Unknown
  Obtained from environmental sample
  misc_feature (1)..(609): n is a, c, g, or t
atgccgaaaatggacgggtttgaggccgccggaaatttgcgaagccttggctataaaatacccatcatagtaactacggcgacatttctccctgaagatgaggaaaactgcaaaaaatctggtatcaacgatgtacttattaagccaatcaagttttcggaaattaaactgatgcttgaaaagtggcttgtctccggaaaagaaccgcaggctttcgatctgatgcctgctgaccaggcggcaagcactgtttcagggtcggcggtatttaatgcccaagaaatgctccatgcctttttgaatgaagtagaagtcgttttaccggtgctttcccgctttattgaacgtaccagctctcagttggaaaattttcctgctttaaaagcagccggcgactgggcaactgcccgccgcgatgcgcatacaataaaaggatcgtccggtaccatgggcagcgcggaacttggcaaagcggccagcgctttggaaaaagcctgcataaacgcctccactgaagaagccgaagttgcttacccatatgtacttgaaactttcgaaaaatacaaaaaagaagcggaaaaatttattcagggtataaaaccgcggtaa

SEQ ID NO: 37316 - protein, 202 aa, Unknown
  Obtained from environmental sample
  DOMAIN (94)...(191): Hpt domain
  misc_feature (1)..(202): Xaa is any amino acid
MPKMDGFEAAGNLRSLGYKIPIIVTTATFLPEDEENCKKSGINDVLIKPIKFSEIKLMLEKWLVSGKEPQAFDLMPADQAASTVSGSAVFNAQEMLHAFLNEVEVVLPVLSRFIERTSSQLENFPALKAAGDWATARRDAHTIKGSSGTMGSAELGKAASALEKACINASTEEAEVAYPYVLETFEKYKKEAEKFIQGIKPR

SEQ ID NO: 37317 - DNA, 369 bp, Unknown
  Obtained from environmental sample
  misc_feature (1)..(369): n is a, c, g, or t
atgccaaagaaggttcttgtacttttggccgaggggtttgaggaagtggaggcggttacacctattgattatctacgccgctgtggaattgaggtgactgtcaccgcgattgggaaaagcctggctgtaaaaggctcacacggtattcagataacggcagacgctttgttggaaagcctttcggttgagggaaagctcttgccttccggctgggatggcgtggttgttccaggagggcttccgggagccgataacctggcggcatcaaaggaaacaggggtttttattaaagaaatggccgccggaggcaaattgatctgcgccatctgcgcggccccagccagggtgctttctccttggaactgttaa

SEQ ID NO: 37318 - protein, 122 aa, Unknown
  Obtained from environmental sample
  misc_feature (1)..(122): Xaa is any amino acid
MPKKVLVLLAEGFEEVEAVTPIDYLRRCGIEVTVTAIGKSLAVKGSHGIQITADALLESLSVEGKLLPSGWDGVVVPGGLPGADNLAASKETGVFIKEMAAGGKLICAICAAPARVLSPWNC

SEQ ID NO: 37319 - DNA, 921 bp, Unknown
  Obtained from environmental sample
  misc_feature (1)..(921): n is a, c, g, or t
ttgacagattcggccgaggtcttttcaacgcttatcgcttttccggatctttatgaaataggtatgggaaatcaggcgttaaaaattatttacaaccgcatgaacagtatccggggcatatcctgcgaccgcgctttcgcccccgcccccgattttgaaaaactgttacgcgaaatcaatatccctctttacggccttgacacgggcatagccctttcctgtcttgatcttcttatgtttaccataggctatgaattgggacttggcggcctccttttaatgctttcttcttcttttattcccctgcgctgcgaagaaaggacggaagatcacccggttgtaattgcgggagggccagcagtttcaaatccctcggccttttcaccgtttattgacgcgttctggataggagaggcggaagcgggtttttttgatcttgttcttgaacttgccgtgatgaaagagaacgggaagggcaggggggcgctgttggaaaaaatttccgcgcacccgaatatttatgtaaaaggaaaaaaaaagacgttacgcgccatttactccggtttttctgacagtgaggaaacagaggcggccgtatttcccgttccaagcatgaaaataattcaacatcacggaagcgtggaaattatgcgcggctgtcctaacggctgccgcttttgccacgcgggtttttggtacagacccatgcggcagaaaagtatggcatttgttgagacgcaggtaagggaaatggtaacaaaaggcggctggcatgaaataagcctttcttccctttcttccggcgactataaaggaatagactgccttgtagaaaatcttaacggaaagttcgcaagcctgcacgtttctttccagcttccctccttaaaagtttccgggtttttcactttcgctccttga

SEQ ID NO: 37320 - protein, 306 aa, Unknown
  Obtained from environmental sample
  misc_feature (1)..(306): Xaa is any amino acid
MTDSAEVFSTLIAFPDLYEIGMGNQALKIIYNRMNSIRGISCDRAFAPAPDFEKLLREINIPLYGLDTGIALSCLDLLMFTIGYELGLGGLLLMLSSSFIPLRCEERTEDHPVVIAGGPAVSNPSAFSPFIDAFWIGEAEAGFFDLVLELAVMKENGKGRGALLEKISAHPNIYVKGKKKTLRAIYSGFSDSEETEAAVFPVPSMKIIQHHGSVEIMRGCPNGCRFCHAGFWYRPMRQKSMAFVETQVREMVTKGGWHEISLSSLSSGDYKGIDCLVENLNGKFASLHVSFQLPSLKVSGFFTFAP

SEQ ID NO: 37321 - DNA, 795 bp, Unknown
  Obtained from environmental sample
  misc_feature (1)..(795): n is a, c, g, or t
ttgaagtggggcgacggcgttgaggttgaacatgaacgcgccgtgaagaataactggccctttattacgcatctcagcgaaggttttgacgaagaatccatgcgcagtgtggaaacgcttaaaaagatgaatatccttgacagccattgtttgcttattcattgtgtcgctttcagcgacgaagacatcgagagcgccgccaaagccggcgcgagtgtttcgtggtgcggcttttccaatatgtttatgtttaacgtaaccgcaaaaatccgcaagatgctcaaggcgggagtgaacgttacaatcggcacggattcttccgctacaggctccgccaatcttctcgcggagattaagtttgacagagaattgtaccgcaggctttacggcgaggatttgccggcggaaaaattattcgaaatgacaactataaacgccgccaaagcgttcaggatgcaggagcagaccggctcccttgacgaggggaagttaggcgacattctggtattgaaagcaaaagacagcgacccctacgaaaactttgtaaacgcaaacatggaagacattgagttgcttgttctggcagggacgcctttatacggggaactgcgtttcctcgatatttttaacgggaaactgcccagcggttacacgcaaataaaagtcggaaacagagcgatgtttgtaaagggcgatccgtcagggctttacagcgaggtaagagaaaagatcggtttcaaaaaagctcttgattacttgccgttcgagccggaacaggaagggaataatgcctaa

SEQ ID NO: 37322 - protein, 264 aa, Unknown
  Obtained from environmental sample
  misc_feature (1)..(264): Xaa is any amino acid
MKWGDGVEVEHERAVKNNWPFITHLSEGFDEESMRSVETLKKMNILDSHCLLIHCVAFSDEDIESAAKAGASVSWCGFSNMFMFNVTAKIRKMLKAGVNVTIGTDSSATGSANLLAEIKFDRELYRRLYGEDLPAEKLFEMTTINAAKAFRMQEQTGSLDEGKLGDILVLKAKDSDPYENFVNANMEDIELLVLAGTPLYGELRFLDIFNGKLPSGYTQIKVGNRAMFVKGDPSGLYSEVREKIGFKKALDYLPFEPEQEGNNA

SEQ ID NO: 37323 - DNA, 441 bp, Unknown
  Obtained from environmental sample
  misc_feature (1)..(441): n is a, c, g, or t
atgatgtctgatacttacaacccttatcaaagtccggaaagtccgattgttcctgagacaccgcagaataccggcgttatgttaaccgaaaaaatgctccgctacctttccgatgcgtcgccttggctgcaatttattggtattcttggttatatcgggagcggtttgttgttagtcggaggaatattcggcacaataggtttatccgtagcgtcgccatttcttgaattgggagagtttccgttttggataataacggttatttatatacctatgggtgtgctgttctttttcccggcgcattttgcatttaactttgggagaagaatccgcaattaccgtttcagtaattcaaccgacgacattgaactggcttttaaaaacaacaaatccctgtggaaattctacggcattattgtctctgccgctcggccgatctga

SEQ ID NO: 37324 - protein, 146 aa, Unknown
  Obtained from environmental sample
  misc_feature (1)..(146): Xaa is any amino acid
MMSDTYNPYQSPESPIVPETPQNTGVMLTEKMLRYLSDASPWLQFIGILGYIGSGLLLVGGIFGTIGLSVASPFLELGEFPFWIITVIYIPMGVLFFFPAHFAFNFGRRIRNYRFSNSTDDIELAFKNNKSLWKFYGIIVSAARPI

SEQ ID NO: 37325 - DNA, 465 bp, Unknown
  Obtained from environmental sample
  misc_feature (1)..(465): n is a, c, g, or t
ttgttgaaatggctattttggaaaactctcccccgctccgctaccgttattgcgcttgatgaagtgaaagttctggaatttaattcccagaactttgaaatactgcttcttggcaatccgcagattgcccttaaactgctgaaaatgttctgcaaacgcatatacgattcaaaaagacgctttatgattcttaccctgcctgatcctcagtcaaaaatcgccgacgtattccttatgcttgatgaaacccaacctgatattgacaaaagcacggaaaagcgggagtttaaaactacagttgagggcgtggctcactgggcaggaatgagcgtcaatgcggtcaaggatgtactggggcatttttcaaaccagcatcgcgtagaaatatttcctgatcgcataacagtaaaaaacatcaatgactttgtacgttttgtcggttccaaacgaaataaaagtatataa

SEQ ID NO: 37326 - protein, 154 aa, Unknown
  Obtained from environmental sample
  misc_feature (1)..(154): Xaa is any amino acid
MLKWLFWKTLPRSATVIALDEVKVLEFNSQNFEILLLGNPQIALKLLKMFCKRIYDSKRRFMILTLPDPQSKIADVFLMLDETQPDIDKSTEKREFKTTVEGVAHWAGMSVNAVKDVLGHFSNQHRVEIFPDRITVKNINDFVRFVGSKRNKSI

SEQ ID NO: 37327 - DNA, 675 bp, Unknown
  Obtained from environmental sample
  misc_feature (1)..(675): n is a, c, g, or t
ttgcgctcgcctccttcttttataaccgcgaaggcaaaaacaggagaaatccaatacgccgcggtttatccaaagagctttttcggcgagctttggcttcttgacgctgacggaaaactttttcccgagtggccagcgcagttgatgagagtggacgaagacggctttaccgcaaacgcgggcattagttttggatcgccgattttagtttcgcttaacaaccaggtgcataccgcgtttgtaagccagtccggcgactttttcatttttgacgaaaccgcaaaagcgctttctccgtttccggttatacttgaaggcgtgttctatgttcagcctgtttttgacggtaagtttttctggcttgtttccgcggaaggaaatttattcaggataagcccggaaggggaagttttgtatcagagtatcccgggtttttccgcaaaggaagaagggtacataacggtatttgactgcgacggagacaaaacccccgaagtctttttcaccggtgagggcaacgccctttacgcgtacacgcagaatttccgttcgctggaaggcttcccgcttcccgcgtggggcaagccgcactttgtccctgcgcagggaagcaaaaaagcggaaatttacggcattggaatggatcggcgcttgtaccgctggcagtttagataa

SEQ ID NO: 37328 - protein, 224 aa, Unknown
  Obtained from environmental sample
  misc_feature (1)..(224): Xaa is any amino acid
MRSPPSFITAKAKTGEIQYAAVYPKSFFGELWLLDADGKLFPEWPAQLMRVDEDGFTANAGISFGSPILVSLNNQVHTAFVSQSGDFFIFDETAKALSPFPVILEGVFYVQPVFDGKFFWLVSAEGNLFRISPEGEVLYQSIPGFSAKEEGYITVFDCDGDKTPEVFFTGEGNALYAYTQNFRSLEGFPLPAWGKPHFVPAQGSKKAEIYGIGMDRRLYRWQFR

SEQ ID NO: 37329 - DNA, 1128 bp, Unknown
  Obtained from environmental sample
  misc_feature (1)..(1128): n is a, c, g, or t
atgaaaaaaataatatttttcctgtttttaacagcggcgtttttttcttcctgcgtctcgatgaaaaaagatatttttcttaacagtcaggtttctcaatcggataaaaatatagaagctattgaagaagcggttgtcccgcttgaggccataggcggcgctcaggcgcgaagccgtcaaagcgagattaccgcggtgcggcaattaattacaagcaaggaaaaagaagcgtcaaccgacaccgactataccggtaaacttatggcgtggtcaggcaggcttgcgattcttgagggcaagtacagcgacgcccaacgtttatacaagcagtcaacggcgacatcagccgggaatgtccccgcgattattcttggcatccgtcttgagggagaccccgcaaagcggcttgagttaatagagaaagaactggcaatatcgggccggcagtcttccgccgtcggtttcggcgaattacagatagaaagaggcgtatcgcttacggaaacaagccgttttgccgaagccgcgggcgcgttcgacgcagcttttgcttcgggcattaacaaggtctataaagacaattacgtaaatatacgtaatcgtgcgtgggaattacgcaacacaagcggagtggccgccggaaaacatgacatgatgcaggatcgcattacatggagtgactgcatcaacattgcgcgtaacgaaacccagcttttcaggtttatcagcggcggcagaacnctaagcgaagccgatttatttacccgtcttcttgaccgcgcctttattccgtacacgcaggacatcgcgataaacgagtggcccaaaacgaggccggacagaagcgaatttgtaacgcgcgccggcgccgcatggtttatctggcacttgtacgccgaaatgagggcggacagaacccttctttcccgctattcatcgcgttacgcgacaggcgcgaatccccgcagtccgatagcggacattccccctctctcgccgttctttgactcaatactcggcagcgtggagacggagcttttgtccctccccgacggaaagaacttcaggccggcccagcccatccgcggttcggagatgctttcggttttgaagaagattgacaattag

SEQ ID NO: 37330 - protein, 375 aa, Unknown
  Obtained from environmental sample
  SIGNAL (1)...(22)
  misc_feature (1)..(375): Xaa is any amino acid
MKKIIFFLFLTAAFFSSCVSMKKDIFLNSQVSQSDKNIEAIEEAVVPLEAIGGAQARSRQSEITAVRQLITSKEKEASTDTDYTGKLMAWSGRLAILEGKYSDAQRLYKQSTATSAGNVPAIILGIRLEGDPAKRLELIEKELAISGRQSSAVGFGELQIERGVSLTETSRFAEAAGAFDAAFASGINKVYKDNYVNIRNRAWELRNTSGVAAGKHDMMQDRITWSDCINIARNETQLFRFISGGRTLSEADLFTRLLDRAFIPYTQDIAINEWPKTRPDRSEFVTRAGAAWFIWHLYAEMRADRTLLSRYSSRYATGANPRSPIADIPPLSPFFDSILGSVETELLSLPDGKNFRPAQPIRGSEMLSVLKKIDN

SEQ ID NO: 37331 - DNA, 519 bp, Unknown
  Obtained from environmental sample
  misc_feature (1)..(519): n is a, c, g, or t
ttgaccgtggaaggggttatgaagtggtacgccaaagaattgggctttggcgacgaggcggatttttgggcaattgtgggtatgcttcacgacatcgacttcggcgaatacccggaagaacactgcgtaaaggcccgccaattgctagcggacgccggcgcaaacgaggagctcattcacgcggtttgcagtcacggctggggcatgacaggcgcgaaagaaaagccggaacaccttatggaaaagctgctttacgccgcggatgaactcaccggccttatttgggcggtagcgataatcaggccttccaaaagcgtgatggacatggaattaaaatccgtcaagaaaaaatacaaaacattgaatttcgccgctggctgtaacagggaaacgatagaaagaggcgccgcggatctgggctgggatttggacaagctcattgagcaaacaatactcgcgatgagaagccgcgaagcggaaattaactcgtttatggcttcctacagctcccatgcttaa

SEQ ID NO: 37332 - protein, 172 aa, Unknown
  Obtained from environmental sample
  misc_feature (1)..(172): Xaa is any amino acid
MTVEGVMKWYAKELGFGDEADFWAIVGMLHDIDFGEYPEEHCVKARQLLADAGANEELIHAVCSHGWGMTGAKEKPEHLMEKLLYAADELTGLIWAVAIIRPSKSVMDMELKSVKKKYKTLNFAAGCNRETIERGAADLGWDLDKLIEQTILAMRSREAEINSFMASYSSHA

SEQ ID NO: 37333 - DNA, 330 bp, Unknown
  Obtained from environmental sample
  misc_feature (1)..(330): n is a, c, g, or t
atggaaacgctttcaacatctgacacggatcttgaaaaagcggcggctgccctcgcggcgggccgacttgttgcttttcccaccgagactgtctatggtttgggagcggacgctttcaatcaatccgcgctcgctagagtatttgaggcgaaaggcaggccacgctttgatcctctgattatccacattgccgagctgaaaactctttggagaatcgcggataaagcttccctaaataaaattgcgcttgaaaggctttccattctttccgaacggctctggccgggcccgcttacgctggttctgccaaaacgcggggaagttccctga

SEQ ID NO: 37334 - protein, 109 aa, Unknown
  Obtained from environmental sample
  misc_feature (1)..(109): Xaa is any amino acid
METLSTSDTDLEKAAAALAAGRLVAFPTETVYGLGADAFNQSALARVFEAKGRPRFDPLIIHIAELKTLWRIADKASLNKIALERLSILSERLWPGPLTLVLPKRGEVP

SEQ ID NO: 37335 - DNA, 456 bp, Unknown
  Obtained from environmental sample
  misc_feature (1)..(456): n is a, c, g, or t
ttgttttggtacaatccaaacatccacccttttaccgaataccgctcaaggcgggatacgctctgtttcttcgcccttgaaaagatgcttcagctgtttaccgacgacgaatacggtcttcgctccttcgttaagaatgtctctcaaatggagtctgaatcaagcgatgaccgctgccttttttgttaccgcttaaggcttgaaaaaaccgcgcgattggccgcggaaagatcatttgacgctttttctactaccctcctaataagcccatatcaaattcatgacgccataaaagaaatcggagagcgggtggcaaatgatttttcggttgaatttttatatcgcgattttcgcccacgttttcatgagggacaaaaacaggccagaaactcaggttactatatgcaaaaatactgcggttgtatttacagcgaagaagaaaggtatatgaaatga

SEQ ID NO: 37336 - protein, 151 aa, Unknown
  Obtained from environmental sample
  DOMAIN (1)...(148): Uncharacterized BCR, COG1636
  misc_feature (1)..(151): Xaa is any amino acid
MFWYNPNIHPFTEYRSRRDTLCFFALEKMLQLFTDDEYGLRSFVKNVSQMESESSDDRCLFCYRLRLEKTARLAAERSFDAFSTTLLISPYQIHDAIKEIGERVANDFSVEFLYRDFRPRFHEGQKQARNSGYYMQKYCGCIYSEEERYMK

SEQ ID NO: 37337 - DNA, 1074 bp, Unknown
  Obtained from environmental sample
  misc_feature (1)..(1074): n is a, c, g, or t
atgacggttaacatgagaacaactaaaaatgaaatgccggtacaagaccctgctgtccgcagcggtaacttttcggaagtcgctctcggttacagcgaagagcaagccgttgatgaggcgaaacgctgtcttggctgcaaaaataaaccttgcgtagatcattgccctgtcaacatcgatattccggctttcatcaatcttatagccgaaggcgaacatgaaaaagcctaccaaactatcactgagcacaattcgcttccggcaatctgcggcagggtttgccctcaggaaagccagtgcgagggaaagtgtacgcggggcatcaagggcgaaccggtcgctatcggcaggctggaacgctttgttgcggatcaccacaaagcgaattccgcttccgcaggaactgcgaaatccgctccggcaaaaatcgaaccagaggttcgtaagaaagtagcggttataggttccggaccttcgggcctttcctgtgcggggaatctggcgcggaagggttataatgttacgattttcgaggcgcttcatcgtgaaggcggcgtactgatttacggcatccccgaattccgtctgcccaagcaaattgttcagcatgaaattcagggactcaaagacatgggtgttgaaatcgtctgcaatacggtaatcggaaaaacgcttaccgtggatgaacttatgcatgaacagggttatgcggcgatattcatcggttccggcgcggggttgcccacctttatgaacattcccggcgaagatatgaacggcgtgtattcggcaaacgaattcttaacccgtatcaatttaatgaaagcctatattgatggaagcgccacgcctattcaagcggcaaaaaaagttgctgttatcggcggaggaaatgtggcgatggattctgcccgctgtgcgaaacggcttggggcagatgtgactattatctatcgccgtacagaaaaagagcttcccgcccggcatgaggaagtggagcacgcgaaggaagaaggcatccattttatgctcctcacaaatccggttaaaatctcaggtgatgaaaaaggctga

SEQ ID NO: 37338 - protein, 357 aa, Unknown
  Obtained from environmental sample
  DOMAIN (150)...(318): Pyridine nucleotide-disulphide oxidoreductase
  misc_feature (1)..(357): Xaa is any amino acid
MTVNMRTTKNEMPVQDPAVRSGNFSEVALGYSEEQAVDEAKRCLGCKNKPCVDHCPVNIDIPAFINLIAEGEHEKAYQTITEHNSLPAICGRVCPQESQCEGKCTRGIKGEPVAIGRLERFVADHHKANSASAGTAKSAPAKIEPEVRKKVAVIGSGPSGLSCAGNLARKGYNVTIFEALHREGGVLIYGIPEFRLPKQIVQHEIQGLKDMGVEIVCNTVIGKTLTVDELMHEQGYAAIFIGSGAGLPTFMNIPGEDMNGVYSANEFLTRINLMKAYIDGSATPIQAAKKVAVIGGGNVAMDSARCAKRLGADVTIIYRRTEKELPARHEEVEHAKEEGIHFMLLTNPVKISGDEKG

SEQ ID NO: 37339 - DNA, 762 bp, Unknown
  Obtained from environmental sample
  misc_feature (1)..(762): n is a, c, g, or t
atggaaaagataactcgccttttgcaggcaaaaatcgaggccaaactgggcaaaggcaaagcccttgtgctctacggaccgaggcagaccggcaagaccacactcattaaggaaatcttacggaaacgctgcgccggccggggatactttaactgcgaggaagcgaccgtccgcgacgcgctcctcagcatggactccgcacggatgttcggctacttctcaggaggcgagatcatcgcactcgacgaggcgcaatcgatccccgacatcggcagaatcataaagattctggtagactcgcacccggaactcaatatcatagcaaccggctcctcctccttcgagctcgccaacgctgtcagcgagccactcaccggcagaaaattcgtgttcttcctgccgcctatctccctagaggagatgaagagcaacttcggaaacgccgccgccgtcaacagcgtgcgcgacaccctgatctacggttcttacccggagatagcgaccgccgccgccgacgaagataaaattgagaacctgcgcctgctcgccacgagctacctatatagagacgtgctcaactacaacggaataaaaaaacacgacctgctggtgaaaatcctgaaggctttagcactccaagtcggcggcgaggtctcgcccaacgagattgccacctcccttcaaatagaccggaaaaccgtcctaagatacctttccctgcttgaacaatctttcatagtcttcaagctgccgccctcgtaa

SEQ ID NO: 37340 - protein, 253 aa, Unknown
  Obtained from environmental sample
  DOMAIN (10)...(160): Archaeal ATPase
  misc_feature (1)..(253): Xaa is any amino acid
MEKITRLLQAKIEAKLGKGKALVLYGPRQTGKTTLIKEILRKRCAGRGYFNCEEATVRDALLSMDSARMFGYFSGGEIIALDEAQSIPDIGRIIKILVDSHPELNIIATGSSSFELANAVSEPLTGRKFVFFLPPISLEEMKSNFGNAAAVNSVRDTLIYGSYPEIATAAADEDKIENLRLLATSYLYRDVLNYNGIKKHDLLVKILKALALQVGGEVSPNEIATSLQIDRKTVLRYLSLLEQSFIVFKLPPS

SEQ ID NO: 37341 - DNA, 612 bp, Unknown
  Obtained from environmental sample
  misc_feature (1)..(612): n is a, c, g, or t
gtggaaggtcattggtatgaagcggtggaattctgcaacaaactgagcgagcaggaagtagggcgtacttcgttttacaagatagacaatagatcgccgctcgatggtagttacccaataaccagcatgacggtaactgtggaggattggaatggaaacggttaccgcctgcctaccgaggctgagtgggagtacgcggccaagggaaaaggagaaataaacgaatctacgggaaattattttgtgtattctggtagtgatgatcctggtttagtggcttggtactctgtaaacagcaggcgtaccactcacgaggtaggaacaaaaaagccaaacggactgggtatttatgacatgagcgggaatgtgtgggaatggtgttgggatcagtatgatataaattattacaatggcagtccaccgttaaatcctactggacctggcagcaatatagtagatagtaccagtcatacccgtgtgctacgtggaggttgctacagttcaaccgatactaagccaatccgttcagtaaaccgccaaaaccacagaccgaatttggccaacaccgaaggccagtttacgggtttccgtattgtttgcaacggcccttaa

SEQ ID NO: 37342 - protein, 203 aa, Unknown
  Obtained from environmental sample
  DOMAIN (16)...(200): Domain of unknown function (DUF323)
  misc_feature (1)..(203): Xaa is any amino acid
MEGHWYEAVEFCNKLSEQEVGRTSFYKIDNRSPLDGSYPITSMTVTVEDWNGNGYRLPTEAEWEYAAKGKGEINESTGNYFVYSGSDDPGLVAWYSVNSRRTTHEVGTKKPNGLGIYDMSGNVWEWCWDQYDINYYNGSPPLNPTGPGSNIVDSTSHTRVLRGGCYSSTDTKPIRSVNRQNHRPNLANTEGQFTGFRIVCNGP

SEQ ID NO: 37343 - DNA, 384 bp, Unknown
  Obtained from environmental sample
  misc_feature (1)..(384): n is a, c, g, or t
atgttcctaaatggcatagacaatatcttcgacctcacctggggcgacatagtgaccgatcaaggcacgttcccggtggactatggcagcgtgcgccgcagggaagaatatgaactgagcgcatacagttttgaacacgccaacttggagttgcacaaatacctattcaatgcttttgaaaaggaaggctggcggctggtgaaagaactggggcattactcttctggctacgaacaggtgctcaagatgagccacacattcaacgtccttgacgcaaggggggccatcagcaccactgagaggccgggcgtgataaaacgggtgcgcgacttggcttgcgcctgcgccaaggtctatttagagctagaggcttcacatgactga

SEQ ID NO: 37344 - protein, 127 aa, Unknown
  Obtained from environmental sample
  DOMAIN (1)...(127): Glycyl-tRNA synthetase alpha subunit
  misc_feature (1)..(127): Xaa is any amino acid
MFLNGIDNIFDLTWGDIVTDQGTFPVDYGSVRRREEYELSAYSFEHANLELHKYLFNAFEKEGWRLVKELGHYSSGYEQVLKMSHTFNVLDARGAISTTERPGVIKRVRDLACACAKVYLELEASHD

SEQ ID NO: 37345 - DNA, 525 bp, Unknown
  Obtained from environmental sample
  misc_feature (1)..(525): n is a, c, g, or t
atgactgacacgcaaacactgttgctggaaatccactgcgaagagatacccgctaggttcctaaagccgttgagtacggaatttgaagcctcgtttttgaactttgccaaagaacagaaacttggagagccaaccgtgcaagccattttcagcccaagaaaattggcgtggcgcatcggcgggctttttgtcgcgcagtcggatcaactcgaacagctcattgggccgcccaaaaggatgtgcgtggatgagatgggcaagcccacagtgcagggccaaaaattcgccgaaaagtgcggcgttgatttttctgccctgcgcttcgagcagccagctggcaaaaaagaaccctgcgccgttgccgaaatattgaaaaagggccgcagctccgattcaattctttcagaggcgctgccaaggttggtttctgcgctgcacgtccccaaggccatgcgttggggttcatcaagctatgaatttgtgcgcccgatacgatccttactgtgcatttttggcaaaaaatag

SEQ ID NO: 37346 - protein, 174 aa, Unknown
  Obtained from environmental sample
  misc_feature (1)..(174): Xaa is any amino acid
MTDTQTLLLEIHCEEIPARFLKPLSTEFEASFLNFAKEQKLGEPTVQAIFSPRKLAWRIGGLFVAQSDQLEQLIGPPKRMCVDEMGKPTVQGQKFAEKCGVDFSALRFEQPAGKKEPCAVAEILKKGRSSDSILSEALPRLVSALHVPKAMRWGSSSYEFVRPIRSLLCIFGKK

SEQ ID NO: 37347 - DNA, 384 bp, Unknown
  Obtained from environmental sample
  misc_feature (1)..(384): n is a, c, g, or t
ttgaacgaccttaaagccagatgcgcggccctgtccaaattcgcaaaagaccagcggttcgagagccttggcagcagcgcaaagcgcatagcgaatatcctgaaagatgaaaacatcgaaaacttggatggcggtttcaagcccgacttgctggaacaggccgaagaaaaaacgctggcctcgcgcttggcagccattgaaggagtcaaggactatggcgcactgctggtgctgctggccgacctagcccagcccttggaagattttttcaacaaggtgatggtcaagtgcgaagacaaagccctgcgaaatgctaggctgttcctgctgcataggctaagaaaggcgtttatgaaaattgcggattttgggttgtggcattga

SEQ ID NO: 37348 - protein, 127 aa, Unknown
  Obtained from environmental sample
  DOMAIN (26)...(113): DALR anticodon binding domain
  misc_feature (1)..(127): Xaa is any amino acid
MNDLKARCAALSKFAKDQRFESLGSSAKRIANILKDENIENLDGGFKPDLLEQAEEKTLASRLAAIEGVKDYGALLVLLADLAQPLEDFFNKVMVKCEDKALRNARLFLLHRLRKAFMKIADFGLWH

SEQ ID NO: 37349 - DNA, 1032 bp, Unknown
  Obtained from environmental sample
  misc_feature (1)..(1032): n is a, c, g, or t
atgtacggcggatttgcaggtttggaaacaagcctgtcgcaacgcgatgttgccaacaaccccaccatccttgacggacagcaaacccattgccccgttgtccaactcaacaaactctgcgtgcttgacggctttaccgttcaaaacggtaaatgcaccggtcaagcccaaaacggcggcggtatttgggcaggcgacagcgttgtggttgaaaactgcaaaattctgaacaattcggcctacaacggtggcggtgttttcggcaaggggcgtgtcagaataattaactgcgtggtttatgacaacaaggccaagggctatggcgctgatatgtacggccactgcttgagcctcgctgcggagccgtttgcaacacctgtgcctcctgcgccgcctgtacctcccggagcgattttaccggcagtaagtgttgctacttgcaatgatacgtcgtctatttcgggaactgtaacgtatggcgatgagtcgaataccgatatcaataccagcacaactactgttggcagtcaaacttggtctgcccctgtgtttgtttccggttgcaacaaaaccactttcgttggtggtagttatctcagtcctcaaaattcagactgtcgtaagagcaccgatggttccggtcgtaattatagttccggttacggcgatttgttttcgtggtgtgctgttgtgcggtatgcgtcatcgctttgtccttcgccttggcgcgtgcctactaaaacggattcttataatttggatatagcgttaggtggaacaggccaatacagtcaaaataattcaactcttcgtaataaatatcttaacgattggggtggcgcctacggcggctactgcctttcgggcggctcgctgcgcaaatcagggtcggacgcgtactactggtcgcagtcggagcgcagttcaggcagcgcttacgacctgtacttcggcacggatggcacgtcgaccctcagncggcagctacaagtacgacgggtctacgctccctgcgtcgggagttcgttttga

SEQ ID NO: 37350 - protein, 343 aa, Unknown
  Obtained from environmental sample
  misc_feature (1)..(343): Xaa is any amino acid
MYGGFAGLETSLSQRDVANNPTILDGQQTHCPVVQLNKLCVLDGFTVQNGKCTGQAQNGGGIWAGDSVVVENCKILNNSAYNGGGVFGKGRVRIINCVVYDNKAKGYGADMYGHCLSLAAEPFATPVPPAPPVPPGAILPAVSVATCNDTSSISGTVTYGDESNTDINTSTTTVGSQTWSAPVFVSGCNKTTFVGGSYLSPQNSDCRKSTDGSGRNYSSGYGDLFSWCAVVRYASSLCPSPWRVPTKTDSYNLDIALGGTGQYSQNNSTLRNKYLNDWGGAYGGYCLSGGSLRKSGSDAYYWSQSERSSGSAYDLYFGTDGTSTLXRQLQVRRVYAPCVGSSF

SEQ ID NO: 37351 - DNA, 1080 bp, Unknown
  Obtained from environmental sample
  misc_feature (1)..(1080): n is a, c, g, or t
atgagagagcgtgcggagagtcgtctacatctccagggctatatgccggagtgcgccaacatagtcccgacggcgggcgtgtacagccacatttcggggatagacctagttcaggcgaaggacggctcgtggtacatactggaggacaacctgcggataccgtcgggcgcgtcttatccgcttatcgcccgcgagttgagccgcatcgccgcgccggaggctttttcgagcaacgacgttacggacaaccgcaattactcggagatgctgcgcgagacgatggacttcgtgaaccgcggggggctgaacgtcatcctcacgcccggcaggtacaacgccgcctacttcgagcactcgtatctcgccgagcgcacaggggcgctgcttgtaaaggcgtcggaactggccgtagaggacgcggtgctgtatatgaaggattatctcggagtaaaggcaagggttggcgcggtgtaccggcgcatctccgacgagtatctcgaccccatgacctttcgggcggactcgctgataggcgtgccgcacatcatggacgcctaccgcgccggaaacgtcgcgataatcaacgcgccgggcaacggtgtcgcggacgacaaggggatttattacttcgtgcccaagatggtgaaatactatcttgacgaagagcctattctgcaaaacgcgccgacgtacctgccttattacgaggacgacatgaagttcacgcttgagaacatcgagcgccttgtcataaaggacgtgtcggaggcgggcggctacggcgttgtgttcggcagcgggctgtcggaggagaaattggccgagctgaangccaccatcataaaagaaccgagggcggtcatatcgcangaggtcattgattttattgatcttgatataatggatgaaaacggcggcgccatccctcgaaaggccgatttgagggcctacgtgctgaccggtaaggccacacgcgtttgggcaagcggactgacgcgtttctcgcgtgtggaggggtctttcattgtaaattcttcgcaaggaggagggtttaaagacacatgggtactatcacggtag

SEQ ID NO: 37352 - protein, 359 aa, Unknown
  Obtained from environmental sample
  DOMAIN (1)...(189): Domain of unknown function (DUF404)
  misc_feature (1)..(359): Xaa is any amino acid
MRERAESRLHLQGYMPECANIVPTAGVYSHISGIDLVQAKDGSWYILEDNLRIPSGASYPLIARELSRIAAPEAFSSNDVTDNRNYSEMLRETMDFVNRGGLNVILTPGRYNAAYFEHSYLAERTGALLVKASELAVEDAVLYMKDYLGVKARVGAVYRRISDEYLDPMTFRADSLIGVPHIMDAYRAGNVAIINAPGNGVADDKGIYYFVPKMVKYYLDEEPILQNAPTYLPYYEDDMKFTLENIERLVIKDVSEAGGYGVVFGSGLSEEKLAELXATIIKEPRAVISXEVIDFIDLDIMDENGGAIPRKADLRAYVLTGKATRVWASGLTRFSRVEGSFIVNSSQGGGFKDTWVLSR

SEQ ID NO: 37353 - DNA, 693 bp, Unknown
  Obtained from environmental sample
  misc_feature (1)..(693): n is a, c, g, or t
atgggtactatcacggtagagtacagttcaaatctttactggctaggaaggtacgtggagcgcgcctacaccacgctcaacacgttcttcaactattacgataagacgctggacaaggataagaactcctacaaggacttccttggcaaattggacattgaggacaagtacggcgactatcgcggtttcatacgcgggtatctgtacgacgacgccgactgcttcaccgtcagttcgtcgtttcgcttcgcgtacgacaacgcgattgtctgccgcaacgtaatcggcagcgaggcgctcgcgtacatccagcttgccgtagacgccttccacgcaagcagtaaagacaagaatccgcgattgtcgctaatgccggtcatagattaccttctcgcgttttggggaagcatagacgacaagctcgccagcggcgaggcgcgtacgattgttaagtgcggcaaactcgttgagcggcttgacttgtattttagattttcgtataatcacaatctcatcaacagcgagtacgaaaaactgtgttacctgctttcgcgtgtacgcaagggtttctgcaacgcgaggcatttggcggtgctggttgaggttctcgctatagaggagagctacaaggcgcgtttggatgaagtgcttaacagtttaagcagattgtttgaggaggagcaggccgcttga

SEQ ID NO: 37354 - protein, 230 aa, Unknown
  Obtained from environmental sample
  misc_feature (1)..(230): Xaa is any amino acid
MGTITVEYSSNLYWLGRYVERAYTTLNTFFNYYDKTLDKDKNSYKDFLGKLDIEDKYGDYRGFIRGYLYDDADCFTVSSSFRFAYDNAIVCRNVIGSEALAYIQLAVDAFHASSKDKNPRLSLMPVIDYLLAFWGSIDDKLASGEARTIVKCGKLVERLDLYFRFSYNHNLINSEYEKLCYLLSRVRKGFCNARHLAVLVEVLAIEESYKARLDEVLNSLSRLFEEEQAA

SEQ ID NO: 37355 - DNA, 795 bp, Unknown
  Obtained from environmental sample
  misc_feature (1)..(795): n is a, c, g, or t
ttggacggtgacgcgcccatcagcttcaataaggcactggcggccaactcggacgcaaagcagaatggccatgcacaagccacgcacgcccccaaaaaagaccaccacctcaagaaagactaccaacatgaatctgccgcaaaagtggaggcgcatgatacaaagagagtccatgaaaaacatgtccaagcggcccccgccccagagcggccgcataaaccagcgccagatgagcgaaacaagttgttgaacatttttggagactctggcgccaatgccaaaccaagagccaaaaccgcgtccgtagccgggcctagtaaaacgcataagaagagagacgctgttccggctcccgccatcgaaccgccaaagctgtcagccgatgtcattgcttcgcttgccgttccggcaaacctgccgcgaaaactgatgcagccaggcaccgcagaacccagcttggcacagcgcaagggcgatgggccgacaattgggaagtcagccaaaaaaacaagctcaaagccaacccccaaagccaaaaaccaaggcaggcaggccgatccgaaaaaacaagccaaggcagaaaaacccgctgtgggaaagcccaagaccgcagcaaaaaaggacggaaatgcgaccccaaaaagtgtcgcgcagcccaaggcgacacctgcggccacaaaatccaaagcaactgcccaaacaaacaaagcgacaaaaaaacctaacgaaaagcccacaagctcttctggctcaaaaaaatcggcaccggccaaaaaagggcccccaaaaaaatga

SEQ ID NO: 37356 - protein, 264 aa, Unknown
  Obtained from environmental sample
  misc_feature (1)..(264): Xaa is any amino acid
MDGDAPISFNKALAANSDAKQNGHAQATHAPKKDHHLKKDYQHESAAKVEAHDTKRVHEKHVQAAPAPERPHKPAPDERNKLLNIFGDSGANAKPRAKTASVAGPSKTHKKRDAVPAPAIEPPKLSADVIASLAVPANLPRKLMQPGTAEPSLAQRKGDGPTIGKSAKKTSSKPTPKAKNQGRQADPKKQAKAEKPAVGKPKTAAKKDGNATPKSVAQPKATPAATKSKATAQTNKATKKPNEKPTSSSGSKKSAPAKKGPPKK

SEQ ID NO: 37357 - DNA, 1161 bp, Unknown
  Obtained from environmental sample
  misc_feature (1)..(1161): n is a, c, g, or t
gtgcgctctcttctcactatgctcggtattatcatcggcgtggcctccgtcgtcgtcatggtctctatcggcgagggggcgcagcttgacattcgccaacagattgaatcgatggggactaacgtgttaaccatccgaccgggcaacatgagccgcggcggggttcgcattgctcaaggtatgcgtacgttaaccattcaggacgtcgaccgcctccgcagtctgccgggggtcgcggccatctcgccgatctcgcgcgccacggggcagatcgtgggcggcgcgggcaattggcgcactcaggcgctcggcgttaccgccgactatctatcaatacgcagttgggaactgcaagacggtacgatgttcaccgagcaggacatcaaaagttcggcgaagatcgccgtcataggcaagaccgtcgtgaacgaactctttccgaacatcgacccgatcgggcaatccatccgcgtaggcgcgatcccagtcaaggtggtcggtgtactgcgggcgcgcggtcagggcgcgatgggcgacgaccaagacgacatcctgctcatgcccgtcacgacggtcatgcagcggatgaacggcacgacgcgcttcatcgaccaaataatgatcagcaccgcgtcgatggatgtcataaacgaggtgcaggcgcaagccgaggacgctctgcgggcggcgcaccgcctctctccgtcggaagataacgacttcaacatccgcaaccagtcggagatgatggaacgcgcgaccgagaccgcccgcgttatgaccatgctcctcggcgcgatagccggcatatcgctcgtggtcggcggtatcggcatcatgaacatcatgctcgtatcggttacggaacgcacgcgcgaaatcggaatcagaatggccgtgggggcgcgcgagggggatatcttaatgcagttccttatagaggcgatagtcctgagcgtgacgggcgggctaataggcgtggcgttgtcgatcgctcttatttgggtgatgaacaatttcgtcggtgtgacgacggtattcgcgccgcagactatactgatgtctatggggttctccgggttcgtgggcgtgttcttcggattctatccggcccgaaaggcggcgaggctcaatccgattcaggcgcttaggtttgagtag

SEQ ID NO: 37358 - protein, 386 aa, Unknown
  Obtained from environmental sample
  SIGNAL (1)...(21)
  DOMAIN (203)...(379): Predicted permease
  misc_feature (1)..(386): Xaa is any amino acid
MRSLLTMLGIIIGVASVVVMVSIGEGAQLDIRQQIESMGTNVLTIRPGNMSRGGVRIAQGMRTLTIQDVDRLRSLPGVAAISPISRATGQIVGGAGNWRTQALGVTADYLSIRSWELQDGTMFTEQDIKSSAKIAVIGKTVVNELFPNIDPIGQSIRVGAIPVKVVGVLRARGQGAMGDDQDDILLMPVTTVMQRMNGTTRFIDQIMISTASMDVINEVQAQAEDALRAAHRLSPSEDNDFNIRNQSEMMERATETARVMTMLLGAIAGISLVVGGIGIMNIMLVSVTERTREIGIRMAVGAREGDILMQFLIEAIVLSVTGGLIGVALSIALIWVMNNFVGVTTVFAPQTILMSMGFSGFVGVFFGFYPARKAARLNPIQALRFE

SEQ ID NO: 37359 - DNA, 666 bp, Unknown
  Obtained from environmental sample
  misc_feature (1)..(666): n is a, c, g, or t
gtggggcagaaggtgctggctatcgggaatccttttgcccttgagcggaccctcaccgtcggcattgtttccggtctgggcaggccgattcagattaaccgccagcacgttgtccgcgacatgattcagaccgacgcttcaattaaccccggcaattcaggcggccccctgctggatacccagggccggatgatagggatcaacacgatgatctattccccctccggcggctcggtgggcataggttttgccattccggtaaacaccgccaagcgggtggtcaacgaactgatccaatacggcaaagtccgccggggctggattgacgcgaccatggtgcagctttttcccgctctggttcgttacgcgaaatttccggttagctccggcctgctggtttcccgtacccgcaagggagggtttgccgacaaggcgggcctgcggcagggctctgatccggtgcaatacggacgcagtgttatctatctgggcggcgacattattaccgcggttgacggcgtaaatatcaataccttgtccgatctgtattcggcgcttgaacacagcaagcccggcgacatggcgaaacttgacgttatccggggcggcagcccgatgaaactggaactgacgctggccgaccgtgaagaggtattaaatcaataa

SEQ ID NO: 37360 - protein, 221 aa, Unknown
  Obtained from environmental sample
  misc_feature (1)..(221): Xaa is any amino acid
MGQKVLAIGNPFALERTLTVGIVSGLGRPIQINRQHVVRDMIQTDASINPGNSGGPLLDTQGRMIGINTMIYSPSGGSVGIGFAIPVNTAKRVVNELIQYGKVRRGWIDATMVQLFPALVRYAKFPVSSGLLVSRTRKGGFADKAGLRQGSDPVQYGRSVIYLGGDIITAVDGVNINTLSDLYSALEHSKPGDMAKLDVIRGGSPMKLELTLADREEVLNQ

SEQ ID NO: 37361 - DNA, 900 bp, Unknown
  Obtained from environmental sample
  misc_feature (1)..(900): n is a, c, g, or t
atgggactcaacgacacgccttccgccaaccgcgtccacatcggcttttttggccggcgtaacgcgggaaaatcaagtctggtaaacgccgtaaccggccaggatttagcgcttgtttccgaggtcaagggaaccaccaccgatccggtgtacaagacgatggaattgctgcccctcggcccggttatgatcatcgacacccccggcatcgacgacgagggcgctctgggggaactgcgggtgagccgcgcccggcgcgtcctcaacaaaaccgatgtcgccgtgctggtgcttgattcggataattcacctgacaacccgctgtatccttcagaagaagaacttatcgcgatttttaaggaaaaaaatattccctttattatcgtacacaacaaatgtgatttgtttatgaatgcagatgtgtcttccgctgctcctcttgcggcggccttgccggaagcatttcccgtcagcgcccaaaccggctacaacatcaatccgctcaaggaaaaaatcgccgcccttgcccttaccggggaacctgagaagcggctggacgccgatcttattcatccgttggattttgtagttctggtaatccccattgataaagccgctcccaaagggcggctgatccttccccagcaacaggtaatccgcgacatactggaaacgggcgctattgccgtttccgttcgggagattggactgaaagacacattggcgcgtttgggaaacaaacccgccctggtaataacccacagtcaggcttttgcgcatgttttcccccgtaacgccgctggatatcccccttacttcggttttcaatttatttccccagttacaaaagctggctgggaaaccgccttccccggaccttgccgcgctggatacacctga

SEQ ID NO: 37362 - protein, 299 aa, Unknown
  Obtained from environmental sample
  DOMAIN (12)...(134): Miro-like protein
  misc_feature (1)..(299): Xaa is any amino acid
MGLNDTPSANRVHIGFFGRRNAGKSSLVNAVTGQDLALVSEVKGTTTDPVYKTMELLPLGPVMIIDTPGIDDEGALGELRVSRARRVLNKTDVAVLVLDSDNSPDNPLYPSEEELIAIFKEKNIPFIIVHNKCDLFMNADVSSAAPLAAALPEAFPVSAQTGYNINPLKEKIAALALTGEPEKRLDADLIHPLDFVVLVIPIDKAAPKGRLILPQQQVIRDILETGAIAVSVREIGLKDTLARLGNKPALVITHSQAFAHVFPRNAAGYPPYFGFQFISPVTKAGWETAFPGPCRAGYT

SEQ ID NO: 37363 - DNA, 720 bp, Unknown
  Obtained from environmental sample
  misc_feature (1)..(720): n is a, c, g, or t
ttggacaaagaccaggattgcgtaatagacgtgcttgatgaccggaaggcggaaacgttggaaacatggcttaatacgcagaaaaacattgatttaagcgaattgaagagcatttccatggatatgtgggatccgtatataaaagcggtacgggcggcggttcccgaagctgactggaagatagcgtttgaccggtttcacgtgagtaagcatataaacgaggcgctggataaagtaaggcggagggaacaccgggcgttcatggaacaggcgggtgaaagcccgttaagcaaaagccggttccaatggctgattaattcaagccggattgataaccgaaacgggaagcggaaagcattcatgagtctgtcgcggctcaatctggagacagcgagggcatggaggataaaggaagccgccaacagcctatgggaatatgtgtacatgaatgtagcggaggcagcgtggaagaagctgctgtggtggataagccattgccggataccagaaatgatccaggccggcaagactatacaaaactatttctggggaattctaaacgcaatacgacttagggtaacaaacggaatgctcgaagccaaaaacaattgcatccagaaaattaaacgaatggcgtgtggatttagaaatccgcaaaggtttaagaacgctattctctttcatttgggtaaattagacctttttccttccactacatag

SEQ ID NO: 37364 - protein, 239 aa, Unknown
  Obtained from environmental sample
  DOMAIN (1)...(83): Transposase
  misc_feature (1)..(239): Xaa is any amino acid
MDKDQDCVIDVLDDRKAETLETWLNTQKNIDLSELKSISMDMWDPYIKAVRAAVPEADWKIAFDRFHVSKHINEALDKVRRREHRAFMEQAGESPLSKSRFQWLINSSRIDNRNGKRKAFMSLSRLNLETARAWRIKEAANSLWEYVYMNVAEAAWKKLLWWISHCRIPEMIQAGKTIQNYFWGILNAIRLRVTNGMLEAKNNCIQKIKRMACGFRNPQRFKNAILFHLGKLDLFPSTT

SEQ ID NO: 37365 - DNA, 858 bp, Unknown
  Obtained from environmental sample
  misc_feature (1)..(858): n is a, c, g, or t
atggacatacccctattcatccggcgcgctgccaatcaaaggcgctatcctcgcggcaatgggacgcgagccagaaggacttaccccacaaaaaaatggacgtgcgcggaaagagcgtttatatcaataccgggaaccgtcaaacaaatagcgggcatagaagaagccaaatccgcaaaccgcgttaatgacttttttctgcgaatcgcggaaggcagcaaagtctccttccctgaaaacaatgtaacaaaatgcggcaacatcatcgcctccgccgaaacaagagacatcgccatagaagccgcagaaaccgccgcccgctcaatccttatcaggctggatcccacagacacaaaaacaaaagaatttcttaccacggaggacacggagtttcacggagtttcaatccgaaaatcttctcttcctccgtgtaactctaagctgtccaacggacagcagtactccgcggttatttctaccttaaaagaagtatttccaccagacgcctttcaattaactgacgaattaaaggaagctctttcccaaatccccgacttccccactaccaactacccactatccactacccactatccactacccactatccaactctacccattcctcgctttcatttcctcaagtcttaaagactacatgggcagaaccgtggaagaagctcttaacgcagtccgattattaaccggttttccccttccggtaacctctgaaaatgccgaaaatatagtaagactcggcagggcattctggagcgcgtttattcgcggctcttatcagggcgcggcctattacattgataatttggagaaaaactcggccgatctgatacttgggtaa

SEQ ID NO: 37366 - protein, 285 aa, Unknown
  Obtained from environmental sample
  misc_feature (1)..(285): Xaa is any amino acid
MDIPLFIRRAANQRRYPRGNGTRARRTYPTKKWTCAERAFISIPGTVKQIAGIEEAKSANRVNDFFLRIAEGSKVSFPENNVTKCGNIIASAETRDIAIEAAETAARSILIRLDPTDTKTKEFLTTEDTEFHGVSIRKSSLPPCNSKLSNGQQYSAVISTLKEVFPPDAFQLTDELKEALSQIPDFPTTNYPLSTTHYPLPTIQLYPFLAFISSSLKDYMGRTVEEALNAVRLLTGFPLPVTSENAENIVRLGRAFWSAFIRGSYQGAAYYIDNLEKNSADLILG

SEQ ID NO: 37367 - DNA, 804 bp, Unknown
  Obtained from environmental sample
  misc_feature (1)..(804): n is a, c, g, or t
atgacggcgggaactgatttctccgccaatgtcgcatgggtagcggaaaaattagggcttcccggtatcccttacgaagccgctcttaacgcgtcggacaaatcaagaatgcgcgagtgttttaaaaaagccgccctgccatctcccgattttatcaccattacagaagcggatttaccgcttcattccaaatccaaactctcaaaactcaactttccccttgttataaaacctgtagacaacatgggaagccgcggctgccgccgtgttgacagcgcggaagaattaaacgaggcggcaaaaactgctatcggcttttcacgatccggtcgcgccattttggaaagttacatggagggaccggagttttccgtggacgcgattgtctatcacggagagataaccatctgcgggcttgcggacaggcacatttttttcccgccgtactttatcgaaatgggacatacaatgccgacagtcatcaaagagaaaaaacaaaccgctattctggacactttccgcgccggaattcacgcccttgggcttgacgggaaggaaagcataggagctgcaaagggcgacattaaattgacagccaaaggaccgatgatcggggaaatagcggcgcgtctttcaggcgggtatatgtcgggatggacatacccctattcatccggcgcgctgccaatcaaaggcgctatcctcgcggcaatgggacgcgagccagaaggacttaccccacaaaaaaatggacgtgcgcggaaagagcgtttatatcaataccgggaaccgtcaaacaaatag

SEQ ID NO: 37368 - protein, 267 aa, Unknown
  Obtained from environmental sample
  DOMAIN (32)...(210): Phosphoribosylglycinamide synthetase, ATP-grasp (A) domain
  misc_feature (1)..(267): Xaa is any amino acid
MTAGTDFSANVAWVAEKLGLPGIPYEAALNASDKSRMRECFKKAALPSPDFITITEADLPLHSKSKLSKLNFPLVIKPVDNMGSRGCRRVDSAEELNEAAKTAIGFSRSGRAILESYMEGPEFSVDAIVYHGEITICGLADRHIFFPPYFIEMGHTMPTVIKEKKQTAILDTFRAGIHALGLDGKESIGAAKGDIKLTAKGPMIGEIAARLSGGYMSGWTYPYSSGALPIKGAILAAMGREPEGLTPQKNGRARKERLYQYREPSNK

SEQ ID NO: 37369 - DNA, 906 bp, Unknown
  Obtained from environmental sample
  misc_feature (1)..(906): n is a, c, g, or t
atgagcaaacgctggcttctaaagcttgtgcaggataaatatgtctcaggctgggatgatccgcgtatgccgaccattgccggtcttcgcaggcgcggttacacgccgcaggcaatacgcagttttgtttcgcagattggcattgcaaaaacagacagtacggtagacatcgcctttcttgaatactgcctccgtgaagatttaaacaaacggtcgttgcgcgtaatggtggttttgcgtccgctgaaactgataatcgaaaattgggacgaaagtaaaacagaagaactggaagctgttaacaaccctgaagacgaaggcgcgggaagcaggcgcgtacctttttcccgcgaactgtggattgagcgcgaggattttgaagaagtcccgccgcctaaatatttcaggctctttccgggaaattccgtgcgtctgcgttatgcgtacattgttacctgcaccggctttgacaaagacgcggacggtaacattaccgccgtgcgctgcacctacgatccgcagacaaggggcggaaacgctcccgataacaaaaaggttaaaggtacaattcactgggtttccgcggcacacgccgtaccgcttgaagtgcgtctttatgactatctgttcaaaacggaaaagccgatggagatttcaccgcgtcctgacggcagcgcgggcgagtttaccgacaaccttaaccctaattcgctggaagtaattgaaaacacatggggagaaccttctcttgcaaatgccgcgcatagtgatgtttgctttcagtttgagcgtctcggttatttcgcccgcgacccggatacaggcagggacggtcgtccggttttcaacaaaactatcgggctgcgcgacacgtgggcaaagattgcgaatcaaaacaccaaataa

SEQ ID NO: 37370 - protein, 301 aa, Unknown
  Obtained from environmental sample
  DOMAIN (74)...(271): tRNA synthetases class I (E and Q), anti-codon binding domain
  misc_feature (1)..(301): Xaa is any amino acid
MSKRWLLKLVQDKYVSGWDDPRMPTIAGLRRRGYTPQAIRSFVSQIGIAKTDSTVDIAFLEYCLREDLNKRSLRVMVVLRPLKLIIENWDESKTEELEAVNNPEDEGAGSRRVPFSRELWIEREDFEEVPPPKYFRLFPGNSVRLRYAYIVTCTGFDKDADGNITAVRCTYDPQTRGGNAPDNKKVKGTIHWVSAAHAVPLEVRLYDYLFKTEKPMEISPRPDGSAGEFTDNLNPNSLEVIENTWGEPSLANAAHSDVCFQFERLGYFARDPDTGRDGRPVFNKTIGLRDTWAKIANQNTK

SEQ ID NO: 37371 - DNA, 1002 bp, Unknown
  Obtained from environmental sample
  misc_feature (1)..(1002): n is a, c, g, or t
gtggcgagtcggtacatagtaggaccgggaactattaagaaaattgaaaacattgccagaaccgcccttgccggaaatgttacggcgactgaccttggtaattataacgaaagctgggagcatcttattgcgggttttgccccggtgtatgataacgacggcaatttttactgtgtcgcggatgtagacatagacgacacggttataacaagtcagcgtaattattcgcttattatgacgatgctccagatactcgccctttctgtttccgtacttttcggcatattaaatatgcttctgtacagcagtaaggcgaaacaaattgaagaggcgcatgtcaaacttcagtactttaacaataatatgcgacaggcgttttccacatatttgtcggaggacgtggtagaagaaataatatccgatcctacccgccttcagttgggaggcgtaaaccggcacatgacagctttgttttccgatatcaagggttttacaggcatagcggaaaaacttgcgccaaatcatttggtcgatcttcttaactattacctttccactatgagcgatattattctggaacagaaaggcacgattgacaaatatcagggagattcaatcgtttccttttttggagcgcctttggagcttgaggatcacgccctgcgggcatgtacagccggaataatgatgaagcggatggaaaacgacattaacaagtatgttttggaaaaaggcataagcccgtcgccgctgttgacacgtatcggcgttaatacaggcgagatggtagtaggaaacatgggaacgcaaaaaaagatgaactacactatcatcagtaacgcggtaaacatggcttcccgtcttgagggagtaaacaaagcatacgaaacatggattcttgcgtcggaatcaacaatacaggaaacaaagggaaagcttttaaccaggcgtcttgacaaggtaaaagtcgtggggaatcaacgaagtggtgcgcatccatga

SEQ ID NO: 37372 - protein, 333 aa, Unknown
  Obtained from environmental sample
  DOMAIN (149)...(330): Adenylate and Guanylate cyclase catalytic domain
  misc_feature (1)..(333): Xaa is any amino acid
MASRYIVGPGTIKKIENIARTALAGNVTATDLGNYNESWEHLIAGFAPVYDNDGNFYCVADVDIDDTVITSQRNYSLIMTMLQILALSVSVLFGILNMLLYSSKAKQIEEAHVKLQYFNNNMRQAFSTYLSEDVVEEIISDPTRLQLGGVNRHMTALFSDIKGFTGIAEKLAPNHLVDLLNYYLSTMSDIILEQKGTIDKYQGDSIVSFFGAPLELEDHALRACTAGIMMKRMENDINKYVLEKGISPSPLLTRIGVNTGEMVVGNMGTQKKMNYTIISNAVNMASRLEGVNKAYETWILASESTIQETKGKLLTRRLDKVKVVGNQRSGAHP

SEQ ID NO: 37373 - DNA, 456 bp, Unknown
  Obtained from environmental sample
  misc_feature (1)..(456): n is a, c, g, or t
ttgatgagatggactcaggcggattgcttcctgtttgaattcaattccaattcaccggatgacactttctctcttggacagcgtatagcccctcttctaaccgcgggatcagtcgtagcccttcagggagaacttggaagcggtaaaacatatcttgttaaaggcatagcaaaaggattaggcgttacggaaaccataacaagccccacttacacaataataagcgaatacaattcttctcccgttctttaccatattgacgcataccgtctgtcaggcgacgaggattttgaaaactcgggcggccgcgatacaattaactcaggcggaatttctttaattgaatggagcgagcgtattccaaaatcaataccaaaggacgcgattacggttattattaaaataacgggtccttgttccagattaattcaaataaaaggattggataaattatga

SEQ ID NO: 37374 - protein, 151 aa, Unknown
  Obtained from environmental sample
  DOMAIN (22)...(143): Uncharacterised P-loop hydrolase UPF0079
  misc_feature (1)..(151): Xaa is any amino acid
MMRWTQADCFLFEFNSNSPDDTFSLGQRIAPLLTAGSVVALQGELGSGKTYLVKGIAKGLGVTETITSPTYTIISEYNSSPVLYHIDAYRLSGDEDFENSGGRDTINSGGISLIEWSERIPKSIPKDAITVIIKITGPCSRLIQIKGLDKL

SEQ ID NO: 37375 - DNA, 672 bp, Unknown
  Obtained from environmental sample
  misc_feature (1)..(672): n is a, c, g, or t
gtgtgcggcctggtgggcctgtttttgatgcggggcattccggccaggttgagggaaattttcagaaaggcaatcggcctttctgtaattcttataggcattaagggcgctctggactgccaaaggatgctgctgtgcattatgagcatggtactcggttcggccctgggagaactcataggcattgacgcgtttatgaaccgcgttggccaatgggccgaaaaccggcttggcaaaaattcaagcagtgagggacataactttgcaaaggcttttgtcaccactaccattctttactgtggcggctccatggcaactgtaggttccctgcaaagcggccttttgggtaaccatgaaatcctttttgcgaaatcaatattggacgggactacttccatcgtttttggcgcgactatgggaatcggagttattttttccgccatccccgtttttgtttaccaggcaggcattgcaatgttgtcaattttgctaaaagattttctgactcccgatatcgttcgggaaatgtccgcagtgggaaaccttattgtagcgggaattggatttaattttttggaaataaaggaaataaaagttgccaattttgtccctgcaatttttgttccccttgtttatatgatcattgaggggcgtattcttcactctttttaa

SEQ ID NO: 37376 - protein, 223 aa, Unknown
  Obtained from environmental sample
  DOMAIN (1)...(217): Protein of unknown function (DUF554)
  misc_feature (1)..(223): Xaa is any amino acid
MCGLVGLFLMRGIPARLREIFRKAIGLSVILIGIKGALDCQRMLLCIMSMVLGSALGELIGIDAFMNRVGQWAENRLGKNSSSEGHNFAKAFVTTTILYCGGSMATVGSLQSGLLGNHEILFAKSILDGTTSIVFGATMGIGVIFSAIPVFVYQAGIAMLSILLKDFLTPDIVREMSAVGNLIVAGIGFNFLEIKEIKVANFVPAIFVPLVYMIIEGRILHSF

SEQ ID NO: 37377 - DNA, 762 bp, Unknown
  Obtained from environmental sample
  misc_feature (1)..(762): n is a, c, g, or t
ttggccgaggtttctgaaagccgcgaacgccggtgcatgaacgcctgcggcaggtttataaaacgcgattcatcgggaaacagcgtatgggctttgcatgacatcgccggtcacataacggccctgattgtccattcaaaacagagcctgttgcccgtattttccggccaaaaagcaattcccccgccgcgttttttgtataacccgttcagcacggcccacgttcattcaatccagggccgcagggaagacgccgaagttctggaagttgctcttgaaaaaattgatctgcttgcggcggaaaaaattgattacgatttaatgtatcttgaccgtcctcccggcaatttccgtttggcggggccgccgacccttgtcatacggaaaccgcagccgccggatatggacgcgcttgccgaactgcacgccgcctatgagatagaagaagtgctgcccgctgcggcaacatttaacgccgccacaagccgcgtaaacgcggaacggatttttgaaaaagagcaaatgctcgttgccgaattgggcgggcggcttgtcggcaaaattaacaccaacgcttttacttttacctgttgtcaggtaggcggcgtgtacgtccgccccgattgccggggcctgggcattgcccgcagaatggccggcgaatttgcggaaaaccttatcgcccanggcaggggcgtctccctttttgtcaaaaagtcaaaccccgccgcccgccgcgtatacgaacgcatcggcttttga

SEQ ID NO: 37378 - protein, 253 aa, Unknown
  Obtained from environmental sample
  DOMAIN (176)...(253): FR47-like protein
  misc_feature (1)..(253): Xaa is any amino acid
MAEVSESRERRCMNACGRFIKRDSSGNSVWALHDIAGHITALIVHSKQSLLPVFSGQKAIPPPRFLYNPFSTAHVHSIQGRREDAEVLEVALEKIDLLAAEKIDYDLMYLDRPPGNFRLAGPPTLVIRKPQPPDMDALAELHAAYEIEEVLPAAATFNAATSRVNAERIFEKEQMLVAELGGRLVGKINTNAFTFTCCQVGGVYVRPDCRGLGIARRMAGEFAENLIAXGRGVSLFVKKSNPAARRVYERIGF

SEQ ID NO: 37379 - DNA, 831 bp, Unknown
  Obtained from environmental sample
  misc_feature (1)..(831): n is a, c, g, or t
ttgagactttgcttttcaagaattcagcttttcggacgcggagaagtggcttttttacggcggctggaaaatgagggcaaaaccgacacaattacggaaatgtttagttttccgattccctgttgtattttcacgcacagtctgatgccgcacaaagaatttttcgagattgccgagaaagcccaatgccccattctacagaccgatttaggttccgccgatttttccaccagaataatgcgtatcctttccagcattttctcgccgcgccagattgttcacggcgtacttgtcgaagtttacgggttagggattttgatacagggcgattcgggagttggaaaaagcgaaaccgcgctggaactgatacaccgcggacatcgtcttgtcgccgacgacgtagtggaaataaattgtatttacggaaatacattgatgggcgcgggcgcgaataaaattatcgggcatcacatggaaattcgcggtccgggaataatcaatattacgcacctgttcggcgtaagagcaattagagatagaaaagaaattcagcttgtagtagcgttggaagaatgggattctcaaaaaaattacgacagacttggcgcggaggatcatacggttgatatattgggcgttaacgtgccgaaacttacgattcccgtaaaaccggggcgtaacatcccgattatcatagaaacagccgctatgaatgagcggttaaaatccatggggtatcatgccgccaaggaattcaacaaaaacatccttaaatggatcgagagcgacgctacgcgttcggtctttttcggctatgacgacgtaatttag

SEQ ID NO: 37380 - protein, 276 aa, Unknown
  Obtained from environmental sample
  DOMAIN (1)...(84): HPr Serine kinase N terminus
  misc_feature (1)..(276): Xaa is any amino acid
MRLCFSRIQLFGRGEVAFLRRLENEGKTDTITEMFSFPIPCCIFTHSLMPHKEFFEIAEKAQCPILQTDLGSADFSTRIMRILSSIFSPRQIVHGVLVEVYGLGILIQGDSGVGKSETALELIHRGHRLVADDVVEINCIYGNTLMGAGANKIIGHHMEIRGPGIINITHLFGVRAIRDRKEIQLVVALEEWDSQKNYDRLGAEDHTVDILGVNVPKLTIPVKPGRNIPIIIETAAMNERLKSMGYHAAKEFNKNILKWIESDATRSVFFGYDDVI

SEQ ID NO: 37381 - DNA, 492 bp, Unknown
  Obtained from environmental sample
  misc_feature (1)..(492): n is a, c, g, or t
atgaaaagcgattctgtaaacaagggtattgccaaagcgcctcatcgttcgctctttaaggcgttgggttttattgaagaagaattcaaaagaccgttaatagggattgcctgcgctaaaagcgaaatagtgccgggtcatatgcacctcgataatatcgcgcgcgcagccgccgacggcgttcgcatggcaggcggtgtgcctgtaacatttcccgtaatcggcgtatgcgacggaatagcgatgggtcatgagggaatgagatactccctgccgacaagggaacttatcgccgactcgattgaatgtatggcgaccgctcacgcatttgacgctcttgtctttatcccaaattgcgacaagatagtgccgggtatgctcatggcgtctgctcggctcaaccttccgtccgtttttgtttcaggcggaccgatgctcgccgggcgcaaggacggaaaaccgctgacgcttacaccatgtttgaagcagtag

SEQ ID NO: 37382 - protein, 163 aa, Unknown
  Obtained from environmental sample
  DOMAIN (31)...(162): Dehydratase family
  misc_feature (1)..(163): Xaa is any amino acid
MKSDSVNKGIAKAPHRSLFKALGFIEEEFKRPLIGIACAKSEIVPGHMHLDNIARAAADGVRMAGGVPVTFPVIGVCDGIAMGHEGMRYSLPTRELIADSIECMATAHAFDALVFIPNCDKIVPGMLMASARLNLPSVFVSGGPMLAGRKDGKPLTLTPCLKQ

SEQ ID NO: 37383 - DNA, 342 bp, Unknown
  Obtained from environmental sample
  misc_feature (1)..(342): n is a, c, g, or t
atgctcgcctcggcaagtctcggcgctcctgtgcagggcggaacaagaccgggaatgtacgagcctattcacggctccgcccccgacattgcggggaaagacttagcgaatccgctggcaacaattctttcggcggctatgatgctacgctactccttcggtcttgaaaaggaagccgttgccattgaaacagcggtcaacaatgtgctggatcagggactgcggacaggagacatcgcaagccgaagtaatgctaacagcaatggcgcagcaagcagcgagaaaattattggtactaaagcaatgggcgaagctgtgctcaaagcgttggagaaattatga

SEQ ID NO: 37384 - protein, 113 aa, Unknown
  Obtained from environmental sample
  misc_feature (1)..(113): Xaa is any amino acid
MLASASLGAPVQGGTRPGMYEPIHGSAPDIAGKDLANPLATILSAAMMLRYSFGLEKEAVAIETAVNNVLDQGLRTGDIASRSNANSNGAASSEKIIGTKAMGEAVLKALEKL

SEQ ID NO: 37385 - DNA, 714 bp, Unknown
  Obtained from environmental sample
  misc_feature (1)..(714): n is a, c, g, or t
ttgttaggagcggttggcggccccaagtgggacacgcttccggggcatctgcgtcccgagagggcgctgttgggtcttcgcgccgggcttggcgttttcgccaaccttcgtccggcggccttgctccctcaattaaaatcagcctgccctgttaaggacgaagtgctaatcgctagtaacagcgaggggaaagccgcttttgatttattgattgtaagagagctgacgggcgggctttacttcggtaagcgcggaagattggacgaagcttcaaacggccacagccccggttcggcttttgataccgagacatattcgtggatggaaattgagcgcgtgctccgcgcgggttacgaagcggcgaaggtgagacggaaaaaactctgcgtggtggacaaggccaatgtgcttgagtcttcccgcttctggcgcgaagttgcggcggtggtttcaaaagattatcccgatatcgaaacaagttatctatatgttgacaatgccgccatgcagttaattcgcgctccggggcaattcgatgtaattgttacatcaaatctctttggagacatactttccgatgaggcgtccgtgcttacggttcaatcggtatgctcgcctcggcaagtctcggcgctcctgtgcagggcggaacaagaccgggaatgtacgagcctattcacggctccgcccccgacattgcggggaaagacttag

SEQ ID NO: 37386 - protein, 237 aa, Unknown
  Obtained from environmental sample
  DOMAIN (1)...(237): Isocitrate/isopropylmalate dehydrogenase
  misc_feature (1)..(237): Xaa is any amino acid
MLGAVGGPKWDTLPGHLRPERALLGLRAGLGVFANLRPAALLPQLKSACPVKDEVLIASNSEGKAAFDLLIVRELTGGLYFGKRGRLDEASNGHSPGSAFDTETYSWMEIERVLRAGYEAAKVRRKKLCVVDKANVLESSRFWREVAAVVSKDYPDIETSYLYVDNAAMQLIRAPGQFDVIVTSNLFGDILSDEASVLTVQSVCSPRQVSALLCRAEQDRECTSLFTAPPPTLRGKT

SEQ ID NO: 37387 - DNA, 792 bp, Unknown
  Obtained from environmental sample
  misc_feature (1)..(792): n is a, c, g, or t
atgatacgtcagactgcggggcaagcccgcaatgacggcggagttgacgccggagtcggaatcgatactgataaagacggcgcgataaccgtgataggcgcggtgaccgccgcccgcgccgagttttacggcaggcctaaattccgcgttaccgtagagggcgacggcggcgggacgcttgacgcgatttggtttatccgtaacatgaagatagaggtcggcgagaggcttatgctgaccggcagggtgacggcggctaagagcggtcggccgcttatggttcatcccgtcctcgaaaaatcggcggacggcgcggatcataggcccatactcgcggtttacgccgtacgggagccgatgcgggaggccggaatcaaccagaggcttttgcgctattctatagaatgggcgctcggcaacgtcaacgacggcggctatccgcggcttctgccggaagttatcgagaagaagaaaggctttccgccgcttagcgattgtttgcgtcaggtgcatctgcccgacgctctttcggagctcggggcgtataaggcccggctcaagtacgaggagctgtaccgcctcgctctggatttgcgttggagcaggcggaagttcgctctgccgggatacgccatgtcgccgggcggtcttacggacagactgcgcgccgcgctgcccttcgcgcttacggagtcccaggaggcggcggtgcggacgttgcacgccgacgcggcgcgccccgaacgtatgcaccggctgctgcaggggacgtgggatcggggaagacggtga

SEQ ID NO: 37388 - protein, 263 aa, Unknown
  Obtained from environmental sample
  misc_feature (1)..(263): Xaa is any amino acid
MIRQTAGQARNDGGVDAGVGIDTDKDGAITVIGAVTAARAEFYGRPKFRVTVEGDGGGTLDAIWFIRNMKIEVGERLMLTGRVTAAKSGRPLMVHPVLEKSADGADHRPILAVYAVREPMREAGINQRLLRYSIEWALGNVNDGGYPRLLPEVIEKKKGFPPLSDCLRQVHLPDALSELGAYKARLKYEELYRLALDLRWSRRKFALPGYAMSPGGLTDRLRAALPFALTESQEAAVRTLHADAARPERMHRLLQGTWDRGRR

SEQ ID NO: 37389 - DNA, 969 bp, Unknown
  Obtained from environmental sample
  misc_feature (1)..(969): n is a, c, g, or t
ttggagcaggcggaagttcgctctgccgggatacgccatgtcgccgggcggtcttacggacagactgcgcgccgcgctgcccttcgcgcttacggagtcccaggaggcggcggtgcggacgttgcacgccgacgcggcgcgccccgaacgtatgcaccggctgctgcaggggacgtgggatcggggaagacggtgacggcgctcttcgcggcgctgccggcgctcaacagcggtcggcaggtggcttggatggcgccgacggagattttggccaagcagaccaagtccgcggtggaggggtgccttgccggtcttgggatccgggtcgggtacgtcggcgcgggcgacgcgccggagaagcggcggacgctcggcgatctggcgtcgggggagctgcgcttcgcggtgggcacccacgccctcttcatgccctccgtgaggtttcgcaatttggggatggtgataatcgacgagcagcataaatttggcgcggcgcagcgtttgaagctgcaggagaaggggccggcgagcgattttctgctgatgtcggctacgcccataccgcagactttggccaagacgctctacggcgaccttgacgttgtggagatcgggtcgaggccctccatggcgccggtgtcgacgcatatcgtgccggaggggaagcgggccggcatggagggtttcatccttgagcggataggcgccggggcgagggcgttttacgtcgtgccgaggatcgatcagcagccgtcggacgattcggaggatgatggcggcgggtcggccgggagtgcgcgcgggcgcaaaacggcggatggcggcgatcattcgggcgctctgccggtgaagaccgtggacagcgtcgcggaggcgttgggcagggggccgctgtcgtcggcgcctatacacaagctgcacgggcggatgtccgcggacgagcgtgacgccgctatatgcgccttttag

SEQ ID NO: 37390 - protein, 322 aa, Unknown
  Obtained from environmental sample
  DOMAIN (13)...(188): Type III restriction enzyme, res subunit
  misc_feature (1)..(322): Xaa is any amino acid
MEQAEVRSAGIRHVAGRSYGQTARRAALRAYGVPGGGGADVARRRGAPRTYAPAAAGDVGSGKTVTALFAALPALNSGRQVAWMAPTEILAKQTKSAVEGCLAGLGIRVGYVGAGDAPEKRRTLGDLASGELRFAVGTHALFMPSVRFRNLGMVIIDEQHKFGAAQRLKLQEKGPASDFLLMSATPIPQTLAKTLYGDLDVVEIGSRPSMAPVSTHIVPEGKRAGMEGFILERIGAGARAFYVVPRIDQQPSDDSEDDGGGSAGSARGRKTADGGDHSGALPVKTVDSVAEALGRGPLSSAPIHKLHGRMSADERDAAICAF

SEQ ID NO: 37391 - DNA, 879 bp, Unknown
  Obtained from environmental sample
  misc_feature (1)..(879): n is a, c, g, or t
atggaagaaagccggacacttcctagcgtgaacactcaagataaaacggaaaatccggaattggctgccgccattatttcggcaatacacgcaaacgaaaacaaacttgaactatttggttccggcaaacaaatcgggattcatgagcctgaaattcatacgcttggaatatcaaatctgcgaaaaaaattcggacgcaaagaagttgtacgcagcgtaaacttttcaatgcaaaacggcatagtggcaggtcttctaggtcccaacggcgcgggaaagacaaccatcttctacatgattgtaggtttctatcagcctactcatggaattgttacattggacgatatagatattaccgataaaccgatgtaccagcgcgcaagacttggcattgcctacctcccgcaggaagcgtcttttttccgcaaacttacggttgaacaaaacatctgggcaattctggaaagtcggcaggacattgacgattacgaaaaggaagaaaaacttgaaagccttttaaatgagttcggtatcgcccgcatccgcactcagttaggctacactctttccggcggtgaaagacgcagaacggaaattgcccgcgctcttgctacagagccaaagtttctgctgttggacgagcccttcgccggaattgatcctatcgcggtttacgaaataaaacaaataatccgccaacttgccaaaaaaggcattggcattcttattaccgaccacaatgtccgcgatactttggaaattacaaacgaagcgtttatcatcgcggacggtaacatattcgcaagaggggataaagatgttattctgaataatgagatggtcagaaaagtttatttgggcagtgaatttaggatgtag

SEQ ID NO: 37392 - protein, 292 aa, Unknown
  Obtained from environmental sample
  DOMAIN (80)...(264): ABC transporter
  misc_feature (1)..(292): Xaa is any amino acid
MEESRTLPSVNTQDKTENPELAAAIISAIHANENKLELFGSGKQIGIHEPEIHTLGISNLRKKFGRKEVVRSVNFSMQNGIVAGLLGPNGAGKTTIFYMIVGFYQPTHGIVTLDDIDITDKPMYQRARLGIAYLPQEASFFRKLTVEQNIWAILESRQDIDDYEKEEKLESLLNEFGIARIRTQLGYTLSGGERRRTEIARALATEPKFLLLDEPFAGIDPIAVYEIKQIIRQLAKKGIGILITDHNVRDTLEITNEAFIIADGNIFARGDKDVILNNEMVRKVYLGSEFRM

SEQ ID NO: 37393 - DNA, 384 bp, Unknown
  Obtained from environmental sample
  misc_feature (1)..(384): n is a, c, g, or t
atgtttggggacatgaggaagaaaagacattttgttctcacagacaggcttcgctacgacagaaaattaaaaatcgcgcggctggaaggcaactcgactctggaagacagaagaaacgcgattgttgcgaaggggcgttttattgaatatgacgacacaaacgaaataaccgtttttcaaattgccgtccgccttttcaaagacgatatggtctgccgctcggaacacgcggtctatcaccgtaaagataaactgctcgacttgaccagcttccctgttgtatataaaaaagacgatgaattccgagcggataaaattcgcgtagatttggacaccgacgatgtaattatggaaggcgccgtatcgggaacaataaagaattaa

SEQ ID NO: 37394 - protein, 127 aa, Unknown
  Obtained from environmental sample
  misc_feature (1)..(127): Xaa is any amino acid
MFGDMRKKRHFVLTDRLRYDRKLKIARLEGNSTLEDRRNAIVAKGRFIEYDDTNEITVFQIAVRLFKDDMVCRSEHAVYHRKDKLLDLTSFPVVYKKDDEFRADKIRVDLDTDDVIMEGAVSGTIKN

SEQ ID NO: 37395 - DNA, 378 bp, Unknown
  Obtained from environmental sample
  misc_feature (1)..(378): n is a, c, g, or t
atgatagattccggcgttgacgtatttacggctatcgcaggaggggcggcgcagggaatgattaaaaccgcttccgaaaaaaataagtacgttgtaagttacaatacaaatgaataccgccttgcggaagggcttgtacttggctgcggaataatggaacagaaaaaacttgtaatggaaatacttaaagacgcgcttgaaggtaaaattcaatacggtatttcgcagactgtcggagtaaaagaaggttacctcggctttatttttgacgatcctgcgtacaggaacaatctgcccgccgacattcgggaaaaatttgaaaaattttacaaagatcttagtgaaggcaaaataaactatacaataccgcctctttga

SEQ ID NO: 37396 - protein, 125 aa, Unknown
  Obtained from environmental sample
  misc_feature (1)..(125): Xaa is any amino acid
MIDSGVDVFTAIAGGAAQGMIKTASEKNKYVVSYNTNEYRLAEGLVLGCGIMEQKKLVMEILKDALEGKIQYGISQTVGVKEGYLGFIFDDPAYRNNLPADIREKFEKFYKDLSEGKINYTIPPL

SEQ ID NO: 37397 - DNA, 612 bp, Unknown
  Obtained from environmental sample
  misc_feature (1)..(612): n is a, c, g, or t
gtggcgaatatttgtgcgataaaagaagttgatatagaaaataaaactgcgttatgtcccttatgtggttataaaaataattttttaccaatgcctttatttattatcggcggtgcaagcggaacaggtaaatcaaccgtattaaaagaattaatcggaaatatggataatgtcattttgcttgagactgatataatttggcaagaagaatttaataagcctgaaaataattacaggaaattctttgaaacatggttaagattagcgaaaaatatatcacaatcgggcagacctgtagtattatttggcgctggttttggagttcctgaaaatatagagccttgtacagaaagaagatatttttccagtataaattatttgaatatatattgttcagatgatgaattagaaaaacgattactcaaacgtcctcaatggagaaattgtcaaaataaagaatttattgacaaacaaaaagaatttaataattgggtaaaaaattatagtaaagaaaagaagcctgaaattgatttattagatacaacagatttaactcttgaaaaagcggtagatagcgttagattatggattaataagaaaatgataaagtga

SEQ ID NO: 37398 - protein, 203 aa, Unknown
  Obtained from environmental sample
  misc_feature (1)..(203): Xaa is any amino acid
MANICAIKEVDIENKTALCPLCGYKNNFLPMPLFIIGGASGTGKSTVLKELIGNMDNVILLETDIIWQEEFNKPENNYRKFFETWLRLAKNISQSGRPVVLFGAGFGVPENIEPCTERRYFSSINYLNIYCSDDELEKRLLKRPQWRNCQNKEFIDKQKEFNNWVKNYSKEKKPEIDLLDTTDLTLEKAVDSVRLWINKKMIK

SEQ ID NO: 37399 - DNA, 882 bp, Unknown
  Obtained from environmental sample
  misc_feature (1)..(882): n is a, c, g, or t
gtggactatgaggaagcggagctggcaaaatccctcgccgagcattatgaaaaaatgggcaatgacgaggcggcggttgactattataaaaaagccctgcaccgctttataaacaagtcgctttttgccaatgtcaaggaaatatgggaaaaactccttgtcttctgcccggatgacatcgactttttcttccatgtgcagaagaaggtcgctaaaaccatcagcgaagaaagggccatagacctgcttaaactcgtgtacgcctcctgtaaggaccgcgatattgacactgctatagccatacttaaaattgttctgcaatacgacgaaaaagattaccccgcccgcaaggaaatcgtcgaatgttataaaaagaaatttgccggccacagccaccttgacgattatatccgcatatcaaacctttcccaaagttaccgcaatgtccatgaggccatcaccgattttgaaaaacatatcgcttttgacaagggaaactacgttttccaccggacatggggagtcggaaaaattgccggcatagaaggcgacgatatcaaaataaatttttccaaaaaggccaaccatacaatgtcgcttaaaatggcggtcagcgctttgcaaattctgtcaaaagaccatatttgggtaataagggcgacatggagcagggaaaaactccaggaaaaagtcaaagcggatatccactggacccttaaaaccattattaaaagcgccgggaattcctgcgacttaaaaaaaataaaggcggaattatgccccggagtgctgtccgagaaagaatggccgtcatggagcggcaaggcgagggatattctgaaatccgatccgaatttcgggggtaagcccggacaatattga

SEQ ID NO: 37400 - protein, 293 aa, Unknown
  Obtained from environmental sample
  misc_feature (1)..(293): Xaa is any amino acid
MDYEEAELAKSLAEHYEKMGNDEAAVDYYKKALHRFINKSLFANVKEIWEKLLVFCPDDIDFFFHVQKKVAKTISEERAIDLLKLVYASCKDRDIDTAIAILKIVLQYDEKDYPARKEIVECYKKKFAGHSHLDDYIRISNLSQSYRNVHEAITDFEKHIAFDKGNYVFHRTWGVGKIAGIEGDDIKINFSKKANHTMSLKMAVSALQILSKDHIWVIRATWSREKLQEKVKADIHWTLKTIIKSAGNSCDLKKIKAELCPGVLSEKEWPSWSGKARDILKSDPNFGGKPGQY

SEQ ID NO: 37401 - DNA, 792 bp, Unknown
  Obtained from environmental sample
  misc_feature (1)..(792): n is a, c, g, or t
atgcttttcgaaaaacgctccacccgcacaagatgttcctttgaaaccgcctttggcgaagaagggggacaccccgtgtttctttccaaccaggacatccaacttgggggaaaagaatcccttgaagatacagcccgcatacttggaaggatgttcaacatcatagagttcagaggctttaagcagtccacggtcgaaaccctggcaaagtactcaggcgtccctgttatcaacgggcttaccgacgattatcaccctacccaggttctggcggacattatgaccatggaagaatgttttggatcatcaaaagggaaaaagctctgctttgtcggggacggcagaaacaacgtggctcgctccctcctggtgatctgttccaaattgggtatcaactttacgatcatcacccccgccctcctgaatcccgattggtccctcatcagcaagtgcgcccccctgtccgcagcatcgggagcaaagatcaaaattaccgataatcttgacgaagtagaaggagcggacgcactctacaccgacgtgtggacttccatgggcgaagaagataaaaaagcggaacgggaaaagctcttgcgtccctaccaggtgaatcaggccctgatgaacaaaaccggacaaaaagacgttatattccctcactgtctgcccgccgttaagggcgaagaagttacagccgacgtgattgagggaccgcaaagcagggcttgggatgaggctgaaaaccgcaaacatacaataaaagcggtaatgcttgcgacactggtaaaataa

SEQ ID NO: 37402 - protein, 263 aa, Unknown
  Obtained from environmental sample
  DOMAIN (1)...(99): Aspartate/ornithine carbamoyltransferase, carbamoyl-P binding domain
  misc_feature (1)..(263): Xaa is any amino acid
MLFEKRSTRTRCSFETAFGEEGGHPVFLSNQDIQLGGKESLEDTARILGRMFNIIEFRGFKQSTVETLAKYSGVPVINGLTDDYHPTQVLADIMTMEECFGSSKGKKLCFVGDGRNNVARSLLVICSKLGINFTIITPALLNPDWSLISKCAPLSAASGAKIKITDNLDEVEGADALYTDVWTSMGEEDKKAEREKLLRPYQVNQALMNKTGQKDVIFPHCLPAVKGEEVTADVIEGPQSRAWDEAENRKHTIKAVMLATLVK

SEQ ID NO: 37403 - DNA, 465 bp, Unknown
  Obtained from environmental sample
  misc_feature (1)..(465): n is a, c, g, or t
atgacagaagcctcttttaaaatttatactgacggcggctgttccggcaacccgggaccgggcggctgggcgtatgtcatggtgcagcagacttttcagggcgaacaggtaatcgcaaaggacaaaggctctgagaaggacactaccaacaacagaatggaattaaccgccgtgattatggcgttacgcgctcttaaaacaatgaccgacgtaccgcgtcaggcggcggtattaacggactcccagtatgtgcaaaaaggcattacggaatggatacgcaactggaagcgcaacgcgtggagaaccgccgacaaaaaacccgtaaaaaatcaggatttatggatggagcttgattccctagcgagtgaatttcctcttaagtgggaatgggtgaaggggcacgcgggcaatgaatacaatgaaatgtgcgacgcgatgactcaggaagccatcgcgcttgtttag

SEQ ID NO: 37404 - protein, 154 aa, Unknown
  Obtained from environmental sample
  DOMAIN (3)...(152): RNase H
  misc_feature (1)..(154): Xaa is any amino acid
MTEASFKIYTDGGCSGNPGPGGWAYVMVQQTFQGEQVIAKDKGSEKDTTNNRMELTAVIMALRALKTMTDVPRQAAVLTDSQYVQKGITEWIRNWKRNAWRTADKKPVKNQDLWMELDSLASEFPLKWEWVKGHAGNEYNEMCDAMTQEAIALV

SEQ ID NO: 37405 - DNA, 1182 bp, Unknown
  Obtained from environmental sample
  misc_feature (1)..(1182): n is a, c, g, or t
gtggacggcaaagggcctattaccgcggaagaacatcttcccctggaatcccccgccgcgccggtcatagaccgcggcagcgtggatacccctttgcagaccggcattgtttccattgacgccatgatccccatcgggcggggccagcgggaactgattatcggcgaccggcagaccggcaagaccgccatcgctattgacgccattatcaatcaaaaagggaaaggcgttacctgcgtgtattgcgcaatcgggcaaaaatcatcgtcggtggcggcgattgttaaaaaacttgaagagcatggggcgatggaatatacctttgtggtgctggcaacggcgtcggattcggcggccctgcaatatatagctccctacgccggggttgcgatggcggaacattttatgcatcagggaaaagacgtgctgatagtgtacgacgatctttccaaacacgccgtagcctaccgcacgatcagcctgcttttgcgccgccctccgggacgcgaggcttttcccggcgacgtgttctaccttcattcgcggctgctggaacgggcggcaaaactttcaccggagaaaggcggcggttcaatcaccgccctgcccattgttgagacccaggccggcgacatttcatcgtacattcccaccaatgttatttccattaccgacgggcaggtcttccttgattcggaactgtttaattcaggtttccggcctgccattgacgtggggctttcggtcagcagggtcgggggcgcggcccagtcaaaggtgatccgcggcatttcaggccgcctgcggctggaccttgcccagtaccgcgaaatggccgcctttgcccaattcggcagcgatctggacaaagctacccgcgacaagctggcgcagggggaacggttgatggaaatgctgaaacaggcgcagtactcaccctacccgctggaacaacaggccgctattctctttttggcgattaacggttttcttatggatgtagcggtggaaaaaacagccccctgcattaccgcctatcttgaataccttcaccttaaccacgcggatttaatgcggaacatcggggagaccggcaaattctcgccggaacaggaaaaagaactgcgggacgctatagataaatttaaatcatccgtatggaagccggcggacagaggttaa

SEQ ID NO: 37406 - protein, 393 aa, Unknown
  Obtained from environmental sample
  DOMAIN (262)...(380): ATP synthase alpha/beta chain, C terminal domain
  misc_feature (1)..(393): Xaa is any amino acid
MDGKGPITAEEHLPLESPAAPVIDRGSVDTPLQTGIVSIDAMIPIGRGQRELIIGDRQTGKTAIAIDAIINQKGKGVTCVYCAIGQKSSSVAAIVKKLEEHGAMEYTFVVLATASDSAALQYIAPYAGVAMAEHFMHQGKDVLIVYDDLSKHAVAYRTISLLLRRPPGREAFPGDVFYLHSRLLERAAKLSPEKGGGSITALPIVETQAGDISSYIPTNVISITDGQVFLDSELFNSGFRPAIDVGLSVSRVGGAAQSKVIRGISGRLRLDLAQYREMAAFAQFGSDLDKATRDKLAQGERLMEMLKQAQYSPYPLEQQAAILFLAINGFLMDVAVEKTAPCITAYLEYLHLNHADLMRNIGETGKFSPEQEKELRDAIDKFKSSVWKPADRG

SEQ ID NO: 37407 - DNA, 978 bp, Unknown
  Obtained from environmental sample
  misc_feature (1)..(978): n is a, c, g, or t
ttgcttcgtaccgtcttcggaaacaccctgtgctataggcgcgaactggtcagggttttccggctgtgtggtatggctcgggcaaaggattgctcgggtatttcggctcaaggagggttatttatggtaattaatcacaacatgagcgctatttatgctaatcgtacgcttggggttacccagttagacataacgaaaagcatggagaaactcagttccggcgagcggattaaccgcgcgggcgatgacgcttccgggcttgctgtctcagaaaaactgagaggccagattcgggggcttaaccaggccgagcggaacattcagaacggtgtagcctttatccaggttacggaagggtatctgcaggaaacacaggatatccttcaccgcatcagggaactgtcggtccagtccgccaacggtatttacactgccgaggacaggatgcagatccaggtagaagtgtcacagttggtggatgaagtaaaccgcatagcgagccatgctcagtttaacggtatgaatctgcttacaggggcttttgcaacggattccgtagtcggtcgggttatgcagttccaggtcggcgccaatatggaccagaacaaacaggtctttatcggtaccatgactgcgctttctcttggattgcagtccaatcaggacgcaaacgaattccttagtattgccaccgccgaatcagcgaaccaggcaatcggtacggtagatgcagccttaaaaatggtttccaagcaaagggctgatctgggcgcgtatcaaaaccgctttgagatggctgctcagggcgttgccatcgcatcggaaaatctgcaggctgccgaatcccgcatcagggatacggacatggcatcggaagtggtcaactataccaggggagcaattctgaaccaagcgggaaccgcaatgctggcgcaagccaatatgcggacccagtcggcgcttcagctccttggctaa

SEQ ID NO: 37408 - protein, 325 aa, Unknown
  Obtained from environmental sample
  DOMAIN (232)...(303): Bacterial flagellin C-terminus
  misc_feature (1)..(325): Xaa is any amino acid
MLRTVFGNTLCYRRELVRVFRLCGMARAKDCSGISAQGGLFMVINHNMSAIYANRTLGVTQLDITKSMEKLSSGERINRAGDDASGLAVSEKLRGQIRGLNQAERNIQNGVAFIQVTEGYLQETQDILHRIRELSVQSANGIYTAEDRMQIQVEVSQLVDEVNRIASHAQFNGMNLLTGAFATDSVVGRVMQFQVGANMDQNKQVFIGTMTALSLGLQSNQDANEFLSIATAESANQAIGTVDAALKMVSKQRADLGAYQNRFEMAAQGVAIASENLQAAESRIRDTDMASEVVNYTRGAILNQAGTAMLAQANMRTQSALQLLG

SEQ ID NO: 37409 - DNA, 399 bp, Unknown
  Obtained from environmental sample
  misc_feature (1)..(399): n is a, c, g, or t
atggccgaggatataccggaagagtatatacgctcggaattgcccaaagtcccggcagaagatgacgggacggaggtatgggaatggatgcggtttctccgcgcgaagcggaaggaggaatttgagatggcggcgatagaaaaccccgaaatacggaaagcggtggacaggctgtacgaactgagcgcggacgggaaagtccgggcggaatacgagatgcgccagaaagcccggcgggattggctgtggcagcttgacaacgccagacaggatggcatggaaaaaggcatggaagaaggcaaggttgagactgcccgcaacgcattagcagagggcttaccgataggcacaatcagtaaaattaccggtttatctcctgaacaaatagcaaaattataa

SEQ ID NO: 37410 - protein, 132 aa, Unknown
  Obtained from environmental sample
  misc_feature (1)..(132): Xaa is any amino acid
MAEDIPEEYIRSELPKVPAEDDGTEVWEWMRFLRAKRKEEFEMAAIENPEIRKAVDRLYELSADGKVRAEYEMRQKARRDWLWQLDNARQDGMEKGMEEGKVETARNALAEGLPIGTISKITGLSPEQIAKL

SEQ ID NO: 37411 - DNA, 1242 bp, Unknown
  Obtained from environmental sample
  misc_feature (1)..(1242): n is a, c, g, or t
atgacaaaagaaaaaataaaagagaaaaaagaaaaaaggaagagccctgtccgttcgataagcgtcccggcgttcgcttcgtacctccggtatgcgcttgctaaccatgctcttaacttttttctcttttctttcttctttcttcttttgttatcctgcccccagcccaacagttccgtgtcggctaaggcccccggcaaccccgagcctgccaagcccgaacctaaggcgctggttgtttttgacaacacctacggcctctgtaccgctctggtgtacgacgactaccaaagaagaaacgaggacaaaatcgccgaggttccggccggaaggcgttctgctgaaattgaatactatcccggcgacagtatccccttttattttgcctatggcataaaccttaacgacttcagcggttttaccatgaattatgtcccccaaaacgggagagaccaaaggacggtaaacctgaaagccgacacaacaacaaccgttcttatacccaaactcgatgaaacattttcagcggccgaccagctactttccccccgcagttttcttttactgcagaacgcgtcctcatattccttcgaactgcaccgggggcgttcctcgatcaggccggacggcgcgtcaggttcgccggtagtgaactcaggggaaagagctttctacaccgtcaatacgtccgatgctttcgatcccggagccggggaagccgtgaattaccgtctgctggtaggtgcggattacaaagaatttccaaatactcaggttgaatttaaaccggggcatttttacaattttacctacaacggaaatattgttttgaataatgaaattcctgtaaagttagatactatagcgataaagacgtatacggtgacgtttaacagtaacggcgcaagcggaacagcgccaacagcgcaggtggcaaacgccggttcagccgtaacattgcccaacagcggcgggctgtcaaaagacggatacacctttggcggctggaacgcctcggcatccgggaatgggatcaattacggggcgggagcgacctataccgtgaccggcgatattaacctgtacgcgacctggtatcccatcggcacggtaatgtacacggttgcgtttgacggcggccgtggcagcgcantcgcgagccaagacataagttccgggcaaaaagcggttccgcccggcgaccccatagaaggggtaacattttatcgactggtaccgtga

SEQ ID NO: 37412 - protein, 413 aa, Unknown
  Obtained from environmental sample
  misc_feature (1)..(413): Xaa is any amino acid
MTKEKIKEKKEKRKSPVRSISVPAFASYLRYALANHALNFFLFSFFFLLLLSCPQPNSSVSAKAPGNPEPAKPEPKALVVFDNTYGLCTALVYDDYQRRNEDKIAEVPAGRRSAEIEYYPGDSIPFYFAYGINLNDFSGFTMNYVPQNGRDQRTVNLKADTTTTVLIPKLDETFSAADQLLSPRSFLLLQNASSYSFELHRGRSSIRPDGASGSPVVNSGERAFYTVNTSDAFDPGAGEAVNYRLLVGADYKEFPNTQVEFKPGHFYNFTYNGNIVLNNEIPVKLDTIAIKTYTVTFNSNGASGTAPTAQVANAGSAVTLPNSGGLSKDGYTFGGWNASASGNGINYGAGATYTVTGDINLYATWYPIGTVMYTVAFDGGRGSAXASQDISSGQKAVPPGDPIEGVTFYRLVP

SEQ ID NO: 37413 - DNA, 912 bp, Unknown
  Obtained from environmental sample
  misc_feature (1)..(912): n is a, c, g, or t
ttgccggggggcatatactccttgagggggtgcccgcggctggcaaaaaccctggcggtcaaaagcctggcgcagatcacggggcttgaattcaaacgcatacagttcacccccgacctgctgcccgcggatcttaccgggactcttatttgggaccagtcaagggggagtttttccgtcaggcgggggccggttttcgccaatgtgatccttgccgatgaaataaaccgcgcgcccgcaaagatgcagtcagccctgcttgaagcgatggaagaacggcaggtaacaatcggcgagacgagctacgcccttccggaccctttttttgtgcttgccacggagaatcccattgagcatgagggtacctactcgctgcccgaggcggagcttgaccgtttcctgctaaaactgcttgtgacataccccgcgccggaagaagagatcggcattgtcggacgaagcccggcgctgtcttccgtttttacccctttggaaccgctctcccccattttggacaaggcggcgatagcccaattaagggcggccgcggacatgatccacatggatgaaaaaatcactgaatacatcgtatcgatagttaccgcaacaaggcccgcgtcaaacagggcacagcattcgggcgcgtcaaaggccgccgcggcaaaagacgccgaggggctgtaccgttatgtgtcattcggcgcgtcgccccgcgcgtcaatagccctttaccgttgctcgaggattctggcgctgttctcaggcaggnatttcgtcagcccggacgacgtgaaagccgncgcctaccccgcgctccggnacagaatcgtgctgttctatgaagcggaaggcgacgggctggacgccgacacggtaattacccgtattctctcccatgtgcctattccgtaa

SEQ ID NO: 37414 - protein, 303 aa, Unknown
  Obtained from environmental sample
  DOMAIN (7)...(141): ATPase family associated with various cellular activities (AAA)
  misc_feature (1)..(303): Xaa is any amino acid
MPGGIYSLRGCPRLAKTLAVKSLAQITGLEFKRIQFTPDLLPADLTGTLIWDQSRGSFSVRRGPVFANVILADEINRAPAKMQSALLEAMEERQVTIGETSYALPDPFFVLATENPIEHEGTYSLPEAELDRFLLKLLVTYPAPEEEIGIVGRSPALSSVFTPLEPLSPILDKAAIAQLRAAADMIHMDEKITEYIVSIVTATRPASNRAQHSGASKAAAAKDAEGLYRYVSFGASPRASIALYRCSRILALFSGRXFVSPDDVKAXAYPALRXRIVLFYEAEGDGLDADTVITRILSHVPIP

SEQ ID NO: 37415 - DNA, 939 bp, Unknown
  Obtained from environmental sample
  misc_feature (1)..(939): n is a, c, g, or t
atgggagaggccaacccatccaagctaagccgcgaggattggaacacgctccgagccaaaaccggcaaccagcgcctgctcggcatggactactactcgggcgggcacctcacccacggttaccgccacaacgtctccgcccagatgttcgacgcgtacagctacggcgtgaacaaggagaccggcctcctcgactacgacgaaatcgagcgtatggccctggagatcaagccgctgatactccttgccggatacagcgcctacccccgaaaggtcaacttcgcccgtatgcgcgaaatcgccgacaaagccggggccgtcttcatggtggacatggcgcacttcgccggattagtggccggcaaggtgctcaccggcgaattcgaccccgtggcgcacgcccacgtggtcacaaccacgacccacaagaccctgcgcggcccgcgcggcggcatagtgctctgcaacgaggagttcgcggaaagcgtggacaaaggctgcccgctggtcatgggcggccccctaggccacgtcatggccgcgaaagccgtcgccctcacggaggcaaacgccccggcgtttaggaagtacgccgcgtcaatagtgaaaaacgccgacgccatgagcaaatattgcgtagccgagggaatgacgatagccaccggcggcacagaaaaccacctattccttatagacgtcacccccttcggcctgacagggccgccaagccgagagcgccctgcgcgaatgcggcataaccctgaaccgcaactccctgccctacgacaaaaacggcccttggtacacaagcggcctgagaataggaaccccggcggcgacgacgctcggcatgggcgacaaagagatgaaagagatcgccgccgtgataaaatcagtcctggcaaacaccaaaccggagacggtcacagagggcgataa

SEQ ID NO: 37416 - protein, 312 aa, Unknown
  Obtained from environmental sample
  DOMAIN (3)...(298): Serine hydroxymethyltransferase
  misc_feature (1)..(312): Xaa is any amino acid
MGEANPSKLSREDWNTLRAKTGNQRLLGMDYYSGGHLTHGYRHNVSAQMFDAYSYGVNKETGLLDYDEIERMALEIKPLILLAGYSAYPRKVNFARMREIADKAGAVFMVDMAHFAGLVAGKVLTGEFDPVAHAHVVTTTTHKTLRGPRGGIVLCNEEFAESVDKGCPLVMGGPLGHVMAAKAVALTEANAPAFRKYAASIVKNADAMSKYCVAEGMTIATGGTENHLFLIDVTPFGLTGPPSRERPARMRHNPEPQLPALRQKRPLVHKRPENRNPGGDDARHGRQRDERDRRRDKISPGKHQTGDGHRGR

SEQ ID NO: 37417 - DNA, 645 bp, Unknown
  Obtained from environmental sample
  misc_feature (1)..(645): n is a, c, g, or t
ttgccaggactgattttatcacggcggcgatctctttcatctctttgtcgcccatgccgagcgtcgtcgccgccggggttcctattctcaggccgcttgtgtaccaagggccgtttttgtcgtagggcagggagttgcggttcagggttatgccgcattcgcgcagggcgctctcggcttggcggccctgtcaggccgaagggggtgacgtctataaggaataggtggttttctgtgccgccggtggctatcgtcattccctcggctacgcaatatttgctcatggcgtcggcgtttttcactattgacgcggcgtacttcctaaacgccggggcgtttgcctccgtgagggcgacggctttcgcggccatgacgtggcctagggggccgcccatgaccagcgggcagcctttgtccacgctttccgcgaactcctcgttgcagagcactatgccgccgcgcgggccgcgcagggtcttgtgggtcgtggttgtgaccacgtgggcgtgcgccacggggtcgaattcgccggtgagcaccttgccggccactaatccggcgaagtgcgccatgtccaccatgaagacggccccggctttgtcggcgatttcgcgcatacgggcgaagttgacctttcgggggtag

SEQ ID NO: 37418 - protein, 214 aa, Unknown
  Obtained from environmental sample
  misc_feature (1)..(214): Xaa is any amino acid
MPGLILSRRRSLSSLCRPCRASSPPGFLFSGRLCTKGRFCRRAGSCGSGLCRIRAGRSRLGGPVRPKGVTSIRNRWFSVPPVAIVIPSATQYLLMASAFFTIDAAYFLNAGAFASVRATAFAAMTWPRGPPMTSGQPLSTLSANSSLQSTMPPRGPRRVLWVVVVTTWACATGSNSPVSTLPATNPAKCAMSTMKTAPALSAISRIRAKLTFRG

SEQ ID NO: 37419 - DNA, 546 bp, Unknown
  Obtained from environmental sample
  misc_feature (1)..(546): n is a, c, g, or t
ttggaacacgctccgagccaaaaccggcaaccagcgcctgctcggcatggactactactcgggcgggcacctcacccacggttaccgccacaacgtctccgcccagatgttcgacgcgtacagctacggcgtgaacaaggagaccggcctcctcgactacgacgaaatcgagcgtatggccctggagatcaagccgctgatactccttgccggatacagcgcctacccccgaaaggtcaacttcgcccgtatgcgcgaaatcgccgacaaagccggggccgtcttcatggtggacatggcgcacttcgccggattagtggccggcaaggtgctcaccggcgaattcgaccccgtggcgcacgcccacgtggtcacaaccacgacccacaagaccctgcgcggcccgcgcggcggcatagtgctctgcaacgaggagttcgcggaaagcgtggacaaaggctgcccgctggtcatgggcggccccctaggccacgtcatggccgcgaaagccgtcgccctcacggaggcaaacgccccggcgtttag

SEQ ID NO: 37420 - protein, 181 aa, Unknown
  Obtained from environmental sample
  misc_feature (1)..(181): Xaa is any amino acid
MEHAPSQNRQPAPARHGLLLGRAPHPRLPPQRLRPDVRRVQLRREQGDRPPRLRRNRAYGPGDQAADTPCRIQRLPPKGQLRPYARNRRQSRGRLHGGHGALRRISGRQGAHRRIRPRGARPRGHNHDPQDPARPARRHSALQRGVRGKRGQRLPAGHGRPPRPRHGRESRRPHGGKRPGV

SEQ ID NO: 37421 - DNA, 318 bp, Unknown
  Obtained from environmental sample
  misc_feature (1)..(318): n is a, c, g, or t
gtgcgccatgtccaccatgaagacggccccggctttgtcggcgatttcgcgcatacgggcgaagttgacctttcgggggtaggcgctgtatccggcaaggagtatcagcggcttgatctccagggccatacgctcgatttcgtcgtagtcgaggaggccggtctccttgttcacgccgtagctgtacgcgtcgaacatctgggcggagacgttgtggcggtaaccgtgggtgaggtgcccgcccgagtagtagtccatgccgagcaggcgctggttgccggttttggctcggagcgtgttccaatcctcgcggcttag

SEQ ID NO: 37422 - protein, 105 aa, Unknown
  Obtained from environmental sample
  misc_feature (1)..(105): Xaa is any amino acid
MRHVHHEDGPGFVGDFAHTGEVDLSGVGAVSGKEYQRLDLQGHTLDFVVVEEAGLLVHAVAVRVEHLGGDVVAVTVGEVPARVVVHAEQALVAGFGSERVPILAA

SEQ ID NO: 37423 - DNA, 573 bp, Unknown
  Obtained from environmental sample
  misc_feature (1)..(573): n is a, c, g, or t
ttgcttgccgcgagttgcgcgaatgggcaaagacggcgtttgcacttcgggcaattgcgtgtggcctacatacagtcgctcgccatcgacgcgcttgcccgcacggttgaacgccacggcctccccgtcacgttcgagccccacgaaaagcacgcgatatccttggtttgtgaaaaaacgaaaggcgcgagccgcttctttaccttgttttcaccgcgcacgatacttacggcgtggaaaaacttccttgccaagaaatgggcgcaccctcataagcgaaagggaaggaagccgctggcaaagcgcattgtcgagcttatcaggngcatgaagctggaaaaccgcttctggggtttccgccgcatcgccgacgagcttaaaaagatttcctatgacgtttcgcatacgacggtcagcaaatatgtcgcctcgttttaccgcgacggcacgctgaaacccacgggggtcatgggggacattcatcaagtcccactggcattccctgttcgcctgcgatttttttaccgcccacattttcggcttcaagcgtttctacgtcttcctcatcattga

SEQ ID NO: 37424 - protein, 190 aa, Unknown
  Obtained from environmental sample
  misc_feature (1)..(190): Xaa is any amino acid
MLAASCANGQRRRLHFGQLRVAYIQSLAIDALARTVERHGLPVTFEPHEKHAISLVCEKTKGASRFFTLFSPRTILTAWKNFLAKKWAHPHKRKGRKPLAKRIVELIRXMKLENRFWGFRRIADELKKISYDVSHTTVSKYVASFYRDGTLKPTGVMGDIHQVPLAFPVRLRFFYRPHFRLQAFLRLPHH

SEQ ID NO: 37425 - DNA, 1242 bp, Unknown
  Obtained from environmental sample
  misc_feature (1)..(1242): n is a, c, g, or t
atgtcgggcgtgtccggcgtagataatttccgccttgcgcgcgcgctggatgttgattcctgggacagctaccctcaatggaccggcacggaaaaagatattgaaaccggcgcgttattctcgttttaccacgacatgaaccgttcggctaaaggcaaaccttttatgttgatggaatccagcccttccgcgacaaactggcggcctgtggcaaaactgcaccggcccggcgtacacatgctccagtcaatacaggctgtagcgcatggggcggatacggtgcaatattttcagtttcgtaagagccgcggctccagcgaaaaattacacggcgccgtcgttgaccatgagggatcggaaaacacccgcgtcttcaacgatgtggcggaagtcggcaaacgcctcgcgggcatgagcggcattataggaacatcaaccccggcggcggtggctgtaatctacgactatcaaaaccactggatattggacgatgttaagggattgcagcggggaaataacaaatacaaagaaaccgttgtcagccattaccgcgctttctggcgtatgggcgtatcggcagatgttatcgactctgccgggaatcttgagggctatgatttggttatagcccccatgctgtatatgcttcgtccgggtattgctgaaaagattaccgcgttcgtacaggcgggcgggacttttgtcgccacttatattaccggttatgccgatgaaaatgatttatgttttcttggcggctttcccggtccgctaaaagaaattttaggcgtctggagcgaagaaattgacgcattgtatccgcaagacggtaattcgtttaactggaacggtaaagattatgatgtttttgacttttgtgaactggtgcatttacggggcgcggaaagtcttgccgtttataatagtgatttttacaagaaccgtcctgccattacagtgaaccgttatggcaagggtaaggctttttttctggcggcccgtaacggacaagatttcctcaatgatttttataaatggctcgtaatggaaacaaacataccatgtaatcttgattcacagttgcccgaaggagtcactgcgcagatgcgtagcgacggtaataccaattatatctttttaatgaatttttcaccttccgaaaaaatgatagaaactaacgacgggagtataacgctcgccccctggggagtacatataaaggaagaaaggaaattgatgtga

SEQ ID NO: 37426 - protein, 413 aa, Unknown
  Obtained from environmental sample
  DOMAIN (364)...(409): Beta-galactosidase C-terminal domain
  misc_feature (1)..(413): Xaa is any amino acid
MSGVSGVDNFRLARALDVDSWDSYPQWTGTEKDIETGALFSFYHDMNRSAKGKPFMLMESSPSATNWRPVAKLHRPGVHMLQSIQAVAHGADTVQYFQFRKSRGSSEKLHGAVVDHEGSENTRVFNDVAEVGKRLAGMSGIIGTSTPAAVAVIYDYQNHWILDDVKGLQRGNNKYKETVVSHYRAFWRMGVSADVIDSAGNLEGYDLVIAPMLYMLRPGIAEKITAFVQAGGTFVATYITGYADENDLCFLGGFPGPLKEILGVWSEEIDALYPQDGNSFNWNGKDYDVFDFCELVHLRGAESLAVYNSDFYKNRPAITVNRYGKGKAFFLAARNGQDFLNDFYKWLVMETNIPCNLDSQLPEGVTAQMRSDGNTNYIFLMNFSPSEKMIETNDGSITLAPWGVHIKEERKLM

SEQ ID NO: 37427 - DNA, 351 bp, Unknown
  Obtained from environmental sample
  misc_feature (1)..(351): n is a, c, g, or t
atgaaaaaaaatcgaaaactaaaaacgacgcagaatgacgtggcccgtcatgccggggtaacccgcagcatggtatcttatgtaatcaacggcagcgaccgttctgtcgcgcctgataccaaacaaaaaattcttaacgccatcagcgaacttgaatacaggccgaataaattcgcccaggccttaagcatgggcgaaaaaggagtttttgcggagcagaatatcggcattgtgctgtgcagcgccgaaatgttcctgcgtccgtattatgcggaaatattggcgggaattcatcaagccgcccatgaaaaaggtttcacatacggtttatacggttttttgatgaattaa

SEQ ID NO: 37428 - protein, 116 aa, Unknown
  Obtained from environmental sample
  DOMAIN (1)...(54): Helix-turn-helix
  misc_feature (1)..(116): Xaa is any amino acid
MKKNRKLKTTQNDVARHAGVTRSMVSYVINGSDRSVAPDTKQKILNAISELEYRPNKFAQALSMGEKGVFAEQNIGIVLCSAEMFLRPYYAEILAGIHQAAHEKGFTYGLYGFLMN

SEQ ID NO: 37429 - DNA, 1131 bp, Unknown
  Obtained from environmental sample
  misc_feature (1)..(1131): n is a, c, g, or t
gtgaaaacctctaagggggcaaatgaggaatataattttgctgaaaaactttcgcaaaaagcagcgggtttgcttttgctctccggtactccaatacagcttgcaccagaagcttatttttataggttaaaacttttggatagcgcacggtttcagaattgggaagaatttgaaaaaaatcaggatagctataaaaaggtagccgaggatttatctaaaatcgcgcttgattccgatgcggaaatttcgtgggaggcactgcgaaaaaacatcccaaaaaattcgcccataagttcgtggctacccataaaagcggatttatctttgaccgctgcggaatggatgaggcgcgttatagatgcccttggcaccggctcctcggtatttcgcaatacacgcaagagcgttaaaggatttcccaagaggattttgaagatgtattcccttgaaaacggaactcttcattcctggctttgctcttatgtaagcgagcataaaaaggataaagttcttctcatctgttcttcatctaagcaggttaacgagttgcttttgcttttgaacgagaagaacggcgagaataccgcagtggctttcaaagaaggggaaaactccctagaacgcgataaagctgcggcggaatggatgcaaccggatggtcctaatatattattatcgtctgaaataggctcggagggcagaaattttcagagtgcgcaacatttggtgctttttgatttgcccgaagattcctctttgctggaacagcgcattggacgtttagaccgcattgggcaaggggaagaaatttacatacatgttccgtatgtcaaaaagagcaaaacggaaatgctctacttatggtaccacgaggctctgggcatttttgaacactcattgctgggtggaggcgagatttacgccaaatttgaagacgaactgaaaagctatttggaaagccctgcaaggaagttcaataaatttgtaaaggaatttttgcctcgtggcaaaaaagagatgcttctgctgaacgaaaaaacggaaaagggcagagacaggttgctggaattcaattcgcaaaacaaaaaattctccgaagaactgctagccgaagccaaaagaatggattga

SEQ ID NO: 37430 - protein, 376 aa, Unknown
  Obtained from environmental sample
  DOMAIN (188)...(265): Helicase conserved C-terminal domain
  misc_feature (1)..(376): Xaa is any amino acid
MKTSKGANEEYNFAEKLSQKAAGLLLLSGTPIQLAPEAYFYRLKLLDSARFQNWEEFEKNQDSYKKVAEDLSKIALDSDAEISWEALRKNIPKNSPISSWLPIKADLSLTAAEWMRRVIDALGTGSSVFRNTRKSVKGFPKRILKMYSLENGTLHSWLCSYVSEHKKDKVLLICSSSKQVNELLLLLNEKNGENTAVAFKEGENSLERDKAAAEWMQPDGPNILLSSEIGSEGRNFQSAQHLVLFDLPEDSSLLEQRIGRLDRIGQGEEIYIHVPYVKKSKTEMLYLWYHEALGIFEHSLLGGGEIYAKFEDELKSYLESPARKFNKFVKEFLPRGKKEMLLLNEKTEKGRDRLLEFNSQNKKFSEELLAEAKRMD

SEQ ID NO: 37431 - DNA, 828 bp, Unknown
  Obtained from environmental sample
  misc_feature (1)..(828): n is a, c, g, or t
gtgctccggccaacgggaaacgagactccctttcttttgggcgacgaagctgaactcaccggccgcctcaaggccagcggcagtgaaggcctggatttgaaaaacctggccgccgaaggcctgggccaggccgcccgccgccttgtcgcctccggccaggccaggccgggctggcgcctggacctgaagaccgccggaacccgcactgaatggtggctggctcccgcctcctcccccccggcctcacccaggcgcctggggccccgggaagaggccctctggcgcctggcccgggaggggccggccaaacccttgagctacttcgcccactatgtccccaaccccttgccccaggcccggagcctggcggccaagggccttattgagcttaccgcccgggaagtgtatcgcgacgacccggaccgggccctggccccggccggcccggggccgcccccggttttgacggagcagcagggccgggccctggccgccttggaggcggccctggccgccggaagcggccgggagtttctgctcttcggcgtcaccggcagcggcaagaccgaagtatatctgagggccgcggccaagaccctggccgccggccgcgaggttttatggctgaccccggaaataggcctgaccctgggcttggaaggcttgttgaaaagccgcctgggcggggagcgggtggcggtgctccattccggcttgtcttcggcccagcggcatgaccagtggcggcgcatccgccgggggctggccccggtggtcctgggggcccggagcgccgtcttcgcccccctggaaaacccggcctggtag

SEQ ID NO: 37432 - protein, 275 aa, Unknown
  Obtained from environmental sample
  misc_feature (1)..(275): Xaa is any amino acid
MLRPTGNETPFLLGDEAELTGRLKASGSEGLDLKNLAAEGLGQAARRLVASGQARPGWRLDLKTAGTRTEWWLAPASSPPASPRRLGPREEALWRLAREGPAKPLSYFAHYVPNPLPQARSLAAKGLIELTAREVYRDDPDRALAPAGPGPPPVLTEQQGRALAALEAALAAGSGREFLLFGVTGSGKTEVYLRAAAKTLAAGREVLWLTPEIGLTLGLEGLLKSRLGGERVAVLHSGLSSAQRHDQWRRIRRGLAPVVLGARSAVFAPLENPAW

SEQ ID NO: 37433 - DNA, 1116 bp, Unknown
  Obtained from environmental sample
  misc_feature (1)..(1116): n is a, c, g, or t
atgctaaagtatcgtagcatcatgaacgaaaaaaaggaataccttacccgccagcttatcacctacattggcaataaacgggcattactggattttatcggcgaaggcattcaaaaagtacaaaaaaaactcagcaaaaataaattaaaaatttttgatgttttcagcggctccggcattgtcgccagatattgcaaacagtttgccgatctgcttatcgcaaatgatattgagcattattcaacagttattaaccaatgttatctgtccaatgaaaatgaaattaatattgcgcggttactcgattattaccatactattattcaacaggcgaacgacaagccggtaaagggaataattgccgaattatacgccccgcatgatgataacaatattcagcacaacgagcgggttttttacacgtcaagaaatgccatgtatattgataccgtcaggcagcttatagaaaaaatcccgcacggcgagcaaaagtattttttggctccattgctgtcggaagcgtcaatacacgcgaatacctccggcgtttttaagggtttttacaaaaacaaacaaaccggcattgggcaatttggcggcaaaaatcaggacgcgctgtcaagaattaccggggatattgtattaccgtttcccgtgttcagcaattttaattgcgaaaccatcatttacaacggcgacgcgaacgaagttatcaaaaacgcgccggaagttgatatagcgtatattgaccctccctacaatcagcacccctacggttccaattactttatgttgaatttaatactgaactatcaatatccccccagcgccagcgccgtttccggcataccccccgactggaaccgttccggttacaataaagaacaccgggctttgcagttattaaccgatcttgttatcggcgtcaaatcaaaatacgcgcttgtttcgtttaattccgagggatttattgccattgaacaaatacgcgatatgctcaacaaaataggcaaagttgaaatcatggaaataaaatacaatactttcaggggcagccggaatttaaacaaccgtgagatatatgtaaaagaatatttatttttgctggagaaatga

SEQ ID NO: 37434 - protein, 371 aa, Unknown
  Obtained from environmental sample
  DOMAIN (22)...(332): D12 class N6 adenine-specific DNA methyltransferase
  misc_feature (1)..(371): Xaa is any amino acid
MLKYRSIMNEKKEYLTRQLITYIGNKRALLDFIGEGIQKVQKKLSKNKLKIFDVFSGSGIVARYCKQFADLLIANDIEHYSTVINQCYLSNENEINIARLLDYYHTIIQQANDKPVKGIIAELYAPHDDNNIQHNERVFYTSRNAMYIDTVRQLIEKIPHGEQKYFLAPLLSEASIHANTSGVFKGFYKNKQTGIGQFGGKNQDALSRITGDIVLPFPVFSNFNCETIIYNGDANEVIKNAPEVDIAYIDPPYNQHPYGSNYFMLNLILNYQYPPSASAVSGIPPDWNRSGYNKEHRALQLLTDLVIGVKSKYALVSFNSEGFIAIEQIRDMLNKIGKVEIMEIKYNTFRGSRNLNNREIYVKEYLFLLEK

SEQ ID NO: 37435 - DNA, 378 bp, Unknown
  Obtained from environmental sample
  misc_feature (1)..(378): n is a, c, g, or t
ttgattagcctttcactcctatccacagctcatccgaagagttttcaacctcaaccggttggggcctccattccgttttaccggaacttcaccctggccatggatagatcacctggtttcgggtctgccgccgacgactcatttcgcccatttaagactcgctttcgcttcggcttcacctcacggcttaacctcgccaacaacggcaactcgcggactcattatgcaaaaggcacgcagtcagcccgtcccgaagaacatgggcctttcacagcttgtagatattcggtttcagtgtctatttcactcccccttcggggttcttttcacctttcccttacggtacttgttcactatcggtcaatcaggagtatttag

SEQ ID NO: 37436 - protein, 125 aa, Unknown
  Obtained from environmental sample
  misc_feature (1)..(125): Xaa is any amino acid
MISLSLLSTAHPKSFQPQPVGASIPFYRNFTLAMDRSPGFGSAADDSFRPFKTRFRFGFTSRLNLANNGNSRTHYAKGTQSARPEEHGPFTACRYSVSVSISLPLRGSFHLSLTVLVHYRSIRSI

SEQ ID NO: 37437 - DNA, 387 bp, Unknown
  Obtained from environmental sample
  misc_feature (1)..(387): n is a, c, g, or t
ttggggcctccattccgttttaccggaacttcaccctggccatggatagatcacctggtttcgggtctgccgccgacgactcatttcgcccatttaagactcgctttcgcttcggcttcacctcacggcttaacctcgccaacaacggcaactcgcggactcattatgcaaaaggcacgcagtcagcccgtcccgaagaacatgggcctttcacagcttgtagatattcggtttcagtgtctatttcactcccccttcggggttcttttcacctttcccttacggtacttgttcactatcggtcaatcaggagtatttagtcttggaggatgggccccccgtattcagacggaatttcacgtgttccgccctactctcggacattga

SEQ ID NO: 37438 - protein, 128 aa, Unknown
  Obtained from environmental sample
  misc_feature (1)..(128): Xaa is any amino acid
MGPPFRFTGTSPWPWIDHLVSGLPPTTHFAHLRLAFASASPHGLTSPTTATRGLIMQKARSQPVPKNMGLSQLVDIRFQCLFHSPFGVLFTFPLRYLFTIGQSGVFSLGGWAPRIQTEFHVFRPTLGH

SEQ ID NO: 37439 - DNA, 552 bp, Unknown
  Obtained from environmental sample
  misc_feature (1)..(552): n is a, c, g, or t
gtgattctggacataatgcttccgggtatggacggcctcaaaacccttaaaagaatccgggaaaataaaaaccttcaaaacctgcccgttatcctgtgcaccgcgcgcggcgaggaagccgatattatcgcgggtcttgaactgggagccgatgattatgtggttaagccgtacagcccccgcgtattggcggccaggatacgggcgggcctcaggcggaaagaggctgcttcttcacagggtgaaggttcccaaaaaaaaatattccggcatggcaaaatcagtctggatattgaccggcatacggttcttctggaagaaaaacccctcgatcttttccctactgaattcgcgattcttgtccagtttatgagcaaccccgatattgttttttcccgccaaagacttatcaccgccatacgcgggaacgattatccggtaacggatcgttccatcgacgtgcagataatgggactgagaaaaaaactgggggactcaggcgatatgatagaaactatccggggcatcggctaccggttcaaaacagaatga

SEQ ID NO: 37440 - protein, 183 aa, Unknown
  Obtained from environmental sample
  DOMAIN (1)...(68): Response regulator receiver domain
  misc_feature (1)..(183): Xaa is any amino acid
MILDIMLPGMDGLKTLKRIRENKNLQNLPVILCTARGEEADIIAGLELGADDYVVKPYSPRVLAARIRAGLRRKEAASSQGEGSQKKIFRHGKISLDIDRHTVLLEEKPLDLFPTEFAILVQFMSNPDIVFSRQRLITAIRGNDYPVTDRSIDVQIMGLRKKLGDSGDMIETIRGIGYRFKTE

SEQ ID NO: 37441 - DNA, 603 bp, Unknown
  Obtained from environmental sample
  misc_feature (1)..(603): n is a, c, g, or t
atgttaaagtacgcaatcgaattttttggcgaaatggcccagcgttacggttcgtatccaaacgtgatatacgaaatttgcaatgagccgaacgggcaggatgtaacctggggcggggcgatcaagccttacgctgaagcagttatcgccgagatccggaagtacgatccggacaatataatcattgtgggaacgcccacctggagccaggacgttgataaagcggcggaagaccctatacgaagctccgcaaacataatgtataccctccatttttatgccggaacccacggcgatgaactccggaacaaggcgaaaaccgccattgacaagggtctgccgctctttgttaccgaatgtggcacctcccaggccacaggcggtggcggggtctacgaggaaaagtatttggagtggctttccttccttaaaaaaaaccaaatctcgtgggtaaactggtctttgaccaataagggggaagattcgggaattctggtaatgaacgcggacagggaaggcaaaggcggctggacggataaccagctatcccaatcgggtaaatttatcaggaaaatactccgaaacgaggtaaaagttaaataa

SEQ ID NO: 37442 - protein, 200 aa, Unknown
  Obtained from environmental sample
  DOMAIN (1)...(163): Cellulase (glycosyl hydrolase family 5)
  misc_feature (1)..(200): Xaa is any amino acid
MLKYAIEFFGEMAQRYGSYPNVIYEICNEPNGQDVTWGGAIKPYAEAVIAEIRKYDPDNIIIVGTPTWSQDVDKAAEDPIRSSANIMYTLHFYAGTHGDELRNKAKTAIDKGLPLFVTECGTSQATGGGGVYEEKYLEWLSFLKKNQISWVNWSLTNKGEDSGILVMNADREGKGGWTDNQLSQSGKFIRKILRNEVKVK

SEQ ID NO: 37443 - DNA, 1110 bp, Unknown
  Obtained from environmental sample
  misc_feature (1)..(1110): n is a, c, g, or t
ttgacgcccgtctgccttaacatcctaaaagagctttcttcctttttgtacgacagggttatcttgtcctttagtcacgatgcgtcagagaacggggagacctgttccactggtattgtaagggatctccttataaacctaaataacattttactgtctttgaaaatagtcccgccaatggagcttttgggatcactttttattttcatattgcaagagagggtcggggaacagggatttgatatcaaccgcgagagcaacctgcttttagccaaggcagagcaatctttggccataatacaggaatttaataacaatgtacctttgactttactacttcgctgctgtacgcgggacatgacgcttacaccacatgaattgagcggcggggaagattggtatgcggtttacagggattactggaaaaaacggattgaatccctttacgccgaatacttgagggaaagccgccagagtgaactgattgaatctttcagcgttttcttaaaggacaaaccccttaaaacactggataatgcccaaacagaaacaaatccggacggaattcccgtaaaaggggcttttgccctttctttcctttacactttttattctgctgttttcatgccggatatcaattgggttctgcgccccattcttattgagggagacttccagaaaaaagaaaaccgtctggaattcaccgagggttacaataatctcataaaactggaagatgagataaaaaaattcgaatataatatttcccgttcaggagaatacggcaagcgctatttacaggcccgccaggatatgtcttcgacccccattccggttaaacgccgaaaaattcaaattataattgaagaagccgaagaagacgcaaaaacaatcctggatcagattatatttgcctcgcagactatgataaatatactaaacggctttctaggaagggatagcaaaggaagatattttccacttatcaatcttcaagcagttgccggaaagaataccgaatttatcgcaggaatgaacgaggttattaagagcttccaaacagttctaaaagtcctggatgatatagaagccatggaaatcggaagataa

SEQ ID NO: 37444 - protein, 369 aa, Unknown
  Obtained from environmental sample
  misc_feature (1)..(369): Xaa is any amino acid
MTPVCLNILKELSSFLYDRVILSFSHDASENGETCSTGIVRDLLINLNNILLSLKIVPPMELLGSLFIFILQERVGEQGFDINRESNLLLAKAEQSLAIIQEFNNNVPLTLLLRCCTRDMTLTPHELSGGEDWYAVYRDYWKKRIESLYAEYLRESRQSELIESFSVFLKDKPLKTLDNAQTETNPDGIPVKGAFALSFLYTFYSAVFMPDINWVLRPILIEGDFQKKENRLEFTEGYNNLIKLEDEIKKFEYNISRSGEYGKRYLQARQDMSSTPIPVKRRKIQIIIEEAEEDAKTILDQIIFASQTMINILNGFLGRDSKGRYFPLINLQAVAGKNTEFIAGMNEVIKSFQTVLKVLDDIEAMEIGR

SEQ ID NO: 37445 - DNA, 792 bp, Unknown
  Obtained from environmental sample
  misc_feature (1)..(792): n is a, c, g, or t
gtgaaggttgttagcgcgggggcgggcgcttcgggcaacgcgttttatccggggggcgcgactgttaccatatcggcggggacgctggcgaacattcatcaatttaaggagtggacgacagagagcgacagcgtgacattcgccgacgcggagagttctactactacgttcattatgcccgcgaacggtgtgacggtgacggcgaattttctgtataacggttcgtgcgattatgtcgtgataggcggcgtgacgtggatgaggaagaatctgaatgttgagacgttgagcgggtcgtggtgttatggcaacagttcagacagttgcaagaagtacggcaggttgtacgattgggaaacggcgatgacggtgtgcccgacggggtggcacttgcctaccaaagaggagtgggaggcgttgattatggccgtaggaggttacaatacggctggtaaggcgctgaaagcaacaagcggttggtgtttcgacggtggtggtacggatgattttggattttcggccctgcccggcggcatcctcagtcgcaaaatccaaccctaccaaaccccacccgactccaaattagatttcagttatggcggcggcgatggcttttggtggacggctacggaggccggtaagacctggaaggatgacgataggtttggtttttcccaaaggtattaccacatgtttatagaatgctacgaaaaccatgtgaattttggctggggctcacttgactggaatgatataggacattcggtacgttgcgttaaagatattcgctag

SEQ ID NO: 37446 - protein, 263 aa, Unknown
  Obtained from environmental sample
  misc_feature (1)..(263): Xaa is any amino acid
MKVVSAGAGASGNAFYPGGATVTISAGTLANIHQFKEWTTESDSVTFADAESSTTTFIMPANGVTVTANFLYNGSCDYVVIGGVTWMRKNLNVETLSGSWCYGNSSDSCKKYGRLYDWETAMTVCPTGWHLPTKEEWEALIMAVGGYNTAGKALKATSGWCFDGGGTDDFGFSALPGGILSRKIQPYQTPPDSKLDFSYGGGDGFWWTATEAGKTWKDDDRFGFSQRYYHMFIECYENHVNFGWGSLDWNDIGHSVRCVKDIR

SEQ ID NO: 37447 - DNA, 1203 bp, Unknown
  Obtained from environmental sample
  misc_feature (1)..(1203): n is a, c, g, or t
atggcgagtgctggttttccaactgtcggatcgcgctatgctcttgtaatgggtaacagcgcttaccgtcatgtggaaattcttccgaacacggtgaacgacgcgacaagcgttgccaaaaaacttacggcgatgggttataaagttgatatggtgttcgacagcgacttggcgggcatgaacagggcgataagcgcgtggatacgcctgctctccgcagacagggcaagcgaaggttttttatggtatgccggacacggaatgcaggtatccggggaaaattatcttttaccgattgatataaacgctgaagacgaagctggcgttgtctacggttcttatccgttaggaagaattcttctctctttggaacagaccgcaaagaacaaactcaatgtaatagtgctggatgcctgccgcgacaatccttttaaaaatcttccgggcgcaagccgcggagtttcccgaggctttgttaccgttgaacatccgcctcaggatatattcgttatgttttccacttctcccggaacaaccgccgcagacggtgacagaggaaagaacagtccttttgccgaagcttttctaaaatacatggactctgacgagatacttcccgtaatggcgggacttgtaacgcgcgaaacaatgcgtttaacagacggcaaacagcggccttatcagaacggcagtatagtgagtgagatatactattctctctcaggcggcgcgtcttcgcgcggacaacctgccggagccggcggcgcttctcttgccgctgcgtcccccgaacaaacgtcttccgccgcaataccttctaagacaatggttcttatccccgccggaacttttacaatgggcagtcccgtaatagaacgtgacagggatccgcttggggaaaccatacatcgagtcaatatgagcgccttttacatgtcctcaaaagaattaagcgtcggcgagttccgccgttttgttgaagatacaaactatgttaccacggccgaagccgaagaaggggcgcaagcctacgatgaagcgaaaaacgaatgggttttccgcgtcggggcaaactggcgtaatcccggtttcaggcagggagaggatcatcctgtagtttgcgtcagctggtttgatgcggtgaagtactgtaactggctttccgtcaaagaaggacttaaacctgcgtatctatgccggtaa

SEQ ID NO: 37448 - protein, 400 aa, Unknown
  Obtained from environmental sample
  DOMAIN (272)...(400): Domain of unknown function (DUF323)
  misc_feature (1)..(400): Xaa is any amino acid
MASAGFPTVGSRYALVMGNSAYRHVEILPNTVNDATSVAKKLTAMGYKVDMVFDSDLAGMNRAISAWIRLLSADRASEGFLWYAGHGMQVSGENYLLPIDINAEDEAGVVYGSYPLGRILLSLEQTAKNKLNVIVLDACRDNPFKNLPGASRGVSRGFVTVEHPPQDIFVMFSTSPGTTAADGDRGKNSPFAEAFLKYMDSDEILPVMAGLVTRETMRLTDGKQRPYQNGSIVSEIYYSLSGGASSRGQPAGAGGASLAAASPEQTSSAAIPSKTMVLIPAGTFTMGSPVIERDRDPLGETIHRVNMSAFYMSSKELSVGEFRRFVEDTNYVTTAEAEEGAQAYDEAKNEWVFRVGANWRNPGFRQGEDHPVVCVSWFDAVKYCNWLSVKEGLKPAYLCR

SEQ ID NO: 37449 - DNA, 459 bp, Unknown
  Obtained from environmental sample
  misc_feature (1)..(459): n is a, c, g, or t
atgaagattaaagtaaagcaaccccatcctaaaagcggtatcgccgttgtcaacagcataatcggcgagggagcgcgctttcgcggtgattttgagctgagcggtctgctccgcatagacggcgcctttgagggaaatatcgaaaacgcgggcaaagttctggttggccgccatggttccgccattgtgccggaaatccgggcgcaagcggtcatcgtaggcgggaaggttattggcaacataagcgcgaaagaaatggttactatcctgtccaccggctctgtggagggcgatatcacaacgccccgcctcctcgccgaggagggagttgtgatcaacgggcgtatcaccgtattctccgcccccaaaaaggaagccgaaaattccgcgcgcattcaggaagagatcgaacgcgcgcgccgtgagctggactctattccgcagcccgaaggaaattga

SEQ ID NO: 37450 - protein, 152 aa, Unknown
  Obtained from environmental sample
  DOMAIN (9)...(122): Protein of unknown function, DUF583
  misc_feature (1)..(152): Xaa is any amino acid
MKIKVKQPHPKSGIAVVNSIIGEGARFRGDFELSGLLRIDGAFEGNIENAGKVLVGRHGSAIVPEIRAQAVIVGGKVIGNISAKEMVTILSTGSVEGDITTPRLLAEEGVVINGRITVFSAPKKEAENSARIQEEIERARRELDSIPQPEGN

SEQ ID NO: 37451 - DNA, 1650 bp, Unknown
  Obtained from environmental sample
  misc_feature (1)..(1650): n is a, c, g, or t
atggcagaacttggaacgcagaacgcggcgcagggcgaaaacagcctgtcgccggaagcattgactctgttaaaaaatgttagagaaatgttgaatgaagaaaaatggaccagggccgccctgagcaattactcaaccggccagttcaaggaattcgattctttgctgaaggaagccagagatctgcgggtagtcgacgagatgaaaaaagactgcgacgagcatcttacccattccaagaacagcattatcgccctgtatctttccggcatgatcgccctgtcgcgccagataattgacgacgcggcgatgattaaccttgtgacgatcttcgcggataaccacaaatgggcaatcgtaaaatacctctgcgagcgcatccttgaccacggcgaatcgaaatacgcgctgcgttcccttatcgactgctgtaaaaacgaaaacaacgaggaagccctctacgggatatgggaacgccttgtaaaagtggactacgaggaagcggaactggcaaagtcccttgccgagcattatgaaaaaacgggcaataacgaagcggcggttgactactataaaaaagccctgcaccgctttatcaacaaatcgctttttgccaatgtcaaggaaatatgggaaaaactccttatctattgcccggatgacatcgacttcttctttcatgtgcagaagaaggtcgccaagaccatcagcgaggagagggccatcgacctcctgaaactcgtgtacgcctcctgcaaggatcgcgacgttgacaccgcgatagccatactgaaactttgtctgcagtacgatgaaaaagactaccccgcccgcatggaaattgttgaatgttataaaaagaaatatgccggtcacagccaactgaaagactacattcgaatttccaacctttcccaaagctaccgcaatgttcatgaggccattaccgactntgagaaacacattgcctttgacaagggaaattttgtattccaccgcacctggggagtgggcagaatagtgggcattcagggcgatgagattaaaattgattttgccaaaaaacgcggtcataccatgtcacttaaaatggcggtggaggccctgcagactctggcaaaagatcatatatgggtgctcaaggccacctggaaaaaagaaacgcttctggaaaatgtaaaaaaggatattccctggacgctgcaaacaatcataaaaagttttgggaattcctgcgacaccaaacgaataaaagcggagctttgtcccggcgtgctttcagaaaaagaatggtcatcatggaatgccaaagcgagagacatcctcaaatccgacccggtttttggcgtaagcccggacaatatcgacatctttactgtccgtgaccgtcagataaacgtctcggaaaaactctacaacgaattcaaggccgaacggaatttctttgaccgcgccgctaccatccgcagtttcgtcaatcaaaaagacgccgaactggattctgaatactttgccgaaatgttttcatacctcacttcttttctgaaaacttcaaaccagacaggcgagcagtcaatagcggctttcctcctgatcaaggaactggcggttaaatatcctcaccgggggcaatctcccgcccggccataa

SEQ ID NO: 37452 - protein, 549 aa, Unknown
  Obtained from environmental sample
  misc_feature (1)..(549): Xaa is any amino acid
MAELGTQNAAQGENSLSPEALTLLKNVREMLNEEKWTRAALSNYSTGQFKEFDSLLKEARDLRVVDEMKKDCDEHLTHSKNSIIALYLSGMIALSRQIIDDAAMINLVTIFADNHKWAIVKYLCERILDHGESKYALRSLIDCCKNENNEEALYGIWERLVKVDYEEAELAKSLAEHYEKTGNNEAAVDYYKKALHRFINKSLFANVKEIWEKLLIYCPDDIDFFFHVQKKVAKTISEERAIDLLKLVYASCKDRDVDTAIAILKLCLQYDEKDYPARMEIVECYKKKYAGHSQLKDYIRISNLSQSYRNVHEAITDXEKHIAFDKGNFVFHRTWGVGRIVGIQGDEIKIDFAKKRGHTMSLKMAVEALQTLAKDHIWVLKATWKKETLLENVKKDIPWTLQTIIKSFGNSCDTKRIKAELCPGVLSEKEWSSWNAKARDILKSDPVFGVSPDNIDIFTVRDRQINVSEKLYNEFKAERNFFDRAATIRSFVNQKDAELDSEYFAEMFSYLTSFLKTSNQTGEQSIAAFLLIKELAVKYPHRGQSPARP

SEQ ID NO: 37453 - DNA, 1017 bp, Unknown
  Obtained from environmental sample
  misc_feature (1)..(1017): n is a, c, g, or t
ttgccacacctacgtcaacattttcatctacacctgcttctgcacggcgagttacgtgggcggcgtangtctttggggcggcacgatggccgtcaggcggcgggactacgaggaactcggggtggaaaaaagcgtggaggcgcgcccgcgtgggacgacatgagcctctcccacgcttgtactcaaaagcaaacgcaaagcagtggtggtcgcggcctgcgtcacggagaccgacgacctcctgccgacggtcggcgcgaccgtctcgtggttcgagcgccaaatcatgtacctcaaatcgtaccagcggcttctgtgggtcttcccggccctgcctatggcgctgctcgtagggtacctgatgctgcttttgccntacgccgccgtcgcgccgctcatttcggcggagcccaccactttcctcgaacaaggcggcggcgcgtcgctgatattcatactcggacacaccgccgtggccatgctctacccagcgctggggaaaatgccgtacttcggacgcttcctgctcttccaacccgttatgaggctggcgcagatgttatcctatttcagaacgtggataacaaggactatcacttgggccgggataaaatacaagctggatttccggggcgatgttcaaaagatagacaggggaggcggttaatgcgctgcgccgtcttcgcctccggcaacggaagcaactttcaagccctgttagaccgcaaatccgccggcggcctaacccgcgccgacttcgtcctaatgatcggcaacaacagcaaagccggagccttcgacaaagcgcgagcgcacggcatacccgccctgcacatagccccctcgcacttttccggcgaagaggcctacgccgaacacctctccgccgctctaaacgacgcccgggttgaactgatagcgctggccggatacatgaaaaaactcccccccgccatagtatccctataccgcaaccgaatcctgaacatccaccccgcccgctctcggccgatctga

SEQ ID NO: 37454 - protein, 338 aa, Unknown
  Obtained from environmental sample
  DOMAIN (223)...(338): Formyl transferase
  misc_feature (1)..(338): Xaa is any amino acid
MPHLRQHFHLHLLLHGELRGRRXSLGRHDGRQAAGLRGTRGGKKRGGAPAWDDMSLSHACTQKQTQSSGGRGLRHGDRRPPADGRRDRLVVRAPNHVPQIVPAASVGLPGPAYGAARRVPDAAFAXRRRRAAHFGGAHHFPRTRRRRVADIHTRTHRRGHALPSAGENAVLRTLPALPTRYEAGADVILFQNVDNKDYHLGRDKIQAGFPGRCSKDRQGRRLMRCAVFASGNGSNFQALLDRKSAGGLTRADFVLMIGNNSKAGAFDKARAHGIPALHIAPSHFSGEEAYAEHLSAALNDARVELIALAGYMKKLPPAIVSLYRNRILNIHPARSRPI

SEQ ID NO: 37455 - DNA, 849 bp, Unknown
  Obtained from environmental sample
  misc_feature (1)..(849): n is a, c, g, or t
ttgatcgcgacagatttcagtcatggaagggcgcgatttatcgcgccattccgtctaaaaatgattttaaagaatttgactttaaaaacgaagagtcattattatttggaggcatttatcttgatagcaacagccgttttaggcaaaagcgcgataacccaaatagtcttcgctctcggtatgctgatggtgataggcgatttcgccgccacgctcttcacaatagcctaccagcggtttatctataagaagcgccgcgcctcctacgacccgtcttacaccccgccgtgcagtatcgtggtgccgtgcaagggcgtccccaagaatttcggcgacaacctccgcggattcctgcaattcgattatccggattacgaagtcatatacgttacggagagcgccgacgacgccgccgttccggagattaaaaagatactctcggaggatagtcgcgccaagtttaccgtggcgggcttgtccgagcggtgcgcgcagaagaaccacaatatgctggcggcgctgcgcgaggcgcgttccgactcggaggtctttgtcttcgccgattcggacatcaagcccggggttcattggctcagggatatcgttttgccgctacagagcgacaaggtctccgtgacgaccggtttccgctggctcctttcggctaagggcacgataggggagctttgccacacctacgtcaacattttcatctacacctgcttctgcacggcgagttacgtgggcggcgtangtctttggggcggcacgatggccgtcaggcggcgggactacgaggaactcggggtggaaaaaagcgtggaggcgcgcccgcgtgggacgacatga

SEQ ID NO: 37456 - protein, 282 aa, Unknown
  Obtained from environmental sample
  DOMAIN (98)...(269): Glycosyl transferase family 2
  misc_feature (1)..(282): Xaa is any amino acid
MIATDFSHGRARFIAPFRLKMILKNLTLKTKSHYYLEAFILIATAVLGKSAITQIVFALGMLMVIGDFAATLFTIAYQRFIYKKRRASYDPSYTPPCSIVVPCKGVPKNFGDNLRGFLQFDYPDYEVIYVTESADDAAVPEIKKILSEDSRAKFTVAGLSERCAQKNHNMLAALREARSDSEVFVFADSDIKPGVHWLRDIVLPLQSDKVSVTTGFRWLLSAKGTIGELCHTYVNIFIYTCFCTASYVGGVXLWGGTMAVRRRDYEELGVEKSVEARPRGTT

SEQ ID NO: 37457 - DNA, 597 bp, Unknown
  Obtained from environmental sample
  misc_feature (1)..(597): n is a, c, g, or t
atggacgcgataagccctcaccgtgaatatgaggcgcttgccaaggaaataagcgacgcgtctgaaaaagaacagcagtaccgcanagatttacagcaaagggagcgtcttcttgttgaattagacgaacagattaaacagaacacagcccttatccagcagttggaagttgaacatgaagaacaaagaaaaaaagtagaagcggaaatctcggacaaacaaaaacaaatagatacgcttaagaaaaaagaggcgaaacttaccgaaaatcttgatccggaaatggtttttaaatttgagcgcattatcaacaacaagatgggcataggaattgtcgccattaaaggcagcgtctgtatgggctgtcacatgattcttcccaaacaattcgcgaacaaggtgcaccagggagaggaatttgttttctgcccgtattgttcgcgtattctttattacgaagaatccgaagaaggcgaggaagatttctttaacaccgacgacatgggcgccctttccgatcttgacgaaacggaagaagaagaggaagaagaagacgaagaagaggaagagattgtaaatatcgattccgaagaatag

SEQ ID NO: 37458 - protein, 198 aa, Unknown
  Obtained from environmental sample
  DOMAIN (1)...(154): Uncharacterized ACR, COG1579
  misc_feature (1)..(198): Xaa is any amino acid
MDAISPHREYEALAKEISDASEKEQQYRXDLQQRERLLVELDEQIKQNTALIQQLEVEHEEQRKKVEAEISDKQKQIDTLKKKEAKLTENLDPEMVFKFERIINNKMGIGIVAIKGSVCMGCHMILPKQFANKVHQGEEFVFCPYCSRILYYEESEEGEEDFFNTDDMGALSDLDETEEEEEEEDEEEEEIVNIDSEE

SEQ ID NO: 37459 - DNA, 849 bp, Unknown
  Obtained from environmental sample
  misc_feature (1)..(849): n is a, c, g, or t
gtgcaatccgccgaaatacaggggcagtttaaccgagatataattaaaagccgccgattggtagaattacaggaaaattgcgggtcaacatttgcccaaaattcatacccgacaggtaatgctacggcaacccctgctgttacttcttccactcaacccgcccccagaccgtcagatacaacgccttcccctgttggagggacagccgcgaaagatgcaccgccagtaaatactgtttcttcaggtacagctattatacagtatgaaaaattttctgaattgagaaaattggaaatagatagtgtaaatactgcgccaaaatttccttttatatttactcaagacggtaatggaatcatagggtttgatagcaaaagtgaaagtaattacataagaatatggaatgtggagacggggaaagtagaaagaaatattcgcgtgttttccagttccggttctcataatgtcaggccgggatatattgctatcagccctgacggaacaaagcttataacggatagctattatgccgcaaagggtaatgtactgctttgggacatagcttcaggagcgtaccgggaatgtacagggcatacaaaacaaataaaggcgcttgcatttagccccgacgggaaatactttgtatccgcatccgtggataaaacaataaaaaaatggagtgttgaaacaggacaggaaatacagagtattgaatgtgatttaggatcagatgccgcatttagtccggaactgcgacaagttgttacagcaacctccggtagtaatatcaggatattggacgcagccaacggaaaaaacaattcggaacatctccaggcatgggtataa

SEQ ID NO: 37460 - protein, 282 aa, Unknown
  Obtained from environmental sample
  DOMAIN (190)...(227): WD domain, G-beta repeat
  misc_feature (1)..(282): Xaa is any amino acid
MQSAEIQGQFNRDIIKSRRLVELQENCGSTFAQNSYPTGNATATPAVTSSTQPAPRPSDTTPSPVGGTAAKDAPPVNTVSSGTAIIQYEKFSELRKLEIDSVNTAPKFPFIFTQDGNGIIGFDSKSESNYIRIWNVETGKVERNIRVFSSSGSHNVRPGYIAISPDGTKLITDSYYAAKGNVLLWDIASGAYRECTGHTKQIKALAFSPDGKYFVSASVDKTIKKWSVETGQEIQSIECDLGSDAAFSPELRQVVTATSGSNIRILDAANGKNNSEHLQAWV

SEQ ID NO: 37461 - DNA, 582 bp, Unknown
  Obtained from environmental sample
  misc_feature (1)..(582): n is a, c, g, or t
ttgatttctcttttgttagcttcaaaagaagttcganagatatatgaagaaaaatataaagataaaataacgattataaataaacgtagtgcgaattctttagtcggaatttttaccacaagtttgtatggacgaagctcacaatataatcggttagtatatcaaaacaatttattatatcaatcaataggtcaaacaaagggatatggtacattacatttatcgaaagagaccatacaagaaatggtgcgttttctaaaaagtaaaaatatttatattaatcatagatttggagatggtccaagctgggtaatgagagtaatagcaaccgctggagaactggttgggtttgatagtgactttttattgaggcattcattcaaaagaggtattttatttcttccacttgcttccaattatcatgattttttaaatgataaaccagtagagccaatatattatgattacaaaaaagaagagcttatttatcattggaaaaaacgatggcttgaaaataggaaaaaaaacgaaaaagtgataaataatgtactttcattcaaaagtaaagaattttttatataa

SEQ ID NO: 37462 - protein, 193 aa, Unknown
  Obtained from environmental sample
  misc_feature (1)..(193): Xaa is any amino acid
MISLLLASKEVRXIYEEKYKDKITIINKRSANSLVGIFTTSLYGRSSQYNRLVYQNNLLYQSIGQTKGYGTLHLSKETIQEMVRFLKSKNIYINHRFGDGPSWVMRVIATAGELVGFDSDFLLRHSFKRGILFLPLASNYHDFLNDKPVEPIYYDYKKEELIYHWKKRWLENRKKNEKVINNVLSFKSKEFFI

SEQ ID NO: 37463 - DNA, 429 bp, Unknown
  Obtained from environmental sample
  misc_feature (1)..(429): n is a, c, g, or t
gtgaaaaatatgtatttaagcgaaatttggtctattctcaaaacaagtcatggaaacgctattttattaaagccaaaagacaaggatgtcgccgtccccatttttatcggcactctggaaatgcagtcaattttaattggaaaagaaggggtcagcctgtccagaccgcatacccatgacctttttttaaatatgcttgcccatgtaaaccttttagttaaaaaagtcgaggtttacgagttaaaagacgatgtttttcacgctcgtcttgtaataacaggcggcgaatatacaaaagaaaacccacttattcttgacagccgtccttccgacgcttttgccattgcaacccgtaaaaaatgccctatctatatggcctcttccattattgaacaaaccggctgttcctttgtctttttttataaatga

SEQ ID NO: 37464 - protein, 142 aa, Unknown
  Obtained from environmental sample
  DOMAIN (4)...(139): Uncharacterised ACR, COG1259
  misc_feature (1)..(142): Xaa is any amino acid
MKNMYLSEIWSILKTSHGNAILLKPKDKDVAVPIFIGTLEMQSILIGKEGVSLSRPHTHDLFLNMLAHVNLLVKKVEVYELKDDVFHARLVITGGEYTKENPLILDSRPSDAFAIATRKKCPIYMASSIIEQTGCSFVFFYK

SEQ ID NO: 37465 - DNA, 378 bp, Unknown
  Obtained from environmental sample
  misc_feature (1)..(378): n is a, c, g, or t
atgatgggagtggggtttcaaatactggacgatgtaaaaaatttaacgacgggaatcccgggaaaaaagcgaggagacgatgtagtcgaagggaaaaaaagcctccctgttcttttgtttcttcataaataccctgaaaaacgagagcgaattttttattattttcatgaagcaaagagaaatggcacaaacgccccggaagtggaagattttatagatatgctttcctcgtcaggcgtttttgcggaagcggaagaaaaaggacggtcctttttaaagcaaacacaggatatatttaactctaatgtattttcaacctgcaatatagataaaaacgtatttgcccttcttgatggttttatagaattaattagttag

SEQ ID NO: 37466 - protein, 125 aa, Unknown
  Obtained from environmental sample
  misc_feature (1)..(125): Xaa is any amino acid
MMGVGFQILDDVKNLTTGIPGKKRGDDVVEGKKSLPVLLFLHKYPEKRERIFYYFHEAKRNGTNAPEVEDFIDMLSSSGVFAEAEEKGRSFLKQTQDIFNSNVFSTCNIDKNVFALLDGFIELIS

SEQ ID NO: 37467 - DNA, 825 bp, Unknown
  Obtained from environmental sample
  misc_feature (1)..(825): n is a, c, g, or t
atgtttcaatgtggcgttggggtatccattatggagtatgtaagagacaggcggctggcttatgccgcttcggaattaagttcgggacgcaaactgctcagcatagcggttgattatggatttgaaacacattcgggattttcaaaagccttccgccgttattttgggtgtccgcctgagatataccgcgcttatgcgacattcgatgttccgaagatccccgatctttcaaagtccaatcaatttgtttccgaatttattatagagccaaaaataattgcaaagaaaacatcctttaaaatagccggttacgcttttaaagtaaaactgccgataaatatttcgtctcttgtaccgcattatttagatcctcaaagtcctgttgttgatgttgatgacggaagaaaacctcttaataaacttcaagaactatgggaagaatgtaggactgacaaaagattggaaaaattacacaaggaaccgtttcttaaatttcatgcggaatacggagcttgttttttcaaagataatgatgaagataaatccgtatatcttatcggagtagaagcaaaatcaagggtaactattccttttgagtatgatatttatacgataccagaagccttgtttgcggttttttcaacacctccgtccaatgaggataattttccttcaatacttaaagacacatggaagtttattttctctgaatggtttcccaattcaggttatgcatttgacgacaattcaattgcttttgaactttacgacgaacgcagtatgggtaatacgggaaaaatctgcgatatatgcatcccaatgtaa

SEQ ID NO: 37468 - protein, 274 aa, Unknown
  Obtained from environmental sample
  DOMAIN (127)...(273): Bacterial transcription activator, effector binding domain
  misc_feature (1)..(274): Xaa is any amino acid
MFQCGVGVSIMEYVRDRRLAYAASELSSGRKLLSIAVDYGFETHSGFSKAFRRYFGCPPEIYRAYATFDVPKIPDLSKSNQFVSEFIIEPKIIAKKTSFKIAGYAFKVKLPINISSLVPHYLDPQSPVVDVDDGRKPLNKLQELWEECRTDKRLEKLHKEPFLKFHAEYGACFFKDNDEDKSVYLIGVEAKSRVTIPFEYDIYTIPEALFAVFSTPPSNEDNFPSILKDTWKFIFSEWFPNSGYAFDDNSIAFELYDERSMGNTGKICDICIPM

SEQ ID NO: 37469 - DNA, 789 bp, Unknown
  Obtained from environmental sample
  misc_feature (1)..(789): n is a, c, g, or t
ttgatggcgagaatcttgcagccttacacgcttgcggcgggtgtcgcccatgagataaagaatccgttaggggctatttcgattcacctccagcttatgcggaaagccctcaataaaaggtataataccgcagggcaagccctgcagcaggagcctgccgcaacagatgcgttaatcgataaatatttttccgtgttaaacgaagaggtagaccggctgaatggcatagttatcgacttcctatttgccgtgcgccccatgtccctggaactcagtgagggagacctcaacgcgctgattagtgatcttggcgaatttatccgcgctgaactggagcagtccaatatacggctcctgcttgaactggatgataaactcccccccgtgcttttcgacgagcgttatatgaaacaggttttgctcaacctgattaaaaacgcccaagctgcaatgccaaggggggggctgttaaccattgccacctttgggacggacagcgagatacggataagcgtatgcgacacaggcacggggattagccaggaaaaccttaaaaaaatatttgaaccttatttcacgacaaaagacaacggcactggtcttgggctgacccttgtatataaaattatcagggagcatcagggcgagatgtcggttgattcaagagaaggagagggaacggatttcgagatcatccttcccgtctatcagaaagaacagcgtttgatcaattatacaggtgcaaagtatacaggtgcaaagtattcaggagcaaagaatgaagtttaa

SEQ ID NO: 37470 - protein, 262 aa, Unknown
  Obtained from environmental sample
  DOMAIN (7)...(89): His Kinase A (phosphoacceptor) domain
  misc_feature (1)..(262): Xaa is any amino acid
MMARILQPYTLAAGVAHEIKNPLGAISIHLQLMRKALNKRYNTAGQALQQEPAATDALIDKYFSVLNEEVDRLNGIVIDFLFAVRPMSLELSEGDLNALISDLGEFIRAELEQSNIRLLLELDDKLPPVLFDERYMKQVLLNLIKNAQAAMPRGGLLTIATFGTDSEIRISVCDTGTGISQENLKKIFEPYFTTKDNGTGLGLTLVYKIIREHQGEMSVDSREGEGTDFEIILPVYQKEQRLINYTGAKYTGAKYSGAKNEV

SEQ ID NO: 37471 - DNA, 615 bp, Unknown
  Obtained from environmental sample
  misc_feature (1)..(615): n is a, c, g, or t
atgcccgccgttatgatttcgcgcaacgcggcgatcttcggaagcggcctgcttatatggcacgtccacgccgacggcagaaacatagacccgtcgcgcggcttcccgcttatatcgcttattcaggccgacgggcgcaatgacttagagagaaaggtaaacagcggcgacgccggcgaccccttccgcgcccggcacaacaacgccttcagcaaaacgaccacccccgccgccgtctactacgacggcgttttgtccaatataaacataaacgggataagcgacagcggcgccgtgatgacctttaaggtaggcacatcaagcggagatccggtttcacccacgccaacagtagcaaccgccccaacaagcccgctatcctacggcatcaaagcctccccgtcaggaaacataaccttcaccctcccgaccgcaggccgcgtaacaataaaagcctacaacgcccgcggcgtacagacagcgacgttattcgatggaatgaaaaacagcggtactcataatataaacgccaaaacaatgggacagggcctatatataataaagatgaaaagcgggggatactctaaagaagttagggttcgcagtgttaagtaa

SEQ ID NO: 37472 - protein, 204 aa, Unknown
  Obtained from environmental sample
  SIGNAL (1)...(24)
  misc_feature (1)..(204): Xaa is any amino acid
MPAVMISRNAAIFGSGLLIWHVHADGRNIDPSRGFPLISLIQADGRNDLERKVNSGDAGDPFRARHNNAFSKTTTPAAVYYDGVLSNININGISDSGAVMTFKVGTSSGDPVSPTPTVATAPTSPLSYGIKASPSGNITFTLPTAGRVTIKAYNARGVQTATLFDGMKNSGTHNINAKTMGQGLYIIKMKSGGYSKEVRVRSVK

SEQ ID NO: 37473 - DNA, 615 bp, Unknown
  Obtained from environmental sample
  misc_feature (1)..(615): n is a, c, g, or t
gtgctccacctgacgcactacgtggtgcacccgcttatgcttatgcttgccatactcaccatgccggtgctcttcttcgtaaagataaagctcgcgcccatctggatggcgctagtcatagcctgcatgattctggcgacaagcggcccctccaccatgtacatggtctcccagcacttcttagggaagaaggtgcgcaaacaattgttccttataccggctatgatgctcataggcaccggtttagccgtaaacaacggcaaggcggttatagaggccctcctgaaaatcgactcgcccttccaccgcacgccgaagaaggggcaggctaagatgagggccggatacaagccgataaaagacgttacctgcatattcgagattttccttggcctgtattgcttcacaagtttaaagatattcatgggctacacaaacttcttagtctccccgttcttggcgctatacgcctcagggttcttgttcgtaggcatcctgtcgatagcccacttccgccggcctgaagtgatcgacatgaagttgctgccgtcgagggttccgactgtaatgaagaccctgtgtttgatgttgtcgctgtctctaatcttcatttga

SEQ ID NO: 37474 - protein, 204 aa, Unknown
  Obtained from environmental sample
  misc_feature (1)..(204): Xaa is any amino acid
MLHLTHYVVHPLMLMLAILTMPVLFFVKIKLAPIWMALVIACMILATSGPSTMYMVSQHFLGKKVRKQLFLIPAMMLIGTGLAVNNGKAVIEALLKIDSPFHRTPKKGQAKMRAGYKPIKDVTCIFEIFLGLYCFTSLKIFMGYTNFLVSPFLALYASGFLFVGILSIAHFRRPEVIDMKLLPSRVPTVMKTLCLMLSLSLIFI

SEQ ID NO: 37475 - DNA, 432 bp, Unknown
  Obtained from environmental sample
  misc_feature (1)..(432): n is a, c, g, or t
atgcgcggcggcaaaatcttcgtccacggcaacgcggggtacagaaccggcatacacatgaaggagtacaaagacaagaagccggtgatcgtaataggcggccgggtgggcagctttttgggcgagtatctcgccggcgggctgataaccgtgctcggcataaattgcggcgacgtcccggtgggcaacttcacggggacgggcatgcacggcggcaaaatcttcataaggacggataaagagctgtcgaacctgccggagcaggtcgtggtagagaacgcatccggcgaggatttgaaggagatagagccccacgtctcggagttcgccggctacttcggcgcggacgcggcggcgcttttgaaagacaagttttacgttctgaggccgaacgcgaagaatccgtataagcagttgtatacggcgaattag

SEQ ID NO: 37476 - protein, 143 aa, Unknown
  Obtained from environmental sample
  DOMAIN (1)...(113): GXGXG motif
  misc_feature (1)..(143): Xaa is any amino acid
MRGGKIFVHGNAGYRTGIHMKEYKDKKPVIVIGGRVGSFLGEYLAGGLITVLGINCGDVPVGNFTGTGMHGGKIFIRTDKELSNLPEQVVVENASGEDLKEIEPHVSEFAGYFGADAAALLKDKFYVLRPNAKNPYKQLYTAN

SEQ ID NO: 37477 - DNA, 507 bp, Unknown
  Obtained from environmental sample
  misc_feature (1)..(507): n is a, c, g, or t
ttgttgataaagccgaatgctccactcggagacgacaacgaaccgacattcaccgcgccggccaatgtgccggacatagcgtgttactatgccggattcggcgcaatctgcgaagtcacgatgttgaccgggcgcgaccaatggtataacgagggacaacccgtaatgcgccatttacgttcatttgagcaggcgaacggcaaacacaaaaattattgtctgttcgtagcgccgcgacttcaccccgataccctaaacacgttttggacggcggtcaaacacggatatgaaggccggcgtcagaagattgtcccgatcactattaccggactgattaatattcttcaagcggtccgaaacgccaaaatgacgagccggctgttcaaaaaagaagatattcagaggctgtatgacagttgcgtaaaattaaaaggtgtgcccgattcaacaaaatggtcggaacatatcaaccgcgcaattgattcctgggcgtcgacgttgacatga

SEQ ID NO: 37478 - protein, 168 aa, Unknown
  Obtained from environmental sample
  misc_feature (1)..(168): Xaa is any amino acid
MLIKPNAPLGDDNEPTFTAPANVPDIACYYAGFGAICEVTMLTGRDQWYNEGQPVMRHLRSFEQANGKHKNYCLFVAPRLHPDTLNTFWTAVKHGYEGRRQKIVPITITGLINILQAVRNAKMTSRLFKKEDIQRLYDSCVKLKGVPDSTKWSEHINRAIDSWASTLT

SEQ ID NO: 37479 - DNA, 336 bp, Unknown
  Obtained from environmental sample
  misc_feature (1)..(336): n is a, c, g, or t
atgggccgctgcctcctcctgccccagaaccgcaccgaggccggcgaccgccggctggccgccttggccagcctgaccgacgggctggaactggccgaactggacctggaaatgcgcgggcccggagaacgcctgggccttaggcagacgggctggccggccctgacctacgcccgcctgccgagggatctggcccgccttacccgggcccacggcctggccgccgacatctgggcccggagagacgagcctccctggccggagatactggagcgcttaagcgagatcggcctggggcggaaggcgcttgaatattccggccttaagccggattga

SEQ ID NO: 37480 - protein, 111 aa, Unknown
  Obtained from environmental sample
  misc_feature (1)..(111): Xaa is any amino acid
MGRCLLLPQNRTEAGDRRLAALASLTDGLELAELDLEMRGPGERLGLRQTGWPALTYARLPRDLARLTRAHGLAADIWARRDEPPWPEILERLSEIGLGRKALEYSGLKPD

SEQ ID NO: 37481 - DNA, 381 bp, Unknown
  Obtained from environmental sample
  misc_feature (1)..(381): n is a, c, g, or t
atgaaacggataattttaaaaccgggcgaggaggagcgcgtcattctggggcacccctgggtgtacggcaacgagattgatcgagtgctggaaggcaaagagccggccaaacttgttccgggcgaatgcgccgatgtcgaaagcagccgtaaaaattatctgggcagggctttagttaatcccaactcgaaaattaccgcgcggctgtacagcccctccaaagagggaatcgacaaaggtttttttagcgccgtatccgtgaagcgatactcaggcgtacgtctttccgcgacctttcccgcgaatcggcccggctggttttcgccgaggctgattttctgcccggccttatcatcgaccgttttaccggctggccgttag

SEQ ID NO: 37482 - protein, 126 aa, Unknown
  Obtained from environmental sample
  misc_feature (1)..(126): Xaa is any amino acid
MKRIILKPGEEERVILGHPWVYGNEIDRVLEGKEPAKLVPGECADVESSRKNYLGRALVNPNSKITARLYSPSKEGIDKGFFSAVSVKRYSGVRLSATFPANRPGWFSPRLIFCPALSSTVLPAGR

SEQ ID NO: 37483 - DNA, 459 bp, Unknown
  Obtained from environmental sample
  misc_feature (1)..(459): n is a, c, g, or t
atggactgccgccgtgaaatgataatagaagcgctggaagaggtattagccgcaaattatggttctcctgacggcattattgaaaaatccggcgcacatgtccgcacactggaaggcctttccccgcgggaaggtttgattaagggaaccttcccctcaggcggcatagtaatttttgaaaatgacctgccctttatcgtggatttgccggaaggtcaaaagaccggattttttttggatcagcgggacaaccgcctgttggcgggcagatacgccgccatgctccgcagggaaacgccgatgaaacagaatgcgtatactcgacgcctgttcctacaccggcgcttttggcatcacgcactgcgtgcgggcgaaaaagcaatggttacaatgctggacaccttcgcggcggcgctggaaggggcccaaaaaaacgccgcgcttaacggcgtttgctga

SEQ ID NO: 37484 - protein, 152 aa, Unknown
  Obtained from environmental sample
  misc_feature (1)..(152): Xaa is any amino acid
MDCRREMIIEALEEVLAANYGSPDGIIEKSGAHVRTLEGLSPREGLIKGTFPSGGIVIFENDLPFIVDLPEGQKTGFFLDQRDNRLLAGRYAAMLRRETPMKQNAYTRRLFLHRRFWHHALRAGEKAMVTMLDTFAAALEGAQKNAALNGVC

SEQ ID NO: 37485 - DNA, 828 bp, Unknown
  Obtained from environmental sample
  misc_feature (1)..(828): n is a, c, g, or t
atgatggccgagaatcgacgacaacggaacatttaccggggccaggactcagattgcgtaacaatcgccggggaggacgattggggaaaaagtttccgcgccgaaacaaaagcgcgccctcttgtctggtcattaaagcgcgacatacattcggcgctgggcaatgggcaaagcggcggctgtattgattcaagcgggcgcggcatcgcgcgtcttttcaaccgggaaggaataaacgatgaaattacagaattggttcccagccaagtacttactcccggcagtcatcaaaaaataaatatgctctgcgcggcacttgcagttttctcttttggcggaaaagcggagagtatccgcggcgctctttcaactttccccggcatagaacaccgccttgaatttttccatgaatccgcaggaatacgctgctacaacgacagcgccgccaccattcccgaagccgccgccgcctgcatcgaagcgttaaccgatccttccgtagcacggggaggattagtccttgttacaggcggcaccgacaaaaaccttgatttttccccactcgcaaacgccgctaaaaaagcaaaaacaatcatcctgcttgaaggcacaggcagcgcaaaactcattcccttattacgcgaaaacggcgtctcttacaacggcccctttgatgacctggacaaagccgtccgctgcgcgattgagaatgcgtccggcgcggatattgtcgcgctctctccggggtgcgcgagttttgggatgtttttgaatgagtttgatcggggaaggaagtggaaggagtctgttctgcgatttgctaagtga

SEQ ID NO: 37486 - protein, 275 aa, Unknown
  Obtained from environmental sample
  DOMAIN (128)...(211): Mur ligase family, glutamate ligase domain
  misc_feature (1)..(275): Xaa is any amino acid
MMAENRRQRNIYRGQDSDCVTIAGEDDWGKSFRAETKARPLVWSLKRDIHSALGNGQSGGCIDSSGRGIARLFNREGINDEITELVPSQVLTPGSHQKINMLCAALAVFSFGGKAESIRGALSTFPGIEHRLEFFHESAGIRCYNDSAATIPEAAAACIEALTDPSVARGGLVLVTGGTDKNLDFSPLANAAKKAKTIILLEGTGSAKLIPLLRENGVSYNGPFDDLDKAVRCAIENASGADIVALSPGCASFGMFLNEFDRGRKWKESVLRFAK

SEQ ID NO: 37487 - DNA, 432 bp, Unknown
  Obtained from environmental sample
  misc_feature (1)..(432): n is a, c, g, or t
ttgatcagatcggccgaggagtcgccctgcgcgccaagtttccttgttttcaacgggaatcctatcggcgtccgcgaaggcggaatgctggaaactccgctgcatgaaattgaaattgaatgtcttccgaaggatcttcctgaaagaatcgagattgatatttccggccttaaggcaaatcaatccatgcatgtcagggatattcccctcgccgcaggagttaaacttcatacgaacccggatcaggttttcgcgttggttaaattcgctaaggttgaagctgccgctccgaccgccgctgatgccgccgctgctgatgccgccgccgctactgccgccggagccgctactgccgcaggcgccgccggggacaaaaaagccgctcctgctgcgggagacaaaaaggctcctggcgccggggagaaaaaataa

SEQ ID NO: 37488 - protein, 143 aa, Unknown
  Obtained from environmental sample
  misc_feature (1)..(143): Xaa is any amino acid
MIRSAEESPCAPSFLVFNGNPIGVREGGMLETPLHEIEIECLPKDLPERIEIDISGLKANQSMHVRDIPLAAGVKLHTNPDQVFALVKFAKVEAAAPTAADAAAADAAAATAAGAATAAGAAGDKKAAPAAGDKKAPGAGEKK

SEQ ID NO: 37489 - DNA, 732 bp, Unknown
  Obtained from environmental sample
  misc_feature (1)..(732): n is a, c, g, or t
atggctttgcttaccgcgctgcactcccttagaagcggcggcattatcggaaaagacgcgcttttttgcctccacgttgaacatggtcttcgcccggtggaagaaagcctgggcgacgccaaatttgtccttgaattttgcaaaaacaacggtattgaatatcacattgaaaatattccgcccggcaaaataaccgcttttgcacggcgaagaggaattggcatagaagccgccgcccgcttttttcgccatagggcgttttcaaaagaagccaatcggttaggtgacaaaacgcttattttacttgcacacacaaaaaacgatcttttggaaaccgcgttgatgcgtattctgcgcggcgccggctgcgcgggtcttgccgccatgcccgtaaaacgcgggcgtcttattcgcccgttgttaaaaatgacgcgcgcagacgttatagagtacctgaaaacaaaaaacatcagttggcgcgaagattccaccaatatcgatgaaaaataccttcgcaaccgtatacggcgcgctcttattccgttgttaaacagatcatttccttcatgggaaagcggaattttcggcttggctganacccagtcatttacggccgccttcatagccggtgaggctgataaacgcataaaatggcaggaaattgcacgtaacgccgattctcctgtttctgtctttacagaagagaaaacttttttattcaagaccaaataa

SEQ ID NO: 37490 - protein, 243 aa, Unknown
  Obtained from environmental sample
  DOMAIN (1)...(200): PP-loop family
  misc_feature (1)..(243): Xaa is any amino acid
MALLTALHSLRSGGIIGKDALFCLHVEHGLRPVEESLGDAKFVLEFCKNNGIEYHIENIPPGKITAFARRRGIGIEAAARFFRHRAFSKEANRLGDKTLILLAHTKNDLLETALMRILRGAGCAGLAAMPVKRGRLIRPLLKMTRADVIEYLKTKNISWREDSTNIDEKYLRNRIRRALIPLLNRSFPSWESGIFGLAXTQSFTAAFIAGEADKRIKWQEIARNADSPVSVFTEEKTFLFKTK

SEQ ID NO: 37491 - DNA, 549 bp, Unknown
  Obtained from environmental sample
  misc_feature (1)..(549): n is a, c, g, or t
ttgtgttctttgtacctttgtgatctttgtgtgaaaatcttatactataaaccaatgtcacggacagcggtctactcagctttagttctcaggaaccggccatcgggagaatctaatagcgaagttactctgctcacggcagaagaaggtataatcaaggctactgtgttcggcggggcaaagagtaagttacgcgctcattgtgcgccgtataattccggtcaggtttggatttaccgcgacaagtcaaaagaatacgcgaaaatcagtgactttgacgttcattcgtggagagcgggtcttagagaactctacgaaagaaccatgtcggcggcggctgtagcggatactatactctcctctcacggcggaggcggcgaatggggaactgctctaaacatggcgatagaaacactggatacgcttgaaagcgcanacgaggaattatgcgcaagattactgattcacttcctatggcgatgggcgggctttttgggaatacagccacatttggaaaactgcgccgcctgcggtaaagacgcccggtaa

SEQ ID NO: 37492 - protein, 182 aa, Unknown
  Obtained from environmental sample
  misc_feature (1)..(182): Xaa is any amino acid
MCSLYLCDLCVKILYYKPMSRTAVYSALVLRNRPSGESNSEVTLLTAEEGIIKATVFGGAKSKLRAHCAPYNSGQVWIYRDKSKEYAKISDFDVHSWRAGLRELYERTMSAAAVADTILSSHGGGGEWGTALNMAIETLDTLESAXEELCARLLIHFLWRWAGFLGIQPHLENCAACGKDAR

SEQ ID NO: 37493 - DNA, 1188 bp, Unknown
  Obtained from environmental sample
  misc_feature (1)..(1188): n is a, c, g, or t
atgcccatatcccaagtgccaacccagcaagcaaaacggttatccacttcaaacccggaatttgacagaacgctcggcggcggaatggcacccggttcgctggttttgataggcggcgatcctggcattggaaaatccaccttggttttgcaaaccctctcaaccatagcagcggctggttgcaaaacgctttatgtgagcggtgaagagagtgcagcgcaggttaaactgagggcagagcggctcggtgcagcgggcagcgatatgctgttgctttgcgaaacctcgcttagcaaaattttggaatatgcggagcagataaaaccacaggtgatggtaatagattccatacaaacaatttacagcgaagaattgcccggcacgcccggcagcgtttctcagctccgcgaatgtgcgttgaagctgatggtttatgcaaaaaacagcggcaccgtcactatgctgatagggcacgtcacaaaagacgggcaaatagcgggaccgagaattttagaacatatagttgacaccgtggcatattttgagggtgataaaaaagggcagtatagaattttgagaaccgtgaagaatcgttttggcgcaacggatgaaatcggtgtttttgagatgacctcattcgggcttatacccgtgcagaacccatcgagggtatttttgcaagatggcgaacttttgcccggtagtgcggtaagttgcactataaaaggcagtcgcgctatgctctttgaaatacaggctttggttggcaaaagcagctatgcaatgccgcaaaaggtttccgcaggggtggagcaaaaaaaattgacaattatattagcgctttgggaacgcttgcaaaaaattcaaacgggcaactccgatgtttttgtctctgttgcaggcggccttaaattggatgacccaggaatagatttatcccttgccttagccattgtaagcaacgccatgaatataagtttaccgcctcgcagcattgtaataggcgaacttgggttgtctggggaaattcgttcggtaagctcgctcgatttgaggataaaggaagcgcagcggctaggttttgaaagaacggtagtgccagatagcgggaaaatttctggtgtgaaaggaattgagataataaaattttcaaggcttgaacaggccgttgaatggttgctccgatga

SEQ ID NO: 37494 - protein, 395 aa, Unknown
  Obtained from environmental sample
  misc_feature (1)..(395): Xaa is any amino acid
MPISQVPTQQAKRLSTSNPEFDRTLGGGMAPGSLVLIGGDPGIGKSTLVLQTLSTIAAAGCKTLYVSGEESAAQVKLRAERLGAAGSDMLLLCETSLSKILEYAEQIKPQVMVIDSIQTIYSEELPGTPGSVSQLRECALKLMVYAKNSGTVTMLIGHVTKDGQIAGPRILEHIVDTVAYFEGDKKGQYRILRTVKNRFGATDEIGVFEMTSFGLIPVQNPSRVFLQDGELLPGSAVSCTIKGSRAMLFEIQALVGKSSYAMPQKVSAGVEQKKLTIILALWERLQKIQTGNSDVFVSVAGGLKLDDPGIDLSLALAIVSNAMNISLPPRSIVIGELGLSGEIRSVSSLDLRIKEAQRLGFERTVVPDSGKISGVKGIEIIKFSRLEQAVEWLLR

SEQ ID NO: 37495 - DNA, 483 bp, Unknown
  Obtained from environmental sample
  misc_feature (1)..(483): n is a, c, g, or t
gtggtaaaaacctgcttgctgaccggggatcattttcaatccgcaaaaaaaatacaggatgctgtaggaatcgacgaaatgcaatgcgaattactgccggaacaaaaacttggctatgttgaaaaaatgatggaaagccgcaccgttacggttatcggagacggcatcaatgacgcgcttgccctgtcacaagcgcatgtaggaatagcgatgggggctatgggttctgatacggctattcaaagcgcggatattgcgctgatgaacaacaatctttccaatattccgtttgtaatcaaactggcgcagaaaacaaaaaacattatttatcaaaatattgttttagctttttccgtaagcatagttatgatttttttatcgggagccggaatcataacgcccatcatgggcgcgtttttccataacatcggcgcgtttttggtgttgataaacagcgggcgggttttgtcaaagagcaaatag

SEQ ID NO: 37496 - protein, 160 aa, Unknown
  Obtained from environmental sample
  misc_feature (1)..(160): Xaa is any amino acid
MVKTCLLTGDHFQSAKKIQDAVGIDEMQCELLPEQKLGYVEKMMESRTVTVIGDGINDALALSQAHVGIAMGAMGSDTAIQSADIALMNNNLSNIPFVIKLAQKTKNIIYQNIVLAFSVSIVMIFLSGAGIITPIMGAFFHNIGAFLVLINSGRVLSKSK

SEQ ID NO: 37497 - DNA, 822 bp, Unknown
  Obtained from environmental sample
  misc_feature (1)..(822): n is a, c, g, or t
ttgggaatcgcgctggcgataatcgccgcccaggccttgctgatctggctgctttggaaactgtttaattccatttccggcaaagtatctgaatccggcaaagacaggatcaagcctttaataattaaaaaactcaaaatcctcagcaccaaacacattattgatgtcattcttgttttgctgagaatactaaaatacgtagtaagcgggttccttctgtttcttaccataccaatagagttcagcctgttcccggaaaccaggcatctcgcgacgaccatttttggctacattcttaaccccattaaggatattgtcatcggggctgtcagatatattccgaatttatttaccattattgtcattgttgttattacgcattatgtgattaagtttcttaaatttttttccacccagattgccagggggaaactggtgttgcacggattttatgccgactgggcggaaccgactttcaagattttacaggtgctgctgtgggcatttactgtcgcgattgtgtacccgtatctccccggttcagagtccagggtattccagggggtctcggtatttgtgggtcttatcttcacccttagctcgtcaagcgccatcggcaacctggtagcggggctggtaatcacctatatgcggccattcaaaataggcgaccgcgtccagattaaggaaaccaccggctttgtagtggaaaaaaacctgatggtggtgcgtattaaaacccataaaaacgaaaatgttactttcccgaatatgctcatacttggctccagcataaccaactacaatacctcttccgaatga

SEQ ID NO: 37498 - protein, 273 aa, Unknown
  Obtained from environmental sample
  DOMAIN (160)...(273): Mechanosensitive ion channel
  misc_feature (1)..(273): Xaa is any amino acid
MGIALAIIAAQALLIWLLWKLFNSISGKVSESGKDRIKPLIIKKLKILSTKHIIDVILVLLRILKYVVSGFLLFLTIPIEFSLFPETRHLATTIFGYILNPIKDIVIGAVRYIPNLFTIIVIVVITHYVIKFLKFFSTQIARGKLVLHGFYADWAEPTFKILQVLLWAFTVAIVYPYLPGSESRVFQGVSVFVGLIFTLSSSSAIGNLVAGLVITYMRPFKIGDRVQIKETTGFVVEKNLMVVRIKTHKNENVTFPNMLILGSSITNYNTSSE

SEQ ID NO: 37499 - DNA, 942 bp, Unknown
  Obtained from environmental sample
  misc_feature (1)..(942): n is a, c, g, or t
gtgttaaatttttccagggccgtgccggagagttcgtccatcattcccgcgaactggccgcccgggccggtcatagactgcaacgccttctccagatcagaaaaaccaattttgccctgcgccgccaatttgcgcacgccttcttctgacgttcctaattcctttgccagttgcttgagaaccgggatgccttgctgctggaagcttagcaaatcgcggctggtcaattttccctgcgcgcgcgcgtgctcaaatacccccgatacggttccgaaagatttgccggttcccgccgccacattgcccagcatttgtatggtttgcgtggcgtacgcggtatcatgccccatgttcaccatcgcccggcccagatcaaacacttcgtcggcggaaagtccgggcgaagcgccgagcctgcgccagtcctcaaaaaccgccgtggcttcatcggcggagccgagcatgtttttcagcgacagttttaatttctcgttttctccggcgagcttgaccgccgcgattccggcgccgccgacaaccgccgagatgattgtcgccttttttgaaactgaatccagcgcgtctccaagggattttgcttcctgttccgcgccgccaacgctacagccgagttttttaaaattatcgatagcctgggcgacctctgcttctaccagcacccgaagctcatctgttacctgcatttttttcctcgtccctttccttcaggagatccaactcaacgtcaaacagttccacaagatccacaagtccggccggttcgttcatccagtccgggccgtgcggccagccgtaccgttttatttttacccacaggttataagccatataaaattcatgggtgaggtatttttttacctcaccctgtcgtataacacggtcacggagcaatattttttcacgcgcgaacccgcgtcttaa

SEQ ID NO: 37500 - protein, 313 aa, Unknown
  Obtained from environmental sample
  misc_feature (1)..(313): Xaa is any amino acid
MLNFSRAVPESSSIIPANWPPGPVIDCNAFSRSEKPILPCAANLRTPSSDVPNSFASCLRTGMPCCWKLSKSRLVNFPCARACSNTPDTVPKDLPVPAATLPSICMVCVAYAVSCPMFTIARPRSNTSSAESPGEAPSLRQSSKTAVASSAEPSMFFSDSFNFSFSPASLTAAIPAPPTTAEMIVAFFETESSASPRDFASCSAPPTLQPSFLKLSIAWATSASTSTRSSSVTCIFFLVPFLQEIQLNVKQFHKIHKSGRFVHPVRAVRPAVPFYFYPQVISHIKFMGEVFFYLTLSYNTVTEQYFFTREPAS

SEQ ID NO: 37501 - DNA, 777 bp, Unknown
  Obtained from environmental sample
  misc_feature (1)..(777): n is a, c, g, or t
atgcaggtaacagatgagcttcgggtgctggtagaagcagaggtcgcccaggctatcgataattttaaaaaactcggctgtagcgttggcggcgcggaacaggaagcaaaatcccttggagacgcgctggattcagtttcaaaaaaggcgacaatcatctcggcggttgtcggcggcgccggaatcgcggcggtcaagctcgccggagaaaacgagaaattaaaactgtcgctgaaaaacatgctcggctccgccgatgaagccacggcggtttttgaggactggcgcaggctcggcgcttcgcccggactttccgccgacgaagtgtttgatctgggccgggcgatggtgaacatggggcatgataccgcgtacgccacgcaaaccatacaaatgctgggcaatgtggcggcgggaaccggcaaatctttcggaaccgtatcgggggtatttgagcacgcgcgcgcgcagggaaaattgaccagccgcgatttgctaagcttccagcagcaaggcatcccggttctcaagcaactggcaaaggaattaggaacgtcagaagaaggcgtgcgcaaattggcggcgcagggcaaaattggtttttctgatctggagaaggcgttgcagtctatgaccggcccgggcggccagttcgcgggaatgatggacgaactctccggcacggccctggaaaaatttaacaccgccgcgaatgacgcgaaacaggcgctcgcgtcattcggcgagctgatgctcccgatggctacggatttttag

SEQ ID NO: 37502 - protein, 258 aa, Unknown
  Obtained from environmental sample
  misc_feature (1)..(258): Xaa is any amino acid
MQVTDELRVLVEAEVAQAIDNFKKLGCSVGGAEQEAKSLGDALDSVSKKATIISAVVGGAGIAAVKLAGENEKLKLSLKNMLGSADEATAVFEDWRRLGASPGLSADEVFDLGRAMVNMGHDTAYATQTIQMLGNVAAGTGKSFGTVSGVFEHARAQGKLTSRDLLSFQQQGIPVLKQLAKELGTSEEGVRKLAAQGKIGFSDLEKALQSMTGPGGQFAGMMDELSGTALEKFNTAANDAKQALASFGELMLPMATDF

SEQ ID NO: 37503 - DNA, 858 bp, Unknown
  Obtained from environmental sample
  misc_feature (1)..(858): n is a, c, g, or t
atgccagagccagccattgagatgctgggtattacgaaggtttttccgggtatagtcgctaatgacagaatttttttccgggttgacaagggggagattcacgctctgttgggcgaaaacggcgcgggcaaatccaccctaatgatgattctttttgggctgtacgagcctgacggcggtaccatcaggattcgcgggaaagaggttcagatccgcagccccaatgatgccactgccctgaaaataggaatggttcatcagcattttaagcttgttcacaattttaccgttgcggaaaatatagtccttgggcttgagccttccaatcgttttggaaaccttgatctcaagactgcggaaaaacgggttgccgagatttctgcgacttacggccttgccgttgacccaaaagccaaaattgaaaatatcaccgttggaatgcagcagcgggtagagattttaaaaatactgtacagggatgcggacatcctcatctttgacgagccgactgcggttcttaccccgcaggaaattgacgagctcctttccatcttccaccgccttaaagccgaaggaaaaacaatagtctttatcacccataaattaaaggagatcaaagccgccgccgatcgctgcacggttttaaggaggggcaaatacatagacacggtcaatgttgatgaagcaaacgaggaaaacctggcggaaaaaatggtaggccgcgctgtgaatttcaggatcgacaaggagccggctaaacccggcgacacagttctgagcatcaggaatcttacggtgcttggttcccgtgtgattctcatggtcagggatctttctctctatgtacgcgcaggctag

SEQ ID NO: 37504 - protein, 285 aa, Unknown
  Obtained from environmental sample
  DOMAIN (31)...(218): ABC transporter
  misc_feature (1)..(285): Xaa is any amino acid
MPEPAIEMLGITKVFPGIVANDRIFFRVDKGEIHALLGENGAGKSTLMMILFGLYEPDGGTIRIRGKEVQIRSPNDATALKIGMVHQHFKLVHNFTVAENIVLGLEPSNRFGNLDLKTAEKRVAEISATYGLAVDPKAKIENITVGMQQRVEILKILYRDADILIFDEPTAVLTPQEIDELLSIFHRLKAEGKTIVFITHKLKEIKAAADRCTVLRRGKYIDTVNVDEANEENLAEKMVGRAVNFRIDKEPAKPGDTVLSIRNLTVLGSRVILMVRDLSLYVRAG

SEQ ID NO: 37505 - DNA, 381 bp, Unknown
  Obtained from environmental sample
  misc_feature (1)..(381): n is a, c, g, or t
atgcgaaactttccagacgagttattgaaactcctttcggagagcgtaagttacctggacagcgccgagagctcgtaccacgggtttatgaccggattgctgtcccgattgggcggctatatgatgacttccaaccgagagtgcggagacgggcgtagcgacttggtcttgtaccgcgtagacggaaagaacagtcaagcaatcatatttgagtttaaggtggccaaagaatttgacaagttgcccataacgtgtgaaaccgccctgaaacagatagaagacaagaattacgccgcctcgtgggagagggagaactataaaaacattatcaaatacggcgtcgctttctgcggcaaacggtgcgagatacgtaaaggatga

SEQ ID NO: 37506 - protein, 126 aa, Unknown
  Obtained from environmental sample
  misc_feature (1)..(126): Xaa is any amino acid
MRNFPDELLKLLSESVSYLDSAESSYHGFMTGLLSRLGGYMMTSNRECGDGRSDLVLYRVDGKNSQAIIFEFKVAKEFDKLPITCETALKQIEDKNYAASWERENYKNIIKYGVAFCGKRCEIRKG

SEQ ID NO: 37507 - DNA, 1641 bp, Unknown
  Obtained from environmental sample
  misc_feature (1)..(1641): n is a, c, g, or t
ttggaagcgcgggatacggcggagaaagagagggtttttctcacttcaaaggagattcaccgcaaattgattatgtggcctcaggcgcttaagggtactgaagaaatagcgtcattatgcggttttgacgatttatttgacggttgggtttttccggcttataaaactgccgcgttgtcagagactgcggcgcaatctgtgattgcacagttacctcagacggcgttgccgtccgccgccgatgaattacggaggcgggtttatgcgggtaacgttgaacgttacggtgaattgggggacagggaaattgggcggattgattatgaattgggcgtgattgaaaaaatgggattcccttcttattttttaattattgacgacattgtaaaaatggcttcaagaacatgcggtcgcggttcgggggcggcttccattgtttcttacggtttgggtattaccaatgtggacccgttacgccataacctgtactttgagaggtttctaaaccccaaccgtcctgatccgccagatcttgatattgatttcgcgtgggatgaacgggacgagctaataaaggctgtaattgaaaaattcggctccgattactgcgcccgtgtcgccaatcataatatgttccgttacagatcggccatgcgtgagacggcgaaggcttacggttttggagatacggaaattacgcaaattgaaagacgacttttttcaatgggtgataagtccgttacaatagaaccgctatggcgggaaatttttaccatcgcgaaaaagattgagggtttaccccgtgggcttggtatgcactgcggcggcgttgtcattacgccggaaccgatatgccgttacgctcctgtagaaaaatccgcagaggggtttccgcttttggcgtgggaaaaagaaggaacggaagcggcggggtttgttaaaattgatttgcttggcaacagaagccttgcggtaatccgggatgccgtaaaaaatgtggaatgtgaaatgaggaatgagcaattagggattaaagaaagaataagccgggctgtagacgatagggcaacgattgaggcgttggcaaggggagacagtatcggggttttttatattgaaagtccggctatgcggcaattacagaaaaaaacaaacagaggggattttgaacatattgtaattcattcctcgataatacgcccggcggccaataagtttatagcggaatatgtcaggcggcttaaaggggggaaatgggaaccgctacacccccgcctagaaaagatacttgatgaaactttcggaattttatgctatcaagaggacgtttcaaaaaccgccgtggctctggcgggatttaatgaggccgacgccgataaactgcgaaaagttatagccaagaaaacgggcggtgttaaactggcggcgtatcaaaaccaattttttgagggctgccggaataacggcgtacaagaagaaacgatacggaagatttgggaaatgatgctgtcatttgacggctatagtttctgcaaaccgcatagcgcaagttacgcaatggtgtctttccaatcggcttatttgcgggttcaccatccggcggaatttatggcggcggttttaagcaatcaagggggataa

SEQ ID NO: 37508 - protein, 546 aa, Unknown
  Obtained from environmental sample
  DOMAIN (12)...(489): Bacterial DNA polymerase III alpha subunit
  misc_feature (1)..(546): Xaa is any amino acid
MEARDTAEKERVFLTSKEIHRKLIMWPQALKGTEEIASLCGFDDLFDGWVFPAYKTAALSETAAQSVIAQLPQTALPSAADELRRRVYAGNVERYGELGDREIGRIDYELGVIEKMGFPSYFLIIDDIVKMASRTCGRGSGAASIVSYGLGITNVDPLRHNLYFERFLNPNRPDPPDLDIDFAWDERDELIKAVIEKFGSDYCARVANHNMFRYRSAMRETAKAYGFGDTEITQIERRLFSMGDKSVTIEPLWREIFTIAKKIEGLPRGLGMHCGGVVITPEPICRYAPVEKSAEGFPLLAWEKEGTEAAGFVKIDLLGNRSLAVIRDAVKNVECEMRNEQLGIKERISRAVDDRATIEALARGDSIGVFYIESPAMRQLQKKTNRGDFEHIVIHSSIIRPAANKFIAEYVRRLKGGKWEPLHPRLEKILDETFGILCYQEDVSKTAVALAGFNEADADKLRKVIAKKTGGVKLAAYQNQFFEGCRNNGVQEETIRKIWEMMLSFDGYSFCKPHSASYAMVSFQSAYLRVHHPAEFMAAVLSNQGG

SEQ ID NO: 37509 - DNA, 597 bp, Unknown
  Obtained from environmental sample
  misc_feature (1)..(597): n is a, c, g, or t
ttgggacgcctgtacttccgtaccagctatggacagaacgtgctgaaccattccagggaagtcgcggttatcgccggtatgctcgccgcagaaatcggctgtaaccgggatctgaccaaaagggcggcccttttgcacgacatcggcaagggcattgactccgactcagaccttaaccacgccgagatcggcatggatatggcccgaaaaatgggagaggatccgcggataatcaacgccataggcagccaccacaatgatattgagccgacctgcattgaggccgtgctggtgcaaatcgccgacgccatttccgcggcaaggcccggcgcccgcaaggaaaccctggacaactacattaagcggctggagaaccttgaaaacatcgcgaaggaattcaccggcgtctccaacgcgttcgcaatccaggccgggcgcgagcttcgcatcatcgtcaacaacgagactgtcagcgacgaccagtcccgtgatcttgccaaagaaatcgcaaaaaagatcgaaaacgatctgcattatcccggcaggatcaagctgaccatcatcagggagacaaggataaccgaatacgcgcgataa

SEQ ID NO: 37510 - protein, 198 aa, Unknown
  Obtained from environmental sample
  DOMAIN (14)...(107): HD domain
  misc_feature (1)..(198): Xaa is any amino acid
MGRLYFRTSYGQNVLNHSREVAVIAGMLAAEIGCNRDLTKRAALLHDIGKGIDSDSDLNHAEIGMDMARKMGEDPRIINAIGSHHNDIEPTCIEAVLVQIADAISAARPGARKETLDNYIKRLENLENIAKEFTGVSNAFAIQAGRELRIIVNNETVSDDQSRDLAKEIAKKIENDLHYPGRIKLTIIRETRITEYAR

SEQ ID NO: 37511 - DNA, 813 bp, Unknown
  Obtained from environmental sample
  misc_feature (1)..(813): n is a, c, g, or t
ttgtcccctcgggtttccggcacgacggatttccgcgtgcgcatgattcagccggcgttcagcatggacgacaaaacgaacaacgacggcgaagtcctgggcgaaatggtgcggatgtcgaaaatgcccggtatcgacgacgcgaaccttgtgatatggccggaaaccgcgtggccgtatgacgcgaattggatgacgcggctgcccgtgctgggcaaacccattgtcgtcgggacaagatacagcatgcagaacaaaatatggaacgcgcttttatacgccgacgggatgggccgcgtcaaggatatgtaccttaaattccaccttgtcccgttcggagagttccgcccgttcggcgatcttatgccgacgcccgggaattacggacgcggccccgggccgaaggttatcgggaatttcgcgcccgcgatttgctacgaggttatattttcggattcggtcgcgccgcccggcgcccgtccggatttcatattgaacattacgaacgacgcatggttcggcgaaagcggcggcccgtatcagcatctggatttggcgcggaaacaggcgatagaatccgggcttccgatcgtgcgcgcggcgtacggcggcatatccgcgattatagacgcgaacggaaaggttatcatgtcgattccgcttgggcaaagggcgattttggacggcaatgttcccgcgtcgcgcgttacattgtatcgacggattgggttgaacggaatgatgctgattattgttttattcgcccttgcgattttattgcttgcacgcaagcaaagagtgattagtggttag

SEQ ID NO: 37512 - protein, 270 aa, Unknown
  Obtained from environmental sample
  DOMAIN (12)...(169): Carbon-nitrogen hydrolase
  misc_feature (1)..(270): Xaa is any amino acid
MSPRVSGTTDFRVRMIQPAFSMDDKTNNDGEVLGEMVRMSKMPGIDDANLVIWPETAWPYDANWMTRLPVLGKPIVVGTRYSMQNKIWNALLYADGMGRVKDMYLKFHLVPFGEFRPFGDLMPTPGNYGRGPGPKVIGNFAPAICYEVIFSDSVAPPGARPDFILNITNDAWFGESGGPYQHLDLARKQAIESGLPIVRAAYGGISAIIDANGKVIMSIPLGQRAILDGNVPASRVTLYRRIGLNGMMLIIVLFALAILLLARKQRVISG

SEQ ID NO: 37513 - DNA, 726 bp, Unknown
  Obtained from environmental sample
  misc_feature (1)..(726): n is a, c, g, or t
ttgaatgaaatctttcggtttccgcccactctctttgtcaaacgtcccacatttaataattttcaggatatgtttattcttatgagtaaatcatgggttacattttcgcgttacatttttaacaccgtatttattacggttgtcggaactgtcggcttaattattgtagcttctatgggcgcgtttgttgtttcaaaatacaaattccccggttcaaaaatattttttaatggcgtaattataactcttatgttctcgggctatgtaacggcaattcccaactaccttgttatggcgcgtcttggttgggtagacacttatctttcagtaattgttcccgcatgggcaatgccgatgggattctttttattaaagcaatttattgacacaataccggatacgctgttggaagcggcaaaggtagacggcgcaaaggagtttagaatctttatatatataattctgccaatgatcaaacctgcatggcttaccgtaatgattttttccgttcagaacctttggaacgcgagggcgtccaactttatttattcggaacaattaanaacgttgccgtactcgcttggtcagattatcacaggcggcattgcccgcgccggcgtaggggccgcagtaacgctctttgtaatgatcgtgccgctggtaatgtttatattcgcgcagagcaacatcttgcagacgatggcaagctcgggaatcaaagaatga

SEQ ID NO: 37514 - protein, 241 aa, Unknown
  Obtained from environmental sample
  DOMAIN (35)...(241): Binding-protein-dependent transport system inner membrane component
  misc_feature (1)..(241): Xaa is any amino acid
MNEIFRFPPTLFVKRPTFNNFQDMFILMSKSWVTFSRYIFNTVFITVVGTVGLIIVASMGAFVVSKYKFPGSKIFFNGVIITLMFSGYVTAIPNYLVMARLGWVDTYLSVIVPAWAMPMGFFLLKQFIDTIPDTLLEAAKVDGAKEFRIFIYIILPMIKPAWLTVMIFSVQNLWNARASNFIYSEQLXTLPYSLGQIITGGIARAGVGAAVTLFVMIVPLVMFIFAQSNILQTMASSGIKE

SEQ ID NO: 37515 - DNA, 1584 bp, Unknown
  Obtained from environmental sample
  misc_feature (1)..(1584): n is a, c, g, or t
ttggcgaaatcatgggaagattcgccgcggcggaaatacgcaacagggatatgggcaagccaagcacgaacagcgatgtttaagatcatttccgcgcgggaagcggttgaatatattaaagacggcgattgcatcgccatcaattccttcctggcgctgtccaaccccgaaacgctgcacgacgctttgtatgaacggtttgcggaaaccggctctccaaaagagctgcggttgttctgcgcggcggggttcggcgcctgggatgaaaatcgttttgccgaccgttacataaaagccggcgctgtaaaggaaattatcgcgggccactacaacagcatgcccgccgccgtaaaaatggcgttagctgataaaattgaggcgtactgccttcccttaggcgtattgtctcacgtcatacgcgccgcggcgtcgggcaaagactggattttaagcgaggtaggactcggcatattctgcgacccccgcgtggacacctgcgccctgaacactatatcgaaaaaagaactcgtcgcggtgcgtgaaatggaaggcaaagaatacctcctgtaccgcacgccgaaaattgacatcgcctttattaaaggcacgtcagttgacccttatggcaatatctcttttgaaaaagagtatttgacggtggatgcgctggcaatggcgcaggcggtaaagcgaaaccagggaaaagtaatcgttcaggtggagcatgtcagccatgtattttcccgtccgcgcaacgtgataatacccggggtccttgtggacgcggtggtagtgtgtgaaacccccgttgaaacaggagaatacaatcccgcgctgtcaggcgacattcatgttcccgcgacgcacatggattattttgttaacaaaatttccaccacaaagaccaagaataaaactcacggcgatgatacagccgacattataggagaacgcgccgcgcgtgaactgcgttcaggtcatatcgtgaacatcggcatcggcattcctgaaatggtaggcatttacgcgtccagactcggcatactaaaagagattgtcaacactgtggaagccggcggcgtaggcgggcttcccgcgcccggcgtggcgtttggcgcgaccataggcgcggacatgatttccgatatggcgactcaatttgatttttacgacggcggcggccttgacatctgttttctcggcggactggaagccgacgcgcagggcaatgtgaacgcccacaaactggatggcagctacgccggaattggaggcttcgccaatattacatactccacaaaaatgattgtattctgcatgagttttaataccaaagggcttatcacctcaaaagaaaacagcaaagtaataataaaacatgaaggcgcggtgcctaaattcaaaaaacaaatttccgcgatcagtttcgccgcaaaaaacgcccttaaacgcggtcagcgggtgttatatatcaccgagcgctgcgtattcgaattaaccgaaaaaggcctgacgcttaaagaagtataccccggaatcgacgaggcccgccaaattcgcggcatgctggattttcaactgtaa

SEQ ID NO: 37516 - protein, 527 aa, Unknown
  Obtained from environmental sample
  DOMAIN (29)...(266): Coenzyme A transferase
  misc_feature (1)..(527): Xaa is any amino acid
MAKSWEDSPRRKYATGIWASQARTAMFKIISAREAVEYIKDGDCIAINSFLALSNPETLHDALYERFAETGSPKELRLFCAAGFGAWDENRFADRYIKAGAVKEIIAGHYNSMPAAVKMALADKIEAYCLPLGVLSHVIRAAASGKDWILSEVGLGIFCDPRVDTCALNTISKKELVAVREMEGKEYLLYRTPKIDIAFIKGTSVDPYGNISFEKEYLTVDALAMAQAVKRNQGKVIVQVEHVSHVFSRPRNVIIPGVLVDAVVVCETPVETGEYNPALSGDIHVPATHMDYFVNKISTTKTKNKTHGDDTADIIGERAARELRSGHIVNIGIGIPEMVGIYASRLGILKEIVNTVEAGGVGGLPAPGVAFGATIGADMISDMATQFDFYDGGGLDICFLGGLEADAQGNVNAHKLDGSYAGIGGFANITYSTKMIVFCMSFNTKGLITSKENSKVIIKHEGAVPKFKKQISAISFAAKNALKRGQRVLYITERCVFELTEKGLTLKEVYPGIDEARQIRGMLDFQL

SEQ ID NO: 37517 - DNA, 528 bp, Unknown
  Obtained from environmental sample
  misc_feature (1)..(528): n is a, c, g, or t
gtggtattcacgaaaaacgaggacgcccaccgccgtctttcaatcgcttttgaagggcgggatgtcaccaaacggtacattgccgttgtccacggccgcccttcctggcgggaaacggcctgcgatcttcccctgattcccaacggtaacaaactccaccagactataatagacaaattccagggcaaaaagtcccttacccgctttgtgctgctgggcagcgcgggtaattacagcgtaattgaagccctgccggaaacaggcagaacccaccagatacgcgttcatgccgcggccctgggccaccccgttgtctgcgactcaatgtacggaaaagccaagcccgtcatgctttcggagataaaaaggaactggcatggcgacccttatgacgaaaaaccccttttggcgcggcttggcctccatgccgccgaactcgcggcgccaacggaatccattagcctccgcgccccgcttcccagggatatgtccgccctcatcaatcaaatgaagaagctctattgttag

SEQ ID NO: 37518 - protein, 175 aa, Unknown
  Obtained from environmental sample
  DOMAIN (1)...(99): RNA pseudouridylate synthase
  misc_feature (1)..(175): Xaa is any amino acid
MVFTKNEDAHRRLSIAFEGRDVTKRYIAVVHGRPSWRETACDLPLIPNGNKLHQTIIDKFQGKKSLTRFVLLGSAGNYSVIEALPETGRTHQIRVHAAALGHPVVCDSMYGKAKPVMLSEIKRNWHGDPYDEKPLLARLGLHAAELAAPTESISLRAPLPRDMSALINQMKKLYC

SEQ ID NO: 37519 - DNA, 1227 bp, Unknown
  Obtained from environmental sample
  misc_feature (1)..(1227): n is a, c, g, or t
atggctgacagttattttgaaactgacgatataacaaaagaatacgacaaccgccttatgcggcgcattatgtcgtatttaaaaccttacaaaaaaattgttattatcacaattgccgcacttgttatttcaacacttggagaactgtatattcccgtcctgctccagcgtattattgacgacggtatactgcaaaaaaatattacatttctttatcgcggctgtgttctttatttaataatacttgtctttgtttttggctttacttttatgcaaacatggacgtcaaacctgatgacccagggcgtaatgaaagatatgcgcctcggtctttttaaaaagaccctctcccagtcaacaggctatctttcgcgccatcctgtgggaaggattgttacgcgattaacgagcgacgttcaaacaatggacgagttttttacaaccgtacttgtcgcctttttaaaagacatcgcgataatgattggcgttatcgcaaccatgtttgtactctcgccgcacatggctttaattgttcttattaccctgccgcctgtgcttgttgttacattaataagcagggtaaaagcgcgcgacgcgttcagaaggcagagaatagcctcttccaaagtattcgcgtaccttgcggaaaggcttgccggaatgcaggttgtacagcttttcaggcaggagaaaaaaagtttaaaagaatttagagagggcaatcaggagtatcttgacgcgaatcttggagagatgtatgtgtttgctacgttcagaccgatagttgaatggctttctacattaacaatggcagtcgttattgtaatcggcgcaaaaatggcgctctcgttctcgatgtcgcttggagtgttaatagcgtttatcaatctggtgcagatgttttttcagcctgtaaccgacattgccgaaaaatacacaatgcttcagtccgcgatggcgggcggggaaaaagtatttaagctgatggacacaaacgaacaaatccccgataacggaactgtagaagtaacagccgcgcgagggcatattgaatttgacaatgtgcatttttcgtataaagcgggagaagaagttttaaaggggcttacattttccgtaaagcccggagaaatggcggcgattgtcgggtacacgggggcgggcaaaactacaatcatcaatgttcttgcacgtctttgggacatgacggcggggaaatccgtctga

SEQ ID NO: 37520 - protein, 408 aa, Unknown
  Obtained from environmental sample
  DOMAIN (34)...(305): ABC transporter transmembrane region
  misc_feature (1)..(408): Xaa is any amino acid
MADSYFETDDITKEYDNRLMRRIMSYLKPYKKIVIITIAALVISTLGELYIPVLLQRIIDDGILQKNITFLYRGCVLYLIILVFVFGFTFMQTWTSNLMTQGVMKDMRLGLFKKTLSQSTGYLSRHPVGRIVTRLTSDVQTMDEFFTTVLVAFLKDIAIMIGVIATMFVLSPHMALIVLITLPPVLVVTLISRVKARDAFRRQRIASSKVFAYLAERLAGMQVVQLFRQEKKSLKEFREGNQEYLDANLGEMYVFATFRPIVEWLSTLTMAVVIVIGAKMALSFSMSLGVLIAFINLVQMFFQPVTDIAEKYTMLQSAMAGGEKVFKLMDTNEQIPDNGTVEVTAARGHIEFDNVHFSYKAGEEVLKGLTFSVKPGEMAAIVGYTGAGKTTIINVLARLWDMTAGKSV

SEQ ID NO: 37521 - DNA, 699 bp, Unknown
  Obtained from environmental sample
  misc_feature (1)..(699): n is a, c, g, or t
atgatctttcaggacccctacgcttccatgaacccacgttttaaggtgcgcgatgtgctggaagaaccgcttgtcatccataaaatccccggttcaatggctgaacacgagcagatgatcatcaaggcgcttaatgaggtcaaactcaacccaccagaagattttatcggacgttacccacacatgctttccggcgggcagagacagcgggtcgccacggcgcggacgcttatcctcaatcccatgctgctggtggcggacgaacccgtgtcgatgatcgatctttcaacccgcgccgaaattctccacatgatgagagatgttcagcgggatttgggtcttagttacctgtacatcacgcatgatctttccacagcgcggtatttcactgacaggatcgccgtaatgtatctgggccgcatcatggagctgggaaacgcagatgatctcatagacaggccgatgcacccctatacgcgcgcacttatcgaggcggttcctgaaccggaaacgggcaaggtcggcctcataaagaatttgcccatacacggcgaaataccgtcgccagccaacatcccgccaggctgtcgcttccacacgcgctgtccgcttgcaaaagctgagtgttccggcggagaggaaccggagcttcacgatcttggcaacgggcattttcacgcgtgtcggctgacagactga

SEQ ID NO: 37522 - protein, 232 aa, Unknown
  Obtained from environmental sample
  DOMAIN (1)...(139): ABC transporter
  misc_feature (1)..(232): Xaa is any amino acid
MIFQDPYASMNPRFKVRDVLEEPLVIHKIPGSMAEHEQMIIKALNEVKLNPPEDFIGRYPHMLSGGQRQRVATARTLILNPMLLVADEPVSMIDLSTRAEILHMMRDVQRDLGLSYLYITHDLSTARYFTDRIAVMYLGRIMELGNADDLIDRPMHPYTRALIEAVPEPETGKVGLIKNLPIHGEIPSPANIPPGCRFHTRCPLAKAECSGGEEPELHDLGNGHFHACRLTD

SEQ ID NO: 37523 - DNA, 810 bp, Unknown
  Obtained from environmental sample
  misc_feature (1)..(810): n is a, c, g, or t
ttgtttcccaaagatccggaaaaagcattaatcggcgtggctatggcaactgttattgcgcggattttcgaacttgtatgctgtatagtacattctctacggaataaaaatattggattctgcctgccggtacgcgacaacacccaaaaagtgcttttgtcagattatgtccactacacaagtccggtattggcgaattatgttacatatggcggcgcggtagcggcaactgtggtgatcataggtcatgtgagttcagacatggtggcagctaacgcaatcgccagtgttgtcaggaatttggctattgtggtatgcggcggtattggaaacggcggaagcgtccttgtaggtaagtatctgggctccggcgatttacaatccgctaaaaaagccggaaacaagatttacctatacgctttagttttcgggatactggcagggcttacaattttactgacaaggccgctgatattcagcatcgtcgatataaacgcaacagcgaaaggttatctgaatacaatgctcgccttttgcgccgtttactgtgtcggcaagtcagtaaattcaacgataattggcgggatattctgcgcgggcggcgattccaaatttggtttctgctgtgatgccatagtgatgtggggaattatcataccgcttggttttctatgcgcctttatatggaaggtgtctcctggtttattgtacattgcgctgtgttctgatgaatttttcaaagcacccgttgctttaatcaggtttcttaagtatcggtggttaaagaatatcacaagggatttaatataa

SEQ ID NO: 37524 - protein, 269 aa, Unknown
  Obtained from environmental sample
  DOMAIN (62)...(224): MatE
  misc_feature (1)..(269): Xaa is any amino acid
MFPKDPEKALIGVAMATVIARIFELVCCIVHSLRNKNIGFCLPVRDNTQKVLLSDYVHYTSPVLANYVTYGGAVAATVVIIGHVSSDMVAANAIASVVRNLAIVVCGGIGNGGSVLVGKYLGSGDLQSAKKAGNKIYLYALVFGILAGLTILLTRPLIFSIVDINATAKGYLNTMLAFCAVYCVGKSVNSTIIGGIFCAGGDSKFGFCCDAIVMWGIIIPLGFLCAFIWKVSPGLLYIALCSDEFFKAPVALIRFLKYRWLKNITRDLI

SEQ ID NO: 37525 - DNA, 696 bp, Unknown
  Obtained from environmental sample
  misc_feature (1)..(696): n is a, c, g, or t
ttgaaattaagagccaaatgtaaatccgtaaaagaggctctattttacgtccaaaaaaccattgaaaatgggtggagccgcgcggttttgatgaatnttctggaaaccgaccttttttccgcacaggggaaggctcttacaaacttttcccgcctattacccgaccctcaaagcgagcttgcaaaccaaattcttaaagacccctataattttgattttcttacacttacccaaaattttaaagaaaaagaacttgaagacgcactaacttcaaatatcacgaaatttttattggaacttgggcagggtttcgcttatataggcaggcagatccctttgaaaataggcgaaacggaacggtttatagatttgcttttttatcacttggaactgcgttgttttgtggtaatagagttaaaagcgggaaaatttgaagccgagcatatcggaaaacttggtttgtatatttcggcagttaatcatcaaatgaaaaaagaggctgacggaccgacaataggaatgattatctgcaaaacaaaagacagcgttgaagtgcagtattctttagaaattgtaaaccagcctattggcgtttccgagtaccggctttcaaaacttttaccggataatttgaaaagcagtctgcccagcattgaagagttggaagaacaattaaagaaaatggacgatgcttga

SEQ ID NO: 37526 - protein, 231 aa, Unknown
  Obtained from environmental sample
  DOMAIN (2)...(218): Protein of unknown function (DUF1016)
  misc_feature (1)..(231): Xaa is any amino acid
MKLRAKCKSVKEALFYVQKTIENGWSRAVLMNXLETDLFSAQGKALTNFSRLLPDPQSELANQILKDPYNFDFLTLTQNFKEKELEDALTSNITKFLLELGQGFAYIGRQIPLKIGETERFIDLLFYHLELRCFVVIELKAGKFEAEHIGKLGLYISAVNHQMKKEADGPTIGMIICKTKDSVEVQYSLEIVNQPIGVSEYRLSKLLPDNLKSSLPSIEELEEQLKKMDDA

SEQ ID NO: 37527 - DNA, 867 bp, Unknown
  Obtained from environmental sample
  misc_feature (1)..(867): n is a, c, g, or t
ttgctttgccttgcatttgctcaaaagaatgcacctaaaaatattaaacctacaaatactaaaggtactaaaggtactaaagaaacccaaataaccttagatgatattaaaggcacattcacagatttccgcgaaaaaaagaaatataaaaccctgaaattaggtggacgagtttggatggcagaggacttaaattataaaaagaacaaacttttcaattttgactccgtgaaaaaggcttgccctagcggttggcgtttgcctagcaaaaacgcttgggaagatttaaaaaaagaattaagcgaaatggatcccaaactcaaagcaaaaatcgggtggaacacacaaggcaaatggtgggctgctaccagtagcagcgtggactctatggtttactatgtggttgtaaattccggttttgggggcataaataaattaaatgagattgaaactgctaatttagctgttcgctgcattcagaatatcaaagctaaacccagtgaaaagaaaaatgacataaaattctacaataccgttaaaataggctctgggttatggatggcagaaaatttaaactataaaaccggaaaatcttggtgctatgaaaacgatgactacaactgcaatatgtatgggcgcttatacgactggaacaccgcaattaaagcatgtcccagcggttggcatttgccaacgcggcgtgaatggagcgaggtatcaatggaggagttttccgctatgctcggcggcagtttaagcggagaatatagccatacaacatctgtagatgaatacaaattcttggatatagaaaagtctggaaattggtggggcatagcggagtatgggataacgtcctcgccataa

SEQ ID NO: 37528 - protein, 288 aa, Unknown
  Obtained from environmental sample
  misc_feature (1)..(288): Xaa is any amino acid
MLCLAFAQKNAPKNIKPTNTKGTKGTKETQITLDDIKGTFTDFREKKKYKTLKLGGRVWMAEDLNYKKNKLFNFDSVKKACPSGWRLPSKNAWEDLKKELSEMDPKLKAKIGWNTQGKWWAATSSSVDSMVYYVVVNSGFGGINKLNEIETANLAVRCIQNIKAKPSEKKNDIKFYNTVKIGSGLWMAENLNYKTGKSWCYENDDYNCNMYGRLYDWNTAIKACPSGWHLPTRREWSEVSMEEFSAMLGGSLSGEYSHTTSVDEYKFLDIEKSGNWWGIAEYGITSSP

SEQ ID NO: 37529 - DNA, 894 bp, Unknown
  Obtained from environmental sample
  misc_feature (1)..(894): n is a, c, g, or t
atgttcagccgcctatgcgggaaaatctttggatttctccgagcttttgaaccgcaggttaggggcggcagattatacggcaggggaacggcagacgataaagccgcaatagtagtccatctgtctgcggcgttgatagcaaagaaaatactcggcgaaaattgccccaccttgaaatttttaattgaaggcgaagaggaatgtggcagtcctaatataaccgctctactgaaagagtgcaaaaaccttaaaagctcggttgccatcatttgcgactcctccaactgggatgaggcaacccctgcaattgtcagctcgctaaggggaatggtggctttggaaatagaggttaaatcaatggaaaagcctttgcacagcggaacttggagcggtcccattcccgatgcagcgcaagggctttcgcacatactggcttcgttaaagctgcctaaagccccgccgcttgcaaaaaacattttggaatcattcgcagaaatgtctaaaagttatggctacaaagagttgaaaaaagagggttccctgctgaacaaaacgcaaattctggtaaaagaaaaagacattttaaaatcgctttggcgggatgccaccataactgtaaccgctatggaagcgggaagcagaaaaaatgctggcaatgttttgcaaaactcggcttgggcaagggttagcataagaatcccgcccggtatggatattaaaaaagttttgggacaggtaaaaaaacagataaaagatgcttgcccttggggattaaatctctccattaaaacagagaacggaatggctactccttgggaaaacaaaaccgacacattttttttcaaaaaatgctcaatggctttgaaagaaagcctatggcaaaaaaccctttga

SEQ ID NO: 37530 - protein, 297 aa, Unknown
  Obtained from environmental sample
  DOMAIN (105)...(258): Peptidase dimerisation domain
  misc_feature (1)..(297): Xaa is any amino acid
MFSRLCGKIFGFLRAFEPQVRGGRLYGRGTADDKAAIVVHLSAALIAKKILGENCPTLKFLIEGEEECGSPNITALLKECKNLKSSVAIICDSSNWDEATPAIVSSLRGMVALEIEVKSMEKPLHSGTWSGPIPDAAQGLSHILASLKLPKAPPLAKNILESFAEMSKSYGYKELKKEGSLLNKTQILVKEKDILKSLWRDATITVTAMEAGSRKNAGNVLQNSAWARVSIRIPPGMDIKKVLGQVKKQIKDACPWGLNLSIKTENGMATPWENKTDTFFFKKCSMALKESLWQKTL

SEQ ID NO: 37531 - DNA, 624 bp, Unknown
  Obtained from environmental sample
  misc_feature (1)..(624): n is a, c, g, or t
atgattgataaatcgggggggagggtcaggttttcggttaaggcgtttcaggatttgactcatgctttgaataggagtcaatatcagattttgacttttgaatttaagaaggcgcttgagcctttgcttgacagcaatcttttagtatgcgctttgtttcagtttcccgaaagttttcattatgaaaaagaagagaggatgtatttggatttgctcttaaaggaaaccggctctgttcctgttgttgttgaaatgcgtaatgttaaatggcagaatgatcaggtttataaagccctgcgggagcgtaatacagggtggtgcataacagacagccccaacttaaaaaatctgttaaaacttgattatgtttgcacaagcgacatcgcctacatgcggtttcacgggcgcaattccgatatgtggtacaagggcgacaatgtttcccgttatgattatatgtactcggatacggaattaaaaacttttgttaatccgattttagaattgttaaagcacgcaagaattgtccagttgttctttaataatcacgcaaaaagccaggctgtggttaacgcaaaaaaaatcgaaatgttattgaaagagacgggaaaagagattaaatga

SEQ ID NO: 37532 - protein, 207 aa, Unknown
  Obtained from environmental sample
  DOMAIN (2)...(200): Protein of unknown function DUF72
  misc_feature (1)..(207): Xaa is any amino acid
MIDKSGGRVRFSVKAFQDLTHALNRSQYQILTFEFKKALEPLLDSNLLVCALFQFPESFHYEKEERMYLDLLLKETGSVPVVVEMRNVKWQNDQVYKALRERNTGWCITDSPNLKNLLKLDYVCTSDIAYMRFHGRNSDMWYKGDNVSRYDYMYSDTELKTFVNPILELLKHARIVQLFFNNHAKSQAVVNAKKIEMLLKETGKEIK

SEQ ID NO: 37533 - DNA, 936 bp, Unknown
  Obtained from environmental sample
  misc_feature (1)..(936): n is a, c, g, or t
atgatcagatcggccgaggtgctggcgttcgcgcttatggtcgctttaagttcctactttatgactgatatagtcaagcgccagttggcgtccaacgcgcatgcggcgcttaactcacttgagaccgatattaacacagacctcagagaaccaagaaccgtactgggcaaccaatccgaaggggtgcgcaatatgatcctgcggggcgcgggtaaagaagaggtgcggacatacctgaacaatatcaccgaatatataatccaaaatgaggaaaaacaactgtcgggctttgacggtattttcggcttttttgacgtattcgggggagtaatgcttgacggccggaatcgtccgccgccggataattataatcccagagaacgcccctggtacaaggaagctgtggcggcacaaggcgaaatagtatttttacatccgcataccggagcggtaaaacctacagttgtcattaccaattcgcgcggtttatttgacaatgacggaaacctgctcggcgcgattgccatggatgtagagtttaacaggatcagggaatatatcgtaaacgaggactcggaaaaattttggtttggaatcttgttaaacgaacagtatgaaataattgcccatagagaacaaagtatggaaggtacaaaatatgaagacgtaaacagcgatgctgcaaggattgtggccgaactgaaaatggggcataatgtttccgaattcagaatgagaaattatcagaatgacatgtcaatcacttttgtaaaaaaactggaaaacggctggtatttgtgcattgtaacgcccaaagaagagtatttacgggaagtcaaaagggtaanggtttatcctcattttgctgggagccgtactgtcggcaatattcagcgtcataatggttcggataataaaggaaaaactaaaaactga

SEQ ID NO: 37534 - protein, 311 aa, Unknown
  Obtained from environmental sample
  SIGNAL (1)...(22)
  misc_feature (1)..(311): Xaa is any amino acid
MIRSAEVLAFALMVALSSYFMTDIVKRQLASNAHAALNSLETDINTDLREPRTVLGNQSEGVRNMILRGAGKEEVRTYLNNITEYIIQNEEKQLSGFDGIFGFFDVFGGVMLDGRNRPPPDNYNPRERPWYKEAVAAQGEIVFLHPHTGAVKPTVVITNSRGLFDNDGNLLGAIAMDVEFNRIREYIVNEDSEKFWFGILLNEQYEIIAHREQSMEGTKYEDVNSDAARIVAELKMGHNVSEFRMRNYQNDMSITFVKKLENGWYLCIVTPKEEYLREVKRVXVYPHFAGSRTVGNIQRHNGSDNKGKTKN

SEQ ID NO: 37535 - DNA, 825 bp, Unknown
  Obtained from environmental sample
  misc_feature (1)..(825): n is a, c, g, or t
ttgctgggagccgtactgtcggcaatattcagcgtcataatggttcggataataaaggaaaaactaaaaactgacgcaaagacaaacgaagcggaaaaggcgatagtcgccaaccgcgttaaaaccaatttcctggcgaagatgagccatgaaatacgctctcccatgaacgtgattttgggcattgtcgaaatgcagcttgagaaaaaagacctgccgccggatacaatgatagctctggacagaatgcataattccggttatatgctgctcaatataatcaacgacatacttgacctttcaaaaattgaatccggtaaaatggaattggctccggttaattatgatgtcgcgggcatgatcaatgataccgtgcagattaatgtcatccgcttcgacactaaacctattcatttcactttaaaagttgatgaaagcgttccctcaacattgttcggcgacgccctgcgagttaaacagatattgaataatatcctctccaacgcgttcaagtacacggacaaaggagaggttatactgtcgatttacgccgagaaatcgctcgcttttgcgcacggatctaacaaatctgtaacgcttgttttaaacgtgagcgatacgggacatggcatgactccggaacagttagacaggctgtttgatgattacacgcggtttaatacggatggtatacgcctgattgagggcacgggtcttggcatgggcatcaccaaaaactttatcgagatgatgaatggtaagattgacgttaaaagcgaaccgggaaaaggtacggagtttaccatccggattccgcagggttag

SEQ ID NO: 37536 - protein, 274 aa, Unknown
  Obtained from environmental sample
  DOMAIN (40)...(106): His Kinase A (phosphoacceptor) domain
  misc_feature (1)..(274): Xaa is any amino acid
MLGAVLSAIFSVIMVRIIKEKLKTDAKTNEAEKAIVANRVKTNFLAKMSHEIRSPMNVILGIVEMQLEKKDLPPDTMIALDRMHNSGYMLLNIINDILDLSKIESGKMELAPVNYDVAGMINDTVQINVIRFDTKPIHFTLKVDESVPSTLFGDALRVKQILNNILSNAFKYTDKGEVILSIYAEKSLAFAHGSNKSVTLVLNVSDTGHGMTPEQLDRLFDDYTRFNTDGIRLIEGTGLGMGITKNFIEMMNGKIDVKSEPGKGTEFTIRIPQG

SEQ ID NO: 37537 - DNA, 471 bp, Unknown
  Obtained from environmental sample
  misc_feature (1)..(471): n is a, c, g, or t
ttgcagcccagcttaaaatccactcctttcagagcccggcggaacaagggggcctgctctttgtccataaaaggaatgatctcgtccatcatttctataaccgttacttctgtcccaagcgcggaaaagagtccggcaaattccacgcctataaccccgccgccgataaccgtcaagcgcttgggcacgctttcgacagccagaagtcccgtggaatccacaagccgtggattgtccttcgcgcccggtattggcggcagaacagggacagaacccgtcgacacgagaaccgtctttccctcatgctcggtatttccgttaggcgtaactaccctgacctttgcggctctttcgcctgacggcgcgctgaggatctctcccctgccgtttatcacttccacgccatatcttttcatctggctttcgatgccgccccggagtttcgttatcacttcggctttccagttttga

SEQ ID NO: 37538 - protein, 156 aa, Unknown
  Obtained from environmental sample
  misc_feature (1)..(156): Xaa is any amino acid
MQPSLKSTPFRARRNKGACSLSIKGMISSIISITVTSVPSAEKSPANSTPITPPPITVKRLGTLSTARSPVESTSRGLSFAPGIGGRTGTEPVDTRTVFPSCSVFPLGVTTLTFAALSPDGALRISPLPFITSTPYLFIWLSMPPRSFVITSAFQF

SEQ ID NO: 37539 - DNA, 1134 bp, Unknown
  Obtained from environmental sample
  misc_feature (1)..(1134): n is a, c, g, or t
gtgatcgtggtgggcgggaagaacagcgccaatacccagcgactggtacagatagcgagggggtgcggcacgcacacgcaggccgtagagaccgaggacgagatagattgggagccgctgcgcgcctgcaaaacggtgggcgtaaccgccggcgcgtccaccccgaactggatgataaagcgcgtctgcgaccacctgctgctcctgagccgtaccaaaggcaaaaactcgatgggcgcgcttatgcgcctattcgacgtaatggccaacctcaacctcttcgtatcaagcggcgccgtggcggcctactacgcctcctgcgccatacaggggataacgttctcaacggcgggcggcgtcatagcccttttctacttcatatccgtatacctatggaacagcctgacaagcatagaaaacacgctgcacttagacatctcaaagtaccggttctacaacaaataccccaaactgcttctgctcctatccggcgcaagcaccctcgccgtgctggtaaccgcgtttttgataaaccggcacactttctacctgatgctcttcgcgacggcggccggctcagcctaccacatcacattggtccccaagagcctgcgccgcctcttcccctacaagagccttaaggacatcccctcctcccgcgacctcttcgtggcgctggcgtgggccacaatcctcacctttctgccgcaaacgataggcggcacgccgaaaatcgtccccgcgacgctggccgccttcgccgtggtcttcatactgagcttcataaggtcgctcattttcgacctgcgagatatagagggcgacagaatcatgggccgcgagacgttaatcacaatcataggagagaaccgcgcccgcaaggcgttgctgataatgatatgggccggcgtgctcctgctcgcaatctccccgacagtgatgggcctaaccgcctaccgctacgccggaactctgcgctacctattccaaatccccgccttggtctacgccgcaatcttcgtccgcctaaacgccggaatccgcccaaaccactcggcgctcttctgcctattagccgacggaatcttttacttggccgcactaggagcgttcgcggctacccttatcgtttga

SEQ ID NO: 37540 - protein, 377 aa, Unknown
  Obtained from environmental sample
  DOMAIN (92)...(376): UbiA prenyltransferase family
  misc_feature (1)..(377): Xaa is any amino acid
MIVVGGKNSANTQRLVQIARGCGTHTQAVETEDEIDWEPLRACKTVGVTAGASTPNWMIKRVCDHLLLLSRTKGKNSMGALMRLFDVMANLNLFVSSGAVAAYYASCAIQGITFSTAGGVIALFYFISVYLWNSLTSIENTLHLDISKYRFYNKYPKLLLLLSGASTLAVLVTAFLINRHTFYLMLFATAAGSAYHITLVPKSLRRLFPYKSLKDIPSSRDLFVALAWATILTFLPQTIGGTPKIVPATLAAFAVVFILSFIRSLIFDLRDIEGDRIMGRETLITIIGENRARKALLIMIWAGVLLLAISPTVMGLTAYRYAGTLRYLFQIPALVYAAIFVRLNAGIRPNHSALFCLLADGIFYLAALGAFAATLIV

SEQ ID NO: 37541 - DNA, 996 bp, Unknown
  Obtained from environmental sample
  misc_feature (1)..(996): n is a, c, g, or t
atggggacggccattcaaatagggataccgcgcgatgtttctgaaactgccgaagacgctgaagctgccggagaagaaattcctgttgcggaacaaatcgaaacggataatgccccgaacccgacgagggaaaaattcagggctatgcttaaagaggggaagcttgaggacagaaccgttgagataattgttaaccagagcccccagtttccttcaattgaaatgatgggcggcagtatggaagatctggaatccagcctttccggtattgccgggtttttcggaggcggcaaaaagaaaaagcgcgtaactatcgcccgcgccagggaaatacttttcagcgaggaatccgaaaagctgatagacagggaacgcgtgagcgacgaagcccgacagagggtcgaagaaacggggatagtttttattgatgaaattgacaagatagccgttaagggcgacaggggcggagggccggatgtttccagagaaggggtgcagagggacatcctgcccatcgttgaaggcgctacggtgaacaccaagtggggcgcggtaaataccgagcacatactttttatcgctgcgggagcctttaacatcgcgaagccttcggacttaatccccgaactgcaggggcgcttcccgctcagggtagagcttgattctcttggaaaagatgattttttaagaatcctgaccgagcctaaaaacgcccttaccaagcagtatacggagcttatggctaccgagaaagttgaaatagagtttacccctgaagccattgagcgccttgccgcccttgccgctgaggtaaactcaaagcttgaaaacataggcgcccgcaggctccacacgattatggaagcccttctggaagagctttcctttgaagcgcctgacatcggccccgcgaaggtgcccatcaccgtggactatgtgaacgaaaaactcgtcaatctggtaaacgatcaggacctaggacggtacatcctgtga

SEQ ID NO: 37542 - protein, 331 aa, Unknown
  Obtained from environmental sample
  DOMAIN (57)...(217): ATPase family associated with various cellular activities (AAA)
  misc_feature (1)..(331): Xaa is any amino acid
MGTAIQIGIPRDVSETAEDAEAAGEEIPVAEQIETDNAPNPTREKFRAMLKEGKLEDRTVEIIVNQSPQFPSIEMMGGSMEDLESSLSGIAGFFGGGKKKKRVTIARAREILFSEESEKLIDRERVSDEARQRVEETGIVFIDEIDKIAVKGDRGGGPDVSREGVQRDILPIVEGATVNTKWGAVNTEHILFIAAGAFNIAKPSDLIPELQGRFPLRVELDSLGKDDFLRILTEPKNALTKQYTELMATEKVEIEFTPEAIERLAALAAEVNSKLENIGARRLHTIMEALLEELSFEAPDIGPAKVPITVDYVNEKLVNLVNDQDLGRYIL

SEQ ID NO: 37543 - DNA, 912 bp, Unknown
  Obtained from environmental sample
  misc_feature (1)..(912): n is a, c, g, or t
gtgatgggcaccttcgcggggccgatgtcaggcgcttcaaaggaaagctcttccagaagggcttccataatcgtgtggagcctgcgggcgcctatgttttcaagctttgagtttacctcagcggcaagggcggcaaggcgctcaatggcttcaggggtaaactctatttcaactttctcggtagccataagctccgtatactgcttggtaagggcgtttttaggctcggtcaggattcttaaaaaatcatcttttccaagagaatcaagctctaccctgagcgggaagcgcccctgcagttcggggattaagtccgaaggcttcgcgatgttaaaggctcccgcagcgataaaaagtatgtgctcggtatttaccgcgccccacttggtgttcaccgtagcgccttcaacgatgggcaggatgtccctctgcaccccttctctggaaacatccggccctccgcccctgtcgcccttaacggctatcttgtcaatttcatcaataaaaactatccccgtttcttcgaccctctgtcgggcttcgtcgctcacgcgttccctgtctatcagcttttcggattcctcgctgaaaagtatttccctggcgcgggcgatagttacgcgctttttctttttgccgcctccgaaaaacccggcaataccggaaaggctggattccagatcttccatactgccgcccatcatttcaattgaaggaaactgggggctctggttaacaattatctcaacggttctgtcctcaagcttcccctctttaagcatagccctgaatttttccctcgtcgggttcggggcattatccgtttcgatttgttccgcaacaggaatttcttctccggcagcttcagcgtcttcggcagtttcagaaacatcgcgcggtatccctatttga

SEQ ID NO: 37544 - protein, 303 aa, Unknown
  Obtained from environmental sample
  misc_feature (1)..(303): Xaa is any amino acid
MMGTFAGPMSGASKESSSRRASIIVWSLRAPMFSSFEFTSAARAARRSMASGVNSISTFSVAISSVYCLVRAFLGSVRILKKSSFPRESSSTLSGKRPCSSGIKSEGFAMLKAPAAIKSMCSVFTAPHLVFTVAPSTMGRMSLCTPSLETSGPPPLSPLTAILSISSIKTIPVSSTLCRASSLTRSLSISFSDSSLKSISLARAIVTRFFFLPPPKNPAIPERLDSRSSILPPIISIEGNWGLWLTIISTVLSSSFPSLSIALNFSLVGFGALSVSICSATGISSPAASASSAVSETSRGIPI

SEQ ID NO: 37545 - DNA, 426 bp, Unknown
  Obtained from environmental sample
  misc_feature (1)..(426): n is a, c, g, or t
atgaaaaaaattctcgttgacataaatataattctagattttttgaacaaacgaaatttttacgaactggcaaaacaaattatacaactttgttatgataaaaaaattcaaggttatgtttgtgctcatgaaattacaacattgtcatattttttagaaaaagacaaagaaagcgaaattgttaataaaattttgatttcaattatggatatgtttacaattatttctatagatgaaaatattttaagaagtgctttaaaatctcaaataaaagattttgaagatgctgtaatagaaatgagttctctacaaaatgatgttgattgcataatttccagaaataaagaagattttgcaaaatcaaaaattctttgtttggaaccagcagattttttagctatgattaattctaaaccattggcttga

SEQ ID NO: 37546 - protein, 141 aa, Unknown
  Obtained from environmental sample
  misc_feature (1)..(141): Xaa is any amino acid
MKKILVDINIILDFLNKRNFYELAKQIIQLCYDKKIQGYVCAHEITTLSYFLEKDKESEIVNKILISIMDMFTIISIDENILRSALKSQIKDFEDAVIEMSSLQNDVDCIISRNKEDFAKSKILCLEPADFLAMINSKPLA

SEQ ID NO: 37547 - DNA, 807 bp, Unknown
  Obtained from environmental sample
  misc_feature (1)..(807): n is a, c, g, or t
gtgatagcgcgaaacctgaaagacggcgaaaagttgacaggcgagagcggcgttctgctggtcaactacaacgcgggcacgggaaaactaaggctgtgcaaggacgacggcaacctgaacgcgtgccgttggggcgaaccggcaggaaagaaagagggcattccggtaataaaagagatatcgcgcgtaacaatggctcacggcgtgaacctatacgcgatagaactggccgaaccctcccacgtgagcctaagcgccccaacgcctgctgcggttatggcctccacagacgataaaatcggcaactaccaagagttttgggaaactctgcgttgggacataccgttgcccgccggtaaacacatcgtcggcataaagcccctcgcaagcggatcgctctccggaatcccgctgacggtgggcttctatccgataccgcaattgacggaagagaaaccgctgagaatgcagctaatggcgtcgcagaacagattggtaaaattcgagttgcagaaaaagagcaatatcggcctaggtttatcaacgcagggtcaagcagtagaagccgcgttgcttgacgcgaaatgcagggagatagcgagcggcagccaaatattcaaagagttggacaaaggcgcatactacgtgctgctctccgtaccgtcgggagcgacccaaaacggcgtgagcgtaaccgtgcgcctattcggccaagccccgccgccagtagacccgccggcggagcgtattaagcggataatcaaagacgacagagacgagagtttggattcgcgggcgagccggtaa

SEQ ID NO: 37548 - protein, 268 aa, Unknown
  Obtained from environmental sample
  misc_feature (1)..(268): Xaa is any amino acid
MIARNLKDGEKLTGESGVLLVNYNAGTGKLRLCKDDGNLNACRWGEPAGKKEGIPVIKEISRVTMAHGVNLYAIELAEPSHVSLSAPTPAAVMASTDDKIGNYQEFWETLRWDIPLPAGKHIVGIKPLASGSLSGIPLTVGFYPIPQLTEEKPLRMQLMASQNRLVKFELQKKSNIGLGLSTQGQAVEAALLDAKCREIASGSQIFKELDKGAYYVLLSVPSGATQNGVSVTVRLFGQAPPPVDPPAERIKRIIKDDRDESLDSRASR

SEQ ID NO: 37549 - DNA, 675 bp, Unknown
  Obtained from environmental sample
  misc_feature (1)..(675): n is a, c, g, or t
atgaaaacattatggcgcatagcaaaagaagccgtcagatataaaggctggctgctactatcaattttcggtacgcttatgctgacgacagttaatctgattgcccccagaataatggcgggtatgacgggacttgtagctgccggcatgacgcgggaaaatttaaccacggtactgtggatggcgggcggattgttgggcctgtacctgacgcgcatcctgttccggtttttatccaattactgttcgcaccgggcggcgtggcggctggtgcttgaactgcggataaaagtttacaacgcgattcagtctttttccatggactattttcacaacaagcaaacgggcgaactgttaagccgcgtaatgaacgatgtggcgacatttgagctgatatacgcccacatcactcccgatgttattaccaattttgtcaccctcaccggcgtaaccattattctttttaatttaaacgcgcgtctcgcgcttgtcacctgtattcctattccgtttattttgttgtcagggtggttcttcatccgtaaagtgcgccccaactttcagaaaacgcagaagtcacagggagaatatccgcgcagctgcaggataatttatcgggcatacaggaaatacaggcttttggacgccaatcttacgcctctgaaaaagttttga

SEQ ID NO: 37550 - protein, 224 aa, Unknown
  Obtained from environmental sample
  misc_feature (1)..(224): Xaa is any amino acid
MKTLWRIAKEAVRYKGWLLLSIFGTLMLTTVNLIAPRIMAGMTGLVAAGMTRENLTTVLWMAGGLLGLYLTRILFRFLSNYCSHRAAWRLVLELRIKVYNAIQSFSMDYFHNKQTGELLSRVMNDVATFELIYAHITPDVITNFVTLTGVTIILFNLNARLALVTCIPIPFILLSGWFFIRKVRPNFQKTQKSQGEYPRSCRIIYRAYRKYRLLDANLTPLKKF

SEQ ID NO: 37551 - DNA, 300 bp, Unknown
  Obtained from environmental sample
  misc_feature (1)..(300): n is a, c, g, or t
ttgaccgacctcccgcctgaaatcggcaaccttaataatctcgagttcttgcagatgtggggcaacggcttcatcgagttgccgtacagcatcaccgagttgacgaaactaaaagagctctacttgaatgacaacaagctaaccaagctgccatacgacataataaaaatggacaatctgaagtacatcgacgttcagcggaacttcttgtgcgatgttttgccggaggtcgacgcttggctgatgagcattaataggatgtacaaggcttatcagttctgtgaaaatgttaaaagatag

SEQ ID NO: 37552 - protein, 99 aa, Unknown
  Obtained from environmental sample
  misc_feature (1)..(99): Xaa is any amino acid
MTDLPPEIGNLNNLEFLQMWGNGFIELPYSITELTKLKELYLNDNKLTKLPYDIIKMDNLKYIDVQRNFLCDVLPEVDAWLMSINRMYKAYQFCENVKR

SEQ ID NO: 37553 - DNA, 1041 bp, Unknown
  Obtained from environmental sample
  misc_feature (1)..(1041): n is a, c, g, or t
gtgcttgcgatggaaactatnttcgtcgtcgacgactgcgatgtggatctcgacatgataagacaggctctgggggggagctatcggatttttacgctctcttctgccgaagccatgttcgatttgatcgagacggtcgtccccgacttggtgctcctcgacatccgtatgccgggcatggacggcttcaccgccctcgacaagctctcctccgacgcgcgcacggcggccgtgccggtcgtcttcatgacctcttacggcgacgccgagaccgaggcgcgggggttcgaggctgggatcgtggacttcatcaacaagccgttctcccaggcggtgctgctgaggcgcatagaggcgcacctgcgcgtggacgagctcataaagaggcgcaccgcgaggcttacgcgcctcaaaaacgggatcgtctccgtcctcgccgacattgtggagttccgggacgagaccgccggcggcggcgggcacatagaccgcacatcgaagttcataaagacgctcatagaggccatgagggagaacggcgtctacacggaagagatggccgactgggacatagacactatggtcgcctcggcgcggttgcacgacatagggaagatcgccgtctccgacacgatactgaacaaacccggcaagctcacggcgcaggagttcgagaccgtcaaaagccacgttaaggagggcgagcggatcatcgacaaaatagtaaccaagaccggcgacgaggaattcttgcaattcgcccgcctgttcgtcagctaccaccacgaacgatgggacggcgaaggctatccctacgggctagctgggctgaacataccccttgccggacgcatcatggcgatcatagacgtctacgacgccctcgtctccgagcggccctacaaaaaaccctttccgcccgacttggccttagacaccatcaagcatgagtccggcaagcacttcgacccgcgcatcacggagatgttcttattaaagcgggaggagttcaaagagatcgccgccgaaaaacacggctga

SEQ ID NO: 37554 - protein, 346 aa, Unknown
  Obtained from environmental sample
  DOMAIN (172)...(295): HD domain
  misc_feature (1)..(346): Xaa is any amino acid
MLAMETXFVVDDCDVDLDMIRQALGGSYRIFTLSSAEAMFDLIETVVPDLVLLDIRMPGMDGFTALDKLSSDARTAAVPVVFMTSYGDAETEARGFEAGIVDFINKPFSQAVLLRRIEAHLRVDELIKRRTARLTRLKNGIVSVLADIVEFRDETAGGGGHIDRTSKFIKTLIEAMRENGVYTEEMADWDIDTMVASARLHDIGKIAVSDTILNKPGKLTAQEFETVKSHVKEGERIIDKIVTKTGDEEFLQFARLFVSYHHERWDGEGYPYGLAGLNIPLAGRIMAIIDVYDALVSERPYKKPFPPDLALDTIKHESGKHFDPRITEMFLLKREEFKEIAAEKHG

SEQ ID NO: 37555 - DNA, 717 bp, Unknown
  Obtained from environmental sample
  misc_feature (1)..(717): n is a, c, g, or t
ttgacgcgatttcgaccgaagggtgcttgcgatggaaactatnttcgtcgtcgacgactgcgatgtggatctcgacatgataagacaggctctgggggggagctatcggatttttacgctctcttctgccgaagccatgttcgatttgatcgagacggtcgtccccgacttggtgctcctcgacatccgtatgccgggcatggacggcttcaccgccctcgacaagctctcctccgacgcgcgcacggcggccgtgccggtcgtcttcatgacctcttacggcgacgccgagaccgaggcgcgggggttcgaggctgggatcgtggacttcatcaacaagccgttctcccaggcggtgctgctgaggcgcatagaggcgcacctgcgcgtggacgagctcataaagaggcgcaccgcgaggcttacgcgcctcaaaaacgggatcgtctccgtcctcgccgacattgtggagttccgggacgagaccgccggcggcggcgggcacatagaccgcacatcgaagttcataaagacgctcatagaggccatgagggagaacggcgtctacacggaagagatggccgactgggacatagacactatggtcgcctcggcgcggttgcacgacatagggaagatcgccgtctccgacacgatactgaacaaacccggcaagctcacggcgcaggagttcgagaccgtcaaaagccacgttaa

SEQ ID NO: 37556 - protein, 238 aa, Unknown
  Obtained from environmental sample
  misc_feature (1)..(238): Xaa is any amino acid
MTRFRPKGACDGNYXRRRRLRCGSRHDKTGSGGELSDFYALFCRSHVRFDRDGRPRLGAPRHPYAGHGRLHRPRQALLRRAHGGRAGRLHDLLRRRRDRGAGVRGWDRGLHQQAVLPGGAAEAHRGAPARGRAHKEAHREAYAPQKRDRLRPRRHCGVPGRDRRRRRAHRPHIEVHKDAHRGHEGERRLHGRDGRLGHRHYGRLGAVARHREDRRLRHDTEQTRQAHGAGVRDRQKPR

SEQ ID NO: 37557 - DNA, 765 bp, Unknown
  Obtained from environmental sample
  misc_feature (1)..(765): n is a, c, g, or t
ttgatagatagatatgtaaatccaattatagctcctaatatatctgagcatttagctatgcgaatggacactatttcacgtattggcgggaatgctctactgctgcctatttctatgctttttctgattcagttaactattattgtgcgtaaaatcattcctgcaaagcggagatttctgtatatactcgccggaagcggcgttccattgagcatcatgtttttgactattgcaggcacagtagctacgccgataagatctctttatgccttgcctttggcttttgcatttatgtttttctttctcattctgcattgcaaaaagaaagttgctattgttgttgcttgcctcgctttgcttattgcggcacataatgcacaaattaccgcacagctattttattcagattatataagatacaatgaagatgttcgccttgcctatgagttggataggcgggttagccaaattcagcccgatggtaaaaactttccagttattattattggcgaataccgagcggcttcgcgattccatgctaattttctgcaaggagaagtaaatgggcattctttttttgaatggtatgacggacattccgtacgaggtttggcttttatgaagagtttgggtataaattatgatgaaccaagcgaagaacaattaaaacaagctcttttagaagcaataccgatgcccgcttatcctagccctgattgcattaagtacacgcagaattttattgtggttaaaatgactccttag

SEQ ID NO: 37558 - protein, 254 aa, Unknown
  Obtained from environmental sample
  misc_feature (1)..(254): Xaa is any amino acid
MIDRYVNPIIAPNISEHLAMRMDTISRIGGNALLLPISMLFLIQLTIIVRKIIPAKRRFLYILAGSGVPLSIMFLTIAGTVATPIRSLYALPLAFAFMFFFLILHCKKKVAIVVACLALLIAAHNAQITAQLFYSDYIRYNEDVRLAYELDRRVSQIQPDGKNFPVIIIGEYRAASRFHANFLQGEVNGHSFFEWYDGHSVRGLAFMKSLGINYDEPSEEQLKQALLEAIPMPAYPSPDCIKYTQNFIVVKMTP

SEQ ID NO: 37559 - DNA, 585 bp, Unknown
  Obtained from environmental sample
  misc_feature (1)..(585): n is a, c, g, or t
atgaacggcaatgtaaaagtttcgccgtgcaagttaaacggcattgttcgcgcaatcccttccaaatcgcaggcgcacagagcgcttatatgcgcggctttagcagataaaccaacaatcatcgaatgtgaaggcggctccgatgatatagcggcaaccgctgactgcctgtccgcactcggggctaaaattgaacgcgaatcgggcgtttatgttgtccagcccctgaaacgggagggtaatgctggtatcgcttcgctgccctgcggggaaagcggcagtacattccgttttatgctgccaattattggcgcgttgggacgcgaaacatcgtttatcctgaaagggcggcttcccgagcgcccgctttccccgttatacgaagagcttatccgccacggggccgaattgtcaccccagggtactgttccgttttacgcctcggggcggcttacgcctgggcgctattcgcttgatgccggcgtatcgtcgcaattcatcagcggcctgttgtttgccctgcccttgctcgacgggaacagtgaattacagctaacagggcaggcggaatcctttcctacatag

SEQ ID NO: 37560 - protein, 194 aa, Unknown
  Obtained from environmental sample
  misc_feature (1)..(194): Xaa is any amino acid
MNGNVKVSPCKLNGIVRAIPSKSQAHRALICAALADKPTIIECEGGSDDIAATADCLSALGAKIERESGVYVVQPLKREGNAGIASLPCGESGSTFRFMLPIIGALGRETSFILKGRLPERPLSPLYEELIRHGAELSPQGTVPFYASGRLTPGRYSLDAGVSSQFISGLLFALPLLDGNSELQLTGQAESFPT

SEQ ID NO: 37561 - DNA, 675 bp, Unknown
  Obtained from environmental sample
  misc_feature (1)..(675): n is a, c, g, or t
ttggcatacaaactgaatttaaagacnatatttttttcataccggggcgggcaaacataccgttcccccggcgcggcagcggtagagggcgattggtctaacgccgcgttctggctgggcgcgggggctgtgggctcaggcagcgtaacctgcgccggcttgaatttgcagtcccggcagggcgaccgggcgatcatggacatcctggcgcggttcggcgcgcgggttgaggggaacggttccgcggtaaccgtatcaggcgggaaactgcagggcatggaaatcgacgcgcgggatattcccgatcttgtgccaatattggccgtcatcgccgccgccgcagatggaactaccgttattcgcaacgcgggaaggctgcgtaccaaggaaagcgacaggctggccgccgtaagcgccatgctgcgcggattgggcgcggatgtgagtgagacggaagacggacttatcatacatgggggcgccgctttcaaaggcggtgaggttttgtcctatggggatcaccggatcgctatggccgcggcaatcgcggcgacggtgtgcgcgcggccggttgtgatccggggggcgcaggctgtcaacaaatcatatcccggattctttgacgatctgcgtttgctgggcggctcggttgacgcagtgagcaatgaggaatag

SEQ ID NO: 37562 - protein, 224 aa, Unknown
  Obtained from environmental sample
  DOMAIN (1)...(210): EPSP synthase (3-phosphoshikimate 1-carboxyvinyltransferase)
  misc_feature (1)..(224): Xaa is any amino acid
MAYKLNLKTIFFSYRGGQTYRSPGAAAVEGDWSNAAFWLGAGAVGSGSVTCAGLNLQSRQGDRAIMDILARFGARVEGNGSAVTVSGGKLQGMEIDARDIPDLVPILAVIAAAADGTTVIRNAGRLRTKESDRLAAVSAMLRGLGADVSETEDGLIIHGGAAFKGGEVLSYGDHRIAMAAAIAATVCARPVVIRGAQAVNKSYPGFFDDLRLLGGSVDAVSNEE

SEQ ID NO: 37563 - DNA, 843 bp, Unknown
  Obtained from environmental sample
  misc_feature (1)..(843): n is a, c, g, or t
atggcggcaccggggcgtgtgcaacagctcatccccatttacgacaaaccgatgatttattatccgctctcggtgctcatgctggcgggcatccgggaaatatgcgtcatctccacgccgacggatttgccgcactttcacaatctgttcggcgacgggagcagcttcggcatctccatccaatacgtccggcagcccagccccgacggtctggcccaagccttcctgctggcgcgcgatttcatagccggcaaaccctgctgcctgattctgggcgacaacctcttttacggcgaccagctctcgcgccatctggcagcggacacggagcttgaacggggcggcgtcatcttcgcctataaggtcaaagacccggagcgttacggcgttgtggaatttgacgaacgccagcaggtcatcggcattgaggaaaaacccgcaaagcccaaatcgcgttatgcggtgacgggcctgtatttctatgacggacgggtcagcgacatggcggccgccttgcgcccttcggcgcgcggcgaactggaaatcaccgatctcaacaacctgtacctgcgcgaaagcagcctgcacgtgcgttttctcagccgcggcgtggcttggctggacaccggcaccttcgactcgctgcatcaggcgtccgcctttgtgcgcgccgtccaggacagacaagggctgaaaatcgcctgccccgaggaaatcgcctacaacctgggatatatcaacgccgcccaactcgaagcccttgccgcgcccatgctcaaaaacgaatacggcatgtacctgatggacatcctggagagttcacggagcgccgagaaaaggtga

SEQ ID NO: 37564 - protein, 280 aa, Unknown
  Obtained from environmental sample
  DOMAIN (5)...(225): Nucleotidyl transferase
  misc_feature (1)..(280): Xaa is any amino acid
MAAPGRVQQLIPIYDKPMIYYPLSVLMLAGIREICVISTPTDLPHFHNLFGDGSSFGISIQYVRQPSPDGLAQAFLLARDFIAGKPCCLILGDNLFYGDQLSRHLAADTELERGGVIFAYKVKDPERYGVVEFDERQQVIGIEEKPAKPKSRYAVTGLYFYDGRVSDMAAALRPSARGELEITDLNNLYLRESSLHVRFLSRGVAWLDTGTFDSLHQASAFVRAVQDRQGLKIACPEEIAYNLGYINAAQLEALAAPMLKNEYGMYLMDILESSRSAEKR

SEQ ID NO: 37565 - DNA, 351 bp, Unknown
  Obtained from environmental sample
  misc_feature (1)..(351): n is a, c, g, or t
atgaacaggttttgcttacctgataaagaacgcacaggccgccatgccaagggggggctgctgaccattgccacgctgggaagggacagcgagatacggataagcgtatgcgacacgggcacggggattagccaggaaaaccttaaaaaaatatttgaaccttattttacgacaaaaggcaacggtacgggtcttgggctgacccttgtttataaaattataagggagcatcagggcgagatgtcggttgattcgagggaaggggaggggacggatttcgagatcatcctccccgtctatcagaaaaaacagaatctgatcaattattcaggggcaaaaaatgaaatttaa

SEQ ID NO: 37566 - protein, 116 aa, Unknown
  Obtained from environmental sample
  DOMAIN (8)...(100): Histidine kinase-, DNA gyrase B-, and HSP90-like ATPase
  misc_feature (1)..(116): Xaa is any amino acid
MNRFCLPDKERTGRHAKGGLLTIATLGRDSEIRISVCDTGTGISQENLKKIFEPYFTTKGNGTGLGLTLVYKIIREHQGEMSVDSREGEGTDFEIILPVYQKKQNLINYSGAKNEI

SEQ ID NO: 37567 - DNA, 1344 bp, Unknown
  Obtained from environmental sample
  misc_feature (1)..(1344): n is a, c, g, or t
atgaaatttaaactccttattgttgatgatgaaaaaaacatccgggaggggcttgccgcttctcttgaaatggacggctacagcgccgtctgcgccgccagcggcgaggaagcgtgggagctctattgcaagggcgacatagacctggtcattactgacctgcgtatgcccggcatggacggcgaggaacttatgcgccgtatactggccgagacccccggtctgccggttatcatactcaccgggcacggaaccatagaaaacgccgtcagcgcaatgcacgatggggcctgggatttccttaccaagcctgtcaatctggatcatcttgcaatgctggtaaagcgggcgctggaaaacagggaacttgtactgcgccaccgggaactggaagccgatctggagcggggcaaactcctgtccggtatgatcggcaagtcaaccgttatgcgaaaagtatttgacacaataagccgcgtcgcgcctaccaaagcctcggtactgattacgggggaatccggcgttggcaaagagctggtcgccgacgctatccacgagctttcgccccgtaagggcaagcctctgattaaagtgcactgcgccgcgcttgcggcaaacctgctggaaagcgaattgtttggtcatgagaaaggggctttcaccggcgcggtctcgcggcggcggggccgttttgagcttgcgaacgagggaacgctttttctcgacgaaataggcgagatagaccagaacatacagataaagctgttgcgtgttttgcaggaacaccaatttgagcgtgtcggcggggaagaaacccttgaaaccgacgtccgcattgtcgccgcgaccaacaaagacctcaaggccgagatagagaaaggcaatttccgcgaagacctgtacttccgccttaacgtggtgagcatcaatgtccccccgttacgcgaaagaaaagacgacatccccctgatggctgccagcttcctgaaggaaatcgccgccgaaaacaacaaaaccatcgaaggcatccacgaaaaggcctatgcccggctttacgcctacgactggcccggcaatatccgcgagcttcgcaactgcatcgaaagcgccgtggtcatgtgccgcaaaccaatcatcgccgtggacgatctgcctcccgccctgcaatcttactctgacgatgaaggctgggtaaaggttcctctggattgcagtcttgaggaagatgaaaagatcatcatcaaggcggcgattggttatcacaaaaacaagaccaaagccgccgaggtcctgggcattgggcgaaagacgctgcacaggaaaatacttgatagtgagcaatga

SEQ ID NO: 37568 - protein, 447 aa, Unknown
  Obtained from environmental sample
  DOMAIN (166)...(314): ATPase family associated with various cellular activities (AAA)
  misc_feature (1)..(447): Xaa is any amino acid
MKFKLLIVDDEKNIREGLAASLEMDGYSAVCAASGEEAWELYCKGDIDLVITDLRMPGMDGEELMRRILAETPGLPVIILTGHGTIENAVSAMHDGAWDFLTKPVNLDHLAMLVKRALENRELVLRHRELEADLERGKLLSGMIGKSTVMRKVFDTISRVAPTKASVLITGESGVGKELVADAIHELSPRKGKPLIKVHCAALAANLLESELFGHEKGAFTGAVSRRRGRFELANEGTLFLDEIGEIDQNIQIKLLRVLQEHQFERVGGEETLETDVRIVAATNKDLKAEIEKGNFREDLYFRLNVVSINVPPLRERKDDIPLMAASFLKEIAAENNKTIEGIHEKAYARLYAYDWPGNIRELRNCIESAVVMCRKPIIAVDDLPPALQSYSDDEGWVKVPLDCSLEEDEKIIIKAAIGYHKNKTKAAEVLGIGRKTLHRKILDSEQ

SEQ ID NO: 37569 - DNA, 351 bp, Unknown
  Obtained from environmental sample
  misc_feature (1)..(351): n is a, c, g, or t
ttggtgttcctgcaaaacacgcaacagctttatctgtatgttctggtctatctcgcctatttcgtcgagaaaaagcgttccctcgttcgcaagctcaaaacggccccgccgccgcgagaccgcgccggtgaaagcccctttctcatgaccaaacaattcgctttccagcaggtttgccgcaagcgcggcgcagtgcactttaatcagaggcttgcccttacggggcgaaagctcgtggatagcgtcggcgaccagctctttgccaacgccggattcccccgtaatcagtaccgaggctttggtaggcgcgacgcggcttattgtgtcaaatacttttcgcataacggttga

SEQ ID NO: 37570 - protein, 116 aa, Unknown
  Obtained from environmental sample
  misc_feature (1)..(116): Xaa is any amino acid
MVFLQNTQQLYLYVLVYLAYFVEKKRSLVRKLKTAPPPRDRAGESPFLMTKQFAFQQVCRKRGAVHFNQRLALTGRKLVDSVGDQLFANAGFPRNQYRGFGRRDAAYCVKYFSHNG

SEQ ID NO: 37571 - DNA, 615 bp, Unknown
  Obtained from environmental sample
  misc_feature (1)..(615): n is a, c, g, or t
atgggattaattaaagcgttagttggagccgccggaggcgttctggcggatcagtggctggaattctttgtctgcgaaagccttgaagcggatgtattggccgccaaggggcagaaaaaaaccggcaagaggagcagcaataccaagggagaagataatatcatctccaacggttccggtgttgtggtaaacaaggggcaggcggcgatcatcgtggacaacggccgtattgccgaagtgtgcgccgaagaggggcgctacacctacgatcattcctcggagcccagcattttctacggcgacctggggtcaagcattgttgattccttaaaaaacatcggggaacgcttcaaatacggcggcattccgggtaaggatcagcggatctattacttcaataccaaggaaataatggggaacaaatacggtactcccgcgccgattccctatctcattgtggatccgtcgattaatctccgccttaccataagccttagagccaatggggagtattcgtaccgtatcataaacccggtgcttttctacgccaatgttacgggcaacgtggaggagctatacacccgggaacaagctcgacagccagttgaagagtga

SEQ ID NO: 37572 - protein, 204 aa, Unknown
  Obtained from environmental sample
  misc_feature (1)..(204): Xaa is any amino acid
MGLIKALVGAAGGVLADQWLEFFVCESLEADVLAAKGQKKTGKRSSNTKGEDNIISNGSGVVVNKGQAAIIVDNGRIAEVCAEEGRYTYDHSSEPSIFYGDLGSSIVDSLKNIGERFKYGGIPGKDQRIYYFNTKEIMGNKYGTPAPIPYLIVDPSINLRLTISLRANGEYSYRIINPVLFYANVTGNVEELYTREQARQPVEE

SEQ ID NO: 37573 - DNA, 933 bp, Unknown
  Obtained from environmental sample
  misc_feature (1)..(933): n is a, c, g, or t
ttgatgggcaggcagattgaccctcagcgcgaagttgtcgtaacttgcggaagcaccgaggcgatgatggcggcgatgctgacggtggcgaatccgggcgacaaagcgatagtcttctcgcctttttatgaaaactacggcgcggatacaatcctttccggcgccgagcccgtctatgtgcccctgcgtcctccattgttcaactttgacgcaaacgagctggaagacgcttttaaacagcgcccgaaagcgcttattctgtgcaacccttcgaacccatgcggtaaagtttttacccgcgaagaattaacaataatcgccgatcttgctaaaaaatacgatgcctatgttataacagacgaagtgtacgagcatattgtttacgcgcctcatgttcatacctatattgcgtctttaccgggaatgttcgaacgtacaatttcatgcagttctctttctaaaacctattcgataacaggctggcggctggggtacatcatcgcgcccgaagaagtcatagaaacggcgaagaaggtacacgactttttaacggtaggagccgcagcccccctgcaggaagcggctgtagcaggccttcgttttcccgcctcatattacggcagcctgttacgcgaatatacagaaaggcgcagtttattcctgagaggactggatgcactaggcatacagcacacaaatcccgagggcgcgtattatgtaatgcttgacatatccgaatacggctatgagagcgatcttgatttttgcgaaaagttggccgaaagggtaggcgtgggcgcggttcccggttccagctttttcagggaagacgtgaacagctttatacgttttcactttgcaaagaagaacgaaactttatatgaggcgctgaaccggctggagaaaatgaaggaacggatgcaaaagcggtaa

SEQ ID NO: 37574 - protein, 310 aa, Unknown
  Obtained from environmental sample
  DOMAIN (14)...(247): Beta-eliminating lyase
  misc_feature (1)..(310): Xaa is any amino acid
MMGRQIDPQREVVVTCGSTEAMMAAMLTVANPGDKAIVFSPFYENYGADTILSGAEPVYVPLRPPLFNFDANELEDAFKQRPKALILCNPSNPCGKVFTREELTIIADLAKKYDAYVITDEVYEHIVYAPHVHTYIASLPGMFERTISCSSLSKTYSITGWRLGYIIAPEEVIETAKKVHDFLTVGAAAPLQEAAVAGLRFPASYYGSLLREYTERRSLFLRGLDALGIQHTNPEGAYYVMLDISEYGYESDLDFCEKLAERVGVGAVPGSSFFREDVNSFIRFHFAKKNETLYEALNRLEKMKERMQKR

SEQ ID NO: 37575 - DNA, 468 bp, Unknown
  Obtained from environmental sample
  misc_feature (1)..(468): n is a, c, g, or t
atgatcatcgcgccggattcggaacaggaagtcccccttttacgcggcattactgatgtggcaattatccatcctcttgcctctggaagggcaagcgcgaataaaaaagatttccatatgctgttgtctgactgggatatagacggcggcatatcaggtatgtgtccttattccgtaaacggcgactttttggcaaagcaccccaaggcggtaacagaattaacagaaatactttccaaagccgcaaagtggaacaacgcccatcaggaagaggcccgcgagttaatggcaaagcgttttggatttaagatggaagaagccgagatgtttgaattttatgaagatcagctcattccggttgaaaatatggaatactggttcgacatatttaaattcgaaaagcttctgtcgccaaactcggctatagaaaattattatacaaatgattttaatcctgcaaacaggtaa

SEQ ID NO: 37576 - protein, 155 aa, Unknown
  Obtained from environmental sample
  misc_feature (1)..(155): Xaa is any amino acid
MIIAPDSEQEVPLLRGITDVAIIHPLASGRASANKKDFHMLLSDWDIDGGISGMCPYSVNGDFLAKHPKAVTELTEILSKAAKWNNAHQEEARELMAKRFGFKMEEAEMFEFYEDQLIPVENMEYWFDIFKFEKLLSPNSAIENYYTNDFNPANR

SEQ ID NO: 37577 - DNA, 657 bp, Unknown
  Obtained from environmental sample
  misc_feature (1)..(657): n is a, c, g, or t
atgagccacgaaataagaacgccgatgaacgccataatcggcatgaccacgatagggaaatccgcgctgaatattgaacgcaaagactattgttttatgaaaatagaggatgcttcgaatcacctgctcggcgtgattaacgatattctggatatgtcgaagatcgaagcaaacaaatttgaacttgctccggtggaatttgaacttgaaaaaatgctccggcgcatagtgaatgtcataaatttccgtatagatgaaaagcatcaagaactttccgtgcatatcgaccgttctattccccacgtcctcataggggacgaccagcggatagcgcaagtcatcaccaacctgctgggaaacgcggtcaaattcacgccggaaaaaggttccattacccttaccgtgcgccttgcgggaaaagtaaacgacctctgtactgtagaattttcggtaagcgacagcggcatcggcataactcccgaacagcagaaaaaaatattcaactcttttgaacaggcggaatccagcacaacccgcaaatacggcggtacggggctgggacttgcgatttccaaaagcatagtagagatgatgggcggtaaaatttgggtgcagtccgagccgggaaaaggatctgtttttgcctttanaggttga

SEQ ID NO: 37578 - protein, 218 aa, Unknown
  Obtained from environmental sample
  DOMAIN (1)...(58): His Kinase A (phosphoacceptor) domain
  misc_feature (1)..(218): Xaa is any amino acid
MSHEIRTPMNAIIGMTTIGKSALNIERKDYCFMKIEDASNHLLGVINDILDMSKIEANKFELAPVEFELEKMLRRIVNVINFRIDEKHQELSVHIDRSIPHVLIGDDQRIAQVITNLLGNAVKFTPEKGSITLTVRLAGKVNDLCTVEFSVSDSGIGITPEQQKKIFNSFEQAESSTTRKYGGTGLGLAISKSIVEMMGGKIWVQSEPGKGSVFAFXG

SEQ ID NO: 37579 - DNA, 810 bp, Unknown
  Obtained from environmental sample
  misc_feature (1)..(810): n is a, c, g, or t
ttgcctttanaggttgagatgaaacgcggcgaagataaaaaacataaactgggcgagcggcccataaacaggaacgatatacgtgttttggtagttgatgacagcaaagttattctggattatttcagggaagtcacaaggaagctcggtatatattgcgacacggcaataaccggagaagatgcgattgcccttgtggagcgggataataattaccatatattttttctggatttacaaatgccggatatggacggccttcaagtatcacacgcgttaaaaccgctggtgtccgaagactccgaagtgattatgatgaccgccaatgaatggaccaccgacgcggaagaagccaaaaacgcgggggttgataaattcctttccaagccactgttccctcctgttatagagggagttatagatgaatatctcagcgcgaagaacaatgaagatacgaatgaacacaaccttgatgtggtatatgaaggtcgcaggatattgcttgcggaagatatggaaataaaccgtgaaattttattggcgctgcttgagccaacgctcctggaagtggactgcgcggaaaacggattgcaggctgtcagtatgtttgctgaagcgccggaaaagtacgacatgatctttatggacgtacaaatgcccgagatggatggttatgaagccacgcagcgtatcagggcgctggaaattccgtcggcgaaaaatgttccgattgtcgccatgaccgccaatgtgtttcgcgaagatatgaaaaatgcctacaggcagaatctcggccgattctgtacctga

SEQ ID NO: 37580 - protein, 269 aa, Unknown
  Obtained from environmental sample
  DOMAIN (164)...(261): Response regulator receiver domain
  misc_feature (1)..(269): Xaa is any amino acid
MPLXVEMKRGEDKKHKLGERPINRNDIRVLVVDDSKVILDYFREVTRKLGIYCDTAITGEDAIALVERDNNYHIFFLDLQMPDMDGLQVSHALKPLVSEDSEVIMMTANEWTTDAEEAKNAGVDKFLSKPLFPPVIEGVIDEYLSAKNNEDTNEHNLDVVYEGRRILLAEDMEINREILLALLEPTLLEVDCAENGLQAVSMFAEAPEKYDMIFMDVQMPEMDGYEATQRIRALEIPSAKNVPIVAMTANVFREDMKNAYRQNLGRFCT

SEQ ID NO: 37581 - DNA, 771 bp, Unknown
  Obtained from environmental sample
  misc_feature (1)..(771): n is a, c, g, or t
atgacagatcgccgagatacgttccggctgggggcgcaggagcgtataaacaggcaaatttatcccgttatttttaaggattcgccatacgcgaacaggcttccaatcggccttcctgtgataatagagaacgccccggcggagcgcctgaaggggttctacaaaaggtggtacaggccggaaaatatggccgttattattgtaggtgattttgacaccgcttacctggaaagaacccttacagagcattttcataatctctggcctgaatccggcgattttaaccggcctctttatgacctgagcgctcaaaaagaaggtagtttccagaccctgatcttgacagacagcgagcttccgcgatccagcatatacctttactggaagcaaaaaaccgaaaaacgccaacaagacctggccgattaccgtgaaagcgtcattgattacctggcaagcataatgctttaccttcgctttcaggaagaaaccgaaaaaagcgaaacgccgtatgtttatggcggcgcgggttgggccaactacggctattcatccaggttttacgctctggtagcccaggcaaaaacaaattccgtaagggcttcgttgagggagcttcttctgattaaagagtcgcttttccgttatggctttacccagggcgaaacatacattgccaaagcggccctcatttcggagatggagcaacagttgccgaaaaagaccgccataactccaataactatgtcaacgcgtttacgcagcattttttaa

SEQ ID NO: 37582 - protein, 256 aa, Unknown
  Obtained from environmental sample
  DOMAIN (44)...(229): Peptidase M16 inactive domain
  misc_feature (1)..(256): Xaa is any amino acid
MTDRRDTFRLGAQERINRQIYPVIFKDSPYANRLPIGLPVIIENAPAERLKGFYKRWYRPENMAVIIVGDFDTAYLERTLTEHFHNLWPESGDFNRPLYDLSAQKEGSFQTLILTDSELPRSSIYLYWKQKTEKRQQDLADYRESVIDYLASIMLYLRFQEETEKSETPYVYGGAGWANYGYSSRFYALVAQAKTNSVRASLRELLLIKESLFRYGFTQGETYIAKAALISEMEQQLPKKTAITPITMSTRLRSIF

SEQ ID NO: 37583 - DNA, 624 bp, Unknown
  Obtained from environmental sample
  misc_feature (1)..(624): n is a, c, g, or t
atggaaaaaatcagcaattttgccgtatttgaaggcctggacgggagcggaaccagcacccagcttaggctgctggaacaaaaattagccggccgcgccattcaaagcccggcttttatggccacatttgagccgacagacggagaaattggcaaattaatccgctccgtgctgaaaaaacaacttgtcataagggcggatacccttgcgcggctctttgccgcggacaggggcgaacatttatacgccccgggcggcataatagaacgctgccggcgcggcgaactggtaatttgcgaccgttataccctttcttcgcttgtctaccagggcatagaatgcggcattgagctgccccgcagcctgaacgaaactttccccgttcctgaattgctgctttttcttgacatagaccccaaaattgcccaacagagaatggccgggcggccttcgcttgagatctttgagcatatagagttccaggaaaaagtcaggcaacagtaccataccctctttgaggaataccgcanaaccggagtatgcgttgagatcatcgacgctgccccaagcgtggaaaaagtagctgaagacgtatggagcgcgataacaaaatgtcgatnatga

SEQ ID NO: 37584 - protein, 207 aa, Unknown
  Obtained from environmental sample
  DOMAIN (10)...(198): Thymidylate kinase
  misc_feature (1)..(207): Xaa is any amino acid
MEKISNFAVFEGLDGSGTSTQLRLLEQKLAGRAIQSPAFMATFEPTDGEIGKLIRSVLKKQLVIRADTLARLFAADRGEHLYAPGGIIERCRRGELVICDRYTLSSLVYQGIECGIELPRSLNETFPVPELLLFLDIDPKIAQQRMAGRPSLEIFEHIEFQEKVRQQYHTLFEEYRXTGVCVEIIDAAPSVEKVAEDVWSAITKCRX

SEQ ID NO: 37585 - DNA, 918 bp, Unknown
  Obtained from environmental sample
  misc_feature (1)..(918): n is a, c, g, or t
ttgcttaattacgttcccaatgaataccgcaatgagaaacttattgccgaggcggttaaaaaagacggcaatgctcttaattatataagtgacacgcaaaagacagaacaactctgctatcaggcggtggaaaattacggaagcgcgctgagatatgttccatacaaaatacgaaccccggatatttgtctcgctgcggtaaaaaaatccaacgacgctttggaatatgtgccggaactgcttaaatcaaaagaaatttgccttgcggcggttaagcagcacggaagcaaatggataatgcgttatataccggaacatatcagaaccgccgaatttaccggggaatttttaacgggcactgaagacatcatgccattcggcgatttggatttttgtctggatatacccggactgcttacggaagaagcctgcctgaaagcggtgcggaataacgctgacgcgctggccgcggttcctgatgaattgaaaacttatgagttatgtattgaggcgctgttaaatcaacattccaacagaaatacgcttgaatatgttcccgataaattcaagacaaaagaattcctgcttaactgcgtccgcattgacggaggaaaacttgcaggcgtcccggaatccatgaagtcttacgagctttgtcttgaagccgttatcaataacggctacgcggttaaatatgtgccgccgcatattttaagcaaagagatcgtccttgcggctgtcaaaaataacggaaaagcccttgagtatgttccgtattctttccgaacgcatgaagtgtacatggaagtaattaaaaatgacgatntcggtgatactatgcgtacgcgtatttgtccgcctgaatacatacggaagaattctgccggctgggcgttacaactacggcatggccattga

SEQ ID NO: 37586 - protein, 305 aa, Unknown
  Obtained from environmental sample
  misc_feature (1)..(305): Xaa is any amino acid
MLNYVPNEYRNEKLIAEAVKKDGNALNYISDTQKTEQLCYQAVENYGSALRYVPYKIRTPDICLAAVKKSNDALEYVPELLKSKEICLAAVKQHGSKWIMRYIPEHIRTAEFTGEFLTGTEDIMPFGDLDFCLDIPGLLTEEACLKAVRNNADALAAVPDELKTYELCIEALLNQHSNRNTLEYVPDKFKTKEFLLNCVRIDGGKLAGVPESMKSYELCLEAVINNGYAVKYVPPHILSKEIVLAAVKNNGKALEYVPYSFRTHEVYMEVIKNDDXGDTMRTRICPPEYIRKNSAGWALQLRHGH

SEQ ID NO: 37587 - DNA, 1290 bp, Unknown
  Obtained from environmental sample
  misc_feature (1)..(1290): n is a, c, g, or t
atggccgagatatggacatcagcgccctcggctgtcgcaagcgttgacgcggacgggaaagttaccgcggttggcgttaccgactccttgaccgacaaatatacggttaatcccgcgaccggttcagcggtcattaccgcaaaaacaggggacggcgaatacgaggcgtccattgagatcactactaccctaaggccgcaggttgatgtaatgacgctgccgcctttgaaagaccagttcagcaaatacttcctcttgggaaatatagcgacggccagtgacgcaaatagcggcggaacggcgataaccaggcagtcgcttctgcggcactacaatgttcttactgcggaaaatgatatgaagccgaacagctacggcaacaacgccaattcgttgacatatgccagctctgacaggttcgttaatgccgcaagaggatccgggtttaaggttcacggccatgtcctcctctggcacagccagaatccccaatgggtgtgggatcaaattgcaagtaaagccggaattattgtatcgggtatggataaagccaaggctcttgatattatgaagaaatacattaccgaggtaatgacccatttcaaggggaaggtttattcctgggacgtgttaaatgaaaccttccctgacaacgcaagttcctcagcaaactggaaagacgcgattcgtaaaggcggcagcgatgaagggcaggacgcaaatccctggtatatagcaatcggctcggattttgtatacgaggccttcctggccgcgcgtttagccgatccttccgcgatactgtactacaacgactacaacaccgatagctcaaacagagccaggttaattcgggacatggtaaaggaagtgaatgacaaatatttggctttgccttccggcagtaaaccctcaggcgatcctgccggcagattgcttatcgaaggcattgggatgcaggaacaccacaataccaacgtaacaaccgcctcaatcaatgctactataaacctgttcaggccgctgggggtaaaactttccgtaagcgagcttgacgtgctgtgccaaggatggagtgaatacagttcaaaccccgccaaaaacaccgaggcaaattatcccgaaacatccaccaataccataaccaacaatggatttataaaagcggcccaattgtacggcgaatacatgaagctgtatgttgaaaacaaggacattatcgagcgcgtggccctgtggggcgttattgacagccaaagttggcgcggcagaggcctgccgttctcttga

SEQ ID NO: 37588 - protein, 429 aa, Unknown
  Obtained from environmental sample
  DOMAIN (75)...(426): Glycosyl hydrolase family 10
  misc_feature (1)..(429): Xaa is any amino acid
MAEIWTSAPSAVASVDADGKVTAVGVTDSLTDKYTVNPATGSAVITAKTGDGEYEASIEITTTLRPQVDVMTLPPLKDQFSKYFLLGNIATASDANSGGTAITRQSLLRHYNVLTAENDMKPNSYGNNANSLTYASSDRFVNAARGSGFKVHGHVLLWHSQNPQWVWDQIASKAGIIVSGMDKAKALDIMKKYITEVMTHFKGKVYSWDVLNETFPDNASSSANWKDAIRKGGSDEGQDANPWYIAIGSDFVYEAFLAARLADPSAILYYNDYNTDSSNRARLIRDMVKEVNDKYLALPSGSKPSGDPAGRLLIEGIGMQEHHNTNVTTASINATINLFRPLGVKLSVSELDVLCQGWSEYSSNPAKNTEANYPETSTNTITNNGFIKAAQLYGEYMKLYVENKDIIERVALWGVIDSQSWRGRGLPFS

SEQ ID NO: 37589 - DNA, 609 bp, Unknown
  Obtained from environmental sample
  misc_feature (1)..(609): n is a, c, g, or t
gtgcctgaaccgctgccagaaccgctacctgacccactgcccgaaccgctacctgacccactgcccgaaccgctacctgacccactgcccgaaccgctgcctgacccactgccagagccactcccagaaccacttccagagccactgcccgaaccgctacctgacccactcccagagccactacctgaaccgctgcctgaaccactcccagaaccgcttgttttagggaatgtatctggcactttggcagagggttccaaagccagtatgttgttccttaccttgcccaaatccacgccagccaaacctttatcaacctcggacttgaccgagccgctcaaagcaccattgtcattgatttggctgctgaactccgaaagcaagctggaaacatctttcgttgtcctattgccctgcaaagaaacggaaacagtgagcaacacattatcatttgagttgcccccgaaaagccccatatcctcgctgttcctcgtaacgctctcgcttacgccaagagcggtaagaacctctttctgtgcctgcttctttgcctcgccaaaggatttgccctctttggcgagcttgataaccttgtcgtattccaaatga

SEQ ID NO: 37590 - protein, 202 aa, Unknown
  Obtained from environmental sample
  misc_feature (1)..(202): Xaa is any amino acid
MPEPLPEPLPDPLPEPLPDPLPEPLPDPLPEPLPDPLPEPLPEPLPEPLPEPLPDPLPEPLPEPLPEPLPEPLVLGNVSGTLAEGSKASMLFLTLPKSTPAKPLSTSDLTEPLKAPLSLIWLLNSESKLETSFVVLLPCKETETVSNTLSFELPPKSPISSLFLVTLSLTPRAVRTSFCACFFASPKDLPSLASLITLSYSK

SEQ ID NO: 37591 - DNA, 693 bp, Unknown
  Obtained from environmental sample
  misc_feature (1)..(693): n is a, c, g, or t
atgtattggaaacaagctttttcgtttttagttatgcttttcgccacccattccgtccacgcggcgttcaccattgagccgacattgataaggttccacgcggacaagggcgataagacggcgatggtcgagatcgtacacgtcggcggtggtcccgccgctatacagatcagtgtacatgagcggctgctggacatcgacggaacgctcatcaaggaagggcttcccaagagttccgattttgtggtacatccagcgcaggttattttgtaccccaaggagcgcgccactgttcaaattcaatacaaaggcaaggggaaaataacctcggacaaggcttacgtgctttactcggaggaggtacctatagacgttagagaagatgataatgaaattaacgttaaggtgaggatggtcacaaactattacaccgtaatcttgttggatgtcgctaagcctgggaggctcgtctttgtgtcatctaagtctatcggaggcggtaagatagaagttgtagcggagaataggggggctgggcgagtctctaaggataagttcatgataaccgtangcggcagacaaatcacagagttcaccggcaaaggcaactcaataatgcccggccagacccgccgtttcactttcgagtggccgagggcggtgacggaaaaggaggttaggtttgtttactga

SEQ ID NO: 37592 - protein, 230 aa, Unknown
  Obtained from environmental sample
  SIGNAL (1)...(21)
  misc_feature (1)..(230): Xaa is any amino acid
MYWKQAFSFLVMLFATHSVHAAFTIEPTLIRFHADKGDKTAMVEIVHVGGGPAAIQISVHERLLDIDGTLIKEGLPKSSDFVVHPAQVILYPKERATVQIQYKGKGKITSDKAYVLYSEEVPIDVREDDNEINVKVRMVTNYYTVILLDVAKPGRLVFVSSKSIGGGKIEVVAENRGAGRVSKDKFMITVXGRQITEFTGKGNSIMPGQTRRFTFEWPRAVTEKEVRFVY

SEQ ID NO: 37593 - DNA, 501 bp, Unknown
  Obtained from environmental sample
  misc_feature (1)..(501): n is a, c, g, or t
ttgacgttatcaccgggccttatcaaggccaatatccccagccgcgtcgcctttatggtcgccggcaagatggacagccgcattatcattgacgcggtaggagcggaaaaactccttggcaaaggcgacatgctctatgccggaattacagaccccttcccgatccgcatgcagggggcctttgtttccgaagaagaagtcgaggcggtggtcgcccatgttaaaacattcggcgaacctgattatattgacgatgaaatcttttttgacgaagaagaggaagaagccgagccttctcttttctccggcgccgatgaccccctgtacgaaaaagccctggaaattgtactacagcagggaaaggccagcgccagttacatacagcgccgcctgaaaatcggttacaaccgcgccgcccgccttgtagaagaaatggaacacaggggcgtcgtcggcccggcgcagggatcaaaaccgcgggaattgctgcgcggaatgtaa

SEQ ID NO: 37594 - protein, 166 aa, Unknown
  Obtained from environmental sample
  misc_feature (1)..(166): Xaa is any amino acid
MTLSPGLIKANIPSRVAFMVAGKMDSRIIIDAVGAEKLLGKGDMLYAGITDPFPIRMQGAFVSEEEVEAVVAHVKTFGEPDYIDDEIFFDEEEEEAEPSLFSGADDPLYEKALEIVLQQGKASASYIQRRLKIGYNRAARLVEEMEHRGVVGPAQGSKPRELLRGM

SEQ ID NO: 37595 - DNA, 621 bp, Unknown
  Obtained from environmental sample
  misc_feature (1)..(621): n is a, c, g, or t
atgccatataataaaaatatgaatcaggtcagaaacagactgttcatcggcagaaaagccggcacgggtgaacggataaaaattatcagatgggcgatagaacacgggtacaacacgcttgtcttgccgctggacgataaaattttcaggggcgggggcggcaaagatatcaaactgataaaacatttcgctttttttattgaagcgggcgggcgcgatttatccctgttactgccaaggcatctgtttttatttaacaaacaactgtttcgcatggaacagggtaaaagaaaaatgaataaccatttttgcccgaccaacccgaaaacaacggcgataatcgccaaacgggcaaaaaaacttttttcccgagccatgcacaaaactacgcctgaccgcatcttccacattatgcccgatgaaggctgtgaaaatgtctggtgtcaatgtccgccctgccgagccttccgccccgtcgatcaatatctgattgccgtcaacgccgcagccgacgcgctcgcgaaactcgatccgcaggcaaagctggcatacgtcgattttgacacggagcctgaggcggcgagagttaagagcagaaagaatatgattatctgcgagtga

SEQ ID NO: 37596 - protein, 206 aa, Unknown
  Obtained from environmental sample
  misc_feature (1)..(206): Xaa is any amino acid
MPYNKNMNQVRNRLFIGRKAGTGERIKIIRWAIEHGYNTLVLPLDDKIFRGGGGKDIKLIKHFAFFIEAGGRDLSLLLPRHLFLFNKQLFRMEQGKRKMNNHFCPTNPKTTAIIAKRAKKLFSRAMHKTTPDRIFHIMPDEGCENVWCQCPPCRAFRPVDQYLIAVNAAADALAKLDPQAKLAYVDFDTEPEAARVKSRKNMIICE

SEQ ID NO: 37597 - DNA, 687 bp, Unknown
  Obtained from environmental sample
  misc_feature (1)..(687): n is a, c, g, or t
ttgttacatatatggatgaaaagattcataatccctctcattctgggagcggcattttttttctcctgcattaccaactcaggcaggaagccatatgagcttccggcaatttccgaggaaacaaaaattccaagagctttcacaattcttgattacaaaaataaaacctcgggagataccgttccagaatgggtcaattcctaccttgattcgggccttcgtggagttgaagctttaaaagattaccaggataactatatattcgtcaaaaaaaatgagggaaacaattttaacgccttgcaattatggaaagacagcttttccgtggaattagattttccgcggctggcggcgactagaatagaagcgcgtttanacgcttccatctcctaccctgacgaagaatacggcgcgttctatgaagcgttgatccgcgccgcctctgacacttcctggacaggggcaaaaacggaagatgacttttggattcgtaaaagatactccgccaacgaaacggaaggcgaacaggaaacctgggagtttcttgtccttgtaacaatagaaaaatcccgcttttcgtcccagctggaaaaaatttttgaaagcataaaacctattccgccgcctaacaaaaaccagattgcagcaatcaattgggttaaagaacatttttttgaaaatttctaa

SEQ ID NO: 37598 - protein, 228 aa, Unknown
  Obtained from environmental sample
  SIGNAL (1)...(27)
  misc_feature (1)..(228): Xaa is any amino acid
MLHIWMKRFIIPLILGAAFFFSCITNSGRKPYELPAISEETKIPRAFTILDYKNKTSGDTVPEWVNSYLDSGLRGVEALKDYQDNYIFVKKNEGNNFNALQLWKDSFSVELDFPRLAATRIEARLXASISYPDEEYGAFYEALIRAASDTSWTGAKTEDDFWIRKRYSANETEGEQETWEFLVLVTIEKSRFSSQLEKIFESIKPIPPPNKNQIAAINWVKEHFFENF

SEQ ID NO: 37599 - DNA, 405 bp, Unknown
  Obtained from environmental sample
  misc_feature (1)..(405): n is a, c, g, or t
gtggaagccgcttgtaaggcagtcagcatccatcacttcatacacacgttaccgcaagggtatgatactgtgttgaacgacaaagcgaacttgtcgacaggtcaaaaacagcttgttaccatcgcgcgggctatgatccaaaactcgccgttgcttattttggatgaagctacaagctcggtagatacgcgcactgaaaggcttgtccaggaagcgatggacaagctgacccatggccggacatcttttgttatcgcgcacaggctttctaccattaaaaacgccgataagatacttgttatgaaagacggcgatataatcgaaagcggaaaccataaagaattgctggaaaagggcggattctacgccgagctttactacagccagtttgaagaagcgtcgtaa

SEQ ID NO: 37600 - protein, 134 aa, Unknown
  Obtained from environmental sample
  DOMAIN (1)...(104): ABC transporter
  misc_feature (1)..(134): Xaa is any amino acid
MEAACKAVSIHHFIHTLPQGYDTVLNDKANLSTGQKQLVTIARAMIQNSPLLILDEATSSVDTRTERLVQEAMDKLTHGRTSFVIAHRLSTIKNADKILVMKDGDIIESGNHKELLEKGGFYAELYYSQFEEAS

SEQ ID NO: 37601 - DNA, 1077 bp, Unknown
  Obtained from environmental sample
  misc_feature (1)..(1077): n is a, c, g, or t
ttgatacaatattttcagatgattgattttcacacacattccaacatttcagacggtgatttacctcctgccatacttattaaagaagcggttaagcgcggccttattgctcttgccttgactgatcacgatactatcaacgggcttgaaagcgcgaaaattgccgctaaaaaggaaaatattcgttttatacccggaattgaggtaaatattaactggacaaggggaaaatcctcgaatgatattccgcatggcgtccccggacttggtcccggcggtgagtttcacttgttaggtttggggataagttcgccgactccggcttttatttcagccattgaaaatctcgcacgccgcagggaagtcagaaaccgtgagattcttgatcggatggttgaattgagcatgattactccaaacgggcaggatgaggcatgggatgagcttttgactattgccggaaaagcgtcagtttccagtagatcgggcaattcgcttggacggcctcattctgcggcatttcttgtaaggcatcaaattgttaaacacgtgaatcaagcgtttgctcgttatttaggagtgggaaagcctttgtatgtgcctaaagaggggcttgtttttgaagaaggggctgttatgatacgggaatccggaggcattccggtccttgtgcataccatctcgcttttcgtggggtggggacgccttccggacctcataaaacccttaaaaaacataggtttgatgggatttgaagcgtggcatcccacagccaaacaaggatcctgcggggcgcgagaatgctctcgtcaagtgtatagggctctgcgttatcgacggcagagggtttcacggcaccatccgacccgacggagaaatgggctatttctcaagcggcaggataatcgacggttctctttttggtgcaattcgcgcattttcagtcattcaagtagtatagttttcgagggcactccttgccccattccgggtgtttttatagcatggtcacaagaaactttcctcattgttgcttgtatacccctctcacataagtgttcttctcagccgttttaa

SEQ ID NO: 37602 - protein, 358 aa, Unknown
  Obtained from environmental sample
  DOMAIN (8)...(280): PHP domain
  misc_feature (1)..(358): Xaa is any amino acid
MIQYFQMIDFHTHSNISDGDLPPAILIKEAVKRGLIALALTDHDTINGLESAKIAAKKENIRFIPGIEVNINWTRGKSSNDIPHGVPGLGPGGEFHLLGLGISSPTPAFISAIENLARRREVRNREILDRMVELSMITPNGQDEAWDELLTIAGKASVSSRSGNSLGRPHSAAFLVRHQIVKHVNQAFARYLGVGKPLYVPKEGLVFEEGAVMIRESGGIPVLVHTISLFVGWGRLPDLIKPLKNIGLMGFEAWHPTAKQGSCGARECSRQVYRALRYRRQRVSRHHPTRRRNGLFLKRQDNRRFSFWCNSRIFSHSSSIVFEGTPCPIPGVFIAWSQETFLIVACIPLSHKCSSQPF

SEQ ID NO: 37603 - DNA, 744 bp, Unknown
  Obtained from environmental sample
  misc_feature (1)..(744): n is a, c, g, or t
gtggcgacagtatctgatggcgtcgttaccggtgtcagcgccggtgaagcgactataacagttacgaccggtgacggcggtaaaacagcaacctgcgccgttactgtacccggatggacagccgtaacggacagcacattcggcacatctaccatttggggaatcgcctatggcaacagcaagtttgtcgcggtcggccaaagcggcaaaatggcgtattcaacggacgacagcatgacatggacagccgtaacgaacagcacattcagcacatctaacatcaacggaatcacctatggcaacggcaagtttgtcgcggtcggcgccagcggcagaatggcgacatcaacggacggcacgacatggacaaccgtaacaaacagcacattcagcacatctaacatcaacggaatcacctatggcaacggcaagtttgtcgcggtcggcgccagcggcagaatggcgacatcaacggacggcacgacatggacaaccgtaacaaacagcgaattcggcacatcgagcaacaccatctacggaatcgcttatggcaacagcaagtttgtcgcaggcggcgcagacggcaaaatggcgtattcaaatgcggacggaacaacatggacagccgtatcagacagcaaattcggcacaagcgatatcacagcaatcgcctatggcgatgccactggcaacggcaagtttgtcgcagtcggaagggacggcaaaatggcgtattcaaaataa

SEQ ID NO: 37604 - protein, 247 aa, Unknown
  Obtained from environmental sample
  misc_feature (1)..(247): Xaa is any amino acid
MATVSDGVVTGVSAGEATITVTTGDGGKTATCAVTVPGWTAVTDSTFGTSTIWGIAYGNSKFVAVGQSGKMAYSTDDSMTWTAVTNSTFSTSNINGITYGNGKFVAVGASGRMATSTDGTTWTTVTNSTFSTSNINGITYGNGKFVAVGASGRMATSTDGTTWTTVTNSEFGTSSNTIYGIAYGNSKFVAGGADGKMAYSNADGTTWTAVSDSKFGTSDITAIAYGDATGNGKFVAVGRDGKMAYSK

SEQ ID NO: 37605 - DNA, 1380 bp, Unknown
  Obtained from environmental sample
  misc_feature (1)..(1380): n is a, c, g, or t
ttggccgaggcaggccgagctcgtgggctccatactgtcagcagcgcggttgttaaggtgactttccccgccgtcggcacgtcgagcagtgaaattttagttttacaggacggccagcccatagacgaattgaaattcttatccaagcccgccggttacacgccggaggagaaggaactgctggtgttcaatctgacggccaacaccgtcaggttttcgttgagcgacgcgctcggaaaattcgacgtggtcccggcgacgttgcccctgggcgggaacgaatccgcgatcgtcaaggtctcgcccaaacccggcctcgacgccgggacgacgcacaaggggaaccttaccatcagcggggccggcatcagcgacccggcgacggtggcgttgagcttccgcgtaaccgggctcggctacgtcattacccagccgaaccccgacaacacgtacacgttcaacgtggctaaagagccgagcgttgagccggatatagcggagggcgtggcgatacaggaggccattgacgccatcaggctcgacgccaacagggccagcgtcgtaataaaatttggcaagcaaaacgccgacggggaatatgaaaccgggctgaacctcggcaacgccggcatatcttttgaagacaactggggcccggtggaactcgaggggaaggtcacttcaatcctttccgccgacggccacggcacgatagtcattgacgatcccgtgaaggtaacgagctttgcggacataagcaatgacgggctctcctccctctcccggacggtcatcagcaaatcctcccagcccctcaccttcgagatgggctcgattaccacaaaattcggcaaggcgttggaaaacacctccgacggcgccgtatatattaacaccggcgtcacggtttccggcttgaccggcgacgtgattgacaacctggcggacgggaaaatcattattgacggcggcacggtagcggcgacggacggcagggcgatccagaacaaagggggcgaggtaatcgtcaaaaaagggacggtcaaggcggacaagggcatagcgattcggaacgacggcgaaggcaaaatcaccgtggaagaggggcttgtaacctccgaaaacgcgaccaacaaccaggggaccgtcacactcgtcggatataacattgctgacgacgaaccggctgaactgctgacggtcaccggcgacaggggcaaggtggaaaacacgattaattcaggcgtggcgatattcaacgacacgcagggcaaggtaacggtcaagaagggcaaggtggaggcggtaaagaatatcgccaccgcgattctcaacataaggagggcccgctggagatctcccgacggcacgttcaggtga

SEQ ID NO: 37606 - protein, 459 aa, Unknown
  Obtained from environmental sample
  misc_feature (1)..(459): Xaa is any amino acid
MAEAGRARGLHTVSSAVVKVTFPAVGTSSSEILVLQDGQPIDELKFLSKPAGYTPEEKELLVFNLTANTVRFSLSDALGKFDVVPATLPLGGNESAIVKVSPKPGLDAGTTHKGNLTISGAGISDPATVALSFRVTGLGYVITQPNPDNTYTFNVAKEPSVEPDIAEGVAIQEAIDAIRLDANRASVVIKFGKQNADGEYETGLNLGNAGISFEDNWGPVELEGKVTSILSADGHGTIVIDDPVKVTSFADISNDGLSSLSRTVISKSSQPLTFEMGSITTKFGKALENTSDGAVYINTGVTVSGLTGDVIDNLADGKIIIDGGTVAATDGRAIQNKGGEVIVKKGTVKADKGIAIRNDGEGKITVEEGLVTSENATNNQGTVTLVGYNIADDEPAELLTVTGDRGKVENTINSGVAIFNDTQGKVTVKKGKVEAVKNIATAILNIRRARWRSPDGTFR

SEQ ID NO: 37607 - DNA, 1002 bp, Unknown
  Obtained from environmental sample
  misc_feature (1)..(1002): n is a, c, g, or t
atgaccatngccggcgttgttaatcgcgtcgccagtcgtcacctgaacgtgccgtcgggagatctccagcgggccctccttatgttgagaatcgcggtggcgatattctttaccgcctccaccttgcccttcttgaccgttaccttgccctgcgtgtcgttgaatatcgccacgcctgaattaatcgtgttttccaccttgcccctgtcgccggtgaccgtcagcagttcagccggttcgtcgtcagcaatgttatatccgacgagtgtgacggtcccctggttgttggtcgcgttttcggaggttacaagcccctcttccacggtgattttgccttcgccgtcgttccgaatcgctatgcccttgtccgccttgaccgtcccttttttgacgattacctcgccccctttgttctggatcgccctgccgtccgtcgccgctaccgtgccgccgtcaataatgattttcccgtccgccaggttgtcaatcacgtcgccggtcaagccggaaaccgtgacgccggtgttaatatatacggcgccgtcggaggtgttttccaacgccttgccgaattttgtggtaatcgagcccatctcgaaggtgaggggctgggaggatttgctgatgaccgtccgggagagggaggagagcccgtcattgcttatgtccgcaaagctcgttaccttcacgggatcgtcaatgactatcgtgccgtggccgtcggcggaaaggattgaagtgaccttcccctcgagttccaccgggccccagttgtcttcaaaagatatgccggcgttgccgaggttcagcccggtttcatattccccgtcggcgttttgcttgccaaattttattacgacgctggccctgttggcgtcgagcctgatggcgtcaatggcctcctgtatcgccacgccctccgctatatccggctcaacgctcggctctttagccacgttgaacgtgtacgtgttgtcggggttcggctgggtaatgacgtag

SEQ ID NO: 37608 - protein, 333 aa, Unknown
  Obtained from environmental sample
  misc_feature (1)..(333): Xaa is any amino acid
MTXAGVVNRVASRHLNVPSGDLQRALLMLRIAVAIFFTASTLPFLTVTLPCVSLNIATPELIVFSTLPLSPVTVSSSAGSSSAMLYPTSVTVPWLLVAFSEVTSPSSTVILPSPSFRIAMPLSALTVPFLTITSPPLFWIALPSVAATVPPSIMIFPSARLSITSPVKPETVTPVLIYTAPSEVFSNALPNFVVIEPISKVRGWEDLLMTVREREESPSLLMSAKLVTFTGSSMTIVPWPSAERIEVTFPSSSTGPQLSSKDMPALPRFSPVSYSPSAFCLPNFITTLALLASSLMASMASCIATPSAISGSTLGSLATLNVYVLSGFGWVMT

SEQ ID NO: 37609 - DNA, 747 bp, Unknown
  Obtained from environmental sample
  misc_feature (1)..(747): n is a, c, g, or t
atgaaaaacaaattctcaaaactcgtactctcagcaagcattatgcttgctatggtattcacattttcctgctcaggtggcgatgacgggaacaacaacggcggcacgtctagcggtggcacacaaggcggttgccccgatgcaactgctggcagcggcactttgacttgtggcggacaaacatacaaaactgttgtaatcggtagccaaacttggttccagcgtaatttgaatatttttgctgagggaagtagatgttacaaagacgaccctgccaactgcactacttatggcaggttatatgactggcaaacggcaacgaccttatgccctagcggttggcgtttgcctagcaatgcagactgggataagctgtttcactatgcggacggcacaagtggcacacaacctggcgcagaaagcccttacaaaagcccaacggcaggcaggtatttgagagcgactagtgggtggaatatgtgtggaaacggcagttcatatacatacaaatgcgaagacacctttggtttttcggctttgcctggcggtcataatgaagacaaagatggattctattctgtcggcagcagtggctattggtggagcaactcagagtacatttccagcagcggctacgacagcggcgaatacgtttatagaattagaatgaaatacgacaaggaagacgtcagctaccctgccagcaacaagcgtgacttgttaagtgttcgttgcgtaaagaactaa

SEQ ID NO: 37610 - protein, 248 aa, Unknown
  Obtained from environmental sample
  SIGNAL (1)...(26)
  misc_feature (1)..(248): Xaa is any amino acid
MKNKFSKLVLSASIMLAMVFTFSCSGGDDGNNNGGTSSGGTQGGCPDATAGSGTLTCGGQTYKTVVIGSQTWFQRNLNIFAEGSRCYKDDPANCTTYGRLYDWQTATTLCPSGWRLPSNADWDKLFHYADGTSGTQPGAESPYKSPTAGRYLRATSGWNMCGNGSSYTYKCEDTFGFSALPGGHNEDKDGFYSVGSSGYWWSNSEYISSSGYDSGEYVYRIRMKYDKEDVSYPASNKRDLLSVRCVKN

SEQ ID NO: 37611 - DNA, 654 bp, Unknown
  Obtained from environmental sample
  misc_feature (1)..(654): n is a, c, g, or t
gtggagccttctgtacttcttttggacgagcccctctccaacctggacgcactgttgcgtgagcagatgagggtggagatccgccgcattcaaaaaagtcttggaacgaccgcggtttatgttacccatgaccgcgtagaagcaatgacgctttctgatcgggtaatcgttatgcgcgacggaaagatacagcagataggcactccccagcaaatctacgaagatcccgacagcaagtttatcgcgggctttgtaggtaaggcggctttcttcccggtggaactgctcgaaaaacgcgggaaaactgcggaaactgcctctggcagttccggcagttctagttgggcttgcaaattgaaaaacaaaaccttcgagctaagccgtttcgctagcgacgtggaattgggaaaagaggcagtaataatggcccggcccgaatccctcagactggtagaaagcggagttggcgctgtggagggcattgtaaaaatgaacgtctacctgggccacagcatagagagttttgtggaaacctccgacggcgaagtccttatccagattgacgatccggcctcaaagaaaatttacggcgagggcgcaaaaatttccattgagtttaactctgaacgcatacgccttctaaaaaacgaatag

SEQ ID NO: 37612 - protein, 217 aa, Unknown
  Obtained from environmental sample
  DOMAIN (141)...(214): TOBE domain
  misc_feature (1)..(217): Xaa is any amino acid
MEPSVLLLDEPLSNLDALLREQMRVEIRRIQKSLGTTAVYVTHDRVEAMTLSDRVIVMRDGKIQQIGTPQQIYEDPDSKFIAGFVGKAAFFPVELLEKRGKTAETASGSSGSSSWACKLKNKTFELSRFASDVELGKEAVIMARPESLRLVESGVGAVEGIVKMNVYLGHSIESFVETSDGEVLIQIDDPASKKIYGEGAKISIEFNSERIRLLKNE

SEQ ID NO: 37613 - DNA, 450 bp, Unknown
  Obtained from environmental sample
  misc_feature (1)..(450): n is a, c, g, or t
gtgcctatgggcaagaaggtcaaggatttgatgaaggagttcaagctaaagcacctgcatttggcggtaatagtggacgagtacggcgggacggcggggatcgtcacgatggaagacattttggaggagatagtaggggacatccaagacgagtacgacgaggaagagaaggagatagtgcctatagacggcaacgtttactttgttgatccgcacatagacctgcgcgatctgaacgacgaactgaacctcgacctcaacgaagacgctgactacaacacgctgagcggcttgatataccacgagtgcggcgacgttccgctcgagggcacgcagatagagtgcggcggcgtgcggatcaacgtcatcaagatggacaaccagcgcatagagaaggtcaaactggaggttttgcagagcgtcgagaagaccgaggcggagccgttctga

SEQ ID NO: 37614 - protein, 149 aa, Unknown
  Obtained from environmental sample
  DOMAIN (60)...(139): Transporter associated domain
  misc_feature (1)..(149): Xaa is any amino acid
MPMGKKVKDLMKEFKLKHLHLAVIVDEYGGTAGIVTMEDILEEIVGDIQDEYDEEEKEIVPIDGNVYFVDPHIDLRDLNDELNLDLNEDADYNTLSGLIYHECGDVPLEGTQIECGGVRINVIKMDNQRIEKVKLEVLQSVEKTEAEPF

SEQ ID NO: 37615 - DNA, 399 bp, Unknown
  Obtained from environmental sample
  misc_feature (1)..(399): n is a, c, g, or t
atgctgaccgccgtcgcgaagtcggtctatcggtgggagggggtgagcgtcggtcaatcaacgaccgtcgtcctttgttcagattacatgatacgcaagcttaaccggctatatcgcggcaaggacaaggccacggacgtgctctccttntgcttcggcgacgacgatctgctgggggaggtctacatatcgccgcaacgcgcaaaggttcaggcgcggcggtacggggtctcctacgatgacgaactgaagcgtctgctgatccacgggctgctgcatcttatggggtacgaccatatcaagcgggcggacagggcggtcatggaggagaaggagaacgcctatttcagaacggctccgcctcggtcttctcgacgctctgcaaaacctccagtttga

SEQ ID NO: 37616 - protein, 132 aa, Unknown
  Obtained from environmental sample
  DOMAIN (26)...(112): Uncharacterized protein family UPF0054
  misc_feature (1)..(132): Xaa is any amino acid
MLTAVAKSVYRWEGVSVGQSTTVVLCSDYMIRKLNRLYRGKDKATDVLSXCFGDDDLLGEVYISPQRAKVQARRYGVSYDDELKRLLIHGLLHLMGYDHIKRADRAVMEEKENAYFRTAPPRSSRRSAKPPV

SEQ ID NO: 37617 - DNA, 1590 bp, Unknown
  Obtained from environmental sample
  misc_feature (1)..(1590): n is a, c, g, or t
ttggcggacgggcggaaagtggtagtttccctcgccccatcattcgtttctgaatttaccgactggaaaccggaaaaacttatcgctgcgcttaaaaaactggggttcaccgccgtatcggaaaccgctctgggtgctgattttctttccgcccgtagcgccggtgatttggcatcgggcgctgcactgtgtaccacttcgggcaacccacctttattgatgatttcctcggcctgtcctgtcattgttgactacataaagctctacaatccccgtcttgcacccttcatttcgcctcacgcctcgccgctcctcacccacgccaggtttctccgttcccgttacgaaacggacggaaaaatcgcggtggtgtttatcgggccctgcatcgccaagaaacacgaggctgatttgtacagggaagagattgacgccgccattaccttcgcggaactgcgtgaatggctgcacaaagagcgcataaccccccagacaatttcgatttcggtttctccttctgcccttgctaattgcgcttttgagccccgccggagcgcgaaaggggcttttttcccggtcgaaggcggggaaataaccgctttttccgcctacatcgcggaagcggcagcggaagagggaaagcggatacataccctctcggcatcgggctttcatgcggtgggagatctgctgaagggatttgatcccgctacgttggaaacaccgctgtttctggaactcctggcctgtcccggcggctgcctcaacggtcccggaatgtccggcgcgtcgcagggtgttgtccgccatgtgcgtctgcgggactatgcgcgcactgccgacaatgccctcgacaacagtatgcttcccctttcgcctttgatgnatgcaaattatccgttggctccgttgtcggataccgtacatactgaaaaggaaatcaccgaagcgcttttacgggtgggaaaatacagtctttccgaccgacttaactgtgcgagctgcggttatgatacctgccgggatttcgcctccgccctgctggacggacgggcagaaaaatcaatgtgcgcttcgtatatgagaaaacttgccaacaaaaccgccaatggacttatcaaggcgattccttccggtgttgttatagttgacaatgacttgaaaattattgattgtaacgaacagtttgcgcgtcttctgggaagcgagaccgaagaactgtttgccataatgccgggattggaaggggcggaactcgaaaaaatatcacccttcccgcagtattttcaggcaattattgatccatcaggaccggagcttgcccaaaccgatgtgcgggaaggcagtaaaatatttcacctaactatttttgccgtggaaaaaggcattgccgcagcgggagttgtagaagatattaccgagccgagggttcaaatcgaaacaactgttgaacgagcgcgggaacttatcaaaaaaaatgtttcaaccgttcaacaaatagcttttctgctgggagaaaatgcggcggaatctgagtctatcctcaattccattatagagtcttacacggtaaaagaagaagatgcctga

SEQ ID NO: 37618 - protein, 529 aa, Unknown
  Obtained from environmental sample
  DOMAIN (329)...(360): Putative Fe-S cluster
  misc_feature (1)..(529): Xaa is any amino acid
MADGRKVVVSLAPSFVSEFTDWKPEKLIAALKKLGFTAVSETALGADFLSARSAGDLASGAALCTTSGNPPLLMISSACPVIVDYIKLYNPRLAPFISPHASPLLTHARFLRSRYETDGKIAVVFIGPCIAKKHEADLYREEIDAAITFAELREWLHKERITPQTISISVSPSALANCAFEPRRSAKGAFFPVEGGEITAFSAYIAEAAAEEGKRIHTLSASGFHAVGDLLKGFDPATLETPLFLELLACPGGCLNGPGMSGASQGVVRHVRLRDYARTADNALDNSMLPLSPLMXANYPLAPLSDTVHTEKEITEALLRVGKYSLSDRLNCASCGYDTCRDFASALLDGRAEKSMCASYMRKLANKTANGLIKAIPSGVVIVDNDLKIIDCNEQFARLLGSETEELFAIMPGLEGAELEKISPFPQYFQAIIDPSGPELAQTDVREGSKIFHLTIFAVEKGIAAAGVVEDITEPRVQIETTVERARELIKKNVSTVQQIAFLLGENAAESESILNSIIESYTVKEEDA

SEQ ID NO: 37619 - DNA, 822 bp, Unknown
  Obtained from environmental sample
  misc_feature (1)..(822): n is a, c, g, or t
atggccgagaggcctgatgtattgctccagcccgttagcaccgctaacaccgctaacaccgctaacacctctgccgttaacacgactaacactgttaatatcgccagcatcgttaaaacccctaacgccgctaatatctttgtcgaatcctattcccctgataccagcctcccggcgctccgcgccgacgcgatcagctttttgacaaacgtgccctcctccggtacaaacacgcatgatgaactcgtggactccctgcggatcctgcagattgcgcggatcaacctcgaactcgccgcgctcgacgctgcgctcgcggacagccgcgccatgcccaaccttgatctcgtcctctccggcgagaagaacgcgggcaaaaaaacattggacgaagccctggggtcgatggacgggagcaattttttcgccggactcgccttctcggttccgttgcaaaattcgtcggagaaatccgcaagcgaagccgcgaaatttgcgctcgcgaagcagcggtttgactatgacgccgcgcgcataaccagcagaaacgcgctgcagcaatatgtcatctcgcttgccgcggcgcgcgatatcgtgaagctcgccgagcaaagcgtggaggcggcggccacgcgcgttaatgtggtctacaccaaataccagcagggacgcgccacgctgaacaacctgaccgacgcgcaggacgcctgggcgcgcgcgcgtatgaccgcgctggattcgctgcactccctgcgccggctggagctggaatacagcgcgatcacagaccggctcgcgccccgcgcttttggtcatccataa

SEQ ID NO: 37620 - protein, 273 aa, Unknown
  Obtained from environmental sample
  misc_feature (1)..(273): Xaa is any amino acid
MAERPDVLLQPVSTANTANTANTSAVNTTNTVNIASIVKTPNAANIFVESYSPDTSLPALRADAISFLTNVPSSGTNTHDELVDSLRILQIARINLELAALDAALADSRAMPNLDLVLSGEKNAGKKTLDEALGSMDGSNFFAGLAFSVPLQNSSEKSASEAAKFALAKQRFDYDAARITSRNALQQYVISLAAARDIVKLAEQSVEAAATRVNVVYTKYQQGRATLNNLTDAQDAWARARMTALDSLHSLRRLELEYSAITDRLAPRAFGHP

SEQ ID NO: 37621 - DNA, 423 bp, Unknown
  Obtained from environmental sample
  misc_feature (1)..(423): n is a, c, g, or t
gtgaacaccattcttctgaaacagtctatacgcagcgcctctgagatcagcttctcgcgatccggaggtcccggcgggcgcaatgtcgacaagcttaatacaaaggtgacgctgcggctgcatatggcgcttgttgacggcctctcggacgctgaactggagagggccagagaaacgctggcaaaccgcataagcgccggggatgagattgttataagttctgacgaagaacgctctcattttaccaatctggaaagagcgtatttccgcgttgaggcgcttataactcaggcggcccgcctgcccaaacaccgccgccctacaaaaccgtcaaaggccagccgcgagaaaaggctccatgtaaagcagttgcaaagcagaaaaaaagagttaaggcgtccggagcatacgccggacgattaa

SEQ ID NO: 37622 - protein, 140 aa, Unknown
  Obtained from environmental sample
  misc_feature (1)..(140): Xaa is any amino acid
MNTILLKQSIRSASEISFSRSGGPGGRNVDKLNTKVTLRLHMALVDGLSDAELERARETLANRISAGDEIVISSDEERSHFTNLERAYFRVEALITQAARLPKHRRPTKPSKASREKRLHVKQLQSRKKELRRPEHTPDD

SEQ ID NO: 37623 - DNA, 1275 bp, Unknown
  Obtained from environmental sample
  misc_feature (1)..(1275): n is a, c, g, or t
atgatcngcgagttacaatacggaatatattttaatattctcagggaaagaactatcaccccctcaggcctgcttaaatttttttccaggaaggaagaagtcgaagtagaattctgcctggttacccagttggggcaggggcttccggccaaacagccgcaatccaagaagcagccggcggctgcggcggaaaatgaggacgatgatcccaatctcgtggattttgaggaaaagaaaaaacaaatcctggttgccgcaggtaaggatcccaacaaagtcatgcggcaaaagaaggagcatgaaaacagggaagccggccagcagttaatacttgataaactcaacgcgataatggaaaagcaggagcagatcaactcaaagaacgcccccaggcaggatcaccccagcctgcagcgcattacaaagatgctccggcaaaacgaattttcagaaaactatatcaacggcttgctggacagggcgcgtaaggaactgccgctggaaacgcttgatgattttaacgcggttcagaagaatttccttttctggattggggaaagcatcaaaatccacaatatgccgccgaaggacgagcattttgacgctcccgccggcaggatattagcgctggtcggccctacaggcgtaggcaagaccaccaccatcgcgaaacttgccgtggtttacggcattggcagcgcggacaggccgccgctttccgttcgggtatacaccattgacacgttcaagattggcggaagcgttcagcttgagaaatactgcgaaataatggaagtagtgcccttcgccgttattaacgattaccttgaactcagaaaagagattgatatgtaccgcgaagagaccgatctgatcctgattgataccataggaagcagcccgaacgatcctaaaaaactgggagatataattgagcttcttagggcctgcggttcaaaagcggagacgcaccttgtgctttccgcgagtaccaagaccaacgatatagaacatatactaaggcagtttgagccgtttaactatcaggcggttttacttaccaagatggatgaaaccaggaccgtgggtaatataatttccgcccttgcggaaaagggaaaaccgatatcatacattaccaacgggcagcaaattcacaaggatattaaaagagcgaatgtagtcgggttcctgattaacctggaaggattcagcgttgacagggatgaaatggagaaacgtttttctcccatacagacggataaaattctttga

SEQ ID NO: 37624 - protein, 424 aa, Unknown
  Obtained from environmental sample
  DOMAIN (204)...(403): SRP54-type protein, GTPase domain
  misc_feature (1)..(424): Xaa is any amino acid
MIXELQYGIYFNILRERTITPSGLLKFFSRKEEVEVEFCLVTQLGQGLPAKQPQSKKQPAAAAENEDDDPNLVDFEEKKKQILVAAGKDPNKVMRQKKEHENREAGQQLILDKLNAIMEKQEQINSKNAPRQDHPSLQRITKMLRQNEFSENYINGLLDRARKELPLETLDDFNAVQKNFLFWIGESIKIHNMPPKDEHFDAPAGRILALVGPTGVGKTTTIAKLAVVYGIGSADRPPLSVRVYTIDTFKIGGSVQLEKYCEIMEVVPFAVINDYLELRKEIDMYREETDLILIDTIGSSPNDPKKLGDIIELLRACGSKAETHLVLSASTKTNDIEHILRQFEPFNYQAVLLTKMDETRTVGNIISALAEKGKPISYITNGQQIHKDIKRANVVGFLINLEGFSVDRDEMEKRFSPIQTDKIL

SEQ ID NO: 37625 - DNA, 471 bp, Unknown
  Obtained from environmental sample
  misc_feature (1)..(471): n is a, c, g, or t
atggagagaggcagaggggcctatcttggagctgatcggttgggtaacaatttggcccgaaagcttccgctgttcgaaagcctgatcattcacgcttatcggagagaaaggcgtggaatctttttgaatatggcccatctaaaagcatggtgcgggaaaataatgaatcgttcaggcgtcatgcgctcggtggaggacaagccggtctctttttcaggcggcatgatacagcgtgttcttttgcagcgcgaatttgcggaagacgcgtcccttctggttttgaccgaacccggcagcgctctggatcaaattaaccgcacggcgcttgccgatgcgctcagggaatatgtcagaggtggcagggtggcgctgattttttcttcggacgccgaggagctaaaattttttaccgatgaaattatggttcttaaaaacggaactataagaaaatggggggatgatgagatttaa

SEQ ID NO: 37626 - protein, 156 aa, Unknown
  Obtained from environmental sample
  DOMAIN (14)...(146): ABC transporter
  misc_feature (1)..(156): Xaa is any amino acid
MERGRGAYLGADRLGNNLARKLPLFESLIIHAYRRERRGIFLNMAHLKAWCGKIMNRSGVMRSVEDKPVSFSGGMIQRVLLQREFAEDASLLVLTEPGSALDQINRTALADALREYVRGGRVALIFSSDAEELKFFTDEIMVLKNGTIRKWGDDEI

SEQ ID NO: 37627 - DNA, 495 bp, Unknown
  Obtained from environmental sample
  misc_feature (1)..(495): n is a, c, g, or t
atgatgagatttaaaaagtccctgtttaaaatggccgactcgccgtttctcggccctgtcattgccataggatcggcggttttattaacggtgattcttatccttattaattctgctcgtccggaaaaaaccttaacagcctttttcctggggccctggtcttctccctggttcttcggcaatacccttgatggaattgccctgctattaacagcttcgctgggcgcggcaatcgcgttacgcgggggaaccttcaaccttgggggggaagggcagatctacgtaggcggcttgaccgcttcgatggttctgcttacacactcgcctctaccgcctgctttactgctcctgctcgccgcgttagccgctatgctgggcaggcggccttttgggtggcatttccgggctgttaaaaaaacatctggacatgaacgaactcatcacttcctttttattttcttccgccctcatccccctggccgactacctgattag

SEQ ID NO: 37628 - protein, 164 aa, Unknown
  Obtained from environmental sample
  misc_feature (1)..(164): Xaa is any amino acid
MMRFKKSLFKMADSPFLGPVIAIGSAVLLTVILILINSARPEKTLTAFFLGPWSSPWFFGNTLDGIALLLTASLGAAIALRGGTFNLGGEGQIYVGGLTASMVLLTHSPLPPALLLLLAALAAMLGRRPFGWHFRAVKKTSGHERTHHFLFIFFRPHPPGRLPD

SEQ ID NO: 37629 - DNA, 522 bp, Unknown
  Obtained from environmental sample
  misc_feature (1)..(522): n is a, c, g, or t
atgtttttcagcgtgtctttcagcggattaacattttcaataattgaaaaaaataattgcgaaaaaatatacggaatattgccggttcgcagaagggaaatcattgcgggaaggtatttatacggatttattttgggaatagtgaatatgataatttcaataatgttggcgaatataattgcgatattctctaaacaatatattgaccctattatattgttcctatctataacaatggctttcttttattatagtttctcggtgagtatttcgtatccaatttattataaatttggtttttcaaaatcatttatttttataacaatgcctttgtatatcataattctcctttttgtttttatatctgagaaaactggtcttattgagactatcgatcagaatttacaatacttcactaatcattatattttgcttttgctatatggttttattttttgtatacttatgctcgtaatttctgcaactatatcttttggaatctttaaaaattcagaaatataa

SEQ ID NO: 37630 - protein, 173 aa, Unknown
  Obtained from environmental sample
  misc_feature (1)..(173): Xaa is any amino acid
MFFSVSFSGLTFSIIEKNNCEKIYGILPVRRREIIAGRYLYGFILGIVNMIISIMLANIIAIFSKQYIDPIILFLSITMAFFYYSFSVSISYPIYYKFGFSKSFIFITMPLYIIILLFVFISEKTGLIETIDQNLQYFTNHYILLLLYGFIFCILMLVISATISFGIFKNSEI

SEQ ID NO: 37631 - DNA, 468 bp, Unknown
  Obtained from environmental sample
  misc_feature (1)..(468): n is a, c, g, or t
atggcggaactattgacggagaccaacaagcaaactattgaggcgggcgggaaactgccggaagatgaacagcatagggtgcgcaggaaataccggaggatacttactgacgcggaaaaagaaaatccgatacccccgttgcaaggaaagcaaaaaagagggcggatggcgcggacaaagacgcggaatcttcttgacaggatgagggagtatgaagaggacatactgcggttcatgactgatgcagacgtaccttttacaaataaccaggcggagcgtgatatccgtatggtaaaagtacaacagaaaatatcagggagcttccgctcatgggacggcgcaaattttttttgccggatacgcggttacttgtcaacctgcgaaaagcacaatatttcatcggcagatgctctggaaattctttttaacggcaaatttccagattttatgtcccttttggctgaatag

SEQ ID NO: 37632 - protein, 155 aa, Unknown
  Obtained from environmental sample
  misc_feature (1)..(155): Xaa is any amino acid
MAELLTETNKQTIEAGGKLPEDEQHRVRRKYRRILTDAEKENPIPPLQGKQKRGRMARTKTRNLLDRMREYEEDILRFMTDADVPFTNNQAERDIRMVKVQQKISGSFRSWDGANFFCRIRGYLSTCEKHNISSADALEILFNGKFPDFMSLLAE

SEQ ID NO: 37633 - DNA, 969 bp, Unknown
  Obtained from environmental sample
  misc_feature (1)..(969): n is a, c, g, or t
ttgatgaaaaatgcccggaaacaaataaacaacgaaccgaatctgtctgccggaatgaaagcgttatntgagatgctcatcgccgtgatacagcttctagccggaaggaggcttgccaaaaactcaaagaacagcggcgtccccccctcgatggatccaaaccgtgaaaagaagcccaaaccgaaacgggaaagaaagcccggcgggcagcccgggcacgcaggggttaccctgcaacagagtgaaaatccggacatgataattgaactcaaagtagaccggaagagactgcctgccggccaatggacatatgccggctgtgagaaacgccaggtttttgacctgaagattaccgcccatgtcacggaataccaggcggagatactggtcaatgaaaggggcgacaaggtgacggcggagtttcccggcggcctggtgcaaaaagcgcagtacggcaacggggtaaaagcgcacagcgtgtatatgtcggtgcagcagcttataccgtgcgagcgggtgagcgagcattttgccagccagatggggctgcctttgagcgccggaaccgtgcataatttcaaggaagaagcgtataacctgcttgaaacgtatgaagaatgggtgcaagaacagataaggaactcaaaaataattcatgcagatgagacgggcatagtgattgaaggcaagcgggtatggctgcatgtggcatgcaccggcttatacacattatattacccgcatgagaaacgggggaaaaccgcgacggatgaaatggatgtcttgaacgcgcaaggcggcatactgatacatgatcactggaagccgtatttcacttacgagaacaaagaacacgggctgtgcaacgcgcattacgtaagggaactannccgccgcatcagaggaagggcagaagtggccgcagcggatggcggaactattgacggagaccaacaagcaaactattga

SEQ ID NO: 37634 - protein, 322 aa, Unknown
  Obtained from environmental sample
  misc_feature (1)..(322): Xaa is any amino acid
MMKNARKQINNEPNLSAGMKALXEMLIAVIQLLAGRRLAKNSKNSGVPPSMDPNREKKPKPKRERKPGGQPGHAGVTLQQSENPDMIIELKVDRKRLPAGQWTYAGCEKRQVFDLKITAHVTEYQAEILVNERGDKVTAEFPGGLVQKAQYGNGVKAHSVYMSVQQLIPCERVSEHFASQMGLPLSAGTVHNFKEEAYNLLETYEEWVQEQIRNSKIIHADETGIVIEGKRVWLHVACTGLYTLYYPHEKRGKTATDEMDVLNAQGGILIHDHWKPYFTYENKEHGLCNAHYVRELXRRIRGRAEVAAADGGTIDGDQQANY

SEQ ID NO: 37635 - DNA, 954 bp, Unknown
  Obtained from environmental sample
  misc_feature (1)..(954): n is a, c, g, or t
atggcgagaggggagatttggtccttatttccgagcgagcgtttggaaatttatggcaaagcagcacagcaactcatagatagcggcaatgcctactactgtttttgcaccgaagaacgtttgcaaactttggaacacggttacgaccgccattgcagggatttaccactggaagaagcaaaaaagagaatagaagctggcgaaaaatttgtggttaggttcaaaagcccgctggacggcatcacaaaattcaacgatttgataagaggcgaaatagaaaccccaaacaaagacttagacgaccttgtattattaaaaagggataaatttcccacttaccatctggcaagcgttgttgacgaccattatatgcaaacaagccacgtgctcagaggcgatgaatggataagcagcacgcccaaacacgttttgctatacaatgcttttggctgggaagccccgctcttttgccacctgcctgtgattttggctcccggtggcggcaagctctccaagcgcaaaggggctgcatccgttggtgattttagggatttgggttatttgccgcacgcactggtgaattttctctcgctcctgggttggaaccccggagacgatagggaagtgatgagcttagaagagatgatagagactttttctctggaacgcatccacccaaaagcggttgcctttgacgaaaaaaaacttgaatggatgaacggtatgcacataaggctattgccggattcatattttgcagatgaattgaaaaaactttacccgaacgaaaaagacgaaagcaaatttttgaaaaccgccgctctcttaaaacctcgcttaaaattcacaaccgaattgccagcgatgtccaattacttttttgaacgccctgaaaaaatcatagatgaaaaggctaaggcaaagtactggacagagcaaagccccaacacatag

SEQ ID NO: 37636 - protein, 317 aa, Unknown
  Obtained from environmental sample
  DOMAIN (4)...(238): tRNA synthetases class I (E and Q), catalytic domain
  misc_feature (1)..(317): Xaa is any amino acid
MARGEIWSLFPSERLEIYGKAAQQLIDSGNAYYCFCTEERLQTLEHGYDRHCRDLPLEEAKKRIEAGEKFVVRFKSPLDGITKFNDLIRGEIETPNKDLDDLVLLKRDKFPTYHLASVVDDHYMQTSHVLRGDEWISSTPKHVLLYNAFGWEAPLFCHLPVILAPGGGKLSKRKGAASVGDFRDLGYLPHALVNFLSLLGWNPGDDREVMSLEEMIETFSLERIHPKAVAFDEKKLEWMNGMHIRLLPDSYFADELKKLYPNEKDESKFLKTAALLKPRLKFTTELPAMSNYFFERPEKIIDEKAKAKYWTEQSPNT

SEQ ID NO: 37637 - DNA, 909 bp, Unknown
  Obtained from environmental sample
  misc_feature (1)..(909): n is a, c, g, or t
gtggatccggtcagagaggcggaacggctcgtttcaattttatcaaaagacaaaaacggcctgcttaccgagggctttgtggtcttcctgggcctgggcgcgggcttcgcccctctggcggcattgaacagcggcgtatcccatgtgctgattattgattacgacattaacggcattgcggaactgttgtgttcccgcgactatatcgcgcttctgggagacccccgctgtaccctgctggtggatccgccgcccggccttattgagaacgtcatacttgagttgtaccggcccgccctgtacgggggaatcaggactctgcccctgcgcgcccggacggaactggacaaacaaaacttcggcctggccgccgacgcgatacaagaaaccatagaaaaagtatcttcggattattcggtgcaggcgcattttggtatgcgctggtttgccaatatcatccgcaacctgggagcggcccagcgccagaaccggagcgccccgcccatccgcgaagccgccatctgcgcggcgggaccctcgctggatgatcagatccccctccttgtcaaacaaaaagaccaggcgaaggcgcagggactgtttatcatctccgcggataccgcgctccccgccctgctgcgccgcggtctcaaacctgacgcggttgtttccattgattgccagcacatcagttattatcattttatgggaacggactgcgcggagattcagctcttcattgatattgccagcctgcccctttatcgcagtttctcgagtatcctttttttttctccggcgggcatccgttggcggcgtatatctcacaaatgtggcggccccttcgcctgctggacacttcgggcgggaacgtcgcctatgcctgcctgtccctcgcggaaagcgtga

SEQ ID NO: 37638 - protein, 302 aa, Unknown
  Obtained from environmental sample
  misc_feature (1)..(302): Xaa is any amino acid
MDPVREAERLVSILSKDKNGLLTEGFVVFLGLGAGFAPLAALNSGVSHVLIIDYDINGIAELLCSRDYIALLGDPRCTLLVDPPPGLIENVILELYRPALYGGIRTLPLRARTELDKQNFGLAADAIQETIEKVSSDYSVQAHFGMRWFANIIRNLGAAQRQNRSAPPIREAAICAAGPSLDDQIPLLVKQKDQAKAQGLFIISADTALPALLRRGLKPDAVVSIDCQHISYYHFMGTDCAEIQLFIDIASLPLYRSFSSILFFSPAGIRWRRISHKCGGPFACWTLRAGTSPMPACPSRKA

SEQ ID NO: 37639 - DNA, 777 bp, Unknown
  Obtained from environmental sample
  misc_feature (1)..(777): n is a, c, g, or t
ttggcggcgtatatctcacaaatgtggcggccccttcgcctgctggacacttcgggcgggaacgtcgcctatgcctgcctgtccctcgcggaaagcgtgagcgcgcagcacataacggtgtacggagttgactttgcgtatcccgccggaaaggcgtatgcgcggggcacgtacatttacccgtatttcgcgcaacggcaggaacgccgggcgccgctggaggcgcagctttcctcatttctctaccgcagtcctttccttcccgcggaaaaggcggacttccagtccgcggaatataccggcgttcctccgtatgagactgccacgttgcgcgtataccgcggcagctttgagcgtaaaatagcggcaatggacgcccgcgtatcggcggctcccggttcgggaatcccgctgacaatcagcaaaaaaacggactgcgcgccgtctaacccgcgtcatcggattatcagcctctttgcccccgggagaatggtgacggatgcaaaccgatttctggaacagtaccggcgcgatatagcggcgctgcccgacatgggcaatgcgggcaataagactgacggcagtaaaactgacggcgtacgtgccggcgcgtacatgcaacgtctcgagcttgaccagcggcggatttttaccaccctgctgccgcaggcggcggccatccgtcaccgccgccctgacctgtcaacgggcgaaccgattgaggcggtcaaacgttatagcgttaaagaaattgaccatgtactgcagggcgaataa

SEQ ID NO: 37640 - protein, 258 aa, Unknown
  Obtained from environmental sample
  misc_feature (1)..(258): Xaa is any amino acid
MAAYISQMWRPLRLLDTSGGNVAYACLSLAESVSAQHITVYGVDFAYPAGKAYARGTYIYPYFAQRQERRAPLEAQLSSFLYRSPFLPAEKADFQSAEYTGVPPYETATLRVYRGSFERKIAAMDARVSAAPGSGIPLTISKKTDCAPSNPRHRIISLFAPGRMVTDANRFLEQYRRDIAALPDMGNAGNKTDGSKTDGVRAGAYMQRLELDQRRIFTTLLPQAAAIRHRRPDLSTGEPIEAVKRYSVKEIDHVLQGE

SEQ ID NO: 37641 - DNA, 759 bp, Unknown
  Obtained from environmental sample
  misc_feature (1)..(759): n is a, c, g, or t
gtgccagaagactatgttatgcctcggcctttggtcatacccaaccccggaacagcggggataacgctggtgataaagggaattacggcaacaaccatgataacccgtggcacccaggatatcgccgccactaacgggctgttcatagtgccgagcggtgtaaagctggtatttgaaaacatcgtgattgacggcgaccagggcgaacatacgggcaacaccgcctcgctggtgcgtgtaaacagcgggggaacattcacgatgaacaagggggctgttttacagaacaaccgcgcaacaagcggcggcggggtatacaacaacggcggcacgttcaccatgaatagcggcagtaagataacgaacaatacggctgcaagtaacggcggcggcggcgtgtatgccggtagtggcacgttcgccatgagcggcggcgagataagcggcaatacgacaagcggcagcaacggcggcggcgtgtatttctccggcggtacattcaccataagcggcggcgagataagcggcaatacggcaagcggcagcaacagcggcagcggcaacggcggcggcgtgtatgccggcagcgcgttcaccatgagcggcggcgagataagcggcaatacggcaagcggcaacagcggcagcagcggcggcggcgtgtatttctccagtaacggtacactcaccatgagcggcggcaagataaacggtaatacggcgacnagctacggcggcggcgtgtatgtcaccggctaa

SEQ ID NO: 37642 - protein, 252 aa, Unknown
  Obtained from environmental sample
  misc_feature (1)..(252): Xaa is any amino acid
MPEDYVMPRPLVIPNPGTAGITLVIKGITATTMITRGTQDIAATNGLFIVPSGVKLVFENIVIDGDQGEHTGNTASLVRVNSGGTFTMNKGAVLQNNRATSGGGVYNNGGTFTMNSGSKITNNTAASNGGGGVYAGSGTFAMSGGEISGNTTSGSNGGGVYFSGGTFTISGGEISGNTASGSNSGSGNGGGVYAGSAFTMSGGEISGNTASGNSGSSGGGVYFSSNGTLTMSGGKINGNTATSYGGGVYVTG

SEQ ID NO: 37643 - DNA, 693 bp, Unknown
  Obtained from environmental sample
  misc_feature (1)..(693): n is a, c, g, or t
ttgccgccgctcatggtgagtgtaccgttactggagaaatacacgccgccgccgctgctgccgctgttgccgcttgccgtattgccgcttatctcgccgccgctcatggtgaacgcgctgccggcatacacgccgccgccgttgccgctgccgctgttgctgccgcttgccgtattgccgcttatctcgccgccgcttatggtgaatgtaccgccggagaaatacacgccgccgccgttgctgccgcttgtcgtattgccgcttatctcgccgccgctcatggcgaacgtgccactaccggcatacacgccgccgccgccgttacttgcagccgtattgttcgttatcttactgccgctattcatggtgaacgtgccgccgttgttgtataccccgccgccgcttgttgcgcggttgttctgtaaaacagcccccttgttcatcgtgaatgttcccccgctgtttacacgcaccagcgaggcggtgttgcccgtatgttcgccctggtcgccgtcaatcacgatgttttcaaataccagctttacaccgctcggcactatgaacagcccgttagtggcggcgatatcctgggtgccacgggttatcatggttgttgccgtaattccctttatcaccagcgttatccccgctgttccggggttgggtatgaccaaaggccgaggcataacatag

SEQ ID NO: 37644 - protein, 230 aa, Unknown
  Obtained from environmental sample
  misc_feature (1)..(230): Xaa is any amino acid
MPPLMVSVPLLEKYTPPPLLPLLPLAVLPLISPPLMVNALPAYTPPPLPLPLLLPLAVLPLISPPLMVNVPPEKYTPPPLLPLVVLPLISPPLMANVPLPAYTPPPPLLAAVLFVILLPLFMVNVPPLLYTPPPLVARLFCKTAPLFIVNVPPLFTRTSEAVLPVCSPWSPSITMFSNTSFTPLGTMNSPLVAAISWVPRVIMVVAVIPFITSVIPAVPGLGMTKGRGIT

SEQ ID NO: 37645 - DNA, 1008 bp, Unknown
  Obtained from environmental sample
  misc_feature (1)..(1008): n is a, c, g, or t
atgttgtcctttcttgcggtctgcgcccaaatttccattcccgaagcgggggcgttagcccctgtgccaagcgtgatatacgtggttcccggaacatacacattgctcctggcagcgccgtccgccttggtattgtcttttactttcgcggttttgccaacagtgaacgtagcgttattatataccccgccgccgttacccgccgccttgttgccgcttatctcgccgtcattcatggtgaacgcgccgccgctgacatacacgccgccgccgccgttgtttgccgcgcttccgtttgccgtgttgccgcttatctcgccgtcattcatggtgaatgtgttgctgccgacatacacgccgccgccgttacctgtcgccgtattgttcgttatcttactgccactgttcatggtgaatgaaccactgccgccgctgctgttggtgaaatacacgcccccgccgttgccgttgctgccgattaccttattgccgcttatctcgccgccgctcatctcgaacttaccggcgttagccggtgacatacacgccgccgccgtagctngtcgccgtattaccgtttatcttgccgccgctcatggtgagtgtaccgttactggagaaatacacgccgccgccgctgctgccgctgttgccgcttgccgtattgccgcttatctcgccgccgctcatggtgaacgcgctgccggcatacacgccgccgccgttgccgctgccgctgttgctgccgcttgccgtattgccgcttatctcgccgccgcttatggtgaatgtaccgccggagaaatacacgccgccgccgttgctgccgcttgtcgtattgccgcttatctcgccgccgctcatggcgaacgtgccactaccggcatacacgccgccgccgccgttacttgcagccgtattgttcgttatcttactgccgctattcatggtgaacgtgccgccgttgttgtataccccgccgccgcttgttgcgcggttgttctgtaa

SEQ ID NO: 37646 - protein, 335 aa, Unknown
  Obtained from environmental sample
  misc_feature (1)..(335): Xaa is any amino acid
MLSFLAVCAQISIPEAGALAPVPSVIYVVPGTYTLLLAAPSALVLSFTFAVLPTVNVALLYTPPPLPAALLPLISPSFMVNAPPLTYTPPPPLFAALPFAVLPLISPSFMVNVLLPTYTPPPLPVAVLFVILLPLFMVNEPLPPLLLVKYTPPPLPLLPITLLPLISPPLISNLPALAGDIHAAAVAXRRITVYLAAAHGECTVTGEIHAAAAAAAVAACRIAAYLAAAHGERAAGIHAAAVAAAAVAAACRIAAYLAAAYGECTAGEIHAAAVAAACRIAAYLAAAHGERATTGIHAAAAVTCSRIVRYLTAAIHGERAAVVVYPAAACCAVVL

SEQ ID NO: 37647 - DNA, 636 bp, Unknown
  Obtained from environmental sample
  misc_feature (1)..(636): n is a, c, g, or t
atggcattccagcacactatcggcaaaagcgtctctctgaccggcgtcggcctgcatacaggcgtggcctcgcaggttacgttctcccccgctcccgaaaactacgggatccgattcgtccgcgccgaccttgacggcaagccggagatacccgccgacatcgacaacgtcgtcgacctctcgcgcggcaccgccataggcctcggcgacgtgcggatgtactcggtcgagcacgtgatgtcgtgcttcgccggcctcgagatcgacaactgccgcgtggaggtcaacgcgcaggagatcccgctcatggacggcagcgccatgccctacgtcaacctcgtgcagaaagccggtatcgtggagcaggaggcggaacgctcgtacatcaatatagacgagccgctgatgttcgtcaaaggcgacatcgctctgggcgtctttccgctcgactacctgcgcgtcaccttagagatagactacaaataccctgcgctgggcgcccaatacacgaccatgttctcgctcaaagactacgtcgccgacttcgccccgtcgcgcaccttctgcttcctctctgaaatacaaaaactgcgcgagcagggcctcattaaaggcggcagcttagacagcgcctag

SEQ ID NO: 37648 - protein, 211 aa, Unknown
  Obtained from environmental sample
  DOMAIN (1)...(211): UDP-3-O-acyl N-acetylglycosamine deacetylase
  misc_feature (1)..(211): Xaa is any amino acid
MAFQHTIGKSVSLTGVGLHTGVASQVTFSPAPENYGIRFVRADLDGKPEIPADIDNVVDLSRGTAIGLGDVRMYSVEHVMSCFAGLEIDNCRVEVNAQEIPLMDGSAMPYVNLVQKAGIVEQEAERSYINIDEPLMFVKGDIALGVFPLDYLRVTLEIDYKYPALGAQYTTMFSLKDYVADFAPSRTFCFLSEIQKLREQGLIKGGSLDSA

SEQ ID NO: 37649 - DNA, 888 bp, Unknown
  Obtained from environmental sample
  misc_feature (1)..(888): n is a, c, g, or t
ttgagatatagtattttagaggaaggcgaaaagctgaagcacatagtcactactcaaaaacaaatagatacttngcaagagaagctaaaacttgataattatgaattgacccttatgaaagcaaaaacgaatgttgcaatgctggagaaaaaacagaatctcaactacaaagaagaaagggatcttaatgtttataaaaatgaaattaaagccataaatgacaaacgcgaagcggcggcaaaagcggcagcagatgaagcaaaagcagtagctgactacgaaaaaaatcagaaagccttagcggaagcagaaaaggctaaagaagcggcaaggcaaaaatccatccaaatgtacgaggcagaaaccaaacgccttaacgactattacgacaattacaaaaaatctaaaagagacgaactagacatagcaaggggcaacaatgctgagttattaaagaatttggaagaattgaacaaaagaggaatattaatcggcaatgattacactcttgctgtgatcgcagcaaacaacgacttatcagaaaaagaaaaagaaataaataaaaaaaatatggaagaacgtataaaaaaagaagaagaaactcaaggcaaagtctgggaactccgcaggatagccgcaaaaagctacggcgatatagcggagatagaaatcgagcaaataagggttaaatacgagaaagaaataaaaatggcagaggatgccaaaatagacaccgttctcataaagcaggcggagcaagccgagatagaagccatacggcaaaaatccatagagagcgaaaggcagcagcaggaatgctccgcagctaccgcgagacggcagcgcaaacagaccaggaaagaatggctattcaaatggaaagcataa

SEQ ID NO: 37650 - protein, 295 aa, Unknown
  Obtained from environmental sample
  misc_feature (1)..(295): Xaa is any amino acid
MRYSILEEGEKLKHIVTTQKQIDTXQEKLKLDNYELTLMKAKTNVAMLEKKQNLNYKEERDLNVYKNEIKAINDKREAAAKAAADEAKAVADYEKNQKALAEAEKAKEAARQKSIQMYEAETKRLNDYYDNYKKSKRDELDIARGNNAELLKNLEELNKRGILIGNDYTLAVIAANNDLSEKEKEINKKNMEERIKKEEETQGKVWELRRIAAKSYGDIAEIEIEQIRVKYEKEIKMAEDAKIDTVLIKQAEQAEIEAIRQKSIESERQQQECSAATARRQRKQTRKEWLFKWKA

SEQ ID NO: 37651 - DNA, 870 bp, Unknown
  Obtained from environmental sample
  misc_feature (1)..(870): n is a, c, g, or t
atgggttttatcctgatttcaggcgcttatgatgattttcgcccaatccccccccgctataagttattacttcaattagtatccgcggttcttatagttatttccggctttgactttgaaagacttttttatacgggcggcggaatatttaccgatttaggatatttttgcattccaattaccgttctttgggtagtcggaattaccaatgcgtttaatatgattgacggagtcgacggccttgcggggggtgtttccgcaattattacgtttttcctcggtcttatatatttttcatattcgggagtatcaaaatctacccttttatgcgtatgtcttatcggcgtacttatcgggtttcttgtttttaacgcgccgtttccaagggcaaaaatctttatgggagactgcggaagccagttcctaggttttacgcttgccattctcccgttaatgaaagaagcggacaggccgacttcactgcctttattctatgcggcatccctttttcttatccccattttcgatactaccgccgccgtctggcgcagaatcagggacggaaagaagatatacgatcctgataaatcccatttacaccataaacttataaacatgggacttgacgcaaaaaaagttgacgccgtagtctattcggtgcaaataatcatcggaatattcacatttattgccattcacacagaaggcattaaatctctgattattttaggtgccgtctatctgtttgcgttggctttttttacgacaatccactttattaaccgctcagtagttaagaataaggccgaaataaacggggggggggggggggagatctactccggcttcaaattaacacatgggagctaa

SEQ ID NO: 37652 - protein, 289 aa, Unknown
  Obtained from environmental sample
  DOMAIN (1)...(159): Glycosyl transferase family 4
  misc_feature (1)..(289): Xaa is any amino acid
MGFILISGAYDDFRPIPPRYKLLLQLVSAVLIVISGFDFERLFYTGGGIFTDLGYFCIPITVLWVVGITNAFNMIDGVDGLAGGVSAIITFFLGLIYFSYSGVSKSTLLCVCLIGVLIGFLVFNAPFPRAKIFMGDCGSQFLGFTLAILPLMKEADRPTSLPLFYAASLFLIPIFDTTAAVWRRIRDGKKIYDPDKSHLHHKLINMGLDAKKVDAVVYSVQIIIGIFTFIAIHTEGIKSLIILGAVYLFALAFFTTIHFINRSVVKNKAEINGGGGGEIYSGFKLTHGS

SEQ ID NO: 37653 - DNA, 672 bp, Unknown
  Obtained from environmental sample
  misc_feature (1)..(672): n is a, c, g, or t
atgtatcccggcgaatgttttataagcgtaaaaaatagcttcaattcattgttgcccgaaatgataagttattcagaagaatatttatctgaaagaatcaatggaaaaacgactttatcaatatcaattcttgataaagaaatcgaaaagaaaggaatattggaaaaatacggttatacaaaaattcaatctataccggtaactatattctcttatgaaaacccattccccagtcaaattcttcccgaagggttttctgttatatcattggacgatgaaaatgattttaaaaaaataaatgattgcctatggtatggatttgatcatggtcccgaacccgacccggacaatgatattgatagcagaatattaatgcaaagcggaccgaattttcgtaaagacttaactactataataaaagccccaaatagtgaatatgcgtgttttgccggaatgtggtttgataaaaaaaataactatgcgtatttggaaccattagcgactgtgccaaaatatcggcgcatgggtttggcaacaatcgcattagttacgggaatgagaaaaacagaaaaattgggtgcaaaatattgctttggaggaacgggagagttttataaaagtaatggttttaaggaaatcgcaaaccgtgaattatggaaaaaagaatggtag

SEQ ID NO: 37654 - protein, 223 aa, Unknown
  Obtained from environmental sample
  DOMAIN (138)...(211): Acetyltransferase (GNAT) family
  misc_feature (1)..(223): Xaa is any amino acid
MYPGECFISVKNSFNSLLPEMISYSEEYLSERINGKTTLSISILDKEIEKKGILEKYGYTKIQSIPVTIFSYENPFPSQILPEGFSVISLDDENDFKKINDCLWYGFDHGPEPDPDNDIDSRILMQSGPNFRKDLTTIIKAPNSEYACFAGMWFDKKNNYAYLEPLATVPKYRRMGLATIALVTGMRKTEKLGAKYCFGGTGEFYKSNGFKEIANRELWKKEW

SEQ ID NO: 37655 - DNA, 744 bp, Unknown
  Obtained from environmental sample
  misc_feature (1)..(744): n is a, c, g, or t
ttggatattaatgttgaaaaaattatggaagcaaatcaagtgagcaaagaatgtttcaaagaatacgactttccacccgaagctctagctattgaacctgaagttattttcagcccaatgccgggcggtgccttaacagcaaacactttgatgatgcgcgaaaccaaaacattccacctttacccgcaagtgattaaaaatatggcagagtgcgtagctcgtggcggatttggttcaagcgttacccctgtttctcaattctatttccagcaggcttatgccaacacggttcagggtccttggaaaaaaataactgacggctatggcaatatggttctcggctaccttggcaaaaccccaagagaaccagacccagaaatagtgaaaattgcaagcgagcaaatgaaaaaaccagtattcaccggaaatccattggatgttttggagcccggtattccaaaagcgaaaaaagttttggaagataaccatttgcccgtaaccgatgaaaatattttcataatcggcgcaatggcaacaaaaggtggcaacaaaggcttggatttcttgcagggcaaggctagagttagtgttcccaaaaagaaacccgctgctcctgcggctccggttgctgtcgcaccggctgcaccagttgcatctgctccggcttatgcaccaattagcggcaccgttaattatggcgtttccgttggtggaaaaacatttaatgtgcaggttagcgggtaa

SEQ ID NO: 37656 - protein, 247 aa, Unknown
  Obtained from environmental sample
  DOMAIN (35)...(238): Conserved carboxylase domain
  misc_feature (1)..(247): Xaa is any amino acid
MDINVEKIMEANQVSKECFKEYDFPPEALAIEPEVIFSPMPGGALTANTLMMRETKTFHLYPQVIKNMAECVARGGFGSSVTPVSQFYFQQAYANTVQGPWKKITDGYGNMVLGYLGKTPREPDPEIVKIASEQMKKPVFTGNPLDVLEPGIPKAKKVLEDNHLPVTDENIFIIGAMATKGGNKGLDFLQGKARVSVPKKKPAAPAAPVAVAPAAPVASAPAYAPISGTVNYGVSVGGKTFNVQVSG

SEQ ID NO: 37657 - DNA, 813 bp, Unknown
  Obtained from environmental sample
  misc_feature (1)..(813): n is a, c, g, or t
ttgatatacataatccttttaacgcgcctggttttccatgaggaaacggtgaatagcacgatggaagtttcgcgccttctcgcgcaaaatggcgcgccgcacggaactgtgatcgcggccgattttcaggaagcgggaaggggaaggacacctgagcgccgctgggagatggaaagggagcaagcccttgcctttacggttttgctgcgttttcctcatctgataccggcggcactgactctgaggacggggctggcagtcgcactcgccatagaagattttgccccaacgattgccggcaaggcgctgattaaatggccaaacgacatactgcttcgggtgtcagatgacaggcaaaccgttttgaaactagccggcatcctcgccgaagcacagagcggcaacgtgcatataggcataggcgtaaatgtttcgcaaaagcagatgccggattttctgcgcgaaaaggcgacaagcatcagtcttgtttccggcgtggaattcagcgccggagacaggtataaccttctggaaaaaattctttcgcggttgcgtgatgaaattgatcccgcccgtgacatagtcggagacgcagccgcaggcaagttaccaggctggagggaacgactggaagcgcgtttgtacaaaaaaggcgatcagatctgttttgccaaaggagcggcggattcaggcgacatggtgacaggcacccttgcgggcatcgggcatgaaggagaattgcttgttacctcacatggcgggacaggaacgttttcgtttactgcgggggaaattttagttattagttattag

SEQ ID NO: 37658 - protein, 270 aa, Unknown
  Obtained from environmental sample
  DOMAIN (11)...(113): Biotin/lipoate A/B protein ligase family
  misc_feature (1)..(270): Xaa is any amino acid
MIYIILLTRLVFHEETVNSTMEVSRLLAQNGAPHGTVIAADFQEAGRGRTPERRWEMEREQALAFTVLLRFPHLIPAALTLRTGLAVALAIEDFAPTIAGKALIKWPNDILLRVSDDRQTVLKLAGILAEAQSGNVHIGIGVNVSQKQMPDFLREKATSISLVSGVEFSAGDRYNLLEKILSRLRDEIDPARDIVGDAAAGKLPGWRERLEARLYKKGDQICFAKGAADSGDMVTGTLAGIGHEGELLVTSHGGTGTFSFTAGEILVISY

SEQ ID NO: 37659 - DNA, 882 bp, Unknown
  Obtained from environmental sample
  misc_feature (1)..(882): n is a, c, g, or t
atgctgttacgcgcaaaaatagcggcatcgatgaggcgcatggataaagccaacgcatattttaccgatgcggttaacatcgatccgttgaacccgaatgtatgggccgcgtatttgcgtttcgggctcaattatgcgcattcacaggttccaaacatcttttatcgcgctatgaaacaggatattaatatgttccgcgatgaatatattttgtatttagtgggagcacaagacactaatttatttaataatgaaaatcaattgcaatacctggataaatttgcggaattttatatcaatgataaagacccggacgaagaaatattttcagaagtgatgaacataatgccgcgttttttggaaaagggcgaattcatcccgtttgtagaaaaaatactgcctactcttgaaaaaagcaaacactgtaacgatgatgacaaaaaaagtttcaaatatattcgctcgtctgtcatgctgcataaacttcactcggataagcggatacacgatgtacttaatgacttgacagtgttttttttatcggagagcaaagataaagacgatcggttgtcgatggagatttatattacctataatctgtctctgttacgtccgtcaataaaagtactcatgaatgaataccctgaattttttaaactaaaccagacgttttaccttgacgcgcttaatgaaaagaaagaagattctcttatagaaaaatatattgcgatacataaaagaatacaccctgattttgaattcacctatgctgacgatacgaaagatataacgccttttatgcgcgaatctcccaaagtcggacgaaacgatccatgcccgtgcgggagcgggaagaaatacaaaaagtgctgcgggagatag

SEQ ID NO: 37660 - protein, 293 aa, Unknown
  Obtained from environmental sample
  DOMAIN (275)...(293): SEC-C motif
  misc_feature (1)..(293): Xaa is any amino acid
MLLRAKIAASMRRMDKANAYFTDAVNIDPLNPNVWAAYLRFGLNYAHSQVPNIFYRAMKQDINMFRDEYILYLVGAQDTNLFNNENQLQYLDKFAEFYINDKDPDEEIFSEVMNIMPRFLEKGEFIPFVEKILPTLEKSKHCNDDDKKSFKYIRSSVMLHKLHSDKRIHDVLNDLTVFFLSESKDKDDRLSMEIYITYNLSLLRPSIKVLMNEYPEFFKLNQTFYLDALNEKKEDSLIEKYIAIHKRIHPDFEFTYADDTKDITPFMRESPKVGRNDPCPCGSGKKYKKCCGR

SEQ ID NO: 37661 - DNA, 780 bp, Unknown
  Obtained from environmental sample
  misc_feature (1)..(780): n is a, c, g, or t
atgaaacccgctactgaacgcagttttatcccttcatatgcgctgacatttacagtctttgccgttattacgccgtatctttcaatcatggtgcggggtttgggatacagtccgctttgggtaggggtactgcttgggatttttgaaggcgccgccatagccggcccctttttattcggctattgggctgataaaaccggcaatttccgttccccgctgattatctcgtgcgtactcccggctctcaccgcaattcccattgtacgctggattcatccccttatcagcgcaattctgcttgccgttctggcattcggcttccgttccacatcctcactgctggacgcgataactaccgtcagaatcggaaaaagcggcaactacggaaagatacggacatacggctcgttaagctttatcgtttttgtgctttttcttcagtggactccgttccttaaacccgacaacgcgaaacatatcgctttctggatagttgtaacttcgtccgccgccataatatacctgttctttctcccgcgcgccgcgtttgacgcaattgaacatgaacatgaaaaaaacgatgatacggaaaaagggataccgcttctttcggtttattttatcgggggcttcgcgattatttttctgtgccgttttgccatgtcatcggtctacacattttttcccttgtacctgaccgagaccctgcaatggaacgccctccgtctgatgttcgccctgtcctcggcgtctgaagtccctttatgtacatatccgtaa

SEQ ID NO: 37662 - protein, 259 aa, Unknown
  Obtained from environmental sample
  misc_feature (1)..(259): Xaa is any amino acid
MKPATERSFIPSYALTFTVFAVITPYLSIMVRGLGYSPLWVGVLLGIFEGAAIAGPFLFGYWADKTGNFRSPLIISCVLPALTAIPIVRWIHPLISAILLAVLAFGFRSTSSLLDAITTVRIGKSGNYGKIRTYGSLSFIVFVLFLQWTPFLKPDNAKHIAFWIVVTSSAAIIYLFFLPRAAFDAIEHEHEKNDDTEKGIPLLSVYFIGGFAIIFLCRFAMSSVYTFFPLYLTETLQWNALRLMFALSSASEVPLCTYP

SEQ ID NO: 37663 - DNA, 900 bp, Unknown
  Obtained from environmental sample
  misc_feature (1)..(900): n is a, c, g, or t
gtgaaatacacctctccattgatcttgcccttcagcgttacattgagggggcttattgcgggtaacgtagaccgttattacaattcccgcctgaccaatggcgcggccattgtcattgacaacgacaacggggaaatacttgcctgggtgggcagcgccgattttaacaacagcgaggccgcggggcagattgacggagtagtggcccttaaccagccgggcagcggcatgaaacccttcctttacgcaatggccctggaaaacggctttaagccaatcgatatcatcgcggatattccggtcaatttcggtgaaagcgaactgtatattccccggaatttcaacaaccgctttaacggtcccatacttttccgcgccgctcttgcctcaagcctgaacattccagcagtatatctgctctaccggctgggggtgcaaaattacagcaacctgcttttttcgctgggattcgattcccttgaacaatccgcggaggacgcggggctgggccttgcgctggggaacgcgccggtaagccttatggaactggtcagggcgttcagcgtttttccccgcgacggcgtttatatgccgctgacatgggagctgggcggaacggagcagtggaatcgcgtaacggcgcgtcgcgaagtggcgcagaagcgaatcttttccgccgataccgcccggcttatctgttcgtttttatcggactcaaacgcgcgggtaatggcctttggacgagcccggaattttcaaactccgtttacctccatgttcaagactggtaccgccaaccagtaccagagcattatcgccctgggggctacgccgaaatataccgccggagtttggatgggaaattttaccggcgaaacaatatcggctcggccgatctga

SEQ ID NO: 37664 - protein, 299 aa, Unknown
  Obtained from environmental sample
  DOMAIN (34)...(295): Penicillin binding protein transpeptidase domain
  misc_feature (1)..(299): Xaa is any amino acid
MKYTSPLILPFSVTLRGLIAGNVDRYYNSRLTNGAAIVIDNDNGEILAWVGSADFNNSEAAGQIDGVVALNQPGSGMKPFLYAMALENGFKPIDIIADIPVNFGESELYIPRNFNNRFNGPILFRAALASSLNIPAVYLLYRLGVQNYSNLLFSLGFDSLEQSAEDAGLGLALGNAPVSLMELVRAFSVFPRDGVYMPLTWELGGTEQWNRVTARREVAQKRIFSADTARLICSFLSDSNARVMAFGRARNFQTPFTSMFKTGTANQYQSIIALGATPKYTAGVWMGNFTGETISARPI

SEQ ID NO: 37665 - DNA, 420 bp, Unknown
  Obtained from environmental sample
  misc_feature (1)..(420): n is a, c, g, or t
atgaatagaacagctgaagtaaccagaaaaacaaaagaaacatccattacgattaagatcaatattgacgggaccggcattgcgaaactggattacccaatcggctttatggcgcatatgcttaatacctttgcccgtcacgggctctttgatctggaaattgccgcgaatggcgatcttgaagttgaccagcaccacctggtggaggatacgggaatcgttttgggccagtgcttcgcaaaagcgttaggcgaaaaaaggggaatacggcgcagcgggagctgccttttccctatggacgagacccttgcccgcgccgcggttgatatttcaggccgcagttttttgttttttgacggccagcttggcggcgtgcctttaatcgccgagatacgcaaaacgagacctcggccgatctga

SEQ ID NO: 37666 - protein, 139 aa, Unknown
  Obtained from environmental sample
  DOMAIN (34)...(135): Imidazoleglycerol-phosphate dehydratase
  misc_feature (1)..(139): Xaa is any amino acid
MNRTAEVTRKTKETSITIKINIDGTGIAKLDYPIGFMAHMLNTFARHGLFDLEIAANGDLEVDQHHLVEDTGIVLGQCFAKALGEKRGIRRSGSCLFPMDETLARAAVDISGRSFLFFDGQLGGVPLIAEIRKTRPRPI

SEQ ID NO: 37667 - DNA, 858 bp, Unknown
  Obtained from environmental sample
  misc_feature (1)..(858): n is a, c, g, or t
atggctgataaattgcgattgcttgttcccaaggggaggatctttgacaaagtggcgagcctcctgactgacgcgggttttcccgtagccttagcggaacgtacatacaggccgtctctgggcgctgactggcttgacgccaaaattatgaaaccgcagaacgtaggcgagcttctggaactgggaagccacgacgcgggctttacaggcatagactggatcagggaaagcggcgccgatgtcgctgaagttatagatctggggtttgacaaggtgaaaatcgtggcggcggttccccaggaatccggtgaagatgaccttagggccaaaaaactggttgtcgccacagaatacgtgaatctcgcgaaatcatggcttggtaaatcgggttatcaataccggattctccgtacctacggggctaccgaggtttttccgccggatgacgccgatatgatcattgacaatacctcctcgggccaaacgcttaaggataaccagctgaaaattatcggcacgattcttgagtcatccacccgttttgtcgcttcccataccgcccttgccgatactgagaaacggaaccgcattgaggagcttgccatgctgttccgcgcggttcttgacggccgcgaccgggtgatgctggagatgaatattccaaagggcagctttgaagcgatggtcaacagcctgcccgcaatgcgcagtccgaccgtcgcccccctgttcggcgacagcggttatgcggtaaaaatcgcggtaaagaagcgcgaggttcccgatattattccgcgtctgaaaaaacttggcgccgtggacattgtggaatatgatctgcggaaagtggttttatag

SEQ ID NO: 37668 - protein, 285 aa, Unknown
  Obtained from environmental sample
  DOMAIN (209)...(283): HisG, C-terminal domain
  misc_feature (1)..(285): Xaa is any amino acid
MADKLRLLVPKGRIFDKVASLLTDAGFPVALAERTYRPSLGADWLDAKIMKPQNVGELLELGSHDAGFTGIDWIRESGADVAEVIDLGFDKVKIVAAVPQESGEDDLRAKKLVVATEYVNLAKSWLGKSGYQYRILRTYGATEVFPPDDADMIIDNTSSGQTLKDNQLKIIGTILESSTRFVASHTALADTEKRNRIEELAMLFRAVLDGRDRVMLEMNIPKGSFEAMVNSLPAMRSPTVAPLFGDSGYAVKIAVKKREVPDIIPRLKKLGAVDIVEYDLRKVVL

SEQ ID NO: 37669 - DNA, 639 bp, Unknown
  Obtained from environmental sample
  misc_feature (1)..(639): n is a, c, g, or t
atgtcaaaaatcatcggcatcgacttgggcaccaccaactcctgcgtggccatcatggagggcggcgaccccaaagtcatcaccaacaccgagggcaaccgcaccaccccctccatagtggccttcacggactcgggggaacggctggtcgggcaggtggccaagcgccaggccatcaccaaccccgaagccaccatcttcgcggtcaagcgtctcatcggccgcaagttcaactcggccgaggtcaagcgggacctggacatcgtgccttataagatcgtcaaggccgataatgacgacgcggccgtggaagtcaggggcaagggctacagcccggccgaaatatcggccatggtgctgaccaagatgaagcagaccgccgaaaattacctgggcgaaaccgtcaccgacgcggtcatcaccgtgccggcctatttcaacgattcccagcgccaggccaccaaggacgccggccgcatcgccggcttgaacgtcctgcgcatcatcaacgaacccacggccgcggccctggcctacggcctggacaagaggttgaccagaagatcgccgtatacgatttgggcggcggcactttcgacatatccattctggagcttggcgacggcgttttcgaggtaa

SEQ ID NO: 37670 - protein, 212 aa, Unknown
  Obtained from environmental sample
  DOMAIN (4)...(212): Hsp70 protein
  misc_feature (1)..(212): Xaa is any amino acid
MSKIIGIDLGTTNSCVAIMEGGDPKVITNTEGNRTTPSIVAFTDSGERLVGQVAKRQAITNPEATIFAVKRLIGRKFNSAEVKRDLDIVPYKIVKADNDDAAVEVRGKGYSPAEISAMVLTKMKQTAENYLGETVTDAVITVPAYFNDSQRQATKDAGRIAGLNVLRIINEPTAAALAYGLDKRLTRRSPYTIWAAALSTYPFWSLATAFSR

SEQ ID NO: 37671 - DNA, 642 bp, Unknown
  Obtained from environmental sample
  misc_feature (1)..(642): n is a, c, g, or t
ttgattttacctcgaaaacgccgtcgccaagctccagaatggatatgtcgaaagtgccgccgcccaaatcgtatacggcgatcttctggtcaacctcttgtccaggccgtaggccagggccgcggccgtgggttcgttgatgatgcgcaggacgttcaagccggcgatgcggccggcgtccttggtggcctggcgctgggaatcgttgaaataggccggcacggtgatgaccgcgtcggtgacggtttcgcccaggtaattttcggcggtctgcttcatcttggtcagcaccatggccgatatttcggccgggctgtagcccttgcccctgacttccacggccgcgtcgtcattatcggccttgacgatcttataaggcacgatgtccaggtcccgcttgacctcggccgagttgaacttgcggccgatgagacgcttgaccgcgaagatggtggcttcggggttggtgatggcctggcgcttggccacctgcccgaccagccgttcccccgagtccgtgaaggccactatggagggggtggtgcggttgccctcggtgttggtgatgactttggggtcgccgccctccatgatggccacgcaggagttggtggtgcccaagtcgatgccgatgatttttga

SEQ ID NO: 37672 - protein, 213 aa, Unknown
  Obtained from environmental sample
  misc_feature (1)..(213): Xaa is any amino acid
MILPRKRRRQAPEWICRKCRRPNRIRRSSGQPLVQAVGQGRGRGFVDDAQDVQAGDAAGVLGGLALGIVEIGRHGDDRVGDGFAQVIFGGLLHLGQHHGRYFGRAVALAPDFHGRVVIIGLDDLIRHDVQVPLDLGRVELAADETLDREDGGFGVGDGLALGHLPDQPFPRVREGHYGGGGAVALGVGDDFGVAALHDGHAGVGGAQVDADDF

SEQ ID NO: 37673 - DNA, 339 bp, Unknown
  Obtained from environmental sample
  misc_feature (1)..(339): n is a, c, g, or t
gtgataaagggcaaattaatatcggtcgtttgcatggcggaaagctggatttttgcatcttccgaggcttgcctcaaccgctgtagagccatcctgtctttactcaggtcgatgcccgtatcgttcttgaattcgccgattagccattcaagtattttgaggtcaaaatcgtcgccgcccaggtgggtgtcgccgttagttgattttacctcgaaaacgccgtcgccaagctccagaatggatatgtcgaaagtgccgccgcccaaatcgtatacggcgatcttctggtcaacctcttgtccaggccgtaggccagggccgcggccgtgggttcgttga

SEQ ID NO: 37674 - protein, 112 aa, Unknown
  Obtained from environmental sample
  misc_feature (1)..(112): Xaa is any amino acid
MIKGKLISVVCMAESWIFASSEACLNRCRAILSLLRSMPVSFLNSPISHSSILRSKSSPPRWVSPLVDFTSKTPSPSSRMDMSKVPPPKSYTAIFWSTSCPGRRPGPRPWVR

SEQ ID NO: 37675 - DNA, 519 bp, Unknown
  Obtained from environmental sample
  misc_feature (1)..(519): n is a, c, g, or t
atgccacncagatcaaaccggcccagaacgcggttctggcttgccatttcccgttcgccctgtaaaacatttatggagaccgctgcctggctgtcagtggccgttgagaaaatctggctcttgcgggtgggaatagtcgtgttgcgcggtatgagttttgtcataacgccgcccagggtttcaatgcccagcgaaaggggagttacatccaacagaagcacgtctttgacatcgccgcccagaatgccgccctggattgccgcgccgaccgcaaccgcttcatcgggatttacgcctttgttgggctctttcttgaaaagatccttgacaagctgctgtaccgcggggatgcgggtagagccgccaacaaggatcacttcgtcgatcttctcggcggttaagtttgcgtccctcagcgccttgacgcagggttccttggatcgctcaaggaggtcggaaaccatctgttcgaatttcgcccttgtaagggatttttgcaaatgtttagggccgctttga

SEQ ID NO: 37676 - protein, 172 aa, Unknown
  Obtained from environmental sample
  misc_feature (1)..(172): Xaa is any amino acid
MPXRSNRPRTRFWLAISRSPCKTFMETAAWLSVAVEKIWLLRVGIVVLRGMSFVITPPRVSMPSERGVTSNRSTSLTSPPRMPPWIAAPTATASSGFTPLLGSFLKRSLTSCCTAGMRVEPPTRITSSIFSAVKFASLSALTQGSLDRSRRSETICSNFALVRDFCKCLGPL

SEQ ID NO: 37677 - DNA, 501 bp, Unknown
  Obtained from environmental sample
  misc_feature (1)..(501): n is a, c, g, or t
atgtctgatagtgatgatctggatcttgatagcggtgaagctccggaggccggcggcgccgccaagaaaagaggcggcggacttggcagtttgctcccgactattttaaagtttgtggcaataggaattggcgctttaatttttattgttactgtctgtattattaccgtcaatatcctgaataaaggcggtaagtcacaaacggttatcgcagaccccgcttcgccctatgtgggcaagaggccggaatataattattttgatatgattggccctatgacggtcagaacaaaggatttccccgtgagcgctacggtcagcgtggatatgataatcggctacgatttaaacgataataacgcgtctgctgaattaacaagccgccggtatgaattacaggattttgtaaggcgttatttttccgggaaaatattccgcccgagcttgccccctgaaagggnaaagatgaatctgaaaactgatatttcggaaaaatgttaa

SEQ ID NO: 37678 - protein, 166 aa, Unknown
  Obtained from environmental sample
  misc_feature (1)..(166): Xaa is any amino acid
MSDSDDLDLDSGEAPEAGGAAKKRGGGLGSLLPTILKFVAIGIGALIFIVTVCIITVNILNKGGKSQTVIADPASPYVGKRPEYNYFDMIGPMTVRTKDFPVSATVSVDMIIGYDLNDNNASAELTSRRYELQDFVRRYFSGKIFRPSLPPERXKMNLKTDISEKC

SEQ ID NO: 37679 - DNA, 1482 bp, Unknown
  Obtained from environmental sample
  misc_feature (1)..(1482): n is a, c, g, or t
ttgaatatcgatgaaaacagcattgagttaggcgagaatacccttatcaggattcagaaagatgaaggtcccctgcaaatagaattttcttatggtaatatcagcgtcgtgtcaggaaaagacacaggggcgattcttttgtcaattggggatcaggtcgtgcaagtacaaccgggagccgaaataaacgccctttcaggagacaacggtcttgtattgcgcgtgacggaaggggcggcgcaggtcataaagaggggacaggttacggatgtgcctgcgggggggatagttgtccgtgatactgaaggtaacgaagtgcgccagccgatggccgccgttattcatcccaagcctaatgcggtgctattaaaaacggaagccggtccattaaatgtggagtttaaatgggcaagaattaatatgcaaccgcaggatcttttaaggctggaaattgcagaggataaaaatttcagaaaaattttacagacggttggtaatcttgactcaaatgcgacagcttccttaaatgccggtctttggcattggcggcttttgcatgaaaattatacgcttgcttcaggacgaatgagcatagttgaagcggccgcgccgactctacttgcccccatggtgggtggctccgcgcaggttccggtaagatatgcgggtcaggaagtccaattcagatgggcggaagttcccgacgcttcgtattatttgctaaatgtttccagaacgccggagtttatttctcctgaaattaatttacaggtacagacgacgagttatattaattccgatatagacgcaggaacatggtattggcgcgttcagcctgttttttcaaccgcttatgaaggcgaggcccgtttttcgccggtttcttcttttcaagtgcaacctgctcctgtcgtatctgctcccgctcccgctccggtaataaatgataattccaccgtaaatactccgagtgaagctgttcagcaacaggcggctgtcgaagaagaaaagaaactggaagaagtttttacggcgttacttgtggagacaagacagatttggcaggaacaacaaacacagagggaacaacaaccgcagttggcgcaactgacgcaacaggcgcagttagagcagggggagcaattacaacagacaactcaaatctccgccgcttcgcaaccgcggcaggaaagccaaccgcagaaacaaacaccgcaacaaccgcttcgccttagattgatctctcccgagaataacgtggttatcgcggggcttacggctcttagacaatcgactgttttccgctgggctacggatgaagatgttgagttttcaagatttgttctttcacgccgttccaatcccctctctggcaggcccgagatagacatacaaaatcccgggcgcgccgtttcaattcccaatctggctgaaggcgtatggtatggacggtcgaagcccgtcaactgtcgatctgtctga

SEQ ID NO: 37680 - protein, 493 aa, Unknown
  Obtained from environmental sample
  misc_feature (1)..(493): Xaa is any amino acid
MNIDENSIELGENTLIRIQKDEGPLQIEFSYGNISVVSGKDTGAILLSIGDQVVQVQPGAEINALSGDNGLVLRVTEGAAQVIKRGQVTDVPAGGIVVRDTEGNEVRQPMAAVIHPKPNAVLLKTEAGPLNVEFKWARINMQPQDLLRLEIAEDKNFRKILQTVGNLDSNATASLNAGLWHWRLLHENYTLASGRMSIVEAAAPTLLAPMVGGSAQVPVRYAGQEVQFRWAEVPDASYYLLNVSRTPEFISPEINLQVQTTSYINSDIDAGTWYWRVQPVFSTAYEGEARFSPVSSFQVQPAPVVSAPAPAPVINDNSTVNTPSEAVQQQAAVEEEKKLEEVFTALLVETRQIWQEQQTQREQQPQLAQLTQQAQLEQGEQLQQTTQISAASQPRQESQPQKQTPQQPLRLRLISPENNVVIAGLTALRQSTVFRWATDEDVEFSRFVLSRRSNPLSGRPEIDIQNPGRAVSIPNLAEGVWYGRSKPVNCRSV

SEQ ID NO: 37681 - DNA, 852 bp, Unknown
  Obtained from environmental sample
  misc_feature (1)..(852): n is a, c, g, or t
gtgcctgtcaccataatcccaaccgtttatcgccgttttctccctgtaatttgccttctgctggttttattgtctctggcctcctgctcccgtcccaaagccggcgcgcaagaaggatctctcgacaaaattaacattgttagcgacaatacaaattccgcaaggcttgatgttgttatgcgtaacgcggagctgccccaggctttgtccggcaaaataaaaacagccgccgcgggccccgcttttatggccgatctttccgcctgtcttgagggcgaccgttatttacgggcgcttgtcgataaaaaacattcccttcccgagggttacgcgcccaatgatttggttacgcttacggaaggctcctacagggtcagccgtaacgggcttacgcttcgccgcgccgccgccgccgccctggacgaaatggcaaaagcggcccgcgccgagggggtcactctggttgcctcatcgacataccgttcttatgaatatcagacgcaggtttataacaggaacgtgcgggaaatgggccaggaggccgccgacagggaatcggccaggccgggccacagccagcaccagaccggcctagttgtcgatttcggctccattgacgactcattcgccgctaccgccgcgggccgctggatgtcagctaacgcatcgcgtttcggctggtccttgtcctttcccgacggctatgaaaacgtaaccggctaccgctgggaaagctggcattaccgctatgtgggcaagggtcttgccgcctttatcgacgattactttgacggcatacagcaatacgccctgcgttttatttatgagtgggagcaggctgataaatcctga

SEQ ID NO: 37682 - protein, 283 aa, Unknown
  Obtained from environmental sample
  SIGNAL (1)...(27)
  DOMAIN (129)...(253): D-alanyl-D-alanine carboxypeptidase
  misc_feature (1)..(283): Xaa is any amino acid
MPVTIIPTVYRRFLPVICLLLVLLSLASCSRPKAGAQEGSLDKINIVSDNTNSARLDVVMRNAELPQALSGKIKTAAAGPAFMADLSACLEGDRYLRALVDKKHSLPEGYAPNDLVTLTEGSYRVSRNGLTLRRAAAAALDEMAKAARAEGVTLVASSTYRSYEYQTQVYNRNVREMGQEAADRESARPGHSQHQTGLVVDFGSIDDSFAATAAGRWMSANASRFGWSLSFPDGYENVTGYRWESWHYRYVGKGLAAFIDDYFDGIQQYALRFIYEWEQADKS

SEQ ID NO: 37683 - DNA, 1200 bp, Unknown
  Obtained from environmental sample
  misc_feature (1)..(1200): n is a, c, g, or t
atggttcttaccgagccggacgcgggaagcgatcttcagtcggtgaacctcaaggccgtgcagggcgcggacggcaagtggtatctgaatggcgttaagcgctttatcaccaacggctgcggcacaatagggctggtgcttgcccgcagcgaggaaaagggaaaaggcgcgagggggctttcgttcttcatttacaagcgcgacgataaaatgataatcagacggctggagcacaaactcggcatacacggttcgcccacctgtgagctgcaatttaacaacgcgcccgctgaactgctcggcgagaggcagaggggactaaccaagtacaccctgtggctcatgaacaacgcgaggctcggagtggcggcgcagggtgtcggcattgccgaagccgcctaccgcgaggctgacctttacgcggcaaagcgcatacagttcggcgctccgattcgggaactgcccgcggtcttcgagatgctcacggagatgagggtcgcggtcgaggctggccgcagtctgttatacgaaaccgcccgcttcgttgacctcaaggaagggttggaagagtattccgaaaaacaccccgaggaaaagggcgagataacggaagacaaaaaaaaatacggaaaatacgcgggttttttcaccccgcttgtaaaggcatacgccacggaaatggcgaacaaggtcgccaatgacgcgattcaaattcacggcggcactggctacatgaaggaattcaacgcggaacgccactatagagacgcgagaatcaccaacatctacgagggaaccacccagcttcagattgtggcggctatcgggccggtgacatcgggcgttgcccagatgattctggacgaatacgacaaggtaacttacaaccacagccctgatctgcttgcgaagctccgtgacgctcgcaaagtttttgaagaggccctggaatacaccaagtcttacgaaggccatgggcagtttctcacctaccattcccgcaggcttgtggaaatggccaccgaccttatattaagttatctgctgctaagggacggcaaccacagcgagaggaagcagaaagtggcggctatttttatagcaaagatgccttcgagaataaaagccaatcgagactttataatgaacgacaacgccacgttgttaaagcattacaaagaagtgattgggaagatttaa

SEQ ID NO: 37684 - protein, 399 aa, Unknown
  Obtained from environmental sample
  DOMAIN (1)...(51): Acyl-CoA dehydrogenase, middle domain
  misc_feature (1)..(399): Xaa is any amino acid
MVLTEPDAGSDLQSVNLKAVQGADGKWYLNGVKRFITNGCGTIGLVLARSEEKGKGARGLSFFIYKRDDKMIIRRLEHKLGIHGSPTCELQFNNAPAELLGERQRGLTKYTLWLMNNARLGVAAQGVGIAEAAYREADLYAAKRIQFGAPIRELPAVFEMLTEMRVAVEAGRSLLYETARFVDLKEGLEEYSEKHPEEKGEITEDKKKYGKYAGFFTPLVKAYATEMANKVANDAIQIHGGTGYMKEFNAERHYRDARITNIYEGTTQLQIVAAIGPVTSGVAQMILDEYDKVTYNHSPDLLAKLRDARKVFEEALEYTKSYEGHGQFLTYHSRRLVEMATDLILSYLLLRDGNHSERKQKVAAIFIAKMPSRIKANRDFIMNDNATLLKHYKEVIGKI

SEQ ID NO: 37685 - DNA, 1146 bp, Unknown
  Obtained from environmental sample
  misc_feature (1)..(1146): n is a, c, g, or t
atgagggaacagggactagggaacagggaacaggtaatagggaaaaatatgataaaaaaggatgaattattgagacatacgaatcaacaatttatatctcttaagccctcaatattgacgaataataaaactgttccctgttccctgttccctgttccctttttccctctcttcttccgtactctcgcgctttttgccatcctttaccaggttcgccttatcgccgccgacctggccgatacctcggtgttttccgcggcgctgcttatcgctgtcggggcggggctttttataagcgaacttaaaattaaagaaaaaagtattaacaactttgcggggcttgtctccatcgcgctgataccctgggcggcgagggcctttatcgccttgccgcggttctttgtgccgggcggtgcgctttccagcgcgacggtgggactggacgcgcttttgcttaactttgacaggaataattttgtttcgctgctgccgttttactggaccgccgcgacgacgtggtnttcgattcgctcgcgcgtgtttctgcgggcggcggtcattgccgatgctgtcatttttatagcggtttttacttttgcccgtgtttctgatttaacggcgtaccgatggcccgtggtaatgatcgtcttgcttgccggtattgtttttgcgcaggccctggctctgctgttttccctgccgccggaaattaatccgcgaagaaaagaaaaaatcgccgcgatagccgtgctgctgctactggtttttttcggcgggctgatttttttgaagccggcgcaggaacgggctattcaaaaaggcggcggcctcctggaacccaaacttttcagttttgatttttcacagtttctcaggcttgatacggaaatcagcatgagcgatgatcttgtcctcattgtaaaaaaagatccggatgataatcatatcctgatgcgccgttcggtgatgtcgggttacggcaagaagcagggtttttaccgtattgaggaactggatgagaaaacccatccgcagcatctgcccgttcgtccggtgaccctgtttccggcggaagttaaatcatcgcggcgggtttatcaggaatattttctggtgaattttgacgcaaacgcgttatcggcatga

SEQ ID NO: 37686 - protein, 381 aa, Unknown
  Obtained from environmental sample
  misc_feature (1)..(381): Xaa is any amino acid
MREQGLGNREQVIGKNMIKKDELLRHTNQQFISLKPSILTNNKTVPCSLFPVPFFPLFFRTLALFAILYQVRLIAADLADTSVFSAALLIAVGAGLFISELKIKEKSINNFAGLVSIALIPWAARAFIALPRFFVPGGALSSATVGLDALLLNFDRNNFVSLLPFYWTAATTWXSIRSRVFLRAAVIADAVIFIAVFTFARVSDLTAYRWPVVMIVLLAGIVFAQALALLFSLPPEINPRRKEKIAAIAVLLLLVFFGGLIFLKPAQERAIQKGGGLLEPKLFSFDFSQFLRLDTEISMSDDLVLIVKKDPDDNHILMRRSVMSGYGKKQGFYRIEELDEKTHPQHLPVRPVTLFPAEVKSSRRVYQEYFLVNFDANALSA

SEQ ID NO: 37687 - DNA, 861 bp, Unknown
  Obtained from environmental sample
  misc_feature (1)..(861): n is a, c, g, or t
ttgcgagcttacgaaacacaagacctactctttgattggaataaggcggcacttgatgcgattcgcgcaacaggtggcaataatgctacacgctttgttgcggttccgagtttgggcagcacagagccaagtatggttattagtgctgacaaacgaggaaaattgttgccaagtgacggtacaaatggtactggaaaattgattgtttctgttcattattaccatccgtggcgatatacagtagcagatccagacagcaaaacggaaccattgttgcatgagtgggactctaaagaacgcggccatccggctagtgcaatgtcttcgctaaaaactacttttatagacaaaggaattgcggtttatctaggcgaatggggagccccaactggcatacgcgcaactatgtcagcagaaataaaagctactcatcgcgagtatatcaagactgtggcaaccaatgctatcaataacaacatagtgcctctttactttgacgatgctgggtatttaaaaatgcttgaacgttcagacggcatagccaaatcaggattatgggcagatgtattatcggatatgatgagtgcggtaagcagctcatccattgcaataagcagctccagcagcagcctagcagcaagctctagtagcagagcaaatagctccagcagcacggcaaccagctccagctctaacggaaatgccaccccaataattagcccctctccactagccactagccactcccaaccagcctactactccctcaaaggcgagcctcttggcaatacaaagcctaccaaagcaggaatttatatatttaaacagggaaattcaattagaaaaatcgcggtgaggtaa

SEQ ID NO: 37688 - protein, 286 aa, Unknown
  Obtained from environmental sample
  misc_feature (1)..(286): Xaa is any amino acid
MRAYETQDLLFDWNKAALDAIRATGGNNATRFVAVPSLGSTEPSMVISADKRGKLLPSDGTNGTGKLIVSVHYYHPWRYTVADPDSKTEPLLHEWDSKERGHPASAMSSLKTTFIDKGIAVYLGEWGAPTGIRATMSAEIKATHREYIKTVATNAINNNIVPLYFDDAGYLKMLERSDGIAKSGLWADVLSDMMSAVSSSSIAISSSSSSLAASSSSRANSSSSTATSSSSNGNATPIISPSPLATSHSQPAYYSLKGEPLGNTKPTKAGIYIFKQGNSIRKIAVR

SEQ ID NO: 37689 - DNA, 861 bp, Unknown
  Obtained from environmental sample
  misc_feature (1)..(861): n is a, c, g, or t
atggtttcccgtgcggtaattgttctctgccggaatagcgaaacggcgaaaacctgcttcggtatcgaggatgattctctggggatcatttacacccgcacgggccgccacttttttttagaagaaaaagcccatgaacaggcgatcctcacccggctcaaagccgccctggacaagtccggtttttgggaagccttttccactaactgggtgtgcttggatacggagttaatgccatggtcggccaaagcccgttcccttatcctggaacaatatgccccgaccggcaaggcggggcaaaacggccttgcgaaagccgttgaggcgttgcgggcggcaaaggtttcgcataacggcaaagacagctcaggtatcacgcttgtttcgggaaccccgggcgatatgaaccttgccgccgtactggcggattaccaaaatcgccaggaatgtattgaacgctacatcgaagcctatcgccgttactgttggcccgtcaattcggtggacgattaccgcatcgctccctttcacattctcgccaccgaaggcaaggtctggcacgatgaaaatcatccgcgccatcttgccgtgattcgcgattacatcaccgcaggcaacgatcctgtttttgtcgccacaaaccacctaacggctgacttgaacaacgaaacttcgattgccgaagccgttgactggtggctgaaccttaccaaatcaggcggcgaaggcatggtggttaaaccngctggattttatcgcccgcaacaaaaacacccttctgcaaccggcggtaaagtgccgtggccgggaatacctgcgcatcatatacggtccggattacaccacagccgcccaccttga

SEQ ID NO: 37690 - protein, 286 aa, Unknown
  Obtained from environmental sample
  misc_feature (1)..(286): Xaa is any amino acid
MVSRAVIVLCRNSETAKTCFGIEDDSLGIIYTRTGRHFFLEEKAHEQAILTRLKAALDKSGFWEAFSTNWVCLDTELMPWSAKARSLILEQYAPTGKAGQNGLAKAVEALRAAKVSHNGKDSSGITLVSGTPGDMNLAAVLADYQNRQECIERYIEAYRRYCWPVNSVDDYRIAPFHILATEGKVWHDENHPRHLAVIRDYITAGNDPVFVATNHLTADLNNETSIAEAVDWWLNLTKSGGEGMVVKPAGFYRPQQKHPSATGGKVPWPGIPAHHIRSGLHHSRPP

SEQ ID NO: 37691 - DNA, 1215 bp, Unknown
  Obtained from environmental sample
  misc_feature (1)..(1215): n is a, c, g, or t
atgggggaagaatatcccgtagattgggatctcctgctgacgcataacgggcaggtgtttacggaggaagtacgcggcaacacggacgcggctttcgcagggacgttgtcaatcggcgaattaaaagatgtcagccaaatagagttgcgagtccttagatggtctcacagaggggcgtttgttaagataacggcgttccttgccaacttcgacagcaagtacgaggacgatgacattgtctcattatcagtgctggaggaaactgacggggcgttagggacgctgcctatcggcaatatcagcagcaacgaattaatggtgacacttcaaaaccttgacgacaaatatttcttcggcaacacggcgtccgttttatcgaattccgcacggacgaacagacgcctagaaccgtttttcggtttcggctctaagatgatgccgaaaggcgtctattggtcgtctgactggagcattgcggatcagggaacgacggcttctactacggcgttggatagattaggattactgcaagacgttcaatataacggtttaggtaatatcaatgatcaggatgccgaaggtgatagtacaatttggaaaaataaaactttatacgttgttgctaatgatatactaatgaatttaagaaactcctacatgagcgatcttgaatttgatttagatgaaagtttaaaacgggtaacaatccctatagcgttctttaaatcacaatcctattttgatgttattaggattatagcccaagcgggatgcgctttcgcttatatggacacacccaccgaagcggaaaagataaccgctgaacagcgtggtaatacaagatgcgccgatatattaaggataaagccacttgaaaactttatagccgtagcaataaacgaagccgaaacaataacaagagacgattttatagacaaaaacactagcgcgaaacggtctgacgtggtcaatattgttaccgtaaactataaagaatttcaaattgacagcgaaacaggtaaacccgtagaaatagatgaagaggaagggacgcaatcacgaagttttacagtacaatcagacgctagtattttggagttcgggaaaatacaatatgaatacaaagataatgatttaatacaaacattgaatcacgccgctgatattgctacaagaatacttagcgcgtttagtaaaacgccngtatgtttgtga

SEQ ID NO: 37692 - protein, 404 aa, Unknown
  Obtained from environmental sample
  misc_feature (1)..(404): Xaa is any amino acid
MGEEYPVDWDLLLTHNGQVFTEEVRGNTDAAFAGTLSIGELKDVSQIELRVLRWSHRGAFVKITAFLANFDSKYEDDDIVSLSVLEETDGALGTLPIGNISSNELMVTLQNLDDKYFFGNTASVLSNSARTNRRLEPFFGFGSKMMPKGVYWSSDWSIADQGTTASTTALDRLGLLQDVQYNGLGNINDQDAEGDSTIWKNKTLYVVANDILMNLRNSYMSDLEFDLDESLKRVTIPIAFFKSQSYFDVIRIIAQAGCAFAYMDTPTEAEKITAEQRGNTRCADILRIKPLENFIAVAINEAETITRDDFIDKNTSAKRSDVVNIVTVNYKEFQIDSETGKPVEIDEEEGTQSRSFTVQSDASILEFGKIQYEYKDNDLIQTLNHAADIATRILSAFSKTPVCL

SEQ ID NO: 37693 - DNA, 576 bp, Unknown
  Obtained from environmental sample
  misc_feature (1)..(576): n is a, c, g, or t
gtggcgagatcattccctgaatccgcgtgcgacccttcatttgtgcgccaagtggaacaggaaagcgggcaatcccttgccgcctgttaccagtgcggcaactgcaccgcgggctgtcccgccgggttcgcctatgacatgcaggccaaccagattatccggggtatccagttgggcttgaaagagcaggcgctctccagccggtcgctgtggtactgtctttcgtgcggcctctgttcccaacgctgccccaacgacatcgccgtggccgaggtcatggaaaccctgcgccacatggcccggcgcgaaggttatgccagggtgccccccattgacaaattctggctctccttcttggaaaccgtgcgcaatttcggacgttcctacgaaatcggcgtgatggccctgtataaaattcgctccgggcgactgttcggggatctggatatcgcctatcccgcgctgtctcgcggcaagctgggcctcctgccgcacgtgatcaaggaaaacaaggaagtgggccgtatcttcgcgcgctacaaagcccgctgcaaaaaagagggggtgaagccgtga

SEQ ID NO: 37694 - protein, 191 aa, Unknown
  Obtained from environmental sample
  misc_feature (1)..(191): Xaa is any amino acid
MARSFPESACDPSFVRQVEQESGQSLAACYQCGNCTAGCPAGFAYDMQANQIIRGIQLGLKEQALSSRSLWYCLSCGLCSQRCPNDIAVAEVMETLRHMARREGYARVPPIDKFWLSFLETVRNFGRSYEIGVMALYKIRSGRLFGDLDIAYPALSRGKLGLLPHVIKENKEVGRIFARYKARCKKEGVKP

SEQ ID NO: 37695 - DNA, 312 bp, Unknown
  Obtained from environmental sample
  misc_feature (1)..(312): n is a, c, g, or t
gtgaactacgcctattatcccggttgttccgcgctcggctcttcggaggattatgagcgttccacccaggccgtgtgcgaagcgctgggcgtacagcttacgcccgtgccggactggagctgctgcggttccaccccggcccatgccgtgagtaccgagctttccgccgcgctgtgcgcgcgcaatctttccatcgccggccggatgggctgcgaggggggggtactgacgtcctgcccgagctgcctgtccaatttgaagctggctacccaccgcatgcaggaccccaccttcccggcaacgtgtggatga

SEQ ID NO: 37696 - protein, 103 aa, Unknown
  Obtained from environmental sample
  DOMAIN (26)...(87): Cysteine-rich domain
  misc_feature (1)..(103): Xaa is any amino acid
MNYAYYPGCSALGSSEDYERSTQAVCEALGVQLTPVPDWSCCGSTPAHAVSTELSAALCARNLSIAGRMGCEGGVLTSCPSCLSNLKLATHRMQDPTFPATCG

SEQ ID NO: 37697 - DNA, 636 bp, Unknown
  Obtained from environmental sample
  misc_feature (1)..(636): n is a, c, g, or t
gtgcgggcaatggaagatgttttggccgtttacgcgcgtccgtatgacgcaaaccggcctgttgtatgcatggacgagaaaccgtatcaattcgtaagcttcagccgcaatcccatacctatgaaacccggttcgccgcaacgggaagactatgaatatatacggctcggcacttgcagcattttcatattcactgaaccgctttcaggctggcgtcacgcgcaagcgtccttacagcggacgaaaaaggattgggcgctccaaatccgatggctgctggatgaacaataccccgaagctgagaaaatcgtattggtgatggacaacctcaatacccatactatttcatcgctgtatgaaacattcccaccggaagaagcgttccgcctcgcacagcggcttgaaatccattatacgcccgtgcacggaagctggctgaacatagctgaaattgagttatccgcaatggccgcgcagtgtttaggccaaaggcgtatccccggtctgaaaaccttgaatgaggaactggccgcctggcatacgcagcgtaatcaatcgcagaagggtgttgattggcagtttaccgctcctgacgcacggataaaacttaaaaggctttatcctttaattttgtga

SEQ ID NO: 37698 - protein, 211 aa, Unknown
  Obtained from environmental sample
  misc_feature (1)..(211): Xaa is any amino acid
MRAMEDVLAVYARPYDANRPVVCMDEKPYQFVSFSRNPIPMKPGSPQREDYEYIRLGTCSIFIFTEPLSGWRHAQASLQRTKKDWALQIRWLLDEQYPEAEKIVLVMDNLNTHTISSLYETFPPEEAFRLAQRLEIHYTPVHGSWLNIAEIELSAMAAQCLGQRRIPGLKTLNEELAAWHTQRNQSQKGVDWQFTAPDARIKLKRLYPLIL

SEQ ID NO: 37699 - DNA, 429 bp, Unknown
  Obtained from environmental sample
  misc_feature (1)..(429): n is a, c, g, or t
atggttcctactccctactccctgaattatacggcagtgttcctgaaactccgcgctgcgatattcccggggcgtttcagggagatggggatttctctgtccagttttccttcattcaacagaaaaatccggtcagcaaaaaaaacagcttcctctatgtcgtgggtaacaaggattacggtaaggccaagatgctgccgcagtttttccagttcatttcttagatggaggcggttaaacgtgtcaaggctgcacaagggttcgtccagcaaaagaacggaggggtttctgcaaagacaccgggcaagggctgcgcgctgtgccataccgccggaaagttcatgggacagggaagcggcgcggccgttaaggccagtcagggaaaggatacgcgctatttcattccgtaccaccgctttttccgcctag

SEQ ID NO: 37700 - protein, 142 aa, Unknown
  Obtained from environmental sample
  DOMAIN (87)...(125): Protein of unknown function (DUF1602)
  misc_feature (1)..(142): Xaa is any amino acid
MVPTPYSLNYTAVFLKLRAAIFPGRFREMGISLSSFPSFNRKIRSAKKTASSMSWVTRITVRPRCCRSFSSSFLRWRRLNVSRLHKGSSSKRTEGFLQRHRARAARCAIPPESSWDREAARPLRPVRERIRAISFRTTAFSA

SEQ ID NO: 37701 - DNA, 387 bp, Unknown
  Obtained from environmental sample
  misc_feature (1)..(387): n is a, c, g, or t
gtggtacggaatgaaatagcgcgtatcctttccctgactggccttaacggccgcgccgcttccctgtcccatgaactttccggcggtatggcacagcgcgcagcccttgcccggtgtctttgcagaaacccctccgttcttttgctggacgaacccttgtgcagccttgacacgtttaaccgcctccatctaagaaatgaactggaaaaactgcggcagcatcttggccttaccgtaatccttgttacccacgacatagaggaagctgttttttttgctgaccggatttttctgttgaatgaaggaaaactggacagagaaatccccatctccctgaaacgccccgggaatatcgcagcgcggagtttcaggaacactgccgtataa

SEQ ID NO: 37702 - protein, 128 aa, Unknown
  Obtained from environmental sample
  DOMAIN (3)...(102): ABC transporter
  misc_feature (1)..(128): Xaa is any amino acid
MVRNEIARILSLTGLNGRAASLSHELSGGMAQRAALARCLCRNPSVLLLDEPLCSLDTFNRLHLRNELEKLRQHLGLTVILVTHDIEEAVFFADRIFLLNEGKLDREIPISLKRPGNIAARSFRNTAV

SEQ ID NO: 37703 - DNA, 795 bp, Unknown
  Obtained from environmental sample
  misc_feature (1)..(795): n is a, c, g, or t
atgagggaaataccccttattataaaggagggcgagtgggtattatgcgggggattgacaataggcagaaaatccctaaaggaacattgggaggggataaatcataaagagggaattcagtttttatatgattttgtaaagaggaaaaaagaattggacgaagactctatactggcatttcacagaagaatacttaaaaatattgatgatacggaggccgggcattacaggtcttcaaatgttatgataatcggggcaatacatattcctccttcggctataaaaataaaaaaattgatgggcgaattttttgaatggtattacgaaaacggagggggggggtctattgccgaacttgcggcatgggtccattacaaaatagtccatattcacccctttattgacggaaacggacgggctgcgcgattactgatgaatttaatactgcttcaaaacggctatccgcccgcggtaattctacatgttgacagacaaaaatattatcgtgcgcttaaagaagcggacaaagaaaaatacggcggttttatgaattttattggccgttcaatagaacgttcattattaatttacttaaacgccttaaaaagcaagaacgacaaaaaagataaatacggatacataagcgtgcaggaagcctcaaaactgtgtgattacggcgtagagtatttatcatttctggcaagaaccggaaaattacaagccgttaaaatgcgccggaactggatgacaacaagagaagcgatatcggaatattgcgaaagaatgggaaaataa

SEQ ID NO: 37704 - protein, 264 aa, Unknown
  Obtained from environmental sample
  DOMAIN (57)...(177): Fic protein family
  misc_feature (1)..(264): Xaa is any amino acid
MREIPLIIKEGEWVLCGGLTIGRKSLKEHWEGINHKEGIQFLYDFVKRKKELDEDSILAFHRRILKNIDDTEAGHYRSSNVMIIGAIHIPPSAIKIKKLMGEFFEWYYENGGGGSIAELAAWVHYKIVHIHPFIDGNGRAARLLMNLILLQNGYPPAVILHVDRQKYYRALKEADKEKYGGFMNFIGRSIERSLLIYLNALKSKNDKKDKYGYISVQEASKLCDYGVEYLSFLARTGKLQAVKMRRNWMTTREAISEYCERMGK

SEQ ID NO: 37705 - DNA, 1410 bp, Unknown
  Obtained from environmental sample
  misc_feature (1)..(1410): n is a, c, g, or t
gtgccgctgagcggctgcaatgatctgctttgcctttccaagcccgatttaattacgtctatacatgacaattatctgcaggccggcgcggatataatcgaaacttgtagttttaactcaacctcaatttcactttccgcttacggacttggtcatctttcgtacgagataagcgccgccgccgcgaaggccgcccgtaaatccgctgataaatattcagctaacggaagtccgcgatttgtggcgggaagcatagggccgacggcaaaaggcgcgagcctttatcccgatgtaaataatcccgcaaaacgcgatatttactgggacgagcttgaagccgcctactatgacaacgcgaggggactcctggacggcggcgcggatattcttcttatagaaacaatttttgataccgtcaacgcgaaggctgcgctttttgccgtcagccgcctgcttaaagaacgcaatatcgacataccgataatgatttccgccgccgcttcaggcgaatcgggacggctcctctgcggccaaaatttaaaagctttttgcagttctgttctccatgttaacccctggtcaatcggcctgaattgttccttaagtccgcaaaaactcatgccctttgtccgcgaattatctgaaatagccccctgtcttgtcagcgcctatcctaatgccggactgcccaacagtcatggtaattacgatgaaacgcctgaaatattttcagctaacattgaaggttatctgaaagaagggcttgtgaatattatcggaagctgctgcggttcttcgccttctcacaccgcggaaattgcgaaaaaggcggcgctttataaacctcgcggcattcacgccgatacttccgccggtacttccgccggtacttccgccgtttcgcggaggacggtcttttcaggattggaaactgttaacattgcagataacgctgttcaaattaaaaaaatggcggatgataacgcaaataaagaatttctccgtctgcttggcgagggaaattatgaagacgctgttgaggaagcgcgtaacatggtggacgatggcgcgttgtttatcaatgtcgaaacaaacgatgaaaaaaaattaagcggctttcttgatttcgccctgatgaacccttatgccgcaaaagtcccctttttcattaacagcacggacataaacgtaattgtaaccggccttaagcgtttgcagggcagatgccttgccgggcctttaaccctgaaagacacagaaacagaatttatcagaaaagcggaaattatacggctttatggagcggcggcggtggtaacagcgcaggggcatgatgaggcgcaaaagatttacgatcttctgcagaaaaacggctaccctgttgataatatcgtcattgctcaagtatag

SEQ ID NO: 37706 - protein, 469 aa, Unknown
  Obtained from environmental sample
  DOMAIN (1)...(279): Homocysteine S-methyltransferase
  misc_feature (1)..(469): Xaa is any amino acid
MPLSGCNDLLCLSKPDLITSIHDNYLQAGADIIETCSFNSTSISLSAYGLGHLSYEISAAAAKAARKSADKYSANGSPRFVAGSIGPTAKGASLYPDVNNPAKRDIYWDELEAAYYDNARGLLDGGADILLIETIFDTVNAKAALFAVSRLLKERNIDIPIMISAAASGESGRLLCGQNLKAFCSSVLHVNPWSIGLNCSLSPQKLMPFVRELSEIAPCLVSAYPNAGLPNSHGNYDETPEIFSANIEGYLKEGLVNIIGSCCGSSPSHTAEIAKKAALYKPRGIHADTSAGTSAGTSAVSRRTVFSGLETVNIADNAVQIKKMADDNANKEFLRLLGEGNYEDAVEEARNMVDDGALFINVETNDEKKLSGFLDFALMNPYAAKVPFFINSTDINVIVTGLKRLQGRCLAGPLTLKDTETEFIRKAEIIRLYGAAAVVTAQGHDEAQKIYDLLQKNGYPVDNIVIAQV

SEQ ID NO: 37707 - DNA, 738 bp, Unknown
  Obtained from environmental sample
  misc_feature (1)..(738): n is a, c, g, or t
gtgggcatcaataaatacgataataaagatattcttggcaatttgaattacgcggtaaacgacgcgcgcgagatcgtcgccgcgttcaaggcgcaggaaggaaagcgttttggcaaggtgaacagcctgttgattaccgatgacacgcccatcaaaccaaccgccagaaatattatctacaatattgacaaacatttaggcagcgccagccagcatgacgttatactcctgttcatcgcgggccacggtgtaaacgacaaccggggtgactggttctttgccgcctcggacacggcttttgagaacgggcaaatcgatcgtaccagcgccgtgccaaagagtgagataatgagggtaaaggatttgcccgggaaaaaacttgtctttatcgacgcctgccattcagaaaacgccggacggcgctcggctgcattgaccatagataataacagcctgctcagggaaattatggaaacaagcacggtagtgtttacttcatcaaccgggaaagaggcatcccttgaaaacttaagggaacggcacggagccttcacctgggctatccttcaggggcttaaaggcgaggcatatcctgatgaaaaaggccatataagcatgaaggcactggacacatatgtttcccgcacggtacctgaattgaccaacggcgcccagcatccgacctcaacagttcagggcggcagttatgtcgattttgttatagcggtaacgagatag

SEQ ID NO: 37708 - protein, 245 aa, Unknown
  Obtained from environmental sample
  DOMAIN (2)...(239): Caspase domain
  misc_feature (1)..(245): Xaa is any amino acid
MGINKYDNKDILGNLNYAVNDAREIVAAFKAQEGKRFGKVNSLLITDDTPIKPTARNIIYNIDKHLGSASQHDVILLFIAGHGVNDNRGDWFFAASDTAFENGQIDRTSAVPKSEIMRVKDLPGKKLVFIDACHSENAGRRSAALTIDNNSLLREIMETSTVVFTSSTGKEASLENLRERHGAFTWAILQGLKGEAYPDEKGHISMKALDTYVSRTVPELTNGAQHPTSTVQGGSYVDFVIAVTR

SEQ ID NO: 37709 - DNA, 924 bp, Unknown
  Obtained from environmental sample
  misc_feature (1)..(924): n is a, c, g, or t
atgatgaccggggcgtctgttaccgtcagagaacctcaggtatttttcacaaaccgcgattcactcctgggtcagtttccggatacggtcacggtagtcaaggccgatttcagttcaggtttccccggggaacatgtctttgtgatgcccgaagataccgcaagaagcatcgcttctttgatgaacaaggaagataacatccaaatggatgagatggccatgtctgtaatcggcgaagtggtttcccagctggtaggaacccagattacggacttgaccaaaaaaaccaacaataaatccatagccgccgttgctccggaagcggccaatgtcaagaaggccgcggcggccctcccggccggagattttctctgcgcggcttaccccatggatcttggagacgggaagcccaaccagatgtgggaaatttatggcggcggagcggccgccgatattgcccggtctttaaacggcggcggagcgtctgccatgccggcaatgggcggaatggatatgggcatgggtatgccgggaatgtctatgcccggaatgtccatgccggggatgggcggcgctccggccatgccgatgcagggaatgccaatgcaaggcatgtctatgccggggatgggaatgcagggtatgcccatgcaaggcatggccatgccgggcatgggtatgcagggaatgccaatgggaggcggcatgcccatgatgggcgctccgaccaatgttcagtccgttcagttcccaaatctcgtccctcatcacacgcctcaggaagcgggaaacatcagtctcatcatggacgttttcatggagatgaccgttgaattgggccgaaccagaaagcttatcaggaaaatcctcacatgggtgagggaacaattattgaattggataagcttggcggtgaacctgtaa

SEQ ID NO: 37710 - protein, 307 aa, Unknown
  Obtained from environmental sample
  misc_feature (1)..(307): Xaa is any amino acid
MMTGASVTVREPQVFFTNRDSLLGQFPDTVTVVKADFSSGFPGEHVFVMPEDTARSIASLMNKEDNIQMDEMAMSVIGEVVSQLVGTQITDLTKKTNNKSIAAVAPEAANVKKAAAALPAGDFLCAAYPMDLGDGKPNQMWEIYGGGAAADIARSLNGGGASAMPAMGGMDMGMGMPGMSMPGMSMPGMGGAPAMPMQGMPMQGMSMPGMGMQGMPMQGMAMPGMGMQGMPMGGGMPMMGAPTNVQSVQFPNLVPHHTPQEAGNISLIMDVFMEMTVELGRTRKLIRKILTWVREQLLNWISLAVNL

SEQ ID NO: 37711 - DNA, 423 bp, Unknown
  Obtained from environmental sample
  misc_feature (1)..(423): n is a, c, g, or t
ttgttccctcacccatgtgaggattttcctgataagctttctggttcggcccaattcaacggtcatctccatgaaaacgtccatgatgagactgatgtttcccgcttcctgaggcgtgtgatgagggacgagatttgggaactgaacggactgaacattggtcggagcgcccatcatgggcatgccgcctcccattggcattccctgcatacccatgcccggcatggccatgccttgcatgggcataccctgcattcccatccccggcatagacatgccttgcattggcattccctgcatcggcatggccggagcgccgcccatccccggcatggacattccgggcatagacattcccggcatacccatgcccatatccattccgcccattgccggcatggcagacgctccgccgccgtttaa

SEQ ID NO: 37712 - protein, 140 aa, Unknown
  Obtained from environmental sample
  misc_feature (1)..(140): Xaa is any amino acid
MFPHPCEDFPDKLSGSAQFNGHLHENVHDETDVSRFLRRVMRDEIWELNGLNIGRSAHHGHAASHWHSLHTHARHGHALHGHTLHSHPRHRHALHWHSLHRHGRSAAHPRHGHSGHRHSRHTHAHIHSAHCRHGRRSAAV

SEQ ID NO: 37713 - DNA, 414 bp, Unknown
  Obtained from environmental sample
  misc_feature (1)..(414): n is a, c, g, or t
gtgggaaatttatggcggcggagcggccgccgatattgcccggtctttaaacggcggcggagcgtctgccatgccggcaatgggcggaatggatatgggcatgggtatgccgggaatgtctatgcccggaatgtccatgccggggatgggcggcgctccggccatgccgatgcagggaatgccaatgcaaggcatgtctatgccggggatgggaatgcagggtatgcccatgcaaggcatggccatgccgggcatgggtatgcagggaatgccaatgggaggcggcatgcccatgatgggcgctccgaccaatgttcagtccgttcagttcccaaatctcgtccctcatcacacgcctcaggaagcgggaaacatcagtctcatcatggacgttttcatggagatgaccgttga

SEQ ID NO: 37714 - protein, 137 aa, Unknown
  Obtained from environmental sample
  misc_feature (1)..(137): Xaa is any amino acid
MGNLWRRSGRRYCPVFKRRRSVCHAGNGRNGYGHGYAGNVYARNVHAGDGRRSGHADAGNANARHVYAGDGNAGYAHARHGHAGHGYAGNANGRRHAHDGRSDQCSVRSVPKSRPSSHASGSGKHQSHHGRFHGDDR

SEQ ID NO: 37715 - DNA, 303 bp, Unknown
  Obtained from environmental sample
  misc_feature (1)..(303): n is a, c, g, or t
ttggtcggagcgcccatcatgggcatgccgcctcccattggcattccctgcatacccatgcccggcatggccatgccttgcatgggcataccctgcattcccatccccggcatagacatgccttgcattggcattccctgcatcggcatggccggagcgccgcccatccccggcatggacattccgggcatagacattcccggcatacccatgcccatatccattccgcccattgccggcatggcagacgctccgccgccgtttaaagaccgggcaatatcggcggccgctccgccgccataa

SEQ ID NO: 37716 - protein, 100 aa, Unknown
  Obtained from environmental sample
  misc_feature (1)..(100): Xaa is any amino acid
MVGAPIMGMPPPIGIPCIPMPGMAMPCMGIPCIPIPGIDMPCIGIPCIGMAGAPPIPGMDIPGIDIPGIPMPISIPPIAGMADAPPPFKDRAISAAAPPP

SEQ ID NO: 37717 - DNA, 780 bp, Unknown
  Obtained from environmental sample
  misc_feature (1)..(780): n is a, c, g, or t
ttgaagcgcgggcccacgaccataatgatacccaccacttccggcaccggcgccgaggtcaccgtcaacgtggttttcaaggacaaggcggccaagttgaaacgggtggcggtaagtccttttctcatgcccgacttggccctggtcgaccctctctataccctcaccgtgcccccggccgtgaccgcggccacgggcatggacgccctgacccacgccattgaggcttatacggccgtaaaggccacgcccctgaccgatcttttcgcggaggacgccatacgccgcataagccgttccctgcgcacggccgtggccagcgggcacaatgttgaagcccgcctggacatgagcctgggttcccttttcgggggcatcgccaacgccggggcctcggtgggcgcggtccacgccctttcctatcctttatgcggggaatacaacctctcccacggcgcggggaacgctttgctcatgccgtatgtggccgaggtcaacatgataggcaacgtccccaaattcgcccgcatcgccgagcttatgggcgaaccagtccgcggcttctcccagcgccgggccgcggccatgtccattgcggccatcaagcagttgtcggttgatattgaaaccccgctccatatgagccgcttcggcgtgccggaggaagtgctgccccgctgggccaaaaccgtcatcgagacccaggggcggttgatgtccaacaacccccgggtcctgaccgaaaaagacgttctgggcatttaccatgccgcgctctga

SEQ ID NO: 37718 - protein, 259 aa, Unknown
  Obtained from environmental sample
  DOMAIN (1)...(251): Iron-containing alcohol dehydrogenase
  misc_feature (1)..(259): Xaa is any amino acid
MKRGPTTIMIPTTSGTGAEVTVNVVFKDKAAKLKRVAVSPFLMPDLALVDPLYTLTVPPAVTAATGMDALTHAIEAYTAVKATPLTDLFAEDAIRRISRSLRTAVASGHNVEARLDMSLGSLFGGIANAGASVGAVHALSYPLCGEYNLSHGAGNALLMPYVAEVNMIGNVPKFARIAELMGEPVRGFSQRRAAAMSIAAIKQLSVDIETPLHMSRFGVPEEVLPRWAKTVIETQGRLMSNNPRVLTEKDVLGIYHAAL

SEQ ID NO: 37719 - DNA, 756 bp, Unknown
  Obtained from environmental sample
  misc_feature (1)..(756): n is a, c, g, or t
ttggtaccggcgtctcaaggaaaccggcgccatgagcctttaatcggttttgccccaagccctgatttgcaggcggagggtatattcaggaggaagtatgttcggcgcggtggccctgttcgttccggccgtttccgaaaaaaaactggccaaggccataggcctggaggccgacagcctctatttcgacctggaggattcagtggccccggctcagaaagaggaggcccgggccgttttgcggcaggtcttggactcttgcgccttccaggcggcggctctcctggtccggatcaacggctttggcacgccccagtgggagcgggacatcgaggccctggcccggcatcaggccttaagcgccctgctcctgcccaacgcggaccgggaggcggtgcaggccttgagccgggaactggaccggttggattcatccctgaaaatcctgccgctcatcgaaaccgcccgaggtctggaagaagcccaggaggtggtgctggcctcggcgcgggtgactggtcttcaattcggcggcgaggattacaccgcctccttgggcataaagcggaccctggaaggcgaggagataggtttcgcccgggcccggctggccaacctggcccatgcctacggactggaggccttggataccccgttcaccaacctccaggaaatggaatggctgcggaaggactgccagagggcccgggccatgggcttcacgggcaaggcggtcatccaccccgcccaaattga

SEQ ID NO: 37720 - protein, 251 aa, Unknown
  Obtained from environmental sample
  misc_feature (1)..(251): Xaa is any amino acid
MVPASQGNRRHEPLIGFAPSPDLQAEGIFRRKYVRRGGPVRSGRFRKKTGQGHRPGGRQPLFRPGGFSGPGSERGGPGRFAAGLGLLRLPGGGSPGPDQRLWHAPVGAGHRGPGPASGLKRPAPAQRGPGGGAGLEPGTGPVGFIPENPAAHRNRPRSGRSPGGGAGLGAGDWSSIRRRGLHRLLGHKADPGRRGDRFRPGPAGQPGPCLRTGGLGYPVHQPPGNGMAAEGLPEGPGHGLHGQGGHPPRPN

SEQ ID NO: 37721 - DNA, 1134 bp, Unknown
  Obtained from environmental sample
  misc_feature (1)..(1134): n is a, c, g, or t
atgaaccgaaccatgaacgagcaaacattagaattgcccaaagagggtgatagggtagggacggggataatctccgacctgataggcataggcggcacagcccgtgtctaccgtacatgggtaacacatttagaaatcaatagggcggttaagatactgcaccccgaagccggtcaatatgttcgcgaccgctttgcgaccgaggcgaagatcggcgcgaaactatcacatccgaatatcgtacagatttacaattacggcgagacggcctccggcttgccctatattgagatggaatacgtggacggtctaacgcttgaaaaggtgctacggaaacacggtgcgctgcccctgcccgttgccatcgctatatcgataggcgtgttagaagcaataaactacgctcacaatataaattacactttccgcgctcagtcgcttaagggtgtaatgcaccgcgacataaaacccgaaaatatcatattctccaacagcggcacgaccaaactgatggacttcggcatagcgcgaccggaaaccgtatctacacacacaatcgccggagacgtggtaggcacggtacagtatttcactcccgaatactgtataagcggaagcagtgatttccgttccgacatctatcaaataggcgtgataatatacgaatgtatcaatggcaatagggcatatccgcaagcggacatcgtggcggtaatcgaggcgataaaaaccggtcaacgaaaaccgctgaacacgaccgacgaagaggccgtcgcgatagtggggaagtgtttggaactcgacccggccaagcggtatcaaaccgccgcagactgtttggccgacatcaaagcattgtatcactcaataagcccgcgaataacgccggaggcgcagataagcgcgtttttgctaaacactacgccgcccccgaccgcagagacaccgccgcccatccgcgccgatcacgcgaccgccatgagcggcacgaccggcacgaggaaattgaaaattgcggccaccgcgatactcgccctgttgcttaccgcaggactggccgtcatgggcctgaaatacacaaatctatctattaaccaccgacagcggcgacaccggcaacgcctccgaccgtag

SEQ ID NO: 37722 - protein, 377 aa, Unknown
  Obtained from environmental sample
  DOMAIN (23)...(283): Protein tyrosine kinase
  misc_feature (1)..(377): Xaa is any amino acid
MNRTMNEQTLELPKEGDRVGTGIISDLIGIGGTARVYRTWVTHLEINRAVKILHPEAGQYVRDRFATEAKIGAKLSHPNIVQIYNYGETASGLPYIEMEYVDGLTLEKVLRKHGALPLPVAIAISIGVLEAINYAHNINYTFRAQSLKGVMHRDIKPENIIFSNSGTTKLMDFGIARPETVSTHTIAGDVVGTVQYFTPEYCISGSSDFRSDIYQIGVIIYECINGNRAYPQADIVAVIEAIKTGQRKPLNTTDEEAVAIVGKCLELDPAKRYQTAADCLADIKALYHSISPRITPEAQISAFLLNTTPPPTAETPPPIRADHATAMSGTTGTRKLKIAATAILALLLTAGLAVMGLKYTNLSINHRQRRHRQRLRP

SEQ ID NO: 37723 - DNA, 762 bp, Unknown
  Obtained from environmental sample
  misc_feature (1)..(762): n is a, c, g, or t
gtgcgtttacaggcggatggtttaatggaatttttaagacggcttgaaaaagaacgtttgttctttgacggcgcgatggggacaatgcttcaggacgagcttgcgcccggggaatcccccgtattattaaatattaaaaatcctgacagcgtgttgaatgtgcataaagcgtacataaaagcgggctgtcatatcttaaaaacaaatacattcagcgcaaaccggctggctctttcaggctccggcttttccgtgaatcagatagtgtctcaggcagtttctctcgcgaaaaaagccgcggaaggcaatgacgcttttaccgccctggatatcggacctacgggaaaactgctcgcgccctttggagatttggattttgaggaagcggtggatattttttcggaaatgataaaagcgggagtacaggccggggcggacattgtacttctggaaaccatgaccgacacttatgaaattaaagcggcaatgcttgcggcaaaagaaaattgcgatcttccggttcttgtaaccttttccacggacgaatccggcaggctcttaaacggcgcggatattcaaacggcggtctgccttatcgaaagcctgggggcctgccccctgggttttaactgcggcttcggtcctgcccagtttaaatccctgctgcctgaattgtcgcgccacacaagtattccggtcattgtaaaccccaacgctcggaattcccgagaggataaacggaaaagcgcagtacagccttaa

SEQ ID NO: 37724 - protein, 253 aa, Unknown
  Obtained from environmental sample
  DOMAIN (20)...(253): Homocysteine S-methyltransferase
  misc_feature (1)..(253): Xaa is any amino acid
MRLQADGLMEFLRRLEKERLFFDGAMGTMLQDELAPGESPVLLNIKNPDSVLNVHKAYIKAGCHILKTNTFSANRLALSGSGFSVNQIVSQAVSLAKKAAEGNDAFTALDIGPTGKLLAPFGDLDFEEAVDIFSEMIKAGVQAGADIVLLETMTDTYEIKAAMLAAKENCDLPVLVTFSTDESGRLLNGADIQTAVCLIESLGACPLGFNCGFGPAQFKSLLPELSRHTSIPVIVNPNARNSREDKRKSAVQP

SEQ ID NO: 37725 - DNA, 417 bp, Unknown
  Obtained from environmental sample
  misc_feature (1)..(417): n is a, c, g, or t
ttgaacttgaggttcctgttgaacccgaggttcctgttgagcccgaagttcctgttgagcttgaggttcctgttgaacccgaggttcctgttgagcccgaagttcctgttgagtccgaggttgccgttgagcttgaggttcctgttgagtccgaggttgccgttgagcttgaggttcctgttgagtccgaggttaccgttgagcctgaagttcctgttgaatccgaggttcctgttgagcccgaagttgccgttgagcccgaagttcctgttgaggccgaggttgccgttgagcttgaggttcctgttgagtccgaggttaccgttgagcctgaagttcctgttgaatccgaggttcctgttgagccagaggttgccgttgagtccgaggttcctgttgaacctgaagttcctctga

SEQ ID NO: 37726 - protein, 138 aa, Unknown
  Obtained from environmental sample
  misc_feature (1)..(138): Xaa is any amino acid
MNLRFLLNPRFLLSPKFLLSLRFLLNPRFLLSPKFLLSPRLPLSLRFLLSPRLPLSLRFLLSPRLPLSLKFLLNPRFLLSPKLPLSPKFLLRPRLPLSLRFLLSPRLPLSLKFLLNPRFLLSQRLPLSPRFLLNLKFL

SEQ ID NO: 37727 - DNA, 816 bp, Unknown
  Obtained from environmental sample
  misc_feature (1)..(816): n is a, c, g, or t
gtgcagattgcggttgacaagcttgtccccaatccaagccaaccccgtaaaaactttgacgaaacagaacttcaggaactggcagattcgattaaagagcacggcgtcataatgccgattatcgcggcggatacaggagatggaaactataccattattgccggtgaaaggcgcacaagggccgcaaggcttgccggacttgaagatgtacccgtaatcatccgggattacaccgacataaagcgaatggaaatttcgcttattgaaaatatccagcgcagcgatttgaatcccattgaggaagccaccgcttacaaaaaccttatggacttctccagcctgtcccagggggacctagccgcgagagtcggcaaaaatcgctccacagtgacaaacgccctgcgcctgttgaaactttccgccgaggtgcaaaagagccttgaaacaggcgatatcagctccggccacgcgcgggctctgctttcggtaacgaacaagacgcagcgggaaaaactgtttaaagaaattaccgcgaaggggctttccgtccgcgaggccgagaagaaggcctctgcattgaattccccgggcgaagaaagtgtcgcccctggcgggagcgcccctggcgggggcgcccctggcggggcggcggagaaagcgtcaaaacgcccgcccgaaatagttgaaatggaagaaaagtttatagaaaaacttggaacaaaagtcactattgacggcgggctggagaagggccgcattcatattgaatattattctatggaagaccttgaccggctctacgagcttctggcctag

SEQ ID NO: 37728 - protein, 271 aa, Unknown
  Obtained from environmental sample
  DOMAIN (1)...(91): ParB-like nuclease domain
  misc_feature (1)..(271): Xaa is any amino acid
MQIAVDKLVPNPSQPRKNFDETELQELADSIKEHGVIMPIIAADTGDGNYTIIAGERRTRAARLAGLEDVPVIIRDYTDIKRMEISLIENIQRSDLNPIEEATAYKNLMDFSSLSQGDLAARVGKNRSTVTNALRLLKLSAEVQKSLETGDISSGHARALLSVTNKTQREKLFKEITAKGLSVREAEKKASALNSPGEESVAPGGSAPGGGAPGGAAEKASKRPPEIVEMEEKFIEKLGTKVTIDGGLEKGRIHIEYYSMEDLDRLYELLA

SEQ ID NO: 37729 - DNA, 567 bp, Unknown
  Obtained from environmental sample
  misc_feature (1)..(567): n is a, c, g, or t
atgcaatattatgaaatgatggatgacagtggaccaaaacgccaaaaggatattgtagtcagacctcgtattgacgtagaagatccttatatattaaataatggcactattataaacgactggaataatgatatgatctttgagtatgacccaaaagaaggcgatatagcaacggagtatttatgcagcgtgtatgattggcctatattttccgaaaaggctataaatttgtttggtgatcttatcgttaatgatgttcaattgctacccattaaagtagttaataaagatactggtcaagaaatagagaagtattttgttttaaatgtgctttcgtttcctgacgcattggatttggaaaactccaagtacgtttacttaggtgaaggaaaagaaaaacgcttatcggtatggtcatatggaattaaaaaagaaaaagtggaagggcatcacatttttaggcttaaaggtgaagaattttctcttttcgtatctgaaaaattttataaaatagctaaaaaaaacaaaatgctggggtgttatttctcgaaagtaaaaacaagttag

SEQ ID NO: 37730 - protein, 188 aa, Unknown
  Obtained from environmental sample
  misc_feature (1)..(188): Xaa is any amino acid
MQYYEMMDDSGPKRQKDIVVRPRIDVEDPYILNNGTIINDWNNDMIFEYDPKEGDIATEYLCSVYDWPIFSEKAINLFGDLIVNDVQLLPIKVVNKDTGQEIEKYFVLNVLSFPDALDLENSKYVYLGEGKEKRLSVWSYGIKKEKVEGHHIFRLKGEEFSLFVSEKFYKIAKKNKMLGCYFSKVKTS

SEQ ID NO: 37731 - DNA, 321 bp, Unknown
  Obtained from environmental sample
  misc_feature (1)..(321): n is a, c, g, or t
ttgggctaccatcgcgaccacaaactttacaaccgctatttcaaaatgggtgcaggctcaatcttcacctttgaaatcaagggagatgcggaaaaagccaaactctttaccgaaaaactggagctgttttcgctcttggtaaacgtggcggacgtgaagtcgctggtggttcatcctgcttccaccactcattctcagatgaacgaagaggagttgctagaaagcggaataaagcccaacacaataaggctttccataggcactgagcatattgatgacatcatagacgatttgaaacagggatttgaagcggtgaagtga

SEQ ID NO: 37732 - protein, 106 aa, Unknown
  Obtained from environmental sample
  DOMAIN (2)...(103): Cys/Met metabolism PLP-dependent enzyme
  misc_feature (1)..(106): Xaa is any amino acid
MGYHRDHKLYNRYFKMGAGSIFTFEIKGDAEKAKLFTEKLELFSLLVNVADVKSLVVHPASTTHSQMNEEELLESGIKPNTIRLSIGTEHIDDIIDDLKQGFEAVK

SEQ ID NO: 37733 - DNA, 687 bp, Unknown
  Obtained from environmental sample
  misc_feature (1)..(687): n is a, c, g, or t
atggcattgcggcctccgattggtggatgccttttaccgcccaacggtggttttgtgccgaggatcacgnggttgttcaagggatcggggcgctccatcccggaattcgatctgcatgccggcttggcgcgctgcgcggatctgctgcacagttttggaggccacagccaggccgccggcctgcggttggatgcggaccgcctggagctgttcagggagcgctttgacgcggttgtccgggagatgctgggcggcgaacctctgactccggaactgcgcctggacggagaactggatttcgccctggcggcggatgccgcttttttgagcagcctggagcagttccagcctttcggaatgggcaatccggaacccgtgttcgcctcgccgccgctctctctgcgcaaacagcgccggttcggtccgaatcgggatcacgtcgcgctggacgtgaccgacgccacaaccggcatcagccttcaggccaagctctggcgcatggccgacgcgttcccgcccctggaacccggcgcgcggttgcggctcgcttacacgccgggatgcaacacgtataacggcgtcgcctccgtggaactgcgggtcaaggattggaggattgagcaagtggagaaacctggacgatcctgcggccacttactgcttgccgacaacgattttccgatgtaa

SEQ ID NO: 37734 - protein, 228 aa, Unknown
  Obtained from environmental sample
  DOMAIN (20)...(77): DHHA1 domain
  misc_feature (1)..(228): Xaa is any amino acid
MALRPPIGGCLLPPNGGFVPRITXLFKGSGRSIPEFDLHAGLARCADLLHSFGGHSQAAGLRLDADRLELFRERFDAVVREMLGGEPLTPELRLDGELDFALAADAAFLSSLEQFQPFGMGNPEPVFASPPLSLRKQRRFGPNRDHVALDVTDATTGISLQAKLWRMADAFPPLEPGARLRLAYTPGCNTYNGVASVELRVKDWRIEQVEKPGRSCGHLLLADNDFPM

SEQ ID NO: 37735 - DNA, 552 bp, Unknown
  Obtained from environmental sample
  misc_feature (1)..(552): n is a, c, g, or t
ttggaggcacttgcngnncgngnggtctatcgcttccccgatagcgcccccgtcgttgacggaaccctgtacctctgtccctccccgctgtacggctacggactggagcgcctgctttcccgccttgagaatacgccaaattccgcggtgctgtgcattgaaggggaacctgagttatacgacatttcccgcaagtttttcagcgaggccttaaaacacagcccaaaattgcacctgacaaacacctgcgacgccaccggcttgtgcgtcattataaaaaaagaatggggttccagagtcttccgcaggcttcatgtgctgcgccttaccggaggctggcagctgcttccgaatttgaatgaccttgccgacaccctgaggcgtgagattgcccttgactggggcaacgcgatgactcttacgaaactgggccgccgctatatccgcaacgcgatacgcaacctcgccttgattcccaacaacccttcgataggcgctcttttccttcggctccgatccggggctcttatggggcgccggcccttctcttga

SEQ ID NO: 37736 - protein, 183 aa, Unknown
  Obtained from environmental sample
  misc_feature (1)..(183): Xaa is any amino acid
MEALAXRXVYRFPDSAPVVDGTLYLCPSPLYGYGLERLLSRLENTPNSAVLCIEGEPELYDISRKFFSEALKHSPKLHLTNTCDATGLCVIIKKEWGSRVFRRLHVLRLTGGWQLLPNLNDLADTLRREIALDWGNAMTLTKLGRRYIRNAIRNLALIPNNPSIGALFLRLRSGALMGRRPFS

SEQ ID NO: 37737 - DNA, 732 bp, Unknown
  Obtained from environmental sample
  misc_feature (1)..(732): n is a, c, g, or t
gtggccgcgagggtcatccgagggtcgggtctgttcggcggatggtcgctcaaagtggccgcgtttgccaacggctccttgacggtggccgaggcggagcttggggcgcccgtttcgtggacaccctgccaactgccgcccggcactgcaccaagcgcagctgagtggtcggaggatggctcgcggctcttcgttggcacggagcagggtctcttgctggcagtcgcgcccggcgtggagccactgacagcggattttcaagagccaatcacagcactgggcttcgcgctggggcacagcagcctattggtcggcggcaaaaatgggaagctggcggcatatcaagtgctgaggcgagacggcaagtctgagctacagcgcttccatgacttcaaaccactgggcggcggtgtcaggggcttcatggagaccctgcgcgacaagcgcttccttgcatattcagacgccggattcgcggtcaaccacctaacgacagaatccaggttgacgagcgcggacgccagcgtttccagcgtggtgtcctttagccccaagggggactgtgttcttgtgcctggcgaaacgcctcggatgtggcgcgtcaaatccaaccacccagaggttagctggggtctgttctggaagaaggtgcattacgagggctactccgcgccagaacacgtttggcagtccagcggggcgagcgacgacatcgagcctaagtcagcctag

SEQ ID NO: 37738 - protein, 243 aa, Unknown
  Obtained from environmental sample
  misc_feature (1)..(243): Xaa is any amino acid
MAARVIRGSGLFGGWSLKVAAFANGSLTVAEAELGAPVSWTPCQLPPGTAPSAAEWSEDGSRLFVGTEQGLLLAVAPGVEPLTADFQEPITALGFALGHSSLLVGGKNGKLAAYQVLRRDGKSELQRFHDFKPLGGGVRGFMETLRDKRFLAYSDAGFAVNHLTTESRLTSADASVSSVVSFSPKGDCVLVPGETPRMWRVKSNHPEVSWGLFWKKVHYEGYSAPEHVWQSSGASDDIEPKSA

SEQ ID NO: 37739 - DNA, 738 bp, Unknown
  Obtained from environmental sample
  misc_feature (1)..(738): n is a, c, g, or t
gtggcgggggaggtcaaccgcgtacgcccggaagcggcgttcgccgccgctcctcggatggctaagatgtctatgcaggctatggccgacaacgccgccgggttcacggagagcgggatgttcgagtaccacgtgtacgatctgggccggtccgtcaccgtcaaggagaaccagacgaagcagataagcctgctggaggcgcagggggtcaatgtcataaaggaatacgtcaccacgccgtcggggcccaactacttcctatataatagtataaacgagggggcggtgaaacagcccgtcgtcgcctacctgtcgttcaagaacacgaaggagaacaacttagccgtcccgctacccgccggaaccgtccgcatatacaccgccgactccaaggggagccagcagttcataggcgaagaccgcataaaccacacgcccaaggacgaggaggtccgcctgaaggtaggggaggctttcgacatagtggccgagcgcacgcaggtggatttcgctcagaagacgtctaaggtcacggagacggagtggaaggttacgcttcgtaaccgcaaggaggaggacgtcacggtgcgcgtacaggagaacgctatggggcaatgggatatactggagccgtcgcacaagttcaccaaggtgagcgccacgatgttcaggttcgacgtgccggtggccaaggggcaggaggtcgccgtcaagtacaagatacgcgttaaggggtag

SEQ ID NO: 37740 - protein, 245 aa, Unknown
  Obtained from environmental sample
  misc_feature (1)..(245): Xaa is any amino acid
MAGEVNRVRPEAAFAAAPRMAKMSMQAMADNAAGFTESGMFEYHVYDLGRSVTVKENQTKQISLLEAQGVNVIKEYVTTPSGPNYFLYNSINEGAVKQPVVAYLSFKNTKENNLAVPLPAGTVRIYTADSKGSQQFIGEDRINHTPKDEEVRLKVGEAFDIVAERTQVDFAQKTSKVTETEWKVTLRNRKEEDVTVRVQENAMGQWDILEPSHKFTKVSATMFRFDVPVAKGQEVAVKYKIRVKG

SEQ ID NO: 37741 - DNA, 648 bp, Unknown
  Obtained from environmental sample
  misc_feature (1)..(648): n is a, c, g, or t
atggattttaaagtcgccggaaccaaagacggaataacaggctttcagatggatataaaaatcgccggagtcagtcaggaaataatgcgcaaagcgctggatcaggcgaaacgcggaagaatgcatatcctttcgataatgaatcaatgtcttgataagcctgtcgaggaaatcagcgaatacgccccgaaaattgtcactttacggattgatatcgataaaatcggcgctcttatcggtcccggcggaaagaatatcaaggcgttatgcgaacaatattcggttaagattaacacggaagacgacggcactgtaacgattttcggtaaaacgtcaaaagacgcggaagacgctaaagcggcggttgtcggtattgcctgcgacccggaaacagacaaagtatacaacggcactgtaaagcgcataatggatttcggcgcttttgtggagattcttcccggcaaggaaggacttgtccacataagcaaactttcaagacagaggatcgagaaagttaccgacgtgttaaaggaaggtcagcagatacccgttaaattacttgaaattgacaaacagggtcgtctcaatctttcgtacatagacgcgattgatccgtcgggcgctcccggcggtcaacgcaagaattaa

SEQ ID NO: 37742 - protein, 215 aa, Unknown
  Obtained from environmental sample
  DOMAIN (65)...(122): KH domain
  misc_feature (1)..(215): Xaa is any amino acid
MDFKVAGTKDGITGFQMDIKIAGVSQEIMRKALDQAKRGRMHILSIMNQCLDKPVEEISEYAPKIVTLRIDIDKIGALIGPGGKNIKALCEQYSVKINTEDDGTVTIFGKTSKDAEDAKAAVVGIACDPETDKVYNGTVKRIMDFGAFVEILPGKEGLVHISKLSRQRIEKVTDVLKEGQQIPVKLLEIDKQGRLNLSYIDAIDPSGAPGGQRKN

SEQ ID NO: 37743 - DNA, 933 bp, Unknown
  Obtained from environmental sample
  misc_feature (1)..(933): n is a, c, g, or t
ttgactttccgcgccgagaaatgcgacagcttcatagctctgggcggcggttcttccatggacgccgcaaaggccgccgccgccagagcggtgaaaccccgtcgaagcgtcaatcaactgggcgggcttttgaaggtgctgaaaaggctgcccttctttatcgccgtacccaccaccgccgggacgggcagcgaaaccactatcgcggcgctgattaccgatacggaaacccatcataaatacgccataatggatcttagcctgattcccagatatgcgattctggacccggaactgacgacgggactgcctcccgcgattacggcgggaacaggcattgacgcccttacccatgcggttgaggcctacatctgctggacttataataccagggagagtattaattttgccctggacgcggtaaaggcgatttttgaaaatctaccgaaggcgtatgataacggagcgaaccttgaggcgcggcaggccatgttacttgcttcttacaaggcaggctttgcttttaccagagccggcgtgggtaatgtccacgccatagcccacaccttgggaggactttacaacacgccgcacggccttgccaacgcggtgatccttcccattgtgctggaagattacggtagtaaggtttggaagaagcttgcccgccttgcacaagccgcgggtgtttgccccgccggttctccgacagacgaagaaaaagcgaaggctttcattgccgccatttacagcatgaacgcgaagatgggaattccccgcggttttgattttataaaaaccgacgacataccgcggatgattaattgggccgcaaaagaaagcaatcccctttaccctgttccggtggtatacaatcacgccaggttcaggaaggttatagaacaagtaataaaaaacgggagcgttaaatag

SEQ ID NO: 37744 - protein, 310 aa, Unknown
  Obtained from environmental sample
  SIGNAL (1)...(27)
  DOMAIN (1)...(296): Iron-containing alcohol dehydrogenase
  misc_feature (1)..(310): Xaa is any amino acid
MTFRAEKCDSFIALGGGSSMDAAKAAAARAVKPRRSVNQLGGLLKVLKRLPFFIAVPTTAGTGSETTIAALITDTETHHKYAIMDLSLIPRYAILDPELTTGLPPAITAGTGIDALTHAVEAYICWTYNTRESINFALDAVKAIFENLPKAYDNGANLEARQAMLLASYKAGFAFTRAGVGNVHAIAHTLGGLYNTPHGLANAVILPIVLEDYGSKVWKKLARLAQAAGVCPAGSPTDEEKAKAFIAAIYSMNAKMGIPRGFDFIKTDDIPRMINWAAKESNPLYPVPVVYNHARFRKVIEQVIKNGSVK

SEQ ID NO: 37745 - DNA, 624 bp, Unknown
  Obtained from environmental sample
  misc_feature (1)..(624): n is a, c, g, or t
gtgcagggcgcaggacttgccagcctcacgcgctatctcggcgtgcctagccatgtccaactgcgcgtccttccactgctccacgctccagccaactggcaggtagccgtggaccaagtcgtgtgcgctggtctggtcggtgacaatgtcgggtatgcctacagagcctgctttaacgcgctccacaagccttggcaggacttcggccgcgttgcccagcagcgctatcgagacagcgtccctcttggcggtgtgggccttcaccagctcaatagcgtggtcaaggtcctttgcctgcacgtccacgtagcgcgtgcggaggcggaagtctatgctcgcctgctggcactcgacgcagaggctcaccgcgccggcgaatgtggccgccagcggctgggcaccgcccatgccgccaaggcccgccgtcagaatccacctgccgcccaaatcgccgccgaagtgctggcgaccggcctcggcgaaggtctcgaaggtcccctgcacgatgccctgcgtgccgatgtatatccaactgccagcggtcatctggccgtacatgaacagaccgcggcgatccagctcgttgaaatgctcccaattggcccacttgggcaccaggtttga

SEQ ID NO: 37746 - protein, 207 aa, Unknown
  Obtained from environmental sample
  misc_feature (1)..(207): Xaa is any amino acid
MQGAGLASLTRYLGVPSHVQLRVLPLLHAPANWQVAVDQVVCAGLVGDNVGYAYRACFNALHKPWQDFGRVAQQRYRDSVPLGGVGLHQLNSVVKVLCLHVHVARAEAEVYARLLALDAEAHRAGECGRQRLGTAHAAKARRQNPPAAQIAAEVLATGLGEGLEGPLHDALRADVYPTASGHLAVHEQTAAIQLVEMLPIGPLGHQV

SEQ ID NO: 37747 - DNA, 657 bp, Unknown
  Obtained from environmental sample
  misc_feature (1)..(657): n is a, c, g, or t
gtggactttacgattgaggttgaacgggccctgagggtgcttgacggagccattcttgtcctttgcgcggttggcggggttcagtcccagtccataaccgtggacaggcagctcaagcgctacaaagttccgcgcatcgcttttgtgaacaagtgcgatcgcatgggggctaaccccttcaaggtaaaagcccagctccgcgaaaagcttgcccttaatgccgtcctgatccagatccccatcgggctggaagacaagcttgaaggggtaatcgatctgatctcgatgaaagccatttacttcgacggcgatcagggaacggagcttcgctacgccgagattcccgctcacctgaaatcggacgcggaaaaataccgcgaagagctgatcgacgaggtctcaattttttccgatgagcttgcggaaaaatttctgtcaggcgagaaaatccccgacgaaatgcttcgtgcagccatacgcaagggaactctggcggaagcttttgttccagtcatgttgggctcagcctataaattcaagggaattcagccacttctggacgccgtaaataattatctgccaaacccgacagaagttaagaattacgcccatgaccttgacaacaacgaagagcagaagggagctttccccggatga

SEQ ID NO: 37748 - protein, 218 aa, Unknown
  Obtained from environmental sample
  DOMAIN (1)...(197): Elongation factor Tu GTP binding domain
  misc_feature (1)..(218): Xaa is any amino acid
MDFTIEVERALRVLDGAILVLCAVGGVQSQSITVDRQLKRYKVPRIAFVNKCDRMGANPFKVKAQLREKLALNAVLIQIPIGLEDKLEGVIDLISMKAIYFDGDQGTELRYAEIPAHLKSDAEKYREELIDEVSIFSDELAEKFLSGEKIPDEMLRAAIRKGTLAEAFVPVMLGSAYKFKGIQPLLDAVNNYLPNPTEVKNYAHDLDNNEEQKGAFPG

SEQ ID NO: 37749 - DNA, 939 bp, Unknown
  Obtained from environmental sample
  misc_feature (1)..(939): n is a, c, g, or t
atgaccttgacaacaacgaagagcagaagggagctttccccggatgaaaacagcccgacggtggcgctgggctttaagctcgaagacggccagtacggccagctaacctacgtcagggtttatcagggtgctcttaaaaaaggcgaagagctgatgaacacccggtcaaggaaaaggttcaaagttggccgccttgtacggatgcacgccgacagcatggaagacataagcgaaggcgctccgggcgacatagtcgcgctctttggcattgagtgcgcatccggtgataccttttgcggcagcggccttaactacgcaatgagctcgatgtttgtgccggagccggtaatctccctcgccgttactccaaaggacaaaaaaagcgccgatcagcttgcaaaggcactggggcgctttacaaaagaggatccgaccttccgcagctacgtggatcaggaatcaaaccagtgcatcatacagggcatgggggagctgcacctggaagtttatattgaaaggatgcgaagggaatacaacgccgaagtggaggtcggcagaccacaggtcgcgtacagggaggcaatcacccagcgcgccgattatagctacacccataaaaagcaaaccggcggcgcgggccagttcggaaaagtcgcaggctatatggaaccattcccctcaggcgactacgaattcgttgacaacatcaagggcggcacaatccccacggaatttgtcccctcctgcgacaagggctttaaggaagcggtaaagaaagggagccttatcggctttccggtggtcaatatccgctgtgtgataaacgacggccagagccacccggtggattcctcggacatagccgttcagcaagcggctatcggcgctttcagggaggcgtacatgaaagccaggccctgcatactggaacaattatga

SEQ ID NO: 37750 - protein, 312 aa, Unknown
  Obtained from environmental sample
  DOMAIN (33)...(99): Elongation factor Tu domain 2
  misc_feature (1)..(312): Xaa is any amino acid
MTLTTTKSRRELSPDENSPTVALGFKLEDGQYGQLTYVRVYQGALKKGEELMNTRSRKRFKVGRLVRMHADSMEDISEGAPGDIVALFGIECASGDTFCGSGLNYAMSSMFVPEPVISLAVTPKDKKSADQLAKALGRFTKEDPTFRSYVDQESNQCIIQGMGELHLEVYIERMRREYNAEVEVGRPQVAYREAITQRADYSYTHKKQTGGAGQFGKVAGYMEPFPSGDYEFVDNIKGGTIPTEFVPSCDKGFKEAVKKGSLIGFPVVNIRCVINDGQSHPVDSSDIAVQQAAIGAFREAYMKARPCILEQL

SEQ ID NO: 37751 - DNA, 1332 bp, Unknown
  Obtained from environmental sample
  misc_feature (1)..(1332): n is a, c, g, or t
gtggacaaagggcttatctataggggattcagagtacagccttactgtccgcgatgcgccacgccgctgtcaaacttcgaggtcaatgaaggatataaagagatcaacgggccgtcaatcacggtaacgttcccgttagccgacgatccgtcaaccaaaatattggtatggacgacgactccgtggacgctgccgtcaaacgtggcgctagcggtgggagaaaaaatagcgtatgtcaagataaaagacggcgaaaacatttacatcatggcaaaagagcgtctcggcgcatactataaagacttgtcaacgatagagattctcaaggagatgaccggcggcgaacttgccggcctacgttacgtcccaatattcgattatttcaaggacaaagacccgcgtttcttcaccgttaccgccgccgattttgtatctacggaagacggcaccggcatagtccacatagccccggcgttcggcgaagacgactttatcgtcggtcaaaaaatgggactgcccatagtctgccccgtcgacgacgaggggaaattcaccgacgaagttccgcagtggcaaggcaaactcgtctacaccgcagacgacgaaatcacgcggcacataaaaacgtcgggcaggctgttccacaagacgactatcctgcaccgctacccgcactgctaccgctgcgacacggcgctcatctacaaggctataacgacttggttcatgaagatcgaaccgctaaaggcgaatatgctggagaacaatcagcaaattcgctgggttccgccgcaccttcaaaacggacgcttcggcaagggcatagagagcgccccggactggaacatctcgcgcaacagatactgggggacgcctatccccgtgtggctctgcgattgcgggcacaaagaatgcgtcggcgggcttgacgaactgcatacgctcgttggcggcggcgataaatcggcgggagaatccatccacgcgcaaacggcgcggcaagtgcaagagagcttgaaagctaaagacgcggcgcaaagactctccgacgcgggtatcgacgcggcgtggatagaaagactcgcgaacgtaaatatcagccccgtggacatacatcgccacatagtagacaaacttgaggtgaaatgccccaaatgcggcgcaatgatgaagcgcaccctagaagtgctcgactgctggttcgaatccgggtctatgccgtacgcgcaacagcactacccgtttgacacaaggaaatctttgagaagaactttccggcggacttcatcgccgaaggtctcgaccagacacgcgggtggttctatacgctga

SEQ ID NO: 37752 - protein, 443 aa, Unknown
  Obtained from environmental sample
  DOMAIN (1)...(443): tRNA synthetases class I (I, L, M and V)
  misc_feature (1)..(443): Xaa is any amino acid
MDKGLIYRGFRVQPYCPRCATPLSNFEVNEGYKEINGPSITVTFPLADDPSTKILVWTTTPWTLPSNVALAVGEKIAYVKIKDGENIYIMAKERLGAYYKDLSTIEILKEMTGGELAGLRYVPIFDYFKDKDPRFFTVTAADFVSTEDGTGIVHIAPAFGEDDFIVGQKMGLPIVCPVDDEGKFTDEVPQWQGKLVYTADDEITRHIKTSGRLFHKTTILHRYPHCYRCDTALIYKAITTWFMKIEPLKANMLENNQQIRWVPPHLQNGRFGKGIESAPDWNISRNRYWGTPIPVWLCDCGHKECVGGLDELHTLVGGGDKSAGESIHAQTARQVQESLKAKDAAQRLSDAGIDAAWIERLANVNISPVDIHRHIVDKLEVKCPKCGAMMKRTLEVLDCWFESGSMPYAQQHYPFDTRKSLRRTFRRTSSPKVSTRHAGGSIR

SEQ ID NO: 37753 - DNA, 366 bp, Unknown
  Obtained from environmental sample
  misc_feature (1)..(366): n is a, c, g, or t
atggctggggcgtgcgctatgaccatagatttcagcacaacacggatatttatccgtcccggacacacggatttgaggaaagcggtaaacgggctgtcggtaatgatagagcaggaaatggccggggagccgttcagcgggaacgtgtacctgttttgcaaccgggggcgcaggcttttgaaggcggtatggtgggacaaaaacgggttttggctggccgggaaaaggctggagaaggagaagttcccgtggcctgaaacggaagaggaagcgagggaaataagcgcggaagaactgtcaatgctgttggcggggatagattttttcaaggcgcataaagcgctgtattataaaaaagtttcgtaa

SEQ ID NO: 37754 - protein, 121 aa, Unknown
  Obtained from environmental sample
  DOMAIN (12)...(120): IS66 Orf2 like protein
  misc_feature (1)..(121): Xaa is any amino acid
MAGACAMTIDFSTTRIFIRPGHTDLRKAVNGLSVMIEQEMAGEPFSGNVYLFCNRGRRLLKAVWWDKNGFWLAGKRLEKEKFPWPETEEEAREISAEELSMLLAGIDFFKAHKALYYKKVS

SEQ ID NO: 37755 - DNA, 438 bp, Unknown
  Obtained from environmental sample
  misc_feature (1)..(438): n is a, c, g, or t
atgttaattggaattgatcctgtaataagccccgagcttcttgacgttttgttcagaatgggtcatggggacgaaattgtgcttgcagacgcgtttttcccgggcgattcgatgaatacccgtgtgatccgggcggacggaataagaattccggcccttttggacggaattttagccctgatgaaccttgacacctatgttcctcacccggttgtcatgatggccccggctcagggagacgatttggacgtaaatgtcgaaaaatcgtacagggcggttattgacgggcgttggccgggaactccgcccactgaacgaatggagcgttttgccttctatgagcgggcaaagaaagcttttgccgtattaatgaccggcgaaaccgttaaatacgggaatgttattttgaaaaaaggggttattccactgggaaagtga

SEQ ID NO: 37756 - protein, 145 aa, Unknown
  Obtained from environmental sample
  DOMAIN (3)...(142): RbsD / FucU transport protein family
  misc_feature (1)..(145): Xaa is any amino acid
MLIGIDPVISPELLDVLFRMGHGDEIVLADAFFPGDSMNTRVIRADGIRIPALLDGILALMNLDTYVPHPVVMMAPAQGDDLDVNVEKSYRAVIDGRWPGTPPTERMERFAFYERAKKAFAVLMTGETVKYGNVILKKGVIPLGK

SEQ ID NO: 37757 - DNA, 399 bp, Unknown
  Obtained from environmental sample
  misc_feature (1)..(399): n is a, c, g, or t
gtggaggccgcgaaaaaactgaaaacgcaattcggcctttcagccgagatcatcgatctgcgttttatcaatccccttaactacgagaagatcgtcgagtcggttaagaagaccggaaagatacttttggcaagcgacgcggcagagcgtggctctttcctccacaccgtagccggcaatatccagaccctggcctttgattaccttgatgcccccgtgacggttgtcggaagcaggaactggatcactccggcggccgaaatggaagaactttactttccgcaagttgactggatcatcgacgccattcacgagcgtatcctgccccttgctggttacagtccggtaacggtgcagacaacgggagatttactcaggaagaacaagcgcggcgtttag

SEQ ID NO: 37758 - protein, 132 aa, Unknown
  Obtained from environmental sample
  DOMAIN (1)...(99): Transketolase, C-terminal domain
  misc_feature (1)..(132): Xaa is any amino acid
MEAAKKLKTQFGLSAEIIDLRFINPLNYEKIVESVKKTGKILLASDAAERGSFLHTVAGNIQTLAFDYLDAPVTVVGSRNWITPAAEMEELYFPQVDWIIDAIHERILPLAGYSPVTVQTTGDLLRKNKRGV

SEQ ID NO: 37759 - DNA, 882 bp, Unknown
  Obtained from environmental sample
  misc_feature (1)..(882): n is a, c, g, or t
ttgataccgacacacgccattaaagcccgaaatgagcgaattaaaacgttaatcaaaaatgagtccgatattcccccctttttcgccgtggatcacgagggcggaactgttaaccgtttcaggcgcggcgcagccgacttgcccgcggcggcttcatactgggaaatcgcccaaaaacaaggaaaacagactgcgctcgcaaaaatagaagccgacagtttaaaagcgggcagagagataaatactttaggggttaacatgaatttcgcccctgtagcggagtacctattcgacggaaaccgcgaatttttggcaagccgctcttacggacccgacccgctctttaccgcgcaagccgcatccgcttttatccgcggaatggaacaggcgggagttttatgcgttgtaaagcattttcccgcaagcgcgggacccgatcctcaccgttcaccgtccgtgctgaacattgacaaagccgctttggacaatcttgtctcgcctttttccgctgttataaaaaacggagcaagatcgataatggcggctcacacccgcgctcccgtaattgacgataaaatagcgagcctttcgcccgtcgttatgggaaaatggctgcgtgacgatttatcttttgacggaatcattataagcgacgattttacaatggcagccgcgggcaatatcagtcccgaagaagcggcggtgctttcagtcgccgctggatcggatatgattcttgtctggcctgcccatttaccaaaaacacatcaggcgtttattgccgcgcttaaagacggacggctttcccgcggcagactgcaggaggcggcgcaaagaataatttacgaaaaaataaaaatgggattgatagatggagaataa

SEQ ID NO: 37760 - protein, 293 aa, Unknown
  Obtained from environmental sample
  DOMAIN (18)...(247): Glycosyl hydrolase family 3 N terminal domain
  misc_feature (1)..(293): Xaa is any amino acid
MIPTHAIKARNERIKTLIKNESDIPPFFAVDHEGGTVNRFRRGAADLPAAASYWEIAQKQGKQTALAKIEADSLKAGREINTLGVNMNFAPVAEYLFDGNREFLASRSYGPDPLFTAQAASAFIRGMEQAGVLCVVKHFPASAGPDPHRSPSVLNIDKAALDNLVSPFSAVIKNGARSIMAAHTRAPVIDDKIASLSPVVMGKWLRDDLSFDGIIISDDFTMAAAGNISPEEAAVLSVAAGSDMILVWPAHLPKTHQAFIAALKDGRLSRGRLQEAAQRIIYEKIKMGLIDGE

SEQ ID NO: 37761 - DNA, 1035 bp, Unknown
  Obtained from environmental sample
  misc_feature (1)..(1035): n is a, c, g, or t
gtgcccgggtttgtattggaaaatttttatactcccgaagaaatacgaaaaatttctttgcatgccgctcaaaagaacgatcagattattgagcttaacccggcgaatgaccccgcccacttcacgttaggggtaaatatttggatagacgacaaactttacggcgctataggatcagtggacatgaataagccgtttaccgaagggcagaaagaaacctttgttatcatcgcaaaagttttaaagctgtattttcagaaccacagtatctatatgcggattgcggaagataaaaccaactggctggacagtctgcttaacggcgttgaaatttctcctgaaataatttccaattatctttttaaatataaatggaaagttgacgaccatttctgtatagtcacctttaccgcttcctctgaattaaagattccgattatttccattttggatattaaacagataaacgaactttttccagaagcgcttgtatcggtttacgatgaatgtgtcgttatgattatacgatgtaacgacaaagaacggttaaatgaaaaaaagaaacagcagttagagcagtttttaagaaaagatattatacttcactgcggcgtcagcatggtttttaataattttttgcatttacgctattattatctacagggcaaattcgccgcgtccaaatgcaaaccgacgctaaactcggcgatctgtttttatgatgattatcagacggatcatgtgttaaacgccttatcgcaaacagccgatttgcgctgtttctgtcatcccggcattctttcgctttgggaaagcggcagtgaatcgcagagggatcttgttcattgtctgtatcattatttcttaaacggcaggaacctaagttccgcggcggacgcgataaatatccaccgcaatacccttatttaccgtttaaccaaagcggaggaaattcttaatatcgatataaagaatacttccgctaagcaggcgtttttgtttatcacttcttgtatgattgttcaggagttataa

SEQ ID NO: 37762 - protein, 344 aa, Unknown
  Obtained from environmental sample
  misc_feature (1)..(344): Xaa is any amino acid
MPGFVLENFYTPEEIRKISLHAAQKNDQIIELNPANDPAHFTLGVNIWIDDKLYGAIGSVDMNKPFTEGQKETFVIIAKVLKLYFQNHSIYMRIAEDKTNWLDSLLNGVEISPEIISNYLFKYKWKVDDHFCIVTFTASSELKIPIISILDIKQINELFPEALVSVYDECVVMIIRCNDKERLNEKKKQQLEQFLRKDIILHCGVSMVFNNFLHLRYYYLQGKFAASKCKPTLNSAICFYDDYQTDHVLNALSQTADLRCFCHPGILSLWESGSESQRDLVHCLYHYFLNGRNLSSAADAINIHRNTLIYRLTKAEEILNIDIKNTSAKQAFLFITSCMIVQEL

SEQ ID NO: 37763 - DNA, 1041 bp, Unknown
  Obtained from environmental sample
  misc_feature (1)..(1041): n is a, c, g, or t
atggttgagaaagcatgggatgacgaaaacggcaaatacgggaaccgcgatcttgaggagttgggaggaaaagaaaagtttaccggtactgacataaaaaaacttgccgggcttcttcgggaacggattgaaggacttgaagccggggaagataaaaaaaaactgaaaaaggaattgaaaacgatagagaaaggctatctaccccgaaaaaagaagtatgaaaaaacgaaacgtatatgcggtaaacgtaacagttattccaagaccgatcctgacgcaaccttcatgcgaatgaaagaagaccatatgggaaacggacagcttaaaccaggttataatgtgcaaataggaacggagaacggttttgtggtaggatatgacttgtttccaaatccaacagataccagaacattgaaaccccacttgagacggcaggctaagcggctgggagtgaaaccgaaagcggtaatagcggacgcgggatatggtggagaagaaaattaccaatatcttgaaaacaggcggacagcagcggtaataaagtacaatacatatcaaaaagaaaaaagcaggaagtggaaaaaggatatttttagaacagaaaactgggaatacagtaaaaaagaaaaatactatatctgccctgacggaagaaaacttacatttagaggaacaaggaaaaagaagaccgatttcggataccagatggaaatacagcggtatgaatgtgaatcatgtaaatattgtcgtaagaaaaaacaatgtaccaaagcaaaaaagaaccgtgttattgagcgaaatgaccggtggctgagactcaagaaaaaagcgcaacgggtattggaagatgagcattataaggagttgaggaaacaacggtcggttgaagtggaaacagtttttgggcagataaaaggaaatcagggatatagaaggtttcttctgcgtggaacggctaaagtctcaactgagtgggggttattggctcttgggtacaatataaaacagatattccgtttaaacagagataacacggcatag

SEQ ID NO: 37764 - protein, 346 aa, Unknown
  Obtained from environmental sample
  DOMAIN (88)...(334): Transposase DDE domain
  misc_feature (1)..(346): Xaa is any amino acid
MVEKAWDDENGKYGNRDLEELGGKEKFTGTDIKKLAGLLRERIEGLEAGEDKKKLKKELKTIEKGYLPRKKKYEKTKRICGKRNSYSKTDPDATFMRMKEDHMGNGQLKPGYNVQIGTENGFVVGYDLFPNPTDTRTLKPHLRRQAKRLGVKPKAVIADAGYGGEENYQYLENRRTAAVIKYNTYQKEKSRKWKKDIFRTENWEYSKKEKYYICPDGRKLTFRGTRKKKTDFGYQMEIQRYECESCKYCRKKKQCTKAKKNRVIERNDRWLRLKKKAQRVLEDEHYKELRKQRSVEVETVFGQIKGNQGYRRFLLRGTAKVSTEWGLLALGYNIKQIFRLNRDNTA

SEQ ID NO: 37765 - DNA, 312 bp, Unknown
  Obtained from environmental sample
  misc_feature (1)..(312): n is a, c, g, or t
atgggcaaaagaaaaaggtataccgccgaagaaaaagtaaagattctcagagaagtacttgaggacgggaaacagataagccaggtagcagagaaatacgggctttccccgaacaacatcttcaaatggcggaagcagctttttgaggatggcctccagaccttccagatcaaaagggcggacatctcgggcaaagccgatgaacggaaaataacagtgctggaagacaggattaagcagaaagacgaaataatagccgagcttgctgaagagctgttagcgttaaaaaaaaagaactgtggcctgaggtag

SEQ ID NO: 37766 - protein, 103 aa, Unknown
  Obtained from environmental sample
  DOMAIN (4)...(95): Transposase
  misc_feature (1)..(103): Xaa is any amino acid
MGKRKRYTAEEKVKILREVLEDGKQISQVAEKYGLSPNNIFKWRKQLFEDGLQTFQIKRADISGKADERKITVLEDRIKQKDEIIAELAEELLALKKKNCGLR

SEQ ID NO: 37767 - DNA, 504 bp, Unknown
  Obtained from environmental sample
  misc_feature (1)..(504): n is a, c, g, or t
atggggactaaaaaagtttcttttaaaggcgctgacgccaaattttacctcctcagctgcccggctcacgcggcgtacccaacgacccccgtgacgctggacatggcggttaaggcccatgtgggctcgaaaaaggaatccaacgagcgcacgatcaacaagtacctcgacccctccgtggttaaaacgtgtcagctcgcgatgggcatgacggttctcgaagaagggtgcgtctggaacaccatgccgagccacacccacgaccggcgcatggaggtgtatctctatctggatctgccggaggacgcgttcgttgtgcacctgatgggcgagcccggcgagacgcggcacatcatcgttcgcgacggccaggcggtgatctccccgagctggtccatccacagcggcgccggaacctgcgcctaccggttcgtctggggtatgtgcggggaaaatcagacctactccgacatggactccatcgccatgaaagagcttatgtaa

SEQ ID NO: 37768 - protein, 167 aa, Unknown
  Obtained from environmental sample
  SIGNAL (1)...(24)
  DOMAIN (1)...(167): 5-keto 4-deoxyuronate isomerase
  misc_feature (1)..(167): Xaa is any amino acid
MGTKKVSFKGADAKFYLLSCPAHAAYPTTPVTLDMAVKAHVGSKKESNERTINKYLDPSVVKTCQLAMGMTVLEEGCVWNTMPSHTHDRRMEVYLYLDLPEDAFVVHLMGEPGETRHIIVRDGQAVISPSWSIHSGAGTCAYRFVWGMCGENQTYSDMDSIAMKELM

SEQ ID NO: 37769 - DNA, 837 bp, Unknown
  Obtained from environmental sample
  misc_feature (1)..(837): n is a, c, g, or t
atgctttccaccctgggtattacccttgccaccgacgcttacggcccggttgcggataacgccggaggcattgccgaaatgtcccatctgccgcacgaggttcgggaacgcaccgacgctctggattctctgggaaataccaccgccgccaccggcaagggcttcgcgattggttccgcggctctgaccgcccttgctcttattgtcgcttatcttgacgagatacagattcacgctccggattttaaattggatctcacgttgaccaatcctccggtactgatagggctctttgtcggcgttatgcttcccttccttttctcatccatgacaatgagcgcggtaggccgggcggcgcagaatatcgtaaaagaagttcgccgccagttcaaggaaatcaaaggtttgatggaaggcaccgtggaagcggactatgccacttgtgttgatatttgtacgcgaggggcgcagaaagaaatgatacttcccgccctgaccggcattatttcacctattgttgttgggatgttactggnggttaacggcgtggccggtatgctcgcgggcgccaccgcttcgggttttgtcctcgcgattatgatggccaattccggcggcgcctgggacaacgccaagaaacacatagaaggcggaaagttcggcggcaagggttcggatccccacaaggcggctgttgtcggcgacacggtaggcgatcccttcaaggatacctccggcccgtccattaatattctgatcaaactgctttccatggtttccattgtttttgcggcgtttattctcaagttttctttgtttacctttttctttaaataa

SEQ ID NO: 37770 - protein, 278 aa, Unknown
  Obtained from environmental sample
  DOMAIN (1)...(264): Inorganic H+ pyrophosphatase
  misc_feature (1)..(278): Xaa is any amino acid
MLSTLGITLATDAYGPVADNAGGIAEMSHLPHEVRERTDALDSLGNTTAATGKGFAIGSAALTALALIVAYLDEIQIHAPDFKLDLTLTNPPVLIGLFVGVMLPFLFSSMTMSAVGRAAQNIVKEVRRQFKEIKGLMEGTVEADYATCVDICTRGAQKEMILPALTGIISPIVVGMLLXVNGVAGMLAGATASGFVLAIMMANSGGAWDNAKKHIEGGKFGGKGSDPHKAAVVGDTVGDPFKDTSGPSINILIKLLSMVSIVFAAFILKFSLFTFFFK

SEQ ID NO: 37771 - DNA, 432 bp, Unknown
  Obtained from environmental sample
  misc_feature (1)..(432): n is a, c, g, or t
ttgacagacagctttatcctgtaccgtttggggcgttacgacgtgcatggaaaagaatatctgaaaacagggcacaagtattatcttgccgatttgggactgcgtttttatttactgggaagtaaaatatcggataccggcaggatactggagaacatcgtgtttctggaattattaaggcgcggatgggaattgagtatcgggaaaatgaacacttatgaggttgattttgtcgcgcagcagggagaaaaacgggaatattatcaggttgctttgagcgtccgggatgaagctacgctggaacgtgaaatacgcccgctgcaggcaataaaagacagctatccaaaattccttttaactatggacgatgatcctcccgcagaacacaacggcatcctcaggaaaaatgtattggactggcttataacgtga

SEQ ID NO: 37772 - protein, 143 aa, Unknown
  Obtained from environmental sample
  misc_feature (1)..(143): Xaa is any amino acid
MTDSFILYRLGRYDVHGKEYLKTGHKYYLADLGLRFYLLGSKISDTGRILENIVFLELLRRGWELSIGKMNTYEVDFVAQQGEKREYYQVALSVRDEATLEREIRPLQAIKDSYPKFLLTMDDDPPAEHNGILRKNVLDWLIT

SEQ ID NO: 37773 - DNA, 813 bp, Unknown
  Obtained from environmental sample
  misc_feature (1)..(813): n is a, c, g, or t
atgtgcggcgagaaagtcgctattgtaagcaaagtgccgcaaacgacgcgtaacgctattcggggaatagtgaaccgtgaagaaggtcagctcatttttgttgatactcccggacggcactccagcgaaaaaaaaatgaataaaaaactgatggatgtttccgcccgcgctttaacggagagcgagcttgttctgtatgtgttggacgctgttcgcgctcccggggcggaagaagaagaaatcgccgcccttcttgccccgttagctgaaaaaacaatcatcgccgtgaacaaaatggacgctaacggcgcggattttaaccgagcgaaagaatttataacagttcgtatgccgtctatcgcaagcgaacgtattttcgctgtttccgctgaaacaggttcgggaattgacgaacttctttgcgccctgttcgctctcgcccccgaaggacagccgctatacggcgacgaatattacacggatcaggatacaggttttcgcatagcggaaattatccgagaacaggcgattaaccgtctgcgtcaggaattgccccattcgctgtatgtcgatatcgccgacatggaatttaaagatgaaaaactttgggtaagagcgtttataatagtagaacgtgagtctcaaaaaggaatggtagtcggcaagggcggcgagatgatcaaggcgatacgccttgcatctttaaaagaattaaaaaaaatattcgactggaaaatcgatcttgatctgcgtgttaaaacaggcaaagactggcggcacaatgatcatacgttaagaaaaataattgattaa

SEQ ID NO: 37774 - protein, 270 aa, Unknown
  Obtained from environmental sample
  DOMAIN (1)...(100): GTPase of unknown function
  misc_feature (1)..(270): Xaa is any amino acid
MCGEKVAIVSKVPQTTRNAIRGIVNREEGQLIFVDTPGRHSSEKKMNKKLMDVSARALTESELVLYVLDAVRAPGAEEEEIAALLAPLAEKTIIAVNKMDANGADFNRAKEFITVRMPSIASERIFAVSAETGSGIDELLCALFALAPEGQPLYGDEYYTDQDTGFRIAEIIREQAINRLRQELPHSLYVDIADMEFKDEKLWVRAFIIVERESQKGMVVGKGGEMIKAIRLASLKELKKIFDWKIDLDLRVKTGKDWRHNDHTLRKIID

SEQ ID NO: 37775 - DNA, 345 bp, Unknown
  Obtained from environmental sample
  misc_feature (1)..(345): n is a, c, g, or t
ttgtccgaaggttggcatttgcctaacaataaagagtggcgagtattattgatggaaaagattgacgatgagagaaaagcaggccagtttcttagatctactagcggttggcccagaaaatatggtaactatgattcgtatgcctttgccgccatgccgggcggctttggtaaatctgatggagacttcggcggtggtggcaacagcggcagttggtggagcgccacagagtacgatgcctcatacgcctacttacgaaacgttgactacgacaacgacgatgtgagcagcaaatacaacgataagacgttcctattctccgtgcgttgcgtacaggacgactaa

SEQ ID NO: 37776 - protein, 114 aa, Unknown
  Obtained from environmental sample
  misc_feature (1)..(114): Xaa is any amino acid
MSEGWHLPNNKEWRVLLMEKIDDERKAGQFLRSTSGWPRKYGNYDSYAFAAMPGGFGKSDGDFGGGGNSGSWWSATEYDASYAYLRNVDYDNDDVSSKYNDKTFLFSVRCVQDD

SEQ ID NO: 37777 - DNA, 1104 bp, Unknown
  Obtained from environmental sample
  misc_feature (1)..(1104): n is a, c, g, or t
ttgcgggaagaaatcaaggggcaggcttcaagccctcgtgaattgtccaggcgcgagctgctttacaatctcggcaagggcatagcggcggcgtggtcgggcaatcataaaacgctggcggatctggcgttcagccctaacctgaaaagcgataactggactaacccaaaagatgttacgtggagcgaaaagggatggacggtttcaaaggctgctctcggcgagccgatgggcaacatggcgactaacgaccagtaccttatcaatccgatttatgaaacggagataatgtctgatgtggcaaaaaaatcggttatgatgggccttgtccgccatcgcccgatgatggggccgtctatcttccttcctaccagagaccggggcggggttcagcttaactggctcacggcttacggccaaaaaatcgagggcagtaaaccgcaaggggctgaaagagtagagcttaaagcctacacattggcggggtacattccgtggttcgatgaatttgaagaggacgtttttgtcgatttgggtgccatgttcgtggacgaatttcttgaaacctacggacaggaatttgaccgccaatgtttgttggccgataacgatccgttcacaggggcaatgaaatgtgccgatgttactgaggtaacaatcaagggaaacaccatagaggatttgacttgnaaggatttccgtgatgccgtctacaaggttccggcagaggagcgcaaggattgttcatggttcatcaatgagacaatactcaatcacattgccaacatagaggacactacgggccgtccgatttggcggcggcctacggaggcaatgccggggcggctggatttgtacccatatcatgaggtttcaatccttccgcagattgcggacatcgaggaagatcaggcgtttgctatttttatgaatccaaaaagaattcagcatggtaacaggcggggtatcgaactgaaaaaatttgacggtacgacagaaagcttggaatatggggaattgtttttaaggttccgcaagcgtgatgggtttctcgttacaaggccgaaagagaacatagttattttaaaaacaaaagcatcttaa

SEQ ID NO: 37778 - protein, 367 aa, Unknown
  Obtained from environmental sample
  DOMAIN (84)...(364): Phage capsid family
  misc_feature (1)..(367): Xaa is any amino acid
MREEIKGQASSPRELSRRELLYNLGKGIAAAWSGNHKTLADLAFSPNLKSDNWTNPKDVTWSEKGWTVSKAALGEPMGNMATNDQYLINPIYETEIMSDVAKKSVMMGLVRHRPMMGPSIFLPTRDRGGVQLNWLTAYGQKIEGSKPQGAERVELKAYTLAGYIPWFDEFEEDVFVDLGAMFVDEFLETYGQEFDRQCLLADNDPFTGAMKCADVTEVTIKGNTIEDLTXKDFRDAVYKVPAEERKDCSWFINETILNHIANIEDTTGRPIWRRPTEAMPGRLDLYPYHEVSILPQIADIEEDQAFAIFMNPKRIQHGNRRGIELKKFDGTTESLEYGELFLRFRKRDGFLVTRPKENIVILKTKAS

SEQ ID NO: 37779 - DNA, 801 bp, Unknown
  Obtained from environmental sample
  misc_feature (1)..(801): n is a, c, g, or t
gtgtcccgtttgggcggcatttgcacaaaagggcttacgctgaatccctggccgggaaataacggcatccgtatttgggaaactccggcagggcttttgaattccatcgggcttgaaaatcccggcatccccgcttttatcgaaaaggaattgcccggcttgcgaaaactcggtccggcggttatcgcgaatctttccggctccactgtggaggaatacgcagaaggagcggcgctgctgaacgcgagttccgttgatatgattgagcttaatatttcctgccccaatgttaaggcaggcggcatggcgttcggccttgatcccaaagcggcggcatcagtggtggtcccggtacgctgtgtccttgataaacccctcatggtaaaactttcgcccaacgcgccggatttggcggccgttgcccgttcctgcgtcaacgcgggggccgacgccctttccctggtaaacacattcaaggcaatggcgatagacatacaaaaacgcaagccggtttttgacaacatcagcgcggggctgtccggtccggcgattaagcccattgccctgcgcatggtgtgggagctttgccgggaattaaaccccgccgttcccgttgtagggcttgggggtatcgcctgcgccgatgacgctctggaattccttatggccggagcgacggcggtgcaggttggttccgccacatttgcccatccgtcaacaatgctcgagattattgacggcattacggactatatgcgacgttccggcattaccagagtgaagaatatttccctgatataa

SEQ ID NO: 37780 - protein, 266 aa, Unknown
  Obtained from environmental sample
  DOMAIN (1)...(252): Dihydroorotate dehydrogenase
  misc_feature (1)..(266): Xaa is any amino acid
MSRLGGICTKGLTLNPWPGNNGIRIWETPAGLLNSIGLENPGIPAFIEKELPGLRKLGPAVIANLSGSTVEEYAEGAALLNASSVDMIELNISCPNVKAGGMAFGLDPKAAASVVVPVRCVLDKPLMVKLSPNAPDLAAVARSCVNAGADALSLVNTFKAMAIDIQKRKPVFDNISAGLSGPAIKPIALRMVWELCRELNPAVPVVGLGGIACADDALEFLMAGATAVQVGSATFAHPSTMLEIIDGITDYMRRSGITRVKNISLI

SEQ ID NO: 37781 - DNA, 669 bp, Unknown
  Obtained from environmental sample
  misc_feature (1)..(669): n is a, c, g, or t
atggcagacgaatcgtttttgaaggagacaacattgtataatattgacaggctttttgaggcggttgccgcgaaaggccatgtatgcgtgggtcttgatacctcggtggaatacgttcctcccgccgagcggcggcgcgccgcttctgacgcggaagcggttctggcttttaacaaggcgattgttgattcaacttttgacgctgccgcctgtttcaaagtgcagatcgcctattatgaggaaatgggaatcgccgggctttcggcttacgccaaaacactgcaatacatccgcgaaaagggcggactcgtaatctccgacattaaacgcggcgacattgccgatacagccgcccgttacgcaaaggcccattttgagggggaatttgaaacggactttgttaccctgtccccctacatgggcatggactccattgagccctggctttcctacgctgacagtaaaggcaaaggggcgtttgtgctgatgcggaccagcaacaaaggaatgcgcgattttgaataccttgaaatatcgcccgacaggaaacgcctgtaccacgcggtcggagagaaatcgccgaacttgcccgccgcccataccggcaaatacggttatggggcgtttggggcggttgtcgggtgtaccgagcgggaaagaaccccttga

SEQ ID NO: 37782 - protein, 222 aa, Unknown
  Obtained from environmental sample
  DOMAIN (26)...(221): Orotidine 5'-phosphate decarboxylase / HUMPS family
  misc_feature (1)..(222): Xaa is any amino acid
MADESFLKETTLYNIDRLFEAVAAKGHVCVGLDTSVEYVPPAERRRAASDAEAVLAFNKAIVDSTFDAAACFKVQIAYYEEMGIAGLSAYAKTLQYIREKGGLVISDIKRGDIADTAARYAKAHFEGEFETDFVTLSPYMGMDSIEPWLSYADSKGKGAFVLMRTSNKGMRDFEYLEISPDRKRLYHAVGEKSPNLPAAHTGKYGYGAFGAVVGCTERERTP

SEQ ID NO: 37783 - DNA, 540 bp, Unknown
  Obtained from environmental sample
  misc_feature (1)..(540): n is a, c, g, or t
atgagaattacaggcgggagtcttagcggcagaaaaatatccgttccgcaaggggcttttgaaataagacctgcaatggacaaaatgcgggaatctgttttttcctgtcttgnggatatttccgggctttcctttcttgatgtttttaccggatcgggcattattgcgctggaagcggcatctaggggggcggcgtatatagaagctgtggaacaggataaacaaaaacggaaaactctgctcgaaaacgtgtcgatttcgccgtgccgtataaattgccgctttatccctgcggaactttatgtaaaacgggcaaaaaccccttttaacattatctttcttgaccccccttttccgtatcaatttaagtgggaacttgtcgccaatattgcaaattctcaacttgtgtcaaatgggacaaaaatcctcattcatagaccaaggcaggactatttaaaggcggaaataccgaatttacagcgtacagattcaagagaatacggaagatctgttgttgattttttcttgtgttttttataa

SEQ ID NO: 37784 - protein, 179 aa, Unknown
  Obtained from environmental sample
  DOMAIN (1)...(176): Conserved hypothetical protein 95
  misc_feature (1)..(179): Xaa is any amino acid
MRITGGSLSGRKISVPQGAFEIRPAMDKMRESVFSCLXDISGLSFLDVFTGSGIIALEAASRGAAYIEAVEQDKQKRKTLLENVSISPCRINCRFIPAELYVKRAKTPFNIIFLDPPFPYQFKWELVANIANSQLVSNGTKILIHRPRQDYLKAEIPNLQRTDSREYGRSVVDFFLCFL

SEQ ID NO: 37785 - DNA, 372 bp, Unknown
  Obtained from environmental sample
  misc_feature (1)..(372): n is a, c, g, or t
atggataagaagttattagaaaaatttgatgacaaaaacgcgtttataaaagtaacagaaccatcgcctgttaatgggacggacaaggcagcgttaaaccgcaagggaaaccaaaagttcaatgaaggcgacattgaaggcgccagaagaatattcatgactacagggtattccgacggactttccagaactggtgatttttataaatcaaaagacagaccgcttgaggcgttaagaatgtattggatggggcatgataaaaacaaatccctgcctttaattgaacagttaagttttgttttacagagtcttattcatgaggaagaagatgccgccgcggttcaggaaaaacaggaagtaaaaaatgaatga

SEQ ID NO: 37786 - protein, 123 aa, Unknown
  Obtained from environmental sample
  misc_feature (1)..(123): Xaa is any amino acid
MDKKLLEKFDDKNAFIKVTEPSPVNGTDKAALNRKGNQKFNEGDIEGARRIFMTTGYSDGLSRTGDFYKSKDRPLEALRMYWMGHDKNKSLPLIEQLSFVLQSLIHEEEDAAAVQEKQEVKNE

SEQ ID NO: 37787 - DNA, 1353 bp, Unknown
  Obtained from environmental sample
  misc_feature (1)..(1353): n is a, c, g, or t
gtgcgcttccaatccgaatgtcgtcgcttgcagggaaacatggaggctgcggatcagggaagcgtacgcggcctattctgtctggaaccagaggccggaagccgcgctggagtcgctgtttttccggctcagggaagaagcggcgggagcggcgttggcatgagcggcttttaccggcgggcgctcagcaaacttaacaggctcaaccttgagcagtgccgggaactccttgtatcggcttcgcaggaaatcttccgtcttgataccgtgcttgactcgctgccctgcggcattctggtatgcgacgagaaacaccgtttgcttatggcgaataaagcggccctgcgttttctgcccatgagttacacggaaggcgatcttttatgggagcttatccccgatgagcgtatagcaaattttttccaacagacgttaaagcgcggcggcaggctgctggaacaggaaatggatctccaaacgcaagggccgccgggtccgagccgcctgctctcaatcagcgtacacccgcttgtcgagaagcggcatataaccggttccctcgtttatattgaagatataacggagaaacgcggcagggaggtacgcctgcgccgcgctgagaatcttgccagccttaccacgcttgctgcgggcgtcgcccatgagataaaaaacccgttaggggctatttcaatccacctccagcttttgcggaaagccctcaaaaaaaaggaaaaacaacaggaacctgccgctacggatgcgttagtcgataaatatttttccgtgttaaacgaagaagtagaccggttgaacggcatagttattgattttttatttgccgtgcgccccatgtcactggaactctgcgagggagacctcaacgcgctgattaccgggcttggtgaatttattcgggctgaactggaacagtccaatatacggctcctgcttgagttggatgacaagcttccccccgtgcttttcgacgagcgttatatgaaacaggttttgcttaacctgataaagaacgcacaggccgccatgccaaagggggggctgctgaccattgccacgctgggaagggacagcgagatacggataagcgtatgcgatacgggcacggggattagccaggaaaaccttaaaaaaatatttgaaccttattttacgacaaaaggcaacggtaccggtcttgggctgacccttgtatataaaattataagggagcatcagggcgagatgtcggttgattcgagggaaggggaggggacggatttcgagatcatcctccccgtttatcagaaaaaacagaatctgatcaattattcaggggaaaaaaatgaaatttaa

SEQ ID NO: 37788 - protein, 450 aa, Unknown
  Obtained from environmental sample
  DOMAIN (85)...(193): PAS fold
  misc_feature (1)..(450): Xaa is any amino acid
MRFQSECRRLQGNMEAADQGSVRGLFCLEPEAGSRAGVAVFPAQGRSGGSGVGMSGFYRRALSKLNRLNLEQCRELLVSASQEIFRLDTVLDSLPCGILVCDEKHRLLMANKAALRFLPMSYTEGDLLWELIPDERIANFFQQTLKRGGRLLEQEMDLQTQGPPGPSRLLSISVHPLVEKRHITGSLVYIEDITEKRGREVRLRRAENLASLTTLAAGVAHEIKNPLGAISIHLQLLRKALKKKEKQQEPAATDALVDKYFSVLNEEVDRLNGIVIDFLFAVRPMSLELCEGDLNALITGLGEFIRAELEQSNIRLLLELDDKLPPVLFDERYMKQVLLNLIKNAQAAMPKGGLLTIATLGRDSEIRISVCDTGTGISQENLKKIFEPYFTTKGNGTGLGLTLVYKIIREHQGEMSVDSREGEGTDFEIILPVYQKKQNLINYSGEKNEI

SEQ ID NO: 37789 - DNA, 372 bp, Unknown
  Obtained from environmental sample
  misc_feature (1)..(372): n is a, c, g, or t
atgagcgatacgcactggtcaacgcagaaagaagaagccgccgggtactggcagcttgctttctttcttgccatattcaaactgctgcctgtcgtcatcctcagaatcctcgccttcccggtcggcttttgttattttctcttttcaaagcgggctagggaactttcccggctttacctggatcgggtatgccccgccacggaaggcgaacctctaaaaagacttacgcccttaaagcacatcatcgccttttccctttctcttatcgagaaacttgaagcctggagcggcagggtgtcgttttcccggattcattttcaggatgatgatgtaatggatcttgtacaacggctgaaagctcggccgatctga

SEQ ID NO: 37790 - protein, 123 aa, Unknown
  Obtained from environmental sample
  misc_feature (1)..(123): Xaa is any amino acid
MSDTHWSTQKEEAAGYWQLAFFLAIFKLLPVVILRILAFPVGFCYFLFSKRARELSRLYLDRVCPATEGEPLKRLTPLKHIIAFSLSLIEKLEAWSGRVSFSRIHFQDDDVMDLVQRLKARPI

SEQ ID NO: 37791 - DNA, 420 bp, Unknown
  Obtained from environmental sample
  misc_feature (1)..(420): n is a, c, g, or t
atgatttgctcctatcctgtgtacgacgacacggttccggcaagccgcagacacggaaggatagttgccaatacatgggcaaaaatcgttactctttccccgcacataaaggaatccatgctggggttcagggtgtatccggttaagccggtacttagcctgtatggcaattcgcgtattgattcccgtatgggttttgatattgaaattctggttcgccttgtctggaaaaacacccctctgattttccagccggtgggggtaacttacccggcggacggcatttcgcatttcaggccggtgcgggacaatatccggattagctggctatttaccaggctctgctgcggaatgataatcaggctgccaattctattaagccgcgttatccgccataaacacgaaaaggacagaccatga

SEQ ID NO: 37792 - protein, 139 aa, Unknown
  Obtained from environmental sample
  misc_feature (1)..(139): Xaa is any amino acid
MICSYPVYDDTVPASRRHGRIVANTWAKIVTLSPHIKESMLGFRVYPVKPVLSLYGNSRIDSRMGFDIEILVRLVWKNTPLIFQPVGVTYPADGISHFRPVRDNIRISWLFTRLCCGMIIRLPILLSRVIRHKHEKDRP

SEQ ID NO: 37793 - DNA, 822 bp, Unknown
  Obtained from environmental sample
  misc_feature (1)..(822): n is a, c, g, or t
atgggagaagtgttggataaagcgtacaaacggttaaaaacttccgacaatgtttcccgttatcgtcagggtattttcaaacaagtgacggctttacttaaggacgataaatggctcgatgaaagcgcaggcaaatatatgcggatacttcaaacaagccgcgaggaatgccgcaaaaaattgatgttcatgctggaagaaattcgagacgatttaaaatcagttgatccactggaagatgaaattgacagacgaaacgccgcatattcccgttccagtacggaaattatcaaagcttacattgaaccggacagcaccatagccggaaaaatcggacagcttattaaggcgatttacggcggtaatgaagaagttaaatccggtattgcccatggtctgcatcgcataagattcctttcaccttccagtctagtcctttcccagaaaagagcggatggtgattttattacctctccttcaaaagccgatgttgaagctcttacccaatctgaagcggaatttcttgaacgcatgaagaagcgactttctatcaaacggattaacgcatggcttgacgaacaaggcggaaaagaaaatattcttacccccgaaaaattaatcacaggagaagattcttatatccgttttatttatgccctgctctacggcgactcacgaaacaattttagttatagtattgaagaaaccggtgaagaaaaagcaaacactgattctataaaagcggcggactatgtggtccaaaatattcgttttcgtaagaggagcggtaatcgcatttctgttgacggagataagccatga

SEQ ID NO: 37794 - protein, 273 aa, Unknown
  Obtained from environmental sample
  misc_feature (1)..(273): Xaa is any amino acid
MGEVLDKAYKRLKTSDNVSRYRQGIFKQVTALLKDDKWLDESAGKYMRILQTSREECRKKLMFMLEEIRDDLKSVDPLEDEIDRRNAAYSRSSTEIIKAYIEPDSTIAGKIGQLIKAIYGGNEEVKSGIAHGLHRIRFLSPSSLVLSQKRADGDFITSPSKADVEALTQSEAEFLERMKKRLSIKRINAWLDEQGGKENILTPEKLITGEDSYIRFIYALLYGDSRNNFSYSIEETGEEKANTDSIKAADYVVQNIRFRKRSGNRISVDGDKP

SEQ ID NO: 37795 - DNA, 1209 bp, Unknown
  Obtained from environmental sample
  misc_feature (1)..(1209): n is a, c, g, or t
ttgggttatccggcgcacgatttggccggctacgtcgacggcgaccccttcgaggtggcgctgcggggcaccgcgctctccggggagccctttgccgtccgcgggtaccagcggcaggccgccgacagtttcataggcggcccgcagtcgcccgggggcagcggagtcgtcgtgctgccgtgcggcgccgggaagaccgtcgtcgggatatacgccatgagcatgctcaagcgccggacgctcatacttgtcacgaacgtcaccgcggcgcaccagtggaagcgggagatactcgacaaaaccacgctacgcgacgatgaggtgggggagtacagcggggacgtgaaggaggtcaggccggtaacgctcgccacctaccagatactgacctaccgcaagtctaagtggagcgacttcttgcactacgacatcttcaactcgcagaactgggggctgataatttacgacgaggttcacctccttccggcgccggtcttcaagttcaccgccgacatacaggcccgcaggcggcttgggcttacggccacgctcatcagggaggacgggctggagaacgatgtcttcacgctcataggccccaagaagttcgacgtcccgtggaaggatctggagcgtcagggctggatagccacggcaaagtgcgtggagatacgcgttgacctgccgcagcaggagaaactgcgctacctctcgctggcgccgcggcagcagatacggctggcctacgagaacccgaacaaactgggcgcctcgagggagatagtcggcaatcacaagggcgacaacatactgatcataggccaatacatcacgcaatnggagatgttcgcgcaagagctctccgccccgataatcacaggcgcgacggccaacaaacgccgcgacgagctgtacaagcagtttagagacggcgagataaaggttctggtactctccaaagtaggaaacttcgccatagacctgcccgacgcgaacgtggcgatccaaatatccggctccttcggatcaaggcaagaggaggcgcaacgcttgggcaggatactgcgccccaaaaagcgcggggagcaagccgtcttttactctatagtgacgagagaatccaaagaattggacttcgcgatgaacagacagctgtttttgacggagcaggggtactcttacgatattcggtatcatgaggctgtgtga

SEQ ID NO: 37796 - protein, 402 aa, Unknown
  Obtained from environmental sample
  DOMAIN (36)...(287): SNF2 family N-terminal domain
  misc_feature (1)..(402): Xaa is any amino acid
MGYPAHDLAGYVDGDPFEVALRGTALSGEPFAVRGYQRQAADSFIGGPQSPGGSGVVVLPCGAGKTVVGIYAMSMLKRRTLILVTNVTAAHQWKREILDKTTLRDDEVGEYSGDVKEVRPVTLATYQILTYRKSKWSDFLHYDIFNSQNWGLIIYDEVHLLPAPVFKFTADIQARRRLGLTATLIREDGLENDVFTLIGPKKFDVPWKDLERQGWIATAKCVEIRVDLPQQEKLRYLSLAPRQQIRLAYENPNKLGASREIVGNHKGDNILIIGQYITQXEMFAQELSAPIITGATANKRRDELYKQFRDGEIKVLVLSKVGNFAIDLPDANVAIQISGSFGSRQEEAQRLGRILRPKKRGEQAVFYSIVTRESKELDFAMNRQLFLTEQGYSYDIRYHEAV

SEQ ID NO: 37797 - DNA, 888 bp, Unknown
  Obtained from environmental sample
  misc_feature (1)..(888): n is a, c, g, or t
gtgcgcgacagggacgctgctgcaaaactgtttgagggacttgaaaacagggaaatcgtattcatacataccgcgtccgtagtgttaatcggcgggaacagcaggcaatataaaacaatggacgacgtgaattacaacggcgtaaaaaacgttattgaagcgtgcctctcgcataaagtgcggctgttatatgtcagttccgtacacgccatcacagagccgcccaaaaaacgtttgacaacggaaatagaaaactttgatccgcgatccgttgttggcagatacgcaaaaagtaaagccactgcaaccgcgctggttatggacgcggttaaaaatcaagggcttgacgccgtaattgtacaccccagcggcattaccggtccgaatgattacagcgattctcatcttacgcagatggttatagattatttggaaaataaagttcccgcggcggtcaggggcggctacgattttgtcgatgtgcgcgacgttgcaagcggcatactcaaagccgcggaaaaaggcaaaaagggcgattgttttctgttgtccaataaatattattcgatgatggaaatgtttacaatgctccacgagataaccggcggaaagaaaataaaattaatacttcccttgtggctggcttatttttcgcttccgttcctttcggcttttttcaccatactcggcaaacgtccgctgtataccgcgtactccctgtataccctgacaagcaacagtaatttttcgcatgaaaaagcatcaaaagagcttggttattcaccgcgcgatttacgcgagagcctcgccgacacagtggcatttataaacgaatatggccgcggtttcgctccgttcatcaaagaacctcaaaatcaaaaactttaa

SEQ ID NO: 37798 - protein, 295 aa, Unknown
  Obtained from environmental sample
  DOMAIN (1)...(168): Male sterility protein
  misc_feature (1)..(295): Xaa is any amino acid
MRDRDAAAKLFEGLENREIVFIHTASVVLIGGNSRQYKTMDDVNYNGVKNVIEACLSHKVRLLYVSSVHAITEPPKKRLTTEIENFDPRSVVGRYAKSKATATALVMDAVKNQGLDAVIVHPSGITGPNDYSDSHLTQMVIDYLENKVPAAVRGGYDFVDVRDVASGILKAAEKGKKGDCFLLSNKYYSMMEMFTMLHEITGGKKIKLILPLWLAYFSLPFLSAFFTILGKRPLYTAYSLYTLTSNSNFSHEKASKELGYSPRDLRESLADTVAFINEYGRGFAPFIKEPQNQKL

SEQ ID NO: 37799 - DNA, 504 bp, Unknown
  Obtained from environmental sample
  misc_feature (1)..(504): n is a, c, g, or t
gtggatgaccccgccgcccagcagaaagagcgccagcacggcgacaaaggtcgtgccgccggtgagcagcgtgcgcgaaagggtctggttgacgctgttgttgatgacggcgccaaggtcgagcggggactccttgcgcagattttcgcggatgcggtcataaacgatgatggtgtcgttcagcgaatagcccaccagggtaagcaaagcggccaccacgttcaggtcgatctccttgcccaatacgctgaggagccccagggtgatgaacacgtcgtgcagcaatccgaccacggccccaaaggcgaagttcagcttcagccgccaggatacggccagggtgatcccgagcgccaccaaaacaagcgcgcccgtgcccacgccgaaaaggctcaccacgtacacgccgccccaaagggccgcggtcatggcggccgccgccagccagcgctgttcaaagcggccggagatatatacggcgatgagcagcacggcataatataa

SEQ ID NO: 37800 - protein, 167 aa, Unknown
  Obtained from environmental sample
  misc_feature (1)..(167): Xaa is any amino acid
MDDPAAQQKERQHGDKGRAAGEQRARKGLVDAVVDDGAKVERGLLAQIFADAVINDDGVVQRIAHQGKQSGHHVQVDLLAQYAEEPQGDEHVVQQSDHGPKGEVQLQPPGYGQGDPERHQNKRARAHAEKAHHVHAAPKGRGHGGRRQPALFKAAGDIYGDEQHGII

SEQ ID NO: 37801 - DNA, 798 bp, Unknown
  Obtained from environmental sample
  misc_feature (1)..(798): n is a, c, g, or t
atgaccgtgacgccgggaatcattgatcctcacgtccacgtgtccgcgtggctgggcggcgggatcggccacacgatgatggccagggcgggcgtgaccaccgcccttgatatgtcaggccccggcgagagcgtgtacgatctggtccacagccgcggcgcgggcctgaacatagccaccatcgaatatgtccgccccggacataccgtatcgtccgccgatcccggcgatcaggagattgccgcgctcctgaaaaaagtgctgcaacaaggctcgctcggcgtgaaaatgctcggcggccactacccgctcaccccggaagccacgcggcgctgcatcaaaatggccgcgcagcatgacgcttatatcgccttccatgccgggacgaccaacaaaggatcctccatcgaagggtttctggaggcggtggaaatcgccgacgggcttcccctgcatctcgcgcacatcaacgcctattgccgcggcctcgacaaacccccggtggaagaaaccgaaatcgcggtaaaaaccttgaccgacaacccgaatatcctctccgaatcctacctttcgccgttcaacggcacaagcgccgaaatcatagacggcgcgcccggaagcaacgtgaccaaacgctgcctcctcaccggcgggttcaccccggatgaaaagggcatggaagaggccatcctggcaggttgggcgcangtgaactatccctacgcgggcgaaaccctgctcatcaccggcaaggaagccgtcgcgcactggagaagcaaggcaccaacaccaccgtaa

SEQ ID NO: 37802 - protein, 265 aa, Unknown
  Obtained from environmental sample
  misc_feature (1)..(265): Xaa is any amino acid
MTVTPGIIDPHVHVSAWLGGGIGHTMMARAGVTTALDMSGPGESVYDLVHSRGAGLNIATIEYVRPGHTVSSADPGDQEIAALLKKVLQQGSLGVKMLGGHYPLTPEATRRCIKMAAQHDAYIAFHAGTTNKGSSIEGFLEAVEIADGLPLHLAHINAYCRGLDKPPVEETEIAVKTLTDNPNILSESYLSPFNGTSAEIIDGAPGSNVTKRCLLTGGFTPDEKGMEEAILAGWAXVNYPYAGETLLITGKEAVAHWRSKAPTPP

SEQ ID NO: 37803 - DNA, 549 bp, Unknown
  Obtained from environmental sample
  misc_feature (1)..(549): n is a, c, g, or t
atggaaaagaaaaagagcgtttccgtcagccttgaaggggtaaccaaggttttcaaaaatacaaagggaaagtccgatgttatagcggttcatgaatccaacttcacggtggaagccggggagcttgtaacgctgctgggcccttcgggctgcggaaagaccaccaccctcagaatgatcggcgggcttgagcttccaacctcggggaaaatccgcataggctccgaagacgttacgatgcttccgcctaacgccagggataccgccacggttttccagagctacggcctctttccgcatctaacggttggtgaaaatgttgcctacggtctaaagctcaagaagatgccaaaagctgacatcgacaaaaaggtgatggaatttattgacatggtaggcttgggagatctccacgacagaccgcccggacagctctcaggcgggcaacagcagcgggtcgcccttgcgcgcagccttatagtggagccttctgtgcttcttttggacgagcccctctcaaacctggatgcgctgctacggaacagatga

SEQ ID NO: 37804 - protein, 182 aa, Unknown
  Obtained from environmental sample
  DOMAIN (40)...(182): ABC transporter
  misc_feature (1)..(182): Xaa is any amino acid
MEKKKSVSVSLEGVTKVFKNTKGKSDVIAVHESNFTVEAGELVTLLGPSGCGKTTTLRMIGGLELPTSGKIRIGSEDVTMLPPNARDTATVFQSYGLFPHLTVGENVAYGLKLKKMPKADIDKKVMEFIDMVGLGDLHDRPPGQLSGGQQQRVALARSLIVEPSVLLLDEPLSNLDALLRNR

SEQ ID NO: 37805 - DNA, 567 bp, Unknown
  Obtained from environmental sample
  misc_feature (1)..(567): n is a, c, g, or t
atggcgggggcgctaatcattgtgcgacagaaattcgccgcaaagcggattctggaagtcctgcttatgacccctttcgcgatccccggtaccctnttaggtatttcctacatactcgcgtttaacaagccgcctttgctgttggtcggaacggcggcgatcatcgtccttaattatgttgtccgcgaactgccagtaggcattgaaactggtgctgccaatntgcgtcaaatcgataaatcaattgaagaagctgcccaggacttgggagcggacatgtccaaggtctttacttccgtagtgcttcccctggtaaggcccagcttcctgaccagcatgtcatacacctttgtccgctcaatgaccgctgtaagcgcggtgatcttcctgatctccgcccgctggtaccacctgaccgtgcagatatataacttttcggaaaatttacgcttcggcatggcaagcgtcctttcaaccgtgctgataataatcgtcctggctgtcttcggcctgatgcaggttcttgtccgggatcgtggcataaacgccaggcaaatatcgcaataa

SEQ ID NO: 37806 - protein, 188 aa, Unknown
  Obtained from environmental sample
  misc_feature (1)..(188): Xaa is any amino acid
MAGALIIVRQKFAAKRILEVLLMTPFAIPGTLLGISYILAFNKPPLLLVGTAAIIVLNYVVRELPVGIETGAANXRQIDKSIEEAAQDLGADMSKVFTSVVLPLVRPSFLTSMSYTFVRSMTAVSAVIFLISARWYHLTVQIYNFSENLRFGMASVLSTVLIIIVLAVFGLMQVLVRDRGINARQISQ

SEQ ID NO: 37807 - DNA, 459 bp, Unknown
  Obtained from environmental sample
  misc_feature (1)..(459): n is a, c, g, or t
gtgcggggttttgtcagcgagctcatgtcaatggcggcgctggtttggggcctgttggcggcaatatttacttttagaaaaacggcggagttagtccggggcaaatttatacccgatgtaaaggcgcttcccgagataatatcctttattgcggtttttcttgccgttttcgcctttataaaaatacttgaaacgatattaaaagatattattgacaggatacaactcggcggcccggatcgttttcttggtttcttcctcggcattgccgaaggattagttatcgtctgcctgctcctgttcctgatacttgtccaaccctttgtcgagcctgaactcgtacttgaaggcagccttcttgcgagattactaatgccgtttatcattggaaccaaaaaagagctgtttgaatctgtcgcccgattcagcggggcagcagggggaggtgccggtgtttga

SEQ ID NO: 37808 - protein, 152 aa, Unknown
  Obtained from environmental sample
  SIGNAL (1)...(20)
  DOMAIN (1)...(138): Colicin V production protein
  misc_feature (1)..(152): Xaa is any amino acid
MRGFVSELMSMAALVWGLLAAIFTFRKTAELVRGKFIPDVKALPEIISFIAVFLAVFAFIKILETILKDIIDRIQLGGPDRFLGFFLGIAEGLVIVCLLLFLILVQPFVEPELVLEGSLLARLLMPFIIGTKKELFESVARFSGAAGGGAGV

SEQ ID NO: 37809 - DNA, 519 bp, Unknown
  Obtained from environmental sample
  misc_feature (1)..(519): n is a, c, g, or t
ttggaaccaaaaaagagctgtttgaatctgtcgcccgattcagcggggcagcagggggaggtgccggtgtttgagaatatcatcgggcaggcggcggcaggacagctaaaagcggatattctttcacaaaggcttgccccttccatgctgttttttgggcccgccgcgtcagggaagggcagcacggcaatggaactggcgcgttccctctcatgcgagaagggacaagcccagtggaactgcgcctgtccttcctgcgcccgtcatcgctcccttatccatgccgatctcgcgatgattggcccccggagttttacggcggagatagccgcctcccgcgccgcttttctcagggataccgcgtcggcggcggggcggtccctttttatccgttctctgagaaaactgctcgcccgcttcgcgccctctgtctgggagtacgaacctaaatcaggcaaacttaacccattgccccttcttcattcgcggaagaagaactctcggccgatgctgacctag

SEQ ID NO: 37810 - protein, 172 aa, Unknown
  Obtained from environmental sample
  misc_feature (1)..(172): Xaa is any amino acid
MEPKKSCLNLSPDSAGQQGEVPVFENIIGQAAAGQLKADILSQRLAPSMLFFGPAASGKGSTAMELARSLSCEKGQAQWNCACPSCARHRSLIHADLAMIGPRSFTAEIAASRAAFLRDTASAAGRSLFIRSLRKLLARFAPSVWEYEPKSGKLNPLPLLHSRKKNSRPMLT

SEQ ID NO: 37811 - DNA, 1539 bp, Unknown
  Obtained from environmental sample
  misc_feature (1)..(1539): n is a, c, g, or t
atgcccaaagaacctcttttcctgattgacgcctacggtcttatctaccgttcgtatttcgcttttctcagccggcccctgttgaatccggctgggaaaaacgtgtccgccttatttggctttgccagaactttggtaaccctcattaattcaggcgtccctaccgtcaaagatggcaaaaataacgacgatcccatcgaaaagcaggaaatggttttaaaaaaaccgcagaggcttgcggcagtattcgattcgctcacccccactttcaggcataagatgtacagcgaatacaaggccacaaggcagaaaacgccggaagacctccacgcgcaggttccgctggtacaggaacttcttaaagccatgaacattccctgccttcgggctgacggttttgaagcggacgacattatcgcgacactggctctaaaatgccgggctgaagggcgacagtgctatatcctttcttcagacaaggatctgcttcagcttgtaggaggcggaacttgggagctaaggccaatcaagggaaacgcgcctacagaaggcggtctgccctacgaacttgtcggccctggcgaagtcaaaagcgaatggggagtaaatccagacaaagtgctggatcttctctcccttaccggggacagctccgataacgttccgggggtaaaaggcattggggaaaagaccgcggtaaaactcatgacccgctacggttcgctcgatgagatttacaaaaacatcgctggcatcgaaggggcaatcgggaaaaagatcgccgaaggaaaagagagcgcctacttttctcaatcgcttatccgtctgcgtgacgatgtaacaataccgattgaaaatattgacgaactttcaacggagagccttaaccgcggagcgggcgcgtctgtactgatgcgcgaaggcatacgcaaaagcgcgaaacaacttgacccaagcgtaaaacctgtttcgttgagcgaacaaaacgataacagtcagcagacggataatacggatataaatacatcgggagaaacatcggtaattgaagcagcaaccttcgtctcggcggcggcagaccaagatcttctgggagacggaacttacaaaacaatactcgaacttgaagaattaagctccttgcttgaaaaggcaaaaaaacaaaaaattttagccatagactttgaaaccgattcccttgacgcatggaattcgcaccctgtgggaatatctctggcgttaaagccaaaagaggcgttttacgcgccgctcgctcctcacggagaaagcaaatgtacttttttagacacggataaagtccgcgccctgctctcccctcttcttgcggacgaagaaatgacgattgttgcgcataacgctaaatttgactacaaagtaagcaggggctggggcatagaccgctggcggtgcaaaatctgggataccatgattgcggcatggcttgttaatcccgagcgcggagcttattcgcttgattcgcttgtttcctacacttttgactgtactcctatcagatag

SEQ ID NO: 37812 - protein, 512 aa, Unknown
  Obtained from environmental sample
  DOMAIN (369)...(512): 3'-5' exonuclease
  misc_feature (1)..(512): Xaa is any amino acid
MPKEPLFLIDAYGLIYRSYFAFLSRPLLNPAGKNVSALFGFARTLVTLINSGVPTVKDGKNNDDPIEKQEMVLKKPQRLAAVFDSLTPTFRHKMYSEYKATRQKTPEDLHAQVPLVQELLKAMNIPCLRADGFEADDIIATLALKCRAEGRQCYILSSDKDLLQLVGGGTWELRPIKGNAPTEGGLPYELVGPGEVKSEWGVNPDKVLDLLSLTGDSSDNVPGVKGIGEKTAVKLMTRYGSLDEIYKNIAGIEGAIGKKIAEGKESAYFSQSLIRLRDDVTIPIENIDELSTESLNRGAGASVLMREGIRKSAKQLDPSVKPVSLSEQNDNSQQTDNTDINTSGETSVIEAATFVSAAADQDLLGDGTYKTILELEELSSLLEKAKKQKILAIDFETDSLDAWNSHPVGISLALKPKEAFYAPLAPHGESKCTFLDTDKVRALLSPLLADEEMTIVAHNAKFDYKVSRGWGIDRWRCKIWDTMIAAWLVNPERGAYSLDSLVSYTFDCTPIR

SEQ ID NO: 37813 - DNA, 1521 bp, Unknown
  Obtained from environmental sample
  misc_feature (1)..(1521): n is a, c, g, or t
ttgcttatcaggtcgcgggccagtatctcaagactttcggaacaatacgtcgtcgccatggcaaatgactccgccgctgatattacaaattttattcaatcttacacctacagggcggaaaccgcctcccatgttatgggacagtacaaatatattgatcccgccaaccgccgggctttgtttaatgttgtactggagggtctggcactgtcaaaccccggtattaccggagtatggtgcgtatgggaaccggatgttttggaaggcggcgaccggcagtatattggaaccaaaggaacagattccaacggacgtttcgccccctattattactgggacgaaggtaaagtaaaattggacgttctcgatgattatgacgaagacgattactaccttttggcgaggaattcaggcaaaccggcggttttgaatccctttgaatataatgtgggcgggaaaaatgtattgatgaccacaattgctattcctatacgcgcggacggcaaggttttgggcgttataggctttgacatccccctgacggagatccagataatttcgcaaacccaaaagcccttctccgattccataacggccgttttcagcagcaacggcacggttaccgctcactttgacgaaagccggataggaaaaaatataaagacttcggaagccgatatggccggcaggcatctcaatgatttattaaatgccgttactatgggtaaaccgtattcttttgccaattacatcgaaacgataggggagaggatgagagtttttaccgttcccgttccggtcggcgacaagacaaccccctggagctacgcgatagctgtcagggacgatacgataatggccccggtatacgaaatgattacccttaccatagtgataagcttcgtggtattggccctggtagtcgcggcggcgatgttcatgtcacgatccatcagtaagccaatcatcagggttgccgatacgcttaaggatatttccgaaggcgaaggcgacctgacacggagcatcgccgttacttccaacgacgaaatcggcagcctcgccctgtacttcaacaagactttggaaaaaatcagaaaccttgtcgtaaccatcaaaaaagaagcggcggacctccgtgacgtgggtaatgatcttgccggcaacatgaccgaaaccgccgccgcggtcaatcaaatcacagcaaacatccggagtatcaaacaacgggtaataaatcagagcgccagcgtcaccgaaacccacgccaccatggaacaggttgtcgcgaacatcaataaattaaacagccatgtagaaaaccagagcagcaatatttcaaaggcttcgtcagccatagaggagatggtagccaacatccattcggttaccgaaaccctgatcaaaaactccgccaatgtaaataccctgaaggaagcgtcagaagtgggcagggccggattgcagggggtggcggccgacattcaggaaatcgcccgcgagtccgagggcttatggtaa

SEQ ID NO: 37814 - protein, 506 aa, Unknown
  Obtained from environmental sample
  DOMAIN (142)...(223): Cache domain
  misc_feature (1)..(506): Xaa is any amino acid
MLIRSRASISRLSEQYVVAMANDSAADITNFIQSYTYRAETASHVMGQYKYIDPANRRALFNVVLEGLALSNPGITGVWCVWEPDVLEGGDRQYIGTKGTDSNGRFAPYYYWDEGKVKLDVLDDYDEDDYYLLARNSGKPAVLNPFEYNVGGKNVLMTTIAIPIRADGKVLGVIGFDIPLTEIQIISQTQKPFSDSITAVFSSNGTVTAHFDESRIGKNIKTSEADMAGRHLNDLLNAVTMGKPYSFANYIETIGERMRVFTVPVPVGDKTTPWSYAIAVRDDTIMAPVYEMITLTIVISFVVLALVVAAAMFMSRSISKPIIRVADTLKDISEGEGDLTRSIAVTSNDEIGSLALYFNKTLEKIRNLVVTIKKEAADLRDVGNDLAGNMTETAAAVNQITANIRSIKQRVINQSASVTETHATMEQVVANINKLNSHVENQSSNISKASSAIEEMVANIHSVTETLIKNSANVNTLKEASEVGRAGLQGVAADIQEIARESEGLW

SEQ ID NO: 37815 - DNA, 1602 bp, Unknown
  Obtained from environmental sample
  misc_feature (1)..(1602): n is a, c, g, or t
atgcgcgttcagggtaacatgaatattgtcggtatagcgtttgacgacgacggagttaaacaagttgaaatcgccgtataccgcggaacagacggaaaaggcgaggaattagtccgcgtaaaggcatcgggaaccgattactggtcttatttccttgacacatcagacggtgaaatatggctggacggagattataccgttaaagcgtggtcaaccgatataaatgatctttcaggtattgcggatgtttacactacaggacaaaaagtccccgcaaaaaagaaaaaagtcgccgttgtttactggcggctggacaggaaaaaacctgacgctgttattacaagccacagtgtcggcgctcttgtctcgggaaatataaaattaggcggcactctttacgacggcaacggcatttcctctttcagttattcggtagacggcggacaaaaatatattcccgctaaattcaaagttaataaaaccggcaacggcacatgggatatcaatattaacacaaaacaatttgaagacggtcccgtcgttatctggtttaaaacagtcgacgggaacgacagcgttggaaccgccgcccatttgttattcgtaaataacattggtcccgacgtaaaagtcgtatatcccgagccgaatactacgttaaacggcgtatttaatatcgccggttacgcgaaacatcccgtaggattaaaatccgtatcatggaaagccggaaactctcacggcgattttgaactgctccccggcaaccattggtggtcggctcctgtagacgcccgcaactttaaaggaaacgctatcgaagttgaaatcagagcggttgacgtttcaggtaacgctactgttacaaaacaaaaatataaatttgatcctcttacggatttacccacagtaaaattgacattacccataacgggcgttcttaataacgatttaggtcttgttgtaaaaggcgaggcgacggatgacgatggaatcgcttccgtattctactctctcgacggcggtcccgcctcggaaatacagtgcaacggatatttccagttctacattcccactccaagcgaaggaagccacactcttgacgtctgggcgaaagacgtaggaggcgttacgggaaataaagtacaggtaaaaggcatactggtttccaacggcgtaatacagccaggcatcgcttccgttacatatccagagggaagaaatacaaaaacagatattttcaatacaggtatgaaaatcaagcctgtcgctaaaatgacaatgcttctttcatacaggtctcaaaacccgcccgcaaccgcgacggtttatttcggcgatcagattacgccggtaagattagccggaacaaaggacgtgtttaccgcggctgttcctgttcccacaggattgcccgaaggtcttttggaaattaaattggcggcgacggatcgtctgggcaaggatattcatacagcgaatatgtttatatcgccggttctgacgatgattcagcgcccagctcattctctttttgtaagcagaatcttcttccctgacgacgcatactgctttaaaacggtgaaactttgcttggtataa

SEQ ID NO: 37816 - protein, 533 aa, Unknown
  Obtained from environmental sample
  misc_feature (1)..(533): Xaa is any amino acid
MRVQGNMNIVGIAFDDDGVKQVEIAVYRGTDGKGEELVRVKASGTDYWSYFLDTSDGEIWLDGDYTVKAWSTDINDLSGIADVYTTGQKVPAKKKKVAVVYWRLDRKKPDAVITSHSVGALVSGNIKLGGTLYDGNGISSFSYSVDGGQKYIPAKFKVNKTGNGTWDININTKQFEDGPVVIWFKTVDGNDSVGTAAHLLFVNNIGPDVKVVYPEPNTTLNGVFNIAGYAKHPVGLKSVSWKAGNSHGDFELLPGNHWWSAPVDARNFKGNAIEVEIRAVDVSGNATVTKQKYKFDPLTDLPTVKLTLPITGVLNNDLGLVVKGEATDDDGIASVFYSLDGGPASEIQCNGYFQFYIPTPSEGSHTLDVWAKDVGGVTGNKVQVKGILVSNGVIQPGIASVTYPEGRNTKTDIFNTGMKIKPVAKMTMLLSYRSQNPPATATVYFGDQITPVRLAGTKDVFTAAVPVPTGLPEGLLEIKLAATDRLGKDIHTANMFISPVLTMIQRPAHSLFVSRIFFPDDAYCFKTVKLCLV

SEQ ID NO: 37817 - DNA, 420 bp, Unknown
  Obtained from environmental sample
  misc_feature (1)..(420): n is a, c, g, or t
gtgccgggaaaacatgtatgcgcttttgggaatgacggatttaacgaagcgcaagctaaagcgtatgaagccgatatgctctgcttcatcactcctgtttattggggcgaagccgaggaaagccttaaatgcttttttgaccgtatacgccgttgtgagtttgatatgccttggggcggaccgcgggacaagaaaccggctttttccggcaagcaggttcttcttatcgcttcgcccggaggcagcgggaacgggatgctctcctgtctggagcagatggaccgattctgccgacataccggggccgtcatctttgactacatcgggataaacagatggaataatgattacaagaaacaagctgttttcgaggctgctaaagcaatggcaagcggacgcaaaaatggtgattcaatataa

SEQ ID NO: 37818 - protein, 139 aa, Unknown
  Obtained from environmental sample
  misc_feature (1)..(139): Xaa is any amino acid
MPGKHVCAFGNDGFNEAQAKAYEADMLCFITPVYWGEAEESLKCFFDRIRRCEFDMPWGGPRDKKPAFSGKQVLLIASPGGSGNGMLSCLEQMDRFCRHTGAVIFDYIGINRWNNDYKKQAVFEAAKAMASGRKNGDSI

SEQ ID NO: 37819 - DNA, 441 bp, Unknown
  Obtained from environmental sample
  misc_feature (1)..(441): n is a, c, g, or t
atgtcagaaagatattacaaacacgaaatattaaaaaagaaatttgaaggctttgtgaaaaaagccgaaaaaggcgatgtttctacgatgctgttattggctcgcgtttatactgaaagcgaatatttccccaatgatacttttgccgccgaagcatggttaagaaaagctgcgcagttaggcagcgatgaagcaaaatttagattggcgaaactgttaagcaatggtaacggagtcgcgaaggatttggaagagtcttttgacttataccatgagctaatgtttgattgcaatattgacgcgatgatggaagtcggcattgccttaaaagagggaagaggcgtaccaaaggacgaagaattagggtctaaatatatgagatttgcattcgatattgaacttgatttaatgaaaagcgagcctgacgcaaaaattccatag

SEQ ID NO: 37820 - protein, 146 aa, Unknown
  Obtained from environmental sample
  misc_feature (1)..(146): Xaa is any amino acid
MSERYYKHEILKKKFEGFVKKAEKGDVSTMLLLARVYTESEYFPNDTFAAEAWLRKAAQLGSDEAKFRLAKLLSNGNGVAKDLEESFDLYHELMFDCNIDAMMEVGIALKEGRGVPKDEELGSKYMRFAFDIELDLMKSEPDAKIP

SEQ ID NO: 37821 - DNA, 1110 bp, Unknown
  Obtained from environmental sample
  misc_feature (1)..(1110): n is a, c, g, or t
gtgtttgacgacaacgccaacacaggcttgaagacagctacatggatactgaacaacgcaggcgtctgggtcagcataaacaccgaatacaatctgtttgacgctgcttattcaggcttgattagggagcctgcatcgcctatggatggcgacatagtggctgctgtcggtagggctggggtggggactgtgttcgggttccctgattctctggcggcgaccagcaatactgacacaaccacatccacgcccgctgtgtcaggcacattgcaggttctactgcaaacgatatgggctaagatacgcagcgttgtcaatgcgatacctacaggggtgaatcaaagcgttgcgctgggaacaacaacaggaacggcgaactcaataacaggcacagcccttcccgtctcaggcacgctgccgattgccaacgttgccaacgtgtcgctcacagccaccaccaacacggacaccaccacatcaacaggcgcggtgtccgctgcctccatatccaccattctgcaaacaatatgggcgaagatacgcagcgttgtcaatgcgatacctacgggggtgaatcaaagcgttgcgcttggaacaacaacaggaacagcgaactcaataacaggcacatcgctacctgtttcgggcatattgccgattgccaacgttgccaacgtgtcgctcacagccaccaccaacacggacaccaccacatcaacaggcgaggtgtccgctgcttccatatccaccattctgcaaacgatatgggcgaagatacgcagcgttgtcaatgcgatacctacgggggtgaatcaaagcgttgcgctgggaacaacaacaggaacggcgaactcaataacggggacttctctccctgtttcgggcacattgccgattgccaacgttgccaacgtgtcgctcacagccaccaccaacacggacaccaccacatcaacaggcgcggtgtccgctgcctccatatccacgatgcttcagacgatatgggctaagatacgtaacgttgtcaatgcctcaaaaaagaatcccttttgtatgatttttaatggaattggtcatttcataatatgttttgacaaaacatactattga

SEQ ID NO: 37822 - protein, 369 aa, Unknown
  Obtained from environmental sample
  misc_feature (1)..(369): Xaa is any amino acid
MFDDNANTGLKTATWILNNAGVWVSINTEYNLFDAAYSGLIREPASPMDGDIVAAVGRAGVGTVFGFPDSLAATSNTDTTTSTPAVSGTLQVLLQTIWAKIRSVVNAIPTGVNQSVALGTTTGTANSITGTALPVSGTLPIANVANVSLTATTNTDTTTSTGAVSAASISTILQTIWAKIRSVVNAIPTGVNQSVALGTTTGTANSITGTSLPVSGILPIANVANVSLTATTNTDTTTSTGEVSAASISTILQTIWAKIRSVVNAIPTGVNQSVALGTTTGTANSITGTSLPVSGTLPIANVANVSLTATTNTDTTTSTGAVSAASISTMLQTIWAKIRNVVNASKKNPFCMIFNGIGHFIICFDKTYY

SEQ ID NO: 37823 - DNA, 1041 bp, Unknown
  Obtained from environmental sample
  misc_feature (1)..(1041): n is a, c, g, or t
atgatctgggataagaaatacgagacgatgcctcgcagcgagttggcggatttacaaggacagcgcctccgcgccatagccgaaaaggtctacgaccgcgtcccgttctacaaagccaaattcgacgcgcacggcgtcaaaccctccgacatccgctccatagcggatatcgccgccctccccttcaccaccaaggacgagatgcgcgacgtctacccgtacggcctcttagcctgcccgttgagcgacatcatcgagatccacacctcctccggcaccacggggaaaccggtcgtcgacgcctacacgcgcgccgacatagacctatggggcgagtcaatggcccggacgctctcgatgggcggagcgggcaaggacgacatcctccagaacgcctacggctacggcctcttcaccggcggactgggcgcccactacggcgcgcagcgcataggcgccacatgcatccccatatcgggcggcaacaccaaacgccagttagacttcctgcgcgacttcggctcaacggcgctcacctgcaccccctcatacagcctctacatagcggaagccggacgcgaagagggcatagacttcgagaaactgcccctgaagcgcggcttcttcggagcggagccgtggagcgacaatatgcgggccgaaatagaggaaaaactgaaaatcaaagcctacgacatcttcggcctgaccgaaattataggccccggcgtcgccgcggagtgcgagtgccaaaacctgctgcacgtattcgaagactactactatccggagataatcaatcccgacaccggagccgtactgcccgaaggcgaaaaaggagaattggtcttcaccacactgaccaaagagggcacccccctaatacgatacagaacaagggacataacctacataacaagagacccctgcccctgcggcagaacccacgtgaaaatgcataggctcttgggacggacagacgacatgctgataataaggggcgtaaacgtcttcccatcccaagtggaacaagtatggtaa

SEQ ID NO: 37824 - protein, 346 aa, Unknown
  Obtained from environmental sample
  DOMAIN (14)...(345): AMP-binding enzyme
  misc_feature (1)..(346): Xaa is any amino acid
MIWDKKYETMPRSELADLQGQRLRAIAEKVYDRVPFYKAKFDAHGVKPSDIRSIADIAALPFTTKDEMRDVYPYGLLACPLSDIIEIHTSSGTTGKPVVDAYTRADIDLWGESMARTLSMGGAGKDDILQNAYGYGLFTGGLGAHYGAQRIGATCIPISGGNTKRQLDFLRDFGSTALTCTPSYSLYIAEAGREEGIDFEKLPLKRGFFGAEPWSDNMRAEIEEKLKIKAYDIFGLTEIIGPGVAAECECQNLLHVFEDYYYPEIINPDTGAVLPEGEKGELVFTTLTKEGTPLIRYRTRDITYITRDPCPCGRTHVKMHRLLGRTDDMLIIRGVNVFPSQVEQVW

SEQ ID NO: 37825 - DNA, 636 bp, Unknown
  Obtained from environmental sample
  misc_feature (1)..(636): n is a, c, g, or t
atggggcgagtcaatggcccggacgctctcgatgggcggagcgggcaaggacgacatcctccagaacgcctacggctacggcctcttcaccggcggactgggcgcccactacggcgcgcagcgcataggcgccacatgcatccccatatcgggcggcaacaccaaacgccagttagacttcctgcgcgacttcggctcaacggcgctcacctgcaccccctcatacagcctctacatagcggaagccggacgcgaagagggcatagacttcgagaaactgcccctgaagcgcggcttcttcggagcggagccgtggagcgacaatatgcgggccgaaatagaggaaaaactgaaaatcaaagcctacgacatcttcggcctgaccgaaattataggccccggcgtcgccgcggagtgcgagtgccaaaacctgctgcacgtattcgaagactactactatccggagataatcaatcccgacaccggagccgtactgcccgaaggcgaaaaaggagaattggtcttcaccacactgaccaaagagggcacccccctaatacgatacagaacaagggacataacctacataacaagagacccctgcccctgcggcagaacccacgtgaaaatgcatag

SEQ ID NO: 37826 - protein, 211 aa, Unknown
  Obtained from environmental sample
  misc_feature (1)..(211): Xaa is any amino acid
MGRVNGPDALDGRSGQGRHPPERLRLRPLHRRTGRPLRRAAHRRHMHPHIGRQHQTPVRLPARLRLNGAHLHPLIQPLHSGSRTRRGHRLRETAPEARLLRSGAVERQYAGRNRGKTENQSLRHLRPDRNYRPRRRRGVRVPKPAARIRRLLLSGDNQSRHRSRTARRRKRRIGLHHTDQRGHPPNTIQNKGHNLHNKRPLPLRQNPRENA

SEQ ID NO: 37827 - DNA, 576 bp, Unknown
  Obtained from environmental sample
  misc_feature (1)..(576): n is a, c, g, or t
atgccttgtgatgaaagcgaaacaaaaaaactgcgacctatgacaatggagggttgcatcgtgcgggtttccgatgttattgcatatataggcagagatatagaagatgccattgccgtgaatttgataaaaagagaagatattccagcaagcatcaccgaaattcttggaaacaccaataaactcatagtcaattcccttgttttggacatactaaataacagctatggcaaaagttccatatctttttcaaaagaagttttcaacgccttgaacaatttgaaaaaatggaattacgaaaatatttacgataatcaaagaaaaatgtctgaggattccaaaatacaagccatgttcaattttgtgctggaatctcttttagaaaaaaaattgcaaggcaacatcaaatcacaatactacaaatgggaacaaagccaaagcgacgaatattttgaagcaaacggtcacgcacgcatcgccgcagactatttgtcaggaatgacagacgattttttaatgagttcatataaagaactagttgtgccaaaatcgtttggatttagttttaaggattaa

SEQ ID NO: 37828 - protein, 191 aa, Unknown
  Obtained from environmental sample
  misc_feature (1)..(191): Xaa is any amino acid
MPCDESETKKLRPMTMEGCIVRVSDVIAYIGRDIEDAIAVNLIKREDIPASITEILGNTNKLIVNSLVLDILNNSYGKSSISFSKEVFNALNNLKKWNYENIYDNQRKMSEDSKIQAMFNFVLESLLEKKLQGNIKSQYYKWEQSQSDEYFEANGHARIAADYLSGMTDDFLMSSYKELVVPKSFGFSFKD

SEQ ID NO: 37829 - DNA, 756 bp, Unknown
  Obtained from environmental sample
  misc_feature (1)..(756): n is a, c, g, or t
ttgaaaaaaataatttttgagaaagttaaaaaagttttcggagaagtaaccgctatcgacggcttaaatctaagcatttcggagggagaagtctatgcgtttctcggccataacggtgccgggaaaacaacaacgctcaggctgcttcttgggcttttagaaccgaacaaggggaatattacggtatttggaaacaatcccataaaggacggcaatgctgtacggagcatatgtggggtgttatcggaagacgtgggcttgtacgagcctttaactgtatatgacaatttattgtactatgcggacatttacggcatgagccgcgttgattcaaacaaacgtatagacgagctgttaagcagatttgagctgtttgacaaaaaaaggttggtcataaaaggcttctccacaggcatgaaaaagaaagtcgctttaatccgcgcgatgcttcacaggccgcaaatacttttattggacgagccgagtaatgggcttgaccctgtcagcacaacggatttgagaaatatgctttcggaactcgcgaaagaacacggaacaacaataataatgacaacgcacaaccttgaagaagtacaaaagatgtgcgataaaatcagcattttccgccatggccggaatatatttaccgattcgatttccgccctcaaagactctaaccattacgcggaaagcgggcaattcagccttgaaaagctctatatggatatagaaaaaggggggacggggaatggttaa

SEQ ID NO: 37830 - protein, 251 aa, Unknown
  Obtained from environmental sample
  DOMAIN (29)...(211): ABC transporter
  misc_feature (1)..(251): Xaa is any amino acid
MKKIIFEKVKKVFGEVTAIDGLNLSISEGEVYAFLGHNGAGKTTTLRLLLGLLEPNKGNITVFGNNPIKDGNAVRSICGVLSEDVGLYEPLTVYDNLLYYADIYGMSRVDSNKRIDELLSRFELFDKKRLVIKGFSTGMKKKVALIRAMLHRPQILLLDEPSNGLDPVSTTDLRNMLSELAKEHGTTIIMTTHNLEEVQKMCDKISIFRHGRNIFTDSISALKDSNHYAESGQFSLEKLYMDIEKGGTGNG

SEQ ID NO: 37831 - DNA, 471 bp, Unknown
  Obtained from environmental sample
  misc_feature (1)..(471): n is a, c, g, or t
atggcggatttagtaagaacgcttggttccgcgatagagaaaacctccaggggcttccgtgttgttttgctaaacggacagcggcaggtcggcaagtcaaccttgctgaaaaacatgtcaaagggaacaaagcgcaaacatgtatcgcttgatgacatggatgccagaaaactggcgcaacaggacccggaattgtttttgcagcagaatcccccgcctgtaataattgacgagattcagtatgcgccggagttgttcccgtatattaaaatctacgcggatgaaaaccgcgcaaacaaggggggcgttttggctgaccggctcgcaaaaatacaggctaatgcagggcgtacaggaatcgctggccggccgtataggtattctggatctgatgggattttcataccgcgaaaaaataaaaaaaccgttttccggcaaaccgtttcttccatccatggacaagtccaatga

SEQ ID NO: 37832 - protein, 156 aa, Unknown
  Obtained from environmental sample
  misc_feature (1)..(156): Xaa is any amino acid
MADLVRTLGSAIEKTSRGFRVVLLNGQRQVGKSTLLKNMSKGTKRKHVSLDDMDARKLAQQDPELFLQQNPPPVIIDEIQYAPELFPYIKIYADENRANKGGVLADRLAKIQANAGRTGIAGRPYRYSGSDGIFIPRKNKKTVFRQTVSSIHGQVQ

SEQ ID NO: 37833 - DNA, 312 bp, Unknown
  Obtained from environmental sample
  misc_feature (1)..(312): n is a, c, g, or t
ttgacgagattcagtatgcgccggagttgttcccgtatattaaaatctacgcggatgaaaaccgcgcaaacaaggggggcgttttggctgaccggctcgcaaaaatacaggctaatgcagggcgtacaggaatcgctggccggccgtataggtattctggatctgatgggattttcataccgcgaaaaaataaaaaaaccgttttccggcaaaccgtttcttccatccatggacaagtccaatgacggcaaaaagctgaaaatacaggatgtgtacaggcgcgggcagtatgcccgaaccgtttgtcaataa

SEQ ID NO: 37834 - protein, 103 aa, Unknown
  Obtained from environmental sample
  misc_feature (1)..(103): Xaa is any amino acid
MTRFSMRRSCSRILKSTRMKTAQTRGAFWLTGSQKYRLMQGVQESLAGRIGILDLMGFSYREKIKKPFSGKPFLPSMDKSNDGKKLKIQDVYRRGQYARTVCQ

SEQ ID NO: 37835 - DNA, 1200 bp, Unknown
  Obtained from environmental sample
  misc_feature (1)..(1200): n is a, c, g, or t
atgatgactgatgtttttatgaaaaattttcaccggctgccggtgacatttgccaagggcgaaggcgtttggctttttgataccgaagggaataaatacctggacttaagctccggtattgcggtgaacagtctggggcacggttacgcgccattggtaaaggccatagccgaacaggcggcgaaatgcaaccatgtgtgtaactattatcagaatgacacgagtttgcgttttgcccaaaaacttgtcgcggcttgcgctcccggcggcatgaaaaatctatttcttggtaactcaggcgcggaggcaaacgaagcggcctgtaaaatcgcccgcaaatactcgctgaaaaaatacggtcccggaaggcacaccatcgtcaccctgcaaggaagtttccacggcaggacgatcaccatgttagccgcaacaggccaggacagtttccacaaggacttcggcccctttaccgagggctttgtctatattcccggcaacgatgttgaggccctggaaaaagcccttgacgcanaaaccgtggccggactgcttattgaggccgtgcagggcgaaggcggcgtcaggccccagtcgcaggaatttattgaaacggcggcgcggctctgcgccgagcgggacatactcctcatgtttgacgaaatccagtgcggcatgggccggacgggaagcttcctcgcttttgaacagtacccctgcggcggcagtcccgttcagcccgatgtggtaacgctggcaaaaagtttggcgggcggcattcccgcgggggcggtgcttgccggagaaaaggccgccggagtttttgagataggggatcacaacagcacctttggcggcaatcccgtcgccgccgccgcgggcctggtagttctggaaacggtcaacaagcctgagtttcttgcggaaattacccggaaaggggaaaagattatggcggcaatcaggggctggaatcatcccgccgtgcgggaagtccggggccggggtctgatgatcggcatcgacattgaccgcgaagcatggccggtattggaagccgccattgcccgcgccggtaaaaaagactgcggtctcttaattttatccgccggagaaaaaactttacggctgttaccgccttatataatcagcgacagcgaaattgatcaggggctggaaatagtgcgggagttgcttacataa

SEQ ID NO: 37836 - protein, 399 aa, Unknown
  Obtained from environmental sample
  DOMAIN (16)...(344): Aminotransferase class-III
  misc_feature (1)..(399): Xaa is any amino acid
MMTDVFMKNFHRLPVTFAKGEGVWLFDTEGNKYLDLSSGIAVNSLGHGYAPLVKAIAEQAAKCNHVCNYYQNDTSLRFAQKLVAACAPGGMKNLFLGNSGAEANEAACKIARKYSLKKYGPGRHTIVTLQGSFHGRTITMLAATGQDSFHKDFGPFTEGFVYIPGNDVEALEKALDAXTVAGLLIEAVQGEGGVRPQSQEFIETAARLCAERDILLMFDEIQCGMGRTGSFLAFEQYPCGGSPVQPDVVTLAKSLAGGIPAGAVLAGEKAAGVFEIGDHNSTFGGNPVAAAAGLVVLETVNKPEFLAEITRKGEKIMAAIRGWNHPAVREVRGRGLMIGIDIDREAWPVLEAAIARAGKKDCGLLILSAGEKTLRLLPPYIISDSEIDQGLEIVRELLT

SEQ ID NO: 37837 - DNA, 357 bp, Unknown
  Obtained from environmental sample
  misc_feature (1)..(357): n is a, c, g, or t
gtgatggacagtaagtctggcatggttgacaccggcgctgaaatgctggtcatcaatgaagccatccggcaggaattggggcttgagataatggaacagcgacaaataagactggcaaatgaaatggtacagaattgtcaatttaccgaaccggtagaggttcattggaaaaacaggtatacatatacccaagcggtggttttagccggagtgagcgatgttttgttgggagctattccccttgaaggcatgaatgtaatcgtagacccggcaaaacagcaactgatcggcgctaacggcgatgaaataatatataaagtttatgtaagcaactcccgcactatttccagcccctga

SEQ ID NO: 37838 - protein, 118 aa, Unknown
  Obtained from environmental sample
  misc_feature (1)..(118): Xaa is any amino acid
MMDSKSGMVDTGAEMLVINEAIRQELGLEIMEQRQIRLANEMVQNCQFTEPVEVHWKNRYTYTQAVVLAGVSDVLLGAIPLEGMNVIVDPAKQQLIGANGDEIIYKVYVSNSRTISSP

SEQ ID NO: 37839 - DNA, 726 bp, Unknown
  Obtained from environmental sample
  misc_feature (1)..(726): n is a, c, g, or t
atgaaaacgcttaatcgataccggtcggcgtcgttgttcgcggcggcggcgattgctgtttgtctctccgggtgcgtcaagaaagtcgcccattcgccggctgagtccgccgccgttgcggaagacgggtgcggggcggcggatattctgatggaatcggtcgatcaggcgggggcggtgttggcgttcaccgactccagagactgccggaggtatcgggcggtaaagataggcggcgatgtttggatggctgagaatatcaattataagacgccgagcaattcttggtgtttgggaaacaataaatcaaactgcgagagatacgggcggctgtatgattgggagacggcgaaaggcgtctgtcccgccggttggcatctctcaaccgccgaggaatgggatagtctgttgactgccgtaggcggtgaaaggagcggagatgacggagacagatggataggcggcgcgagcaagaaactgaaagcgaagagcggctgggataaggatgaagacgacgaacgaagcggcgacggtacggacgattacggttttgcggcgttgcccggcggcgagcgttacggcggcggcggattcaaggaatcgggcggtcagggccattggtggatttgcgacgagaacacggttncagcgcgcataggcgggagatattcaaaggcgatctcgtgttcnaaggcaccggttttcaggaagtcggacattctgtga

SEQ ID NO: 37840 - protein, 241 aa, Unknown
  Obtained from environmental sample
  SIGNAL (1)...(27)
  misc_feature (1)..(241): Xaa is any amino acid
MKTLNRYRSASLFAAAAIAVCLSGCVKKVAHSPAESAAVAEDGCGAADILMESVDQAGAVLAFTDSRDCRRYRAVKIGGDVWMAENINYKTPSNSWCLGNNKSNCERYGRLYDWETAKGVCPAGWHLSTAEEWDSLLTAVGGERSGDDGDRWIGGASKKLKAKSGWDKDEDDERSGDGTDDYGFAALPGGERYGGGGFKESGGQGHWWICDENTVXARIGGRYSKAISCSKAPVFRKSDIL

SEQ ID NO: 37841 - DNA, 666 bp, Unknown
  Obtained from environmental sample
  misc_feature (1)..(666): n is a, c, g, or t
atgattgaatacgtagtccctttgaatattgatgaccggacgctggcaaaagccgcgcggattctggagggcggcgggcttgtcgcattacccaccgatacaagctggagcatagtttgttccatccaatcccgggaagggataaaaaaactccgacgcctttccggagaacgggatgagcggtacttcaccctcctctgctcaaacatctcccaatttggggactggtgcagttttgataatacccggttcaggcttatcaagcgtttggcgccgggcccctatgtttttatccttaaaacgcatctgggaaccgaaaaggccctgggtctaagacgaagtgaaatcggggttaagctgccggattatcctatacccatggccttgatcaacaaccttggctgccccctctatggtatcactgccaaacgaaccatgataaaggatactctggtagaagcagaggatgagagcgaagacaaagcaaatgccttgtaccgggaagatgtgctttttgaagggggatgggaactggaagatatacccggattggatctcattctggatcccggggaagaccgggaacgggttttttctactgtactggatatgagagaaggggacgtaatactcctcagggaaggagtagggccttggcctgtctga

SEQ ID NO: 37842 - protein, 221 aa, Unknown
  Obtained from environmental sample
  DOMAIN (19)...(215): yrdC domain
  misc_feature (1)..(221): Xaa is any amino acid
MIEYVVPLNIDDRTLAKAARILEGGGLVALPTDTSWSIVCSIQSREGIKKLRRLSGERDERYFTLLCSNISQFGDWCSFDNTRFRLIKRLAPGPYVFILKTHLGTEKALGLRRSEIGVKLPDYPIPMALINNLGCPLYGITAKRTMIKDTLVEAEDESEDKANALYREDVLFEGGWELEDIPGLDLILDPGEDRERVFSTVLDMREGDVILLREGVGPWPV

SEQ ID NO: 37843 - DNA, 783 bp, Unknown
  Obtained from environmental sample
  misc_feature (1)..(783): n is a, c, g, or t
gtgttctccctcatgaacggcaaggttgaaaaggtctatttcgattacaacgatacggttaaggcgggggatgttctggcagtattgaacacagatatgcttaaggtaaagcgggaacagcagttggccgcacttaccaaggtgcggtcaaattacgaattgcagttagtttattaccagagccaggaagtccttgcccagaaaaattttatttccgaatacgagttcaaaaccagcttgaacgcattggaaaacctggaggccgatttaagggttgccgaagggaatctaaaggcaatcgaaaccgagattaatcagtatgcctatattatttccccgattgacggcattgtgcttgaccgcaacgtcaatgtcggtgatacggtagtggaatcttcaagcagcaattcggccagtgtttttacccttgcggagaacctcagagagatgcaaattgaagctgtggtaggccagcttgacgttgtttctttatataagggccaggcagtacgatttacacttgaaagtttgcccggacgcagttttaccggaagggtggaaaacatacggatggttccggttgtatcgaataacgttgtttcctacactgtgataatcagtgttgaaaactcaggacggtgtcctcatgccgggaatgacctgcacggtaaattttatcgtggaaacacgcgaagatgttctgttgggtttccaacgccgccctgcgctatcagccgacaagtctcagcgcagaaaaaatcgccgaaatggtctttaatgtga

SEQ ID NO: 37844 - protein, 260 aa, Unknown
  Obtained from environmental sample
  misc_feature (1)..(260): Xaa is any amino acid
MFSLMNGKVEKVYFDYNDTVKAGDVLAVLNTDMLKVKREQQLAALTKVRSNYELQLVYYQSQEVLAQKNFISEYEFKTSLNALENLEADLRVAEGNLKAIETEINQYAYIISPIDGIVLDRNVNVGDTVVESSSSNSASVFTLAENLREMQIEAVVGQLDVVSLYKGQAVRFTLESLPGRSFTGRVENIRMVPVVSNNVVSYTVIISVENSGRCPHAGNDLHGKFYRGNTRRCSVGFPTPPCAISRQVSAQKKSPKWSLM

SEQ ID NO: 37845 - DNA, 1110 bp, Unknown
  Obtained from environmental sample
  misc_feature (1)..(1110): n is a, c, g, or t
gtgccggcgctgggcgccgacagcggcatcataatcaccgccagccacaacccgctgccatacaacgggtacaagatggttcacagcggcgggcgcctcttcaagggggaggagtgcgaggaggtctactcggcgttcagaaacggcgattatcccgaaagcgacgagtttgcaaagcactgcggcaagcggccggagagcgccgacgcctcgtctatccacatcgacaaaatactctcatgcgtagacgcgcccctaatccggtcgaagaacatccgtatagccgtggactcgataaacggcgccgccggcgcggtgtttcccaaactgctcgacgctctgtccgtgcgctgggagggcgtgaacaacaaactggacggcgacttcgtccacaaccctgagccgcgccccgaacacctgggcgatctgcgccgcctgctctccggcggcggattctggggcggcttcgtcttcgaccccgacgccgaccgcctggcgacaatgggcgagacgggccaagaggtctccgaggagatgaccctggcgctggccctgcaaaacatcctggccaaaaagcccggcggcgtggcgacgaacctatctacgtcaatggtgatagacgacgtagccgccaaatacggggcgggggtgattaggacgaagataggcgaggcgcacgtggttgagggactgaggtccagcaggtgcatagccggcggcgagggcaacggcggcgtgatataccccgccgtctgtatgtccagagacgggctaacgggtctggccgttattttggaggagatggccaagacgggaaaaaaactatatgagttggcaatggattggccggtttattatattgttaaggagaagattccttgcgttgatacagacccgtcgatattgataaataggttgagcgaggtgttcgcgaatgaaaagagcgacatgacggacgggttgaagatcatcagagattacggttgggtgcatttgcgggcatcaaataccgagccgataatacggtgttacgcggaggctaggagtaatgagcaagcaaaggaattggcggatatgatgatggttgctgccacaaggtctttttactag

SEQ ID NO: 37846 - protein, 369 aa, Unknown
  Obtained from environmental sample
  DOMAIN (176)...(285): Phosphoglucomutase/phosphomannomutase, alpha/beta/alpha domain III
  misc_feature (1)..(369): Xaa is any amino acid
MPALGADSGIIITASHNPLPYNGYKMVHSGGRLFKGEECEEVYSAFRNGDYPESDEFAKHCGKRPESADASSIHIDKILSCVDAPLIRSKNIRIAVDSINGAAGAVFPKLLDALSVRWEGVNNKLDGDFVHNPEPRPEHLGDLRRLLSGGGFWGGFVFDPDADRLATMGETGQEVSEEMTLALALQNILAKKPGGVATNLSTSMVIDDVAAKYGAGVIRTKIGEAHVVEGLRSSRCIAGGEGNGGVIYPAVCMSRDGLTGLAVILEEMAKTGKKLYELAMDWPVYYIVKEKIPCVDTDPSILINRLSEVFANEKSDMTDGLKIIRDYGWVHLRASNTEPIIRCYAEARSNEQAKELADMMMVAATRSFY

SEQ ID NO: 37847 - DNA, 1236 bp, Unknown
  Obtained from environmental sample
  misc_feature (1)..(1236): n is a, c, g, or t
ttgattcttgataatgttgacaaagaaacaatactggaacgcattacggattacgccccggaccggcataagctgcacattttggtaacgtcccggcaagggtttgttgccggtaaaagtattaaagaatttcatactccgccgttagggcagtttttttcgatggatttattgcttaaactgtttcaagctaaagatgaagatgagttaaaggcggcgaactcaattacgcgcaggcttggcgggcacccgttggcgattacgatgaccggcacctttcttgccaataagggggatgtgacgtatgccgagcagttgcgatggctggaagacgaaggaatcggttcattggacgaaattagcaaggagattcgccttgatgattatgcccgtccggttccgacaaaagtttttgaacaggtgttttcactgctggaacctgaaggaaaagcgactgccgagatgcgggtactggaatatgccgcgctgctgccgccggattccgttccgttcccgtggatttttaaactggttaaggaagagttccctgaaattgcgccaaccccaaaaaggcctattgatccgtggaaaaaagttttacaacaattggaacggttccaattgctgcttccttctgttgaggaaccgaaaatcggcactatgcaccgcctgattcaagacgcaattcaacaaaggcatgatcgtaaccggcaatactgcgaacgtttgatcgagcacatatattccagggctgtttttctggaagagaatttagaacaagggaatatcccgcctgaatgtctttggaaagtaaaactacagcctcttggcggaatgctagagtgggtagactttactcaatgggcgctaaagatcgctgttttcgagatggctttaggcgatatgttgatcatgatcggttctctgacagaagcggtaaatcacaacgaggaatcgcttaagattatgaggcaactgattgtaaaaaattcaaacaacgctcagtggcaatatgacttggcaaggaatttactcaaggctggcaaattactggaaaccagcggcgatttgactggcgcattgaactacgacacagaatcactggagatcatgcggcgattagcggcgaaagagccgaataatgatgaatggcaacgcaatctgatcaagagctttatccaggttggttatgtcttaactaacaacggcgatctgcccggcgcactaaacatctga

SEQ ID NO: 37848 - protein, 411 aa, Unknown
  Obtained from environmental sample
  misc_feature (1)..(411): Xaa is any amino acid
MILDNVDKETILERITDYAPDRHKLHILVTSRQGFVAGKSIKEFHTPPLGQFFSMDLLLKLFQAKDEDELKAANSITRRLGGHPLAITMTGTFLANKGDVTYAEQLRWLEDEGIGSLDEISKEIRLDDYARPVPTKVFEQVFSLLEPEGKATAEMRVLEYAALLPPDSVPFPWIFKLVKEEFPEIAPTPKRPIDPWKKVLQQLERFQLLLPSVEEPKIGTMHRLIQDAIQQRHDRNRQYCERLIEHIYSRAVFLEENLEQGNIPPECLWKVKLQPLGGMLEWVDFTQWALKIAVFEMALGDMLIMIGSLTEAVNHNEESLKIMRQLIVKNSNNAQWQYDLARNLLKAGKLLETSGDLTGALNYDTESLEIMRRLAAKEPNNDEWQRNLIKSFIQVGYVLTNNGDLPGALNI

SEQ ID NO: 37849 - DNA, 1248 bp, Unknown
  Obtained from environmental sample
  misc_feature (1)..(1248): n is a, c, g, or t
atgcacaacgactttacattgtatttcaggaaggtgccttcggggaaaagggtgttttattactacgcctacgacgaagagggcgggcggctggggccgtggacaacgggggagacgacaaaaacggcggccaggaatttctgcatccgcctaatcaaattgggcagactgttgcccgggccaaaggaaatgccgacttttgcggaatacgctgccgacttttgggattgggaaagcagcccgtacctgaaagaccggaagaagcgccggaagctgacacaggcctatgcggacaaaaacaagaaggtagcggagcatacgctaatcccctattttggcaaaatgaagctggacaagattaccggggaagaaatcgacaagtggctggactgcatgatcaaagagaagtaccgcaacacgactacaaacggctatttcgggactttgcagaccatgatgaaatgggcggccaaaaaaaggattatcgggcgcgacccgttcctcgacgttgaaaagctcctgaaagaccagaaagaaaaagaaattattacgcccgacgagtttaaggcgctgtttgtcgaggattggaaaaaggcctgggacaaggacctgctgcggtgcaccgccaacaaaatagctgcgctgaccggaatgaggtgctgcgaggtgctggggctgcggggcgaatacgtgtacgacgaccatattttcctttgcgggcaatacgacgagtacggctacagggaaaccaaaaccaagataaagcaccatatccccctggccgccgaactggtagccgacttgagaaagctgatggagcttaacggaaacggctatatattttcgctcgacggcggggcaacgccggtaacaaggcggcacatatacaacggcttaaccaaggcgcttaacaaaatcgggatagccgacggggagataaaagagcgcggccttaacgtccatgcgtggcggcatttttgcaatacggaactgcaaaaggcagggctgaccgtccaaaaagttcaggcggttaccgggcacaaatccgaaaggatgacggagcattacacgcactttgacccgcttgatttcggggaagtcccaaaaatacaggaggcgcttttgaagaagaaacccagaaagcaggaagcccgtaccggcgacccggcgcagaatgagcgcccggcccttgcaatcgtaaaaatgccggaaggcggcaatgccgcccggaggaaacaagcatcatag

SEQ ID NO: 37850 - protein, 415 aa, Unknown
  Obtained from environmental sample
  DOMAIN (193)...(366): Phage integrase family
  misc_feature (1)..(415): Xaa is any amino acid
MHNDFTLYFRKVPSGKRVFYYYAYDEEGGRLGPWTTGETTKTAARNFCIRLIKLGRLLPGPKEMPTFAEYAADFWDWESSPYLKDRKKRRKLTQAYADKNKKVAEHTLIPYFGKMKLDKITGEEIDKWLDCMIKEKYRNTTTNGYFGTLQTMMKWAAKKRIIGRDPFLDVEKLLKDQKEKEIITPDEFKALFVEDWKKAWDKDLLRCTANKIAALTGMRCCEVLGLRGEYVYDDHIFLCGQYDEYGYRETKTKIKHHIPLAAELVADLRKLMELNGNGYIFSLDGGATPVTRRHIYNGLTKALNKIGIADGEIKERGLNVHAWRHFCNTELQKAGLTVQKVQAVTGHKSERMTEHYTHFDPLDFGEVPKIQEALLKKKPRKQEARTGDPAQNERPALAIVKMPEGGNAARRKQAS

SEQ ID NO: 37851 - DNA, 1170 bp, Unknown
  Obtained from environmental sample
  misc_feature (1)..(1170): n is a, c, g, or t
atgaacgataccgaccttatcgaatcgctggggactatagcccgttccggcacccggtccttcctggaaaaactcgccgaagacgcgaaaagggattccaacctcatcggccagttcggggtaggcttttactcggcctttatggtcgccgataaaatcgaggtaatcagcaggaaagcagccgaggataaaacatggaaatggtcaagcgacggcaaggacagtttcgagattgaaagctccggcgcaaaggacagccagggcacgacggttattttacacctgaccgaagagggccttgaatacgccaaccgctggtccatcgaagacataatcaaacgctactccaaccatgtggctttcccgatatacctgacctacgacgaaaaagaatgggatgacaaaggcaaggaaaagggcagcaagatcaagaccgaccggataaattcaggaaccgccctctggcgcagggcaaaaaccgaacttaaagaagaagattacaacgaattctacaaacagattggccatgacagcgagccgcccctgcactacgtccacacaaaggccgaaggctcccttgagtattcaaccttgttttacattcctaagaaagccccctttgacctgtacaatgtcgactacaaactcggggtaaaactatacgtcaagcgggtgttcatcaccgacgacgaccaggagcttatgcccgtgtggctgcgctttgtacgcggcgttatcgattccgaagatctgccccttaacgtaagccgcgagatactccagcagaacaaggtgctgatcaatataaaaaacgcctcggtaaaaaaactcatcgccgaattcaagcagatggcggataacgccgtatccggcggggacgaagccaaaacaaaatgggaaacttttgtaagcgagtttaaccgcccgctncaggaagggctgtaccaggattttgccaaccgcgaggcgctcatggagcttgtccgctttcaaagcaccgcggtggcaggacaagacggcaaacccggatgggacagttttgcccgatacgtctcacgcatgaagagcggaccagaagcccctctattacctaaacaggcgggcgaccaaaaaaaccctgggcctcctccccggttcctggaaagccctaccccccccaaaaaaaattaa

SEQ ID NO: 37852 - protein, 389 aa, Unknown
  Obtained from environmental sample
  DOMAIN (101)...(387): Hsp90 protein
  misc_feature (1)..(389): Xaa is any amino acid
MNDTDLIESLGTIARSGTRSFLEKLAEDAKRDSNLIGQFGVGFYSAFMVADKIEVISRKAAEDKTWKWSSDGKDSFEIESSGAKDSQGTTVILHLTEEGLEYANRWSIEDIIKRYSNHVAFPIYLTYDEKEWDDKGKEKGSKIKTDRINSGTALWRRAKTELKEEDYNEFYKQIGHDSEPPLHYVHTKAEGSLEYSTLFYIPKKAPFDLYNVDYKLGVKLYVKRVFITDDDQELMPVWLRFVRGVIDSEDLPLNVSREILQQNKVLINIKNASVKKLIAEFKQMADNAVSGGDEAKTKWETFVSEFNRPLQEGLYQDFANREALMELVRFQSTAVAGQDGKPGWDSFARYVSRMKSGPEAPLLPKQAGDQKNPGPPPRFLESPTPPKKN

SEQ ID NO: 37853 - DNA, 1338 bp, Unknown
  Obtained from environmental sample
  misc_feature (1)..(1338): n is a, c, g, or t
atgatggcgatgccaaataatgacgcaaatggtttgtcagaacgacgcgccgccatcattgacgctttgaataaatctattgaaattttttcatctcacagcgaggaatcgtttgacgatgtaatgtcaaatggcataaagccgattgccgatgcggtaggcctggatcgcgttgttttttattcattggtgggtaaggaggaggaaaagcgtttcgggcaaatttaccgctgggataaatcaaaaggcggcttgatgtctattgccgacaagttgcaggttttacacgataacccggttatagtacgcattacctcgattataatgaaaggcgattttgtaaaattccgtgagagttgctttagcgaagacgagaaagccttatttggcgaatacggcgttaagtcagtactgtatatgcctattttcacgcttggcaaattatggggcgccgttgcctttcaggatcataccaataaccattattttgatgaagactgccaggatttgctgcattcggcggcgcgtatattctcaaatggcattatcagggaagaattcaggcttaacgccgaaaaggccattggatcgctaaaacgccgcgaagaaatgatggctgcgctgaacagggctgccgtcatttttctctcgaaaagcgaagaatcttttgaagctaccatgactgcgggtgtacgggaaatcgctgatgttttcaacctggacaggttttccctgttgcgaaacttaaccatagttgacggtttacgatacggagggcaaatttaccgctgggacagaaaatccggcgggactacagcgccggtaaaaggcctggaatctttctctcctgacaagtatgtaccgagctggggtgaaatcttgccttcaggcgggacaattagcggcccggtacggcttatgcccgaagcggctgtgctgcaatcgtttggcctggtgtcgatatgcgttacgcctgtttttatcaacaacattttttggggcattgctttatttgaggatctccattccgagcgttgttttgaaaatgacagtgtcgagttgatgcgctcggcggcgtttttgtgcgcgaataccttcgtacacgccgaaatggaacgcaatctggatagcgcccacgaattcacccgcgccgcgcttgacgcttcgccgatnagctttaccgtttttgacgagaatatgcgcgttattgactgtaacgacgctaccttgaaatgctgggtactactaaggaatattaccttgagcatttccatagtttttttcccgatccaagatcgacgggataaaatccggcgagaagatagacgagttttgtaa

SEQ ID NO: 37854 - protein, 445 aa, Unknown
  Obtained from environmental sample
  DOMAIN (222)...(366): GAF domain
  misc_feature (1)..(445): Xaa is any amino acid
MMAMPNNDANGLSERRAAIIDALNKSIEIFSSHSEESFDDVMSNGIKPIADAVGLDRVVFYSLVGKEEEKRFGQIYRWDKSKGGLMSIADKLQVLHDNPVIVRITSIIMKGDFVKFRESCFSEDEKALFGEYGVKSVLYMPIFTLGKLWGAVAFQDHTNNHYFDEDCQDLLHSAARIFSNGIIREEFRLNAEKAIGSLKRREEMMAALNRAAVIFLSKSEESFEATMTAGVREIADVFNLDRFSLLRNLTIVDGLRYGGQIYRWDRKSGGTTAPVKGLESFSPDKYVPSWGEILPSGGTISGPVRLMPEAAVLQSFGLVSICVTPVFINNIFWGIALFEDLHSERCFENDSVELMRSAAFLCANTFVHAEMERNLDSAHEFTRAALDASPXSFTVFDENMRVIDCNDATLKCWVLLRNITLSISIVFFPIQDRRDKIRREDRRVL

SEQ ID NO: 37855 - DNA, 621 bp, Unknown
  Obtained from environmental sample
  misc_feature (1)..(621): n is a, c, g, or t
atggaaaaatcaaaaccccacgaaaaaaaagctccagggggaactaggacggccagcggcatcgccgcctataaaaaggccatgggggaaggcttacttaaaaccggacaagtcgttcctaatgaaaaaccgggcataatcccttcaaaatacaccagagcggcccaatttatggtacttattgggagcgatgaggcgtcaaggatattatcaaagctggatcctgaacaggtggaggccatttcaaaggaaattgttaccttaaagaccataactgccaaagaagccgaagatgttcttgaagaattccgctcccttttgtcatcttcctatggctactccggcacttcttccgggggaatagaacaggcccgccgcctgctttacgcagcttttggccccgaaaaaggcgaggccatgcttgtaaaagccgttcccgacgcggcggaaaacccctttgactttctttcggaattctcaggcgaacagctctccctgctttttagggacgaaagccccgccgtctgcgcgatggtgttttcccgcctgccgtcaaactgtccgcggaggttctggcaaatgccaccccgcagcggaaactggaaatcgtcaagcgcatag

SEQ ID NO: 37856 - protein, 206 aa, Unknown
  Obtained from environmental sample
  misc_feature (1)..(206): Xaa is any amino acid
MEKSKPHEKKAPGGTRTASGIAAYKKAMGEGLLKTGQVVPNEKPGIIPSKYTRAAQFMVLIGSDEASRILSKLDPEQVEAISKEIVTLKTITAKEAEDVLEEFRSLLSSSYGYSGTSSGGIEQARRLLYAAFGPEKGEAMLVKAVPDAAENPFDFLSEFSGEQLSLLFRDESPAVCAMVFSRLPSNCPRRFWQMPPRSGNWKSSSA

SEQ ID NO: 37857 - DNA, 405 bp, Unknown
  Obtained from environmental sample
  misc_feature (1)..(405): n is a, c, g, or t
gtgcttgcggccatactaaaacactccgacatcgcctttagcgggcagcttttagatggcttggaaaaaagcgacccttccctcagcaaagaaatgaaagatcgcctttatacccttgaggatgtcgcgaatgcgaatgatcggcccttacaggaaaaactaagaagcatggacgacagggaaatcgccctgctcctaaaagggcgctcggaagctttcacccaaaagataatgtggaatgtctctttggcaagagccgacaggatcagggaggaatcggaaataatgggggccgtgcccaaaatcgaggctgaagccgcggcaagggaatttctctcctggttccgcgaaagccttgacgaaggccggatattgatgctttcagacaaggacatactggtatga

SEQ ID NO: 37858 - protein, 134 aa, Unknown
  Obtained from environmental sample
  DOMAIN (18)...(127): FliG C-terminal domain
  misc_feature (1)..(134): Xaa is any amino acid
MLAAILKHSDIAFSGQLLDGLEKSDPSLSKEMKDRLYTLEDVANANDRPLQEKLRSMDDREIALLLKGRSEAFTQKIMWNVSLARADRIREESEIMGAVPKIEAEAAAREFLSWFRESLDEGRILMLSDKDILV

SEQ ID NO: 37859 - DNA, 897 bp, Unknown
  Obtained from environmental sample
  misc_feature (1)..(897): n is a, c, g, or t
atgccgcgctttaacgacggtctgccggagatacttccgccgatatacgacattgtattcaaattggttttcgcgaagcgtccagatttgctaaagccgcttctgaaatccgtaatcagtctgcctgacgacgagtacggggagattgagatagtagacccgaacatctacccggagcatgttgacgaaaaactgggtgttttggacatcaaggttgttttgaagtcgaagacggtgatagacgttgagatgcagaaggaaaaagttgcctgtctgcgtgagcgcgtattattttactgttcggggatgctcagggagcaggtggtatcgggcgacgactacggcaacatccagcgggtcataggcgtaactataacgaaccatgtaatgatacctgaggacggcgcgtatcatcaccgttatactttgtacgaccctgagacgcgctcggagtttacggacttgttggaggtgcatatccttgagttgccgaagttgtcgcgtatagacgacggcagcgagttgtggtggtggatgagatttttaaccgtgagaacgaaggaggagttagccatgatagccgagaagagtccggtattggagaaggccgccgcccgtctgaccgaggtgtcggaggacatgcacacgcgtcatcgtctggagagctaccgtctctacgagatggatcagcgggtcaaggcgagggtggcgaagagggaggcagaggaggagatgaggaaggtgagggaggaggctaggaaggcggaggagaaagccatggcgaagggcatggagaagggcatggagaagactatggaactcattgaacaagggtacacgttcgatgaaatcaaaaagatactgcgggacggcagcggtcaagggcaggaagtgtaa

SEQ ID NO: 37860 - protein, 298 aa, Unknown
  Obtained from environmental sample
  misc_feature (1)..(298): Xaa is any amino acid
MPRFNDGLPEILPPIYDIVFKLVFAKRPDLLKPLLKSVISLPDDEYGEIEIVDPNIYPEHVDEKLGVLDIKVVLKSKTVIDVEMQKEKVACLRERVLFYCSGMLREQVVSGDDYGNIQRVIGVTITNHVMIPEDGAYHHRYTLYDPETRSEFTDLLEVHILELPKLSRIDDGSELWWWMRFLTVRTKEELAMIAEKSPVLEKAAARLTEVSEDMHTRHRLESYRLYEMDQRVKARVAKREAEEEMRKVREEARKAEEKAMAKGMEKGMEKTMELIEQGYTFDEIKKILRDGSGQGQEV

SEQ ID NO: 37861 - DNA, 531 bp, Unknown
  Obtained from environmental sample
  misc_feature (1)..(531): n is a, c, g, or t
atgaaaaaagatattaaaatcgccgtctcggggatgagcggatgcgggaacacgacggtcagcaaaataatcgcggaccgccttgggctgaaattcattaattttacatttcgctccctggcggtggagaaaggcattgaatttaaaaaagtgctggaacttgccgcaaaggacgattcatgggacagggaagtggacagccgccaggtgcagcttgcccgtgaaagcggaggctgcgtaatcggttcgcgtctcgcgatctggatgctggaggaggccgacctgaaagtgtacctccgggcgaagcctgaaaccagggccgccaggatcgttaaacgcgagggggggaagcttgaggagattgccgcctttaccgccgaacgggacaagcatgataaccagcgctatatccgcatatacaatattgataattttaattatgaatttgccggccttgtcattgatacggataatattagccccgatgagatagccgatatgattattgaagccgcgggaaaaattgtttaa

SEQ ID NO: 37862 - protein, 176 aa, Unknown
  Obtained from environmental sample
  DOMAIN (13)...(173): Shikimate kinase
  misc_feature (1)..(176): Xaa is any amino acid
MKKDIKIAVSGMSGCGNTTVSKIIADRLGLKFINFTFRSLAVEKGIEFKKVLELAAKDDSWDREVDSRQVQLARESGGCVIGSRLAIWMLEEADLKVYLRAKPETRAARIVKREGGKLEEIAAFTAERDKHDNQRYIRIYNIDNFNYEFAGLVIDTDNISPDEIADMIIEAAGKIV

SEQ ID NO: 37863 - DNA, 318 bp, Unknown
  Obtained from environmental sample
  misc_feature (1)..(318): n is a, c, g, or t
gtgaaaattaaaatttgcgggcttttccgcgagcaggacattgattttgtcaacgaagccgaacccgattatgtcggagttcgtgatttgcgagaaagtaaaaggcaggtttctccggctttcgcggcccaattacgccgccgcctgtcagacagattgcttcccgtcggcgtttttgtgaacgcccctgtcgctgatattgtctccttgtataatgaaaatgtcattgctatcgcgcaacttctcggcacggaagacgacgaatatattacactactcaaagaggcaagcgccgcgggcgggaaaaagccacattga

SEQ ID NO: 37864 - protein, 105 aa, Unknown
  Obtained from environmental sample
  misc_feature (1)..(105): Xaa is any amino acid
MKIKICGLFREQDIDFVNEAEPDYVGVRDLRESKRQVSPAFAAQLRRRLSDRLLPVGVFVNAPVADIVSLYNENVIAIAQLLGTEDDEYITLLKEASAAGGKKPH

SEQ ID NO: 37865 - DNA, 882 bp, Unknown
  Obtained from environmental sample
  misc_feature (1)..(882): n is a, c, g, or t
atggttgggaccaccaacaagggcaaccctcttcatttcccacttcaaatgccagacggaacgacaaaagaaattgatcgcacagatgagattatcgaattttttgccaaaaaagagattgacgcgctcgtatccatcggcggcgacggcagcctgaccatagcggacgcgctgtgcaaaaaaggcctgcgcgttgtgggagttccaaagacgattgacaacgatttggataaaacagagaccaccttcggattcgacactgctgtgtcattcgcgacagagagcctagacaggcttcatagcacagcggaaagccaccagcgggtcattgtggtagaggtcatgggccgctatgccggctggatagccctgcactgtggcatcagcggcggggctcacgccatattgattcccgaaattccctttgacctgaaaaaagtggccgaaagggtagtccagcgcgaaaacgatgggcgccactattcccttgttgtagttgcagaaggtgcaaagccaaagggcggggatctggccgttgttgcatcggcagaaattggccacctagagcgtcttggaggcatcggagaccgagtggcgcatgaactgcaagcacttactggcaaagaatgcaggacggttgtgctgggccatcttttgcgcggcggaagcccgacttctttcgaccgcttggcggcactaaggttcggcgctgccgcagtccgtgcgttggacgagggctattccggtgtcatggtcgcgctggaacacccaacagtccaatacgtcccgcttctagaggtcgcgggacgaatgagggcggtgccgctcgactgcgagattgtgcagacggggcgcgatgttggggtttgctttggggactag

SEQ ID NO: 37866 - protein, 293 aa, Unknown
  Obtained from environmental sample
  DOMAIN (17)...(245): Phosphofructokinase
  misc_feature (1)..(293): Xaa is any amino acid
MVGTTNKGNPLHFPLQMPDGTTKEIDRTDEIIEFFAKKEIDALVSIGGDGSLTIADALCKKGLRVVGVPKTIDNDLDKTETTFGFDTAVSFATESLDRLHSTAESHQRVIVVEVMGRYAGWIALHCGISGGAHAILIPEIPFDLKKVAERVVQRENDGRHYSLVVVAEGAKPKGGDLAVVASAEIGHLERLGGIGDRVAHELQALTGKECRTVVLGHLLRGGSPTSFDRLAALRFGAAAVRALDEGYSGVMVALEHPTVQYVPLLEVAGRMRAVPLDCEIVQTGRDVGVCFGD

SEQ ID NO: 37867 - DNA, 615 bp, Unknown
  Obtained from environmental sample
  misc_feature (1)..(615): n is a, c, g, or t
gtgctggactgcggggcaaacgtgcgcggctatggctccgacatcacccgcacattcgtgagtcaggcttgcgactataggttcaagttcctccttgcagggatggaaaagctggaacgcgagctggctgacgccgccagccctggcctctcttttggcaagctgcaccattcggcccaccaaaaaatcgcctcgctcctatgccaggctggcatactcaagaccgacccagaggaggcggtcaaaaatggatggacgaggccatttttcccgcacggccttggccaccacttgggcatccagatacacgatgttggcggcaagctcgcctctccagatggcaaactgcagtccccgccatcagagtatccggcactacgcaacactagaactctggaaaagggccatctagttaccattgagccaggactgtacttcataccaatgctcctcaagccgcaccgcgagggcaaggattccaaggcatttgactggaagctgatagacgagctaacgccgttggggggcatcagggtcgaagacaacgtgctgataaccgatggaagcccaaggaacattacgagggtgatggaagccgaactgggaatcgggtag

SEQ ID NO: 37868 - protein, 204 aa, Unknown
  Obtained from environmental sample
  DOMAIN (2)...(195): metallopeptidase family M24
  misc_feature (1)..(204): Xaa is any amino acid
MLDCGANVRGYGSDITRTFVSQACDYRFKFLLAGMEKLERELADAASPGLSFGKLHHSAHQKIASLLCQAGILKTDPEEAVKNGWTRPFFPHGLGHHLGIQIHDVGGKLASPDGKLQSPPSEYPALRNTRTLEKGHLVTIEPGLYFIPMLLKPHREGKDSKAFDWKLIDELTPLGGIRVEDNVLITDGSPRNITRVMEAELGIG

SEQ ID NO: 37869 - DNA, 717 bp, Unknown
  Obtained from environmental sample
  misc_feature (1)..(717): n is a, c, g, or t
atgtctttgggcgtcggcttgttaagccgttatcctataagcgaggcaaagtcgcattcggctaatattgacggcgacattgcgccccggcccatgttagaggtacggatcaatactgccgccgccgcttcaggagacgaaagcggcgcaggtaattcatcgctggcgttgtttgtctgtcactggaagtcaaaactcggtaacgaagacgctaccgaaagaacccgcagggcttcggcgcggattattcttcgccggttaagggaattaaaggaaaccgatcccgatcttccggtgataatcatgggcgacctgaacgaaaattacgatgaattttaccgccgcaacggaacaaccatcagcgccctgctccccgatgatccccgcgcggcggaatttgccaacttgtacggacttgacggggataacccagacactgccgcgctcatcggcgagctgcaaaaagattttatcattttaagcaaaagcaaaccgcctgagacacggtactttcccgccggagttttgacgctgtactcaccctggactgtagaactgcaagatggttcctattactacaaaaatgactgggagacgatagactatttcttgctttcgccgcagttgtttgacggaaccggctgggaatttgaaaactgcgcgtatactgaactttccgccatttaccaacgcaaaaggatcgccggctgcctataa

SEQ ID NO: 37870 - protein, 238 aa, Unknown
  Obtained from environmental sample
  misc_feature (1)..(238): Xaa is any amino acid
MSLGVGLLSRYPISEAKSHSANIDGDIAPRPMLEVRINTAAAASGDESGAGNSSLALFVCHWKSKLGNEDATERTRRASARIILRRLRELKETDPDLPVIIMGDLNENYDEFYRRNGTTISALLPDDPRAAEFANLYGLDGDNPDTAALIGELQKDFIILSKSKPPETRYFPAGVLTLYSPWTVELQDGSYYYKNDWETIDYFLLSPQLFDGTGWEFENCAYTELSAIYQRKRIAGCL

SEQ ID NO: 37871 - DNA, 528 bp, Unknown
  Obtained from environmental sample
  misc_feature (1)..(528): n is a, c, g, or t
atgggctatcaggaaatgatatacaactacctcggctcgcgcaaagaccttgttgaaaaaatgcgcggcgcgggggatcgcattatccgtatcgcaaaccccatgaccgagaattacgagtatgtccgcgattcaataatcgcgtctctaatggaaagcgagtcagtttcgggcaattcggtatacccgcacaaaattttcgaggtaggtaaagtcgcgtatcttgacagcgcggacaattccggcactgtaacccgtcagtacgctggcttccttcacgccgacaaagaggcgaacttcaacaccgccgcgggacaaatgcagactctgttctactacctttcccgcgagtacgaggtcgaggaatccgacgacccgcgttttattcccggacgcgcggctgcaataatttacaacggaaaaccaatcggcgtattcggcgagattcaccccgaagtgctggaaaactggggcgtaaccgttccatgtaccgcaggcgagatcgatttagacgcgcttttgaattag

SEQ ID NO: 37872 - protein, 175 aa, Unknown
  Obtained from environmental sample
  misc_feature (1)..(175): Xaa is any amino acid
MGYQEMIYNYLGSRKDLVEKMRGAGDRIIRIANPMTENYEYVRDSIIASLMESESVSGNSVYPHKIFEVGKVAYLDSADNSGTVTRQYAGFLHADKEANFNTAAGQMQTLFYYLSREYEVEESDDPRFIPGRAAAIIYNGKPIGVFGEIHPEVLENWGVTVPCTAGEIDLDALLN

SEQ ID NO: 37873 - DNA, 555 bp, Unknown
  Obtained from environmental sample
  misc_feature (1)..(555): n is a, c, g, or t
atgaagaaaaagaatcttcgcataataaaactttcaaaagctcctgttgaaacccatgaatacatcgcggttgacggaggccttttggttcagcaaagcgaccgcaggcttcttgaaaaatgggatgtcgtgacaaaagccgcgcccgccgcacaggacctgcgggatatgatcttcggcatgagggctgtaacatttgtaaagtcgaacgcgataatgattgtcaaagacgaggccgccaccggaatagggggagggcaggttaaccgaatatggccgacagagcaggcgctggatcggagcattgctgccatacagacagccggtaccgtaataaaagcggaggacaatccgtggaagaatgaaaattccgccagggtgcttgcctccgacgcgtttttcccctttgccgatgttgtggaagccgccgcagcagcgggtataaaatccataatccagcccggaggatcggtgaacgacaaaatgtctattgaagcttgcgacaagcacggtatagcgatggtctttaccggcataaggcacttcaagcactaa

SEQ ID NO: 37874 - protein, 184 aa, Unknown
  Obtained from environmental sample
  misc_feature (1)..(184): Xaa is any amino acid
MKKKNLRIIKLSKAPVETHEYIAVDGGLLVQQSDRRLLEKWDVVTKAAPAAQDLRDMIFGMRAVTFVKSNAIMIVKDEAATGIGGGQVNRIWPTEQALDRSIAAIQTAGTVIKAEDNPWKNENSARVLASDAFFPFADVVEAAAAAGIKSIIQPGGSVNDKMSIEACDKHGIAMVFTGIRHFKH

SEQ ID NO: 37875 - DNA, 849 bp, Unknown
  Obtained from environmental sample
  misc_feature (1)..(849): n is a, c, g, or t
atgggaatagcccattaccttattacgcaaaaaacaaagaacgctaaactaaccattcttcttttggatattaaagacggttatgaaaaagaaggtgatccttttgtcggcggatatttttatcctgttgatttctttaaaaacgatccgaaatatcctaatattaagtcaaatgaactggatatgatctatatagatacttatccgtctgatcctgcctcgccttcaacctatgaaactcttgcccatgaaatgcagcatcttatgaattttgtgacaagtatattggtaagatctgatgatgataatatttttttaatggatacatgggttgacgaaggtctttcggcggccgcgcaatgggtatattcgggaaaccaccctgaaatacgctggaaatattataatgtagacccttcagaattaattgcaaaaggcaacaatttttatatgtgggataatcgcggcgatgaatccccgctggcgaatcttgatgattatgccaccgtatatcttttattccaatatttaagactgcaagcaggagaacctgatgagatttattttgatatacacacgtctgagtttccgaattatcaagcggtatcaaccgcggaaagtataaacagcagtcataaagaaaattggcccttgttgcttagagactggcatgcggcaaattatacaaataatacaagcggcttatatggttataagaatgatcctgtattgaaagatgtaaaagctccaatgttcaagggcggaacttccgcggctctctttccggagaaggcgtttacagtaaaaccaattcaacagaatctgttccggcgccttccggtaatataa

SEQ ID NO: 37876 - protein, 282 aa, Unknown
  Obtained from environmental sample
  misc_feature (1)..(282): Xaa is any amino acid
MGIAHYLITQKTKNAKLTILLLDIKDGYEKEGDPFVGGYFYPVDFFKNDPKYPNIKSNELDMIYIDTYPSDPASPSTYETLAHEMQHLMNFVTSILVRSDDDNIFLMDTWVDEGLSAAAQWVYSGNHPEIRWKYYNVDPSELIAKGNNFYMWDNRGDESPLANLDDYATVYLLFQYLRLQAGEPDEIYFDIHTSEFPNYQAVSTAESINSSHKENWPLLLRDWHAANYTNNTSGLYGYKNDPVLKDVKAPMFKGGTSAALFPEKAFTVKPIQQNLFRRLPVI

SEQ ID NO: 37877 - DNA, 474 bp, Unknown
  Obtained from environmental sample
  misc_feature (1)..(474): n is a, c, g, or t
atgccccggtactccttgaaaatcctgccgtcaaaaattatctccctgcccggcgcttccttgaggcctgcaaagaggttgcctatcataaccgcgctggcccccgcgcctatggccttggtaatatcccctgagaattttataccgccgtccgcaataacgggaatacccgatttcgcggcttcttcggcgcagtccagtaccgcagtaaactgcggcataccaatgcccgcgacgatccgcgtcgtacagattgatccgggaccaatgcccacttttaccgcgtcggctcctgcttcgataagacggcgcgttccttctttggacgcgacattcccgccgattacaggtatgccgaattctttttttatcccccggaccgcgtccatgacattttttgaatcgccgtgggcggtgtcgagcacgacaaaatcgaccttggcgttttttaacaggggaagacgctgcacgtaa

SEQ ID NO: 37878 - protein, 157 aa, Unknown
  Obtained from environmental sample
  misc_feature (1)..(157): Xaa is any amino acid
MPRYSLKILPSKIISLPGASLRPAKRLPIITALAPAPMALVISPENFIPPSAITGIPDFAASSAQSSTAVNCGIPMPATIRVVQIDPGPMPTFTASAPASIRRRVPSLDATFPPITGMPNSFFIPRTASMTFFESPWAVSSTTKSTLAFFNRGRRCT

SEQ ID NO: 37879 - DNA, 834 bp, Unknown
  Obtained from environmental sample
  misc_feature (1)..(834): n is a, c, g, or t
ttggttgagcgcaaattttttgtatgtgattatatttgctatttattttggccgaaagtatattttcaatcaatattaacttataggctgacaatgcatatcctctactacataacgtctcacggctacggccacgctgtcagaagcgccgcggtttgcaacgcgctgtttgaggctgtcggcgcttgcgaccgccccgccaacgtcggcgcggatattgatagagacgggcttcgcttgcgcctgacaatctgcaccgacgtcccgcgatcgttcttcgaagaggagctcccgttcccgcataattggcgcggcggcggcttcgacgtcgggtgcctccaaagcgacggggtctccgtattgataaaggagacgcttgccgcctacaaggagatatccgttaataacaggctgcgcttagacgaggaggtacggtggtgcaagtttaataatgttgactgcgtcatcagcgacatcacgccgttcgcctttgatgtggcagaaaaggcggggatccagtccgtggcgatcagcaattttacgtggcacgacatctactcgccatacgttgagcggtttccggagtatggggagatgctggcggagatggcgaatcaataccgtaaagcctcaatcgcgttgacgctctacccgtccttgccgatgccggtcttcgagaggaagaaaccgatacccatcctcggcagacgcggcgttgaccggcgggaggagatttgccgtcgcttcgggatagaccggggcaagcggcttggggtgatttacgtagggaatttcgggcttgaccgcgttgactggcggcggctgagaggttga

SEQ ID NO: 37880 - protein, 277 aa, Unknown
  Obtained from environmental sample
  misc_feature (1)..(277): Xaa is any amino acid
MVERKFFVCDYICYLFWPKVYFQSILTYRLTMHILYYITSHGYGHAVRSAAVCNALFEAVGACDRPANVGADIDRDGLRLRLTICTDVPRSFFEEELPFPHNWRGGGFDVGCLQSDGVSVLIKETLAAYKEISVNNRLRLDEEVRWCKFNNVDCVISDITPFAFDVAEKAGIQSVAISNFTWHDIYSPYVERFPEYGEMLAEMANQYRKASIALTLYPSLPMPVFERKKPIPILGRRGVDRREEICRRFGIDRGKRLGVIYVGNFGLDRVDWRRLRG

SEQ ID NO: 37881 - DNA, 465 bp, Unknown
  Obtained from environmental sample
  misc_feature (1)..(465): n is a, c, g, or t
ttgagcccggggttttcacatcagacttacgcggccgcctacgcgccctttacgcccaataattccgaacaacgctcgccccttacgtgttaccgcggctgctggcacgtaattagccggggcttattcgcgggccggcgtcaccggcggggcattccctccccgccttcttcttcgcccgcaaaaggattttacaacctttcggccttcgtcatccacgcggcgtcgctccgtcaggctttcgcccattgcggaatattcttagctgctgcctcccgtaggagtctgggccgtgttccagtcccagtgtggctgatcatcctctcagaccagctacccatcgtcgccttggtgggcctttaccccgccaacaagctaatgggacgcggactcatccatacgcgggagcatatgcagaggccccctttccccacaacgttacaccatgagcgtatccggtattag

SEQ ID NO: 37882 - protein, 154 aa, Unknown
  Obtained from environmental sample
  misc_feature (1)..(154): Xaa is any amino acid
MSPGFSHQTYAAAYAPFTPNNSEQRSPLTCYRGCWHVISRGLFAGRRHRRGIPSPPSSSPAKGFYNLSAFVIHAASLRQAFAHCGIFLAAASRRSLGRVPVPVWLIILSDQLPIVALVGLYPANKLMGRGLIHTREHMQRPPFPTTLHHERIRY

SEQ ID NO: 37883 - DNA, 360 bp, Unknown
  Obtained from environmental sample
  misc_feature (1)..(360): n is a, c, g, or t
atggaatataaaatagaactgtatgaaaaaatagacggaaaaacgcctgttttagagttcattttatgtttagaccccagatatcaggcaaaaatatatagagaaatagatttgttggaaaaatttggtaatgaattacattatcctcatgtggatactattaaaggtaaaaaatacaatgatttatgggaattaaggatagaattcgcctcaaatatttttcgaatattttactttttacctaaaaacaatagagtaatattattacacgggatagtaaaaaagaaacaaaaaacaccaaaaaaagaattagatacggcattagatcgcatgaaagactatttaaggagggaaaaataa

SEQ ID NO: 37884 - protein, 119 aa, Unknown
  Obtained from environmental sample
  DOMAIN (59)...(114): Phage derived protein Gp49-like (DUF891)
  misc_feature (1)..(119): Xaa is any amino acid
MEYKIELYEKIDGKTPVLEFILCLDPRYQAKIYREIDLLEKFGNELHYPHVDTIKGKKYNDLWELRIEFASNIFRIFYFLPKNNRVILLHGIVKKKQKTPKKELDTALDRMKDYLRREK

SEQ ID NO: 37885 - DNA, 1536 bp, Unknown
  Obtained from environmental sample
  misc_feature (1)..(1536): n is a, c, g, or t
atgcgtatcaaccacaaccttatcgcgattaatacccacaggcaactgggtattagtgaaaactccggcgcgaagtcgatggaaaaactctccagcggctaccgcatcaaccgagcgggagacgacgcggcggggctcgccatatccgagaaaatgcggggccaagtccgcggactctctatggcctccagaaacgcccaagacactatctccatgatccaaacggctgaaggagcgctggcggagacacaagacatcttgcagagaatgcgcgaactctccgtacagtccgcaaacgataccaatacggacgccgatcgggccgaactgcaagctgaagtcacacagctgcggtacgaaatagaccggatcgctaataccaccgagttcaacacgcgcaaactgctggaaggcagcgctaagggcgtggccgaagaggtgcaggggacggcgcggtataacaataactcgagaataaccatagactccgtcaaaagcaaggcgatgatggacgccgtgcaaaacgataaaagctgggcgttcgacggagcgtatatgctcataaagactaaccagacttttaacagcggagaccctgtctatgacccgagcgactataaactggtcgggccggacgggactatatacaacttncaggcgatgagcgagaatactaaggttaaggccagcgagttggaagcggggactatattcgccgacgacggggccgtgacgaagataccaaacgcgggtgcgatttcaaaaggtttctccggaactccgccggccacgatagtgctcggcaacgcgatcagcagtcacgaactttctaaggtngtcacagccgcctctccagccgccagcgttttagcctcaggctctgaatttacgttactgggcgggaaatcggttctgcttgaatccggcacaggcgccacttctatcacatacactatgtcgggagaactgcaagttcttaacggcaccaccatcattaccaccgtcgaagtcggcaagagcataaggctcgacgacggcacggttctcaagaacaacggcggcgggaacgtcagcgtggaaagcggaggtctcgtactagacgccggcggcggtttggacagcactaccggcggaaacgtcctctctttcacaatagcctcgcagagcaccctgaacacgaactccacgaccgtgcgtaaggatgtggagatagtggaagcggccaactacttagtcgcctccggcgagctcggcgtcaacgtcacgctgggcaacagtatcccgctcacaagcagaaccgataccacaagctccaaggatgcaggcgatatcgccgtgcttgcggagaacagcgtactggcgaggggcagcataattgagatgattaccgccggcgcgtcgccgaccgccatcaaaataatggtgaacggcaacgaggtcacaatatcctacgacccgtcgtcggatatgctcaaagtgggcagcgaagtggtctcccccggcaagagcataacgctgaagacggcacgattctaa

SEQ ID NO: 37886 - protein, 511 aa, Unknown
  Obtained from environmental sample
  DOMAIN (27)...(165): Bacterial flagellin N-terminus
  misc_feature (1)..(511): Xaa is any amino acid
MRINHNLIAINTHRQLGISENSGAKSMEKLSSGYRINRAGDDAAGLAISEKMRGQVRGLSMASRNAQDTISMIQTAEGALAETQDILQRMRELSVQSANDTNTDADRAELQAEVTQLRYEIDRIANTTEFNTRKLLEGSAKGVAEEVQGTARYNNNSRITIDSVKSKAMMDAVQNDKSWAFDGAYMLIKTNQTFNSGDPVYDPSDYKLVGPDGTIYNXQAMSENTKVKASELEAGTIFADDGAVTKIPNAGAISKGFSGTPPATIVLGNAISSHELSKVVTAASPAASVLASGSEFTLLGGKSVLLESGTGATSITYTMSGELQVLNGTTIITTVEVGKSIRLDDGTVLKNNGGGNVSVESGGLVLDAGGGLDSTTGGNVLSFTIASQSTLNTNSTTVRKDVEIVEAANYLVASGELGVNVTLGNSIPLTSRTDTTSSKDAGDIAVLAENSVLARGSIIEMITAGASPTAIKIMVNGNEVTISYDPSSDMLKVGSEVVSPGKSITLKTARF

SEQ ID NO: 37887 - DNA, 465 bp, Unknown
  Obtained from environmental sample
  misc_feature (1)..(465): n is a, c, g, or t
atgagcatatacgctccgtcgaacgcccagcttttatcgttttgcacggcgtccatcatcgccttgcttttgacggagtctatggttattctcgagttattgttataccgcgccgtcccctgcacctcttcggccacgcccttagcgctgccttccagcagtttgcgcgtgttgaactcggtggtattagcgatccggtctatttcgtaccgcagctgtgtgacttcagcttgcagttcggcccgatcggcgtccgtattggtatcgtttgcggactgtacggagagttcgcgcattctctgcaagatgtcttgtgtctccgccagcgctccttcagccgtttggatcatggagatagtgtcttgggcgtttctggaggccatagagagtccgcggacttggccccgcattttctcggatatggcgagccccgccgcgtcgtctcccgctcggttgatgcggtag

SEQ ID NO: 37888 - protein, 154 aa, Unknown
  Obtained from environmental sample
  misc_feature (1)..(154): Xaa is any amino acid
MSIYAPSNAQLLSFCTASIIALLLTESMVILELLLYRAVPCTSSATPLALPSSSLRVLNSVVLAIRSISYRSCVTSACSSARSASVLVSFADCTESSRILCKMSCVSASAPSAVWIMEIVSWAFLEAIESPRTWPRIFSDMASPAASSPARLMR

SEQ ID NO: 37889 - DNA, 585 bp, Unknown
  Obtained from environmental sample
  misc_feature (1)..(585): n is a, c, g, or t
ttgcacggcgtccatcatcgccttgcttttgacggagtctatggttattctcgagttattgttataccgcgccgtcccctgcacctcttcggccacgcccttagcgctgccttccagcagtttgcgcgtgttgaactcggtggtattagcgatccggtctatttcgtaccgcagctgtgtgacttcagcttgcagttcggcccgatcggcgtccgtattggtatcgtttgcggactgtacggagagttcgcgcattctctgcaagatgtcttgtgtctccgccagcgctccttcagccgtttggatcatggagatagtgtcttgggcgtttctggaggccatagagagtccgcggacttggccccgcattttctcggatatggcgagccccgccgcgtcgtctcccgctcggttgatgcggtagccgctggagagtttttccatcgacttcgcgccggagttttcactaatacccagttgcctgtgggtattaatcgcgataaggttgtggttgatacgcataaaaatcctcccttaaagggtgtatgtgattggttttttccggctccgaaaacagcaagttaa

SEQ ID NO: 37890 - protein, 194 aa, Unknown
  Obtained from environmental sample
  misc_feature (1)..(194): Xaa is any amino acid
MHGVHHRLAFDGVYGYSRVIVIPRRPLHLFGHALSAAFQQFARVELGGISDPVYFVPQLCDFSLQFGPIGVRIGIVCGLYGEFAHSLQDVLCLRQRSFSRLDHGDSVLGVSGGHRESADLAPHFLGYGEPRRVVSRSVDAVAAGEFFHRLRAGVFTNTQLPVGINRDKVVVDTHKNPPLKGVCDWFFPAPKTAS

SEQ ID NO: 37891 - DNA, 771 bp, Unknown
  Obtained from environmental sample
  misc_feature (1)..(771): n is a, c, g, or t
atgattcccggctgcgccacgacatggggctccgggtgctggtctttgaacgggctctcatcggcgggccggacagttggctcatcgcggccgaactgtggctgccggaaacaagcctcaagggagattttaaatgacggccgctgccggtattggccgctggttccccagccggagcttacagcctgtccaaggagttttaatttgacgaccgacccggccggccggcggcgccgcagcctggccaccagttttttcatgggcttcacctccggcgtgcccttcctggtgaccgcgaccttggtccaggcctggtggctggaagccggcctcgacctcaaatccatcggcctcctggccctgaccggcctgccctacaccttcaaatgggcctggtccttctggctggatgtctttgatccgcctctcttcgccgcctggggccggcggcggggctggctgctcttgagccaggcggccctgttcgccgggctctggctcctgtcgctcctggacccgggccaggccggggccgtctcggccctctgcctgggcctggccttcgcctcggccacccaggacgtggtgatcgatgcctaccgccgggaagacctggccgatgccgacctggccccgggctcggccgcctatatctggggctaccgcctgggcatgctgaccgtgggcggcgggggcctgatggccgcggaagtcctgggccctccggccgtctttcgcctgaccgccnttatgctgctcctggccccctga

SEQ ID NO: 37892 - protein, 256 aa, Unknown
  Obtained from environmental sample
  misc_feature (1)..(256): Xaa is any amino acid
MIPGCATTWGSGCWSLNGLSSAGRTVGSSRPNCGCRKQASREILNDGRCRYWPLVPQPELTACPRSFNLTTDPAGRRRRSLATSFFMGFTSGVPFLVTATLVQAWWLEAGLDLKSIGLLALTGLPYTFKWAWSFWLDVFDPPLFAAWGRRRGWLLLSQAALFAGLWLLSLLDPGQAGAVSALCLGLAFASATQDVVIDAYRREDLADADLAPGSAAYIWGYRLGMLTVGGGGLMAAEVLGPPAVFRLTAXMLLLAP

SEQ ID NO: 37893 - DNA, 849 bp, Unknown
  Obtained from environmental sample
  misc_feature (1)..(849): n is a, c, g, or t
ttgaacgggatatggaggttctctgtatcataccgaaggatactgtcccctttgatatttctaccgaaatctgaacggctcaaaaatagttttacccggatatgtcagaatatgctcctcctgatatttctggcagttacgatattttttaccacccttgcatgggataaaacttctgtcgcgtcccatgacgatatcggcattcaagttgcaaatattccgtatagcttagacgctgttcgcctcgcgaaacgtttagggtgtaaaaaatttgtcggcgccggttctcacgtagagtatggaaccatcgcggaaccgttaaaacccgacacgccggcgaaccctttgagcggttacgccatagcaaaatataccgtcggcaaattaagccgtttgctttgctctcaatttggtttactgtttaattggacaagaatagtaacattgtatggtccatttaatagagaacatacgttgatcacgtatgcgataaatgagctactcgccggacgttctccggaatttaccaaatgcgagcagatttgggattatctctatagcgatgacgctgcgagagcgtttttagctatcggagatagcggtgtagacggaaaaatatatacgctcggttcaggtcagacgcgccacttgtcggaataccttgaatcgctcagggatatcgttaacccaaccggatcattgcaattcggcaaaagggattattttccgcatcagccgatgtatctatgtgcagatatatcagaattaacaaaagataccggatggaggccggaagtattgtttgaggatggtgtgagaaagattatgcaatttgaagggaaaatataa

SEQ ID NO: 37894 - protein, 282 aa, Unknown
  Obtained from environmental sample
  DOMAIN (8)...(210): NAD dependent epimerase/dehydratase family
  misc_feature (1)..(282): Xaa is any amino acid
MNGIWRFSVSYRRILSPLIFLPKSERLKNSFTRICQNMLLLIFLAVTIFFTTLAWDKTSVASHDDIGIQVANIPYSLDAVRLAKRLGCKKFVGAGSHVEYGTIAEPLKPDTPANPLSGYAIAKYTVGKLSRLLCSQFGLLFNWTRIVTLYGPFNREHTLITYAINELLAGRSPEFTKCEQIWDYLYSDDAARAFLAIGDSGVDGKIYTLGSGQTRHLSEYLESLRDIVNPTGSLQFGKRDYFPHQPMYLCADISELTKDTGWRPEVLFEDGVRKIMQFEGKI

SEQ ID NO: 37895 - DNA, 798 bp, Unknown
  Obtained from environmental sample
  misc_feature (1)..(798): n is a, c, g, or t
gtgcctacgggtcttgacctacactacgatggttatgtttacggtacgctcgaaggagcaggtacttttacattcaaggtaaaagctgaaaatgtggctggctttgatacggcaacttttgtcgtaactgttgtcgcgccttcaataccaacaattacaaccgcttcattgccaaatggcaagattgacagacattactctaaatatctggaggcaacaggcggcggcgtagagtggagcaaaacaaccggcacattgccaccgggtcttcaattggatgacgatggcgaaataaggggctatcccacaacagcaggcacttatacattcacggtaaaggcaacaaatacgcttggttctgtcacaaagcagttttccataaaaattgacccggcagaactgccagtgattgtagtcagtgcggtgccgaatggcacggtcggcagagagtatagtcaatatcttgtaacatcgtcattggaagatgatgtcatctggagcaagtctagcggcaccttgccaccgggtcttcaattggatggcgatggcgaaataaggggcactcccacaacggctggcacttatacattcacggtaaaggcaacaaatacggctggctctgccacaaaagagcttaccatgaaaataaatgcaacattgcaggtgccaacaatcacaaccaccacactgccaaatggcaagaaagatgaagaatacttacaactcataaatgcaacagagcttgctgagtggagcgtggtagatggtgatttgccgccggggtctttatctatatga

SEQ ID NO: 37896 - protein, 265 aa, Unknown
  Obtained from environmental sample
  DOMAIN (78)...(119): Putative Ig domain
  misc_feature (1)..(265): Xaa is any amino acid
MPTGLDLHYDGYVYGTLEGAGTFTFKVKAENVAGFDTATFVVTVVAPSIPTITTASLPNGKIDRHYSKYLEATGGGVEWSKTTGTLPPGLQLDDDGEIRGYPTTAGTYTFTVKATNTLGSVTKQFSIKIDPAELPVIVVSAVPNGTVGREYSQYLVTSSLEDDVIWSKSSGTLPPGLQLDGDGEIRGTPTTAGTYTFTVKATNTAGSATKELTMKINATLQVPTITTTTLPNGKKDEEYLQLINATELAEWSVVDGDLPPGSLSI

SEQ ID NO: 37897 - DNA, 396 bp, Unknown
  Obtained from environmental sample
  misc_feature (1)..(396): n is a, c, g, or t
atggaagaagtaataaaatttttacaggatgccaaaacattttatctcgcttctgtcgagaaggatcagccgcgggtacggcctatgggctttgtaatgatctacgagggaaaactcagcttttgtacaaacaacaaaaaagaaatgttcaaacagatgaaagcaaaccctaaaattgaaatttgcgccagtagcccagacgggaagtggctcaggatatgtggcaatgtgggctttaattccagcagggccgcgaaggaaaagacgttggaaattatgcccgtcctgaaaaatatgtactccgctgacgacggtatttttgagatttttcattttgaaaacgcccacgcggttttcagcgatatgcagggcgggaagaaagaagtaaaaatataa

SEQ ID NO: 37898 - protein, 131 aa, Unknown
  Obtained from environmental sample
  DOMAIN (1)...(84): Pyridoxamine 5'-phosphate oxidase
  misc_feature (1)..(131): Xaa is any amino acid
MEEVIKFLQDAKTFYLASVEKDQPRVRPMGFVMIYEGKLSFCTNNKKEMFKQMKANPKIEICASSPDGKWLRICGNVGFNSSRAAKEKTLEIMPVLKNMYSADDGIFEIFHFENAHAVFSDMQGGKKEVKI

SEQ ID NO: 37899 - DNA, 423 bp, Unknown
  Obtained from environmental sample
  misc_feature (1)..(423): n is a, c, g, or t
ttgaataccgttcttctgcggcagtctatacgcaacgcctctgaaatcagcttctcccgatcaggaggaccgggcgggcaaaatgtaaacaagcttaatactaaggtgacattgcggcttcgccttgccgatattgacggcctctcggacgcggaactggagagggcgagggttctgctggcaaaccgtataagcggagggaacgagattgttatcagttcggacgaagaacgctcgcagcgtaccaatctggaaagggcatatttccgcgtcgaggcgctcataaacgcctcggcccggctgccaaaataccgtcatcccacaaagccgtcaaaagcggccatggagcggcggctccagggaaaacaattacaaagccgcaaaaaagcgtcacggaattcaaagttttcttcggaagattag

SEQ ID NO: 37900 - protein, 140 aa, Unknown
  Obtained from environmental sample
  DOMAIN (1)...(132): Peptidyl-tRNA hydrolase domain
  misc_feature (1)..(140): Xaa is any amino acid
MNTVLLRQSIRNASEISFSRSGGPGGQNVNKLNTKVTLRLRLADIDGLSDAELERARVLLANRISGGNEIVISSDEERSQRTNLERAYFRVEALINASARLPKYRHPTKPSKAAMERRLQGKQLQSRKKASRNSKFSSED

SEQ ID NO: 37901 - DNA, 486 bp, Unknown
  Obtained from environmental sample
  misc_feature (1)..(486): n is a, c, g, or t
atgcctgacatacttcttgccgcgatcaacgcaaagtggatacacccttcgcttgccctgcggcttcttaaagtgaatctcggccatctggaaaacaactgcgacattgttgaatttgccctgcgccagcccttacgcgaaaagattgcccccattctcgccgccaggcctcgtatactgggactgtcggtatcaatctggaatcacatggctacgctggaactgctgaaacaactgaatgaagcgtggaaggatgataagcccattgtcattcttggcgggcccgaagtgtcatatctgccccgggagtcggaaatatttaaattcgctgattattgtatccgcggcgagggggaaaccgcgtttcgtgatttgtgcatggcaattctaggcggcggtgatgttgttattaaacatgaaattcattcagttcatgtcactgaaataaaaagcggctacagcctgtacactgaagaggatttctag

SEQ ID NO: 37902 - protein, 161 aa, Unknown
  Obtained from environmental sample
  DOMAIN (3)...(128): B12 binding domain
  misc_feature (1)..(161): Xaa is any amino acid
MPDILLAAINAKWIHPSLALRLLKVNLGHLENNCDIVEFALRQPLREKIAPILAARPRILGLSVSIWNHMATLELLKQLNEAWKDDKPIVILGGPEVSYLPRESEIFKFADYCIRGEGETAFRDLCMAILGGGDVVIKHEIHSVHVTEIKSGYSLYTEEDF

SEQ ID NO: 37903 - DNA, 888 bp, Unknown
  Obtained from environmental sample
  misc_feature (1)..(888): n is a, c, g, or t
ttggctataatccttgagagccaacactggaaccttgatgattttaccggactgtcaggctgggatgtccagatggcttttgacctttcggccctgccaaggtcggccactgtgctgggaaacaggctttttcttttttttaccccctggacacggctcaatatttttaagcggcttgaagctgccggcctgcttcccgcaagactgcttccgctgggttcggtcggccttagcgcgacggcgatttctttgcggcttacacagggaaccgtaatcacggcgggcattgatttttctttcagcatggattcataccatgcaagatccacctctggtcatttggcaaggctgcgccgtcagaaccgtttaaggggcctgttaaacacggacgcggtgtttgcacagtatgttatcagaacagtatcaaaaaccggaactggtattttgtcaaatccgggtatgcgtaattaccgcgacctttttgaaaaacaatttggcggctgttcttcaaggctgtttgatatggcaggaagcggacttcccctcggcattaaaaccctgtctatagatgaagcctttagtctgttaactagtaatgactgtaaggttaacaggcctaataatgacaaaaaaccaatgccaaacattgaaaaattgcgtgattttgtaattttagaaattaaacgtctaaatttactcagggatattcttacaggcaaagcccccatggattacaacagtcttgccggacttgttgatgaatgcgattacctttgggctcatttcccagattatgcggcctcaagccgccgtcccgacaaggctgagcttgaagccgggggtcaaacgagtagtttctttcctcaaccgcgtccgtgcggaaattga

SEQ ID NO: 37904 - protein, 295 aa, Unknown
  Obtained from environmental sample
  misc_feature (1)..(295): Xaa is any amino acid
MAIILESQHWNLDDFTGLSGWDVQMAFDLSALPRSATVLGNRLFLFFTPWTRLNIFKRLEAAGLLPARLLPLGSVGLSATAISLRLTQGTVITAGIDFSFSMDSYHARSTSGHLARLRRQNRLRGLLNTDAVFAQYVIRTVSKTGTGILSNPGMRNYRDLFEKQFGGCSSRLFDMAGSGLPLGIKTLSIDEAFSLLTSNDCKVNRPNNDKKPMPNIEKLRDFVILEIKRLNLLRDILTGKAPMDYNSLAGLVDECDYLWAHFPDYAASSRRPDKAELEAGGQTSSFFPQPRPCGN

SEQ ID NO: 37905 - DNA, 492 bp, Unknown
  Obtained from environmental sample
  misc_feature (1)..(492): n is a, c, g, or t
atggagatgacgaccatggaaataccgagatactatgaattatttaatcctgtgctgcaggctttacacgctttaggtggaagcggctcagttgaagagatatataccaaagttattgaactgcagaactactccaccgaagttgtagatgctcctcacggagaaggcgcgcagacaaaactggaatacaggcttggatgggcaaggacatatctgaaaaaatatggacttatagaaaatacagccagaggggtttggagtattgcaaatggaaaacttggcactaccgaggtggatgcaaaaacagtcgtagattatgtatcgcaactgccaaaagaagtaaaatataatcccatcgacgatatcactgccgaggaatccgtacttaaaaagtggcaagaagaattattggaagttttgctgggcatatcgccggaagcttttgaacggcttacgcaaagaatattacgcgagtcgggcttttcacagtag

SEQ ID NO: 37906 - protein, 163 aa, Unknown
  Obtained from environmental sample
  misc_feature (1)..(163): Xaa is any amino acid
MEMTTMEIPRYYELFNPVLQALHALGGSGSVEEIYTKVIELQNYSTEVVDAPHGEGAQTKLEYRLGWARTYLKKYGLIENTARGVWSIANGKLGTTEVDAKTVVDYVSQLPKEVKYNPIDDITAEESVLKKWQEELLEVLLGISPEAFERLTQRILRESGFSQ

SEQ ID NO: 37907 - DNA, 945 bp, Unknown
  Obtained from environmental sample
  misc_feature (1)..(945): n is a, c, g, or t
ttgcaagccgcttcctcggtcgtggatcacaacaagggacgtttgggaaaaaccctccgatctgaacggggagacggaaaactgccggtacttgcctttctgccgaatcaggaagaagaggccaatttctgcgcctcgcttatcgaaaagtcggttaagggcaacggcgcaaaaagcggtgaaaaagcgcaatggtcggactgggctattttatatcggactaacgcgcaatcttttggttttgaaacggaattcctccgtcgcggcattccctacaaagtagtcggatcgttgaagttctacgagcgcgaggagatcaaagacgccctcgcccttctttcgttcatggtaaacccccgcgacgaggtggccttccgccggatgctgaacaaacccgcccgcggccttggtgcggtaacggcggcccgccttattgacgcaagcctgacagaaggaaaagatcttctggaaacggcgaaaaacatggttcagacaaaaaaattaagcgccaaaaccggcgcggggcttgaaaaatttatcaaagtgatggatgaagggaaatcgctgctggaaaacccccggcctgcaattacaactaacgatgaaaaccccgagtcccatgtgtccaggaaaaaaaaggctaaagcggccatgccaaaagacggtgatactctggtgtcaggcgaagggctttccgtgtgcgtagcccaattattgaaagactccggcatcgccgaataccacataatgcaggacgagataaccgggaaccagcgtctgaatcacatgcangaactggtaaacagagtcagcgagtacgaaggaagcgttaatggactactggacttccttgaaccatttgaacttgatcgctcgcttgatgaagaaattcccaaaaaaacgcccgtgatctcgcgggatcacccgaccagaaaactaaggtga

SEQ ID NO: 37908 - protein, 314 aa, Unknown
  Obtained from environmental sample
  misc_feature (1)..(314): Xaa is any amino acid
MQAASSVVDHNKGRLGKTLRSERGDGKLPVLAFLPNQEEEANFCASLIEKSVKGNGAKSGEKAQWSDWAILYRTNAQSFGFETEFLRRGIPYKVVGSLKFYEREEIKDALALLSFMVNPRDEVAFRRMLNKPARGLGAVTAARLIDASLTEGKDLLETAKNMVQTKKLSAKTGAGLEKFIKVMDEGKSLLENPRPAITTNDENPESHVSRKKKAKAAMPKDGDTLVSGEGLSVCVAQLLKDSGIAEYHIMQDEITGNQRLNHMXELVNRVSEYEGSVNGLLDFLEPFELDRSLDEEIPKKTPVISRDHPTRKLR

SEQ ID NO: 37909 - DNA, 1545 bp, Unknown
  Obtained from environmental sample
  misc_feature (1)..(1545): n is a, c, g, or t
atgcaagttgaaacacttgatgccacagtccgcgattacatcaatgaattagagaccagaaatcaagaattgcaaaataaagtcattgagattgaaacaaatcataaacaagattaccaacagttatataatgaatatttgacactaaaagaacaatacgacctactggtatacaaacgatttgtgcgtagcgcggagcaattgctggctgatgaaaagcagcagctgttatttgccgaggaagccgaacagcctgaagcaaatgaagagaagcctttagagcttcaagcggttaaatcatttacacgcaagaagaatggcgggcgcaagccgattagcgcaaaccttgagcgaaggccgagggtcatagacataccggaaagcgaaaaaacatgcgcttgcggggcgaatttgaccaaaataggcgaagaaaccagcgaaaagttggttataataccaccgcagatttatgtagaccaaataatcaggccaaaatatgcctgtaggcaatgcgaagggacggaagaggaagacaagcctgcggtgcgcatcgcgcccgtggagccgtctataattccccggggcatagcgagccccagtttgctggcaaccgtcttcacgcaaaagtttgaaatgcaccttccctattacaggcaggagaaacaatttgaacagataggggcggcaataagccgccaggacatgagcaactggcagcagcaggcgtatgaaaaacttaagccgttattggacatgctggaagaaacggtaaaatgtggccctgtgctgcagatggatgagactgaggtacaggtaataggggaagaggagcgaagcgatcttcagaaaagttatatgtggcttgcccgtggcggtcctttaggcaaaaaagtaattttgtataagtaccgtccgactcgcgccgcatataacgtcatggaattcctccaagggtacagaggctatctgcaaacggacgggtacaaagggtatgacagcgcggccaaagaccttcccggaataatacaggtgggatgttttgcacacgcaaggcggaagttttttgaggctgccaaaataagctgtaaaggcaggtctgccgaagaaggcataaaatatatccgcaggctctaccagcttgaggatacgctacggagcaaatggaaagacgaccttgaaaaattccatgaagaacgaaaaaaagaagcggctcccatactggctgaatttgagcagtggctttcaaaacgggtggatgaagtgccgcctaaggtactgttgggagaagcgatacactatacccttaaccaatgggacaaattgataaagtacattgaaagcccctatttgactcccgacaacaatgcctgcgaaaacgcgatacggccttttgtcatcggaagaaaaaattggctgttctgccagagcgtaggcggggccaaaagctcatgcggtatgtttacccttatagagacggcaaagcaaaacggccttgtcccgttcaaatatctgatggctgtttttgaaaagccccgcttgctttaa

SEQ ID NO: 37910 - protein, 514 aa, Unknown
  Obtained from environmental sample
  DOMAIN (138)...(340): Transposase IS66 family
  misc_feature (1)..(514): Xaa is any amino acid
MQVETLDATVRDYINELETRNQELQNKVIEIETNHKQDYQQLYNEYLTLKEQYDLLVYKRFVRSAEQLLADEKQQLLFAEEAEQPEANEEKPLELQAVKSFTRKKNGGRKPISANLERRPRVIDIPESEKTCACGANLTKIGEETSEKLVIIPPQIYVDQIIRPKYACRQCEGTEEEDKPAVRIAPVEPSIIPRGIASPSLLATVFTQKFEMHLPYYRQEKQFEQIGAAISRQDMSNWQQQAYEKLKPLLDMLEETVKCGPVLQMDETEVQVIGEEERSDLQKSYMWLARGGPLGKKVILYKYRPTRAAYNVMEFLQGYRGYLQTDGYKGYDSAAKDLPGIIQVGCFAHARRKFFEAAKISCKGRSAEEGIKYIRRLYQLEDTLRSKWKDDLEKFHEERKKEAAPILAEFEQWLSKRVDEVPPKVLLGEAIHYTLNQWDKLIKYIESPYLTPDNNACENAIRPFVIGRKNWLFCQSVGGAKSSCGMFTLIETAKQNGLVPFKYLMAVFEKPRLL

SEQ ID NO: 37911 - DNA, 969 bp, Unknown
  Obtained from environmental sample
  misc_feature (1)..(969): n is a, c, g, or t
atgaaaaaaaaggtaaaaagaataaacatggaaaaaagcactgaagcgggcgataacaactccctgcttatctacctgcaggaaatcaacaagattccgcttcttagcaaaagcgaggaagaagcgatagctgcccaggcgatgaaagggaacagcgtcgccagggaacgcctggtaaacgcaaacctccgttttgttatctcggtcgccaagaagtaccagggcagggggctgccgctggaggaccttatcagcgaaggcaacctggggcttttaaacgcggtaaagcactttgatgtggaaaaaggctaccgtttcattacatacgcggtctggtggattcgccagtcaattgtcaaagcaattcaggaaaaggggcgcatgatccggctgccatgcaacaaggcaaatgaattgataaaattcgacaaagccaggcaggcaatccaaaaaaggcccggtttgcagaatgagcaggatatccgggaaatcgccaattatctggaaataccgcaggaaaaagcggaagggcttatgcggataagccaggatgttgtatacctggacgacaaggtatcaaattacgatgattccctgtctaccaaagaccttatcgaagaagagttttccaaacctcccatagaattggccatgatcagtgtcctaaaaaaaaaattggaagagatcattagcggccttgaagacagagccgcagatgttattcgaagccactacggcctggaagacacctgtccccagacgcttaaagaaataggcgaaacctacaatctaagcaaggaacgcgtgcgccagattgaaaagcgggctctggggcagcttcagcattcctcaaacaggaacaggctaaagagttccatntctttgtcctcttcaaaaatccggagccctttcctcttctgcggttttggaagtggctctttnggttggtctttttgggggcccctttag

SEQ ID NO: 37912 - protein, 322 aa, Unknown
  Obtained from environmental sample
  DOMAIN (19)...(55): Sigma-70 factor, region 1.2
  misc_feature (1)..(322): Xaa is any amino acid
MKKKVKRINMEKSTEAGDNNSLLIYLQEINKIPLLSKSEEEAIAAQAMKGNSVARERLVNANLRFVISVAKKYQGRGLPLEDLISEGNLGLLNAVKHFDVEKGYRFITYAVWWIRQSIVKAIQEKGRMIRLPCNKANELIKFDKARQAIQKRPGLQNEQDIREIANYLEIPQEKAEGLMRISQDVVYLDDKVSNYDDSLSTKDLIEEEFSKPPIELAMISVLKKKLEEIISGLEDRAADVIRSHYGLEDTCPQTLKEIGETYNLSKERVRQIEKRALGQLQHSSNRNRLKSSXSLSSSKIRSPFLFCGFGSGSXGWSFWGPL

SEQ ID NO: 37913 - DNA, 513 bp, Unknown
  Obtained from environmental sample
  misc_feature (1)..(513): n is a, c, g, or t
gtggcaagatttactaaaaattgttataataccccaatgacatccggggaaaatgctgccctaaaaaattttctcaaccttgcatccgattacctgaaagacggccattcccgtgttcatgaaaccgataaaccagtggaaaaagccgcccttccacttgcttacatgatagaagagtcagaaaacgaagacgaggactcgcttgatacggtggcagcggatgtcggcgcgtgcaaagcctgcatccttgcagctacgcgaaaaaacaccgtccccggcgaaggctcaattaatccgctggtgatggtaattggcgaagggccgggcgcggatgaagacgccgccggaagaccatttgtcggcagggccgggcaattgctggataaaatgcttggatctatcggacttgtcaggggcaaaaactgttacatcgccaacatggtaaagtgccgtccgcctggaaaccgcgatccgggggctgaagagattagcgcctgtactcggccattctga

SEQ ID NO: 37914 - protein, 170 aa, Unknown
  Obtained from environmental sample
  misc_feature (1)..(170): Xaa is any amino acid
MARFTKNCYNTPMTSGENAALKNFLNLASDYLKDGHSRVHETDKPVEKAALPLAYMIEESENEDEDSLDTVAADVGACKACILAATRKNTVPGEGSINPLVMVIGEGPGADEDAAGRPFVGRAGQLLDKMLGSIGLVRGKNCYIANMVKCRPPGNRDPGAEEISACTRPF

SEQ ID NO: 37915 - DNA, 558 bp, Unknown
  Obtained from environmental sample
  misc_feature (1)..(558): n is a, c, g, or t
atgtacagattggccgagtcccgtcattgtcaagctattcaggaaaaaggacgcatgatccggctgccctgtaacaaggcaaacgagttgaccaaacttgataaagcccggcaggttattcaaaacaaacccggcgtacaaaatgatcaggacattcgggaaatcgccaattatctggatatgtcggaagaaaaagcggaagggctcatgcggataagccaggatgtcgtttacctggacgataaggcgtcaaaatacgacgattccctgactaccaaagacctcattgaagatgagtattccagaacccccgtagattttgcgataaacagcgtccttaaagatgaattggaagagatcatcagcggtcttgaagacagagcggcgaatgttctaagaagccactatggcctggagggcgcttgtccccagacgcttaaggaaataggcgaaacatataacctgagcaaagagcgcgtgcgccagattgaaaagcgggctctggggcagcttcaacactctttaaaccggaacaggcttaagagttacatatcgtga

SEQ ID NO: 37916 - protein, 185 aa, Unknown
  Obtained from environmental sample
  DOMAIN (120)...(173): Sigma-70, region 4
  misc_feature (1)..(185): Xaa is any amino acid
MYRLAESRHCQAIQEKGRMIRLPCNKANELTKLDKARQVIQNKPGVQNDQDIREIANYLDMSEEKAEGLMRISQDVVYLDDKASKYDDSLTTKDLIEDEYSRTPVDFAINSVLKDELEEIISGLEDRAANVLRSHYGLEGACPQTLKEIGETYNLSKERVRQIEKRALGQLQHSLNRNRLKSYIS

SEQ ID NO: 37917 - DNA, 732 bp, Unknown
  Obtained from environmental sample
  misc_feature (1)..(732): n is a, c, g, or t
atgcaatggggcaatgcggggcctgcggaatcccgggcaacggcaacgacaccattttggggaaaatcccttctgtgcgggcaaccctccgtggttgcccacccccagcggggattttcccctacaaaatcattttccgcaaaacaaaatccagccgggtttttaccacaccaaaacacgttatcgtttttcgaaagggcatttgtaaaattaggaatcccaataaaattcagcgaaggatttagccccaaaccccgcatagcaaacacaggtgcattgccgctgggtttggaatctctttgcgaggttatttccattgagcttttggaaaaactggatttagagaataaaaaagcagagtttgtgaaaaatataaacgaaatttttccgcaaggtttggaaattgtttcaatagaacccctgcaaacaaaactctccgcgcaatttcccaaatctgtggattactgcatggcaggcgaatatccgagcggtcttgtgcaaaaaaaagaaaaaaatgaactacctgcggttttaaatcacagggggcaaagcataaacttaaatgagcatattctttcaattaccgaagctgaaaatgctttgcacatcacggttaaatgcaacgagcaaggtgccaccgcaagtcctttcacaatatacagcggtcttttgaacataagcgagcaagaagcaagagctttgaatatagtgaagataaatatcagtgcctaa

SEQ ID NO: 37918 - protein, 243 aa, Unknown
  Obtained from environmental sample
  misc_feature (1)..(243): Xaa is any amino acid
MQWGNAGPAESRATATTPFWGKSLLCGQPSVVAHPQRGFSPTKSFSAKQNPAGFLPHQNTLSFFERAFVKLGIPIKFSEGFSPKPRIANTGALPLGLESLCEVISIELLEKLDLENKKAEFVKNINEIFPQGLEIVSIEPLQTKLSAQFPKSVDYCMAGEYPSGLVQKKEKNELPAVLNHRGQSINLNEHILSITEAENALHITVKCNEQGATASPFTIYSGLLNISEQEARALNIVKINISA

SEQ ID NO: 37919 - DNA, 486 bp, Unknown
  Obtained from environmental sample
  misc_feature (1)..(486): n is a, c, g, or t
atggtccaggaagtaaaaaataaaattgaaagcagttctgcgctggaagtcacagaaaaaacttttgaaaaaatagaggaaacaaaggggctaaacgcttatatatccttatgcaaggagagggctttggcacaggctaaggcagcggatgagcggcgcaagagcggcaaaagcctttccgttttggatggcgtccctattgcggttaaagataacatctacatagaaggcgttagaacaacctgcgcatctaaggttttggaaaattttatctcgccatacacagccacagctgtggcaaaattggaagcggctggagccatagtggttggcaaaacaaatatggacgagttgcgatgggagcttctggcgagaactctttttttggcaaggtggttaacccagccgcaccggataggatatcaggaggctcatccagcggcagcgcggcaacggttgcagccggagttgttgccttggctatag

SEQ ID NO: 37920 - protein, 161 aa, Unknown
  Obtained from environmental sample
  misc_feature (1)..(161): Xaa is any amino acid
MVQEVKNKIESSSALEVTEKTFEKIEETKGLNAYISLCKERALAQAKAADERRKSGKSLSVLDGVPIAVKDNIYIEGVRTTCASKVLENFISPYTATAVAKLEAAGAIVVGKTNMDELRWELLARTLFLARWLTQPHRIGYQEAHPAAARQRLQPELLPWL

SEQ ID NO: 37921 - DNA, 603 bp, Unknown
  Obtained from environmental sample
  misc_feature (1)..(603): n is a, c, g, or t
ttgctccttggagtaaacggggtcggcaagacgactaccgcggcgaaactttcgcacctttacaatacaaagttaaataaaaaaaccatactagccgcagcggacacattcagggcggccgctattgatcaaataaaaatacacggggaaaaattaaatacccgggtagtggcgcataaacagggaggagaccccgcagcggtggtttatgacgctctggaagccgcgcagtcgggcggcgcggatgttgttattgctgataccgccggaagaatgcatacaaaatcagcgttagttgaagaattgcggaaaattgacagagtagtggagtcaagaaccggcggagcgaattatattaaataccttgtgctggacgcaactacgggaagaaacgccttcgctcaggcggaagtatttcacggcgcagtcgttctggacggggtaatattgacaaagtacgattcaaccgccaagggcggagtggttttttccttggcggacgagttaaaattgcctgtgacgtatatatgtacgggtgaaaaatacgaggatatagaacaatttgatcctcataaatttgcgagggaatttgcgggtatttaa

SEQ ID NO: 37922 - protein, 200 aa, Unknown
  Obtained from environmental sample
  DOMAIN (1)...(199): SRP54-type protein, GTPase domain
  misc_feature (1)..(200): Xaa is any amino acid
MLLGVNGVGKTTTAAKLSHLYNTKLNKKTILAAADTFRAAAIDQIKIHGEKLNTRVVAHKQGGDPAAVVYDALEAAQSGGADVVIADTAGRMHTKSALVEELRKIDRVVESRTGGANYIKYLVLDATTGRNAFAQAEVFHGAVVLDGVILTKYDSTAKGGVVFSLADELKLPVTYICTGEKYEDIEQFDPHKFAREFAGI

SEQ ID NO: 37923 - DNA, 873 bp, Unknown
  Obtained from environmental sample
  misc_feature (1)..(873): n is a, c, g, or t
atgaatanccaaatttcgtctacgtccaggcgcctgtttttggtaattattgccggaatactgatgtcgtttaatataaaaacctttgtccatgccggcgggcttctccccggcggatttaccggactttccctgctgattcagcaaatatgcctgcgtttcggaaacttcaacctgccctttagcgtgccgttctacattctaaattcgatacccgcggcggtgtgttttaaatttatcgggaagaaattcaccctttattccgtgcttgccatcgttgttacaggcttgcttgccgactggatgccctccatgttcattgatataatccaactgcacgacaccctgctttcggcggtgttcggcggagttctgaacgggctgtccatcgcgctctgcctttatgccgacgccacgtccggcggcaccgattttatcgcgatttttatttccgaaagataccacaaggacgcatggaattacatttttatcgggaactgcgttattctggctgtggcggggttccttttcggcctggacaaggctttgtactccatcattttccagttcgcaaccactatggcccttggcgccctttaccggaattatcagcaaacaacgcttcttattattaccaacaaaccggaattgattttctcggtgatcaatgaaaaaacccatcatggggctacctgttttgaagggtacggaagctatgaaaagaaaagcaggacgctgctgtattccgtggtaaccgccagccagataaagacgttaattcccgcgataaggaaaattgacggggaagcgtttatcaatgtgctgaaaaccgaccatattaccggccggttttatcaaaggccttttgactaa

SEQ ID NO: 37924 - protein, 290 aa, Unknown
  Obtained from environmental sample
  DOMAIN (11)...(99): Uncharacterized BCR, YitT family COG1284
  misc_feature (1)..(290): Xaa is any amino acid
MNXQISSTSRRLFLVIIAGILMSFNIKTFVHAGGLLPGGFTGLSLLIQQICLRFGNFNLPFSVPFYILNSIPAAVCFKFIGKKFTLYSVLAIVVTGLLADWMPSMFIDIIQLHDTLLSAVFGGVLNGLSIALCLYADATSGGTDFIAIFISERYHKDAWNYIFIGNCVILAVAGFLFGLDKALYSIIFQFATTMALGALYRNYQQTTLLIITNKPELIFSVINEKTHHGATCFEGYGSYEKKSRTLLYSVVTASQIKTLIPAIRKIDGEAFINVLKTDHITGRFYQRPFD

SEQ ID NO: 37925 - DNA, 876 bp, Unknown
  Obtained from environmental sample
  misc_feature (1)..(876): n is a, c, g, or t
atgataacggaggctctgcgggaagtagtgacaatcgtcacgcctggcgctgacaatgccggcacggcttatccggcggcatttataccggacggcgcgttggcaggcattatcgaaaaatccggcgcccatgtccgtgagctggaaggcttgccccttcgcgagggggcgctatggggaaattttcccgaaacaggcatcgtcattttcgagggcggcctgcctttcattgtggatctgcttcaggggcaaaagaccgggttctttctggatcaaagggataaccgcctgcttgccggagaatacgccgccatgctgcaaaaagaggcgggaaccgccctgagaattcttgacgcctgttcgtatacaggcggcttcggcctgcacgcactgcgtcctgcggggaagcttaccatgctggatatatctgcaacggcgcttgagacagcgaaaaagaatgccgcgctcaacggtgtcgcgccaggcgcgccggatcgcctaacggtaatagaagccaatgtttttgacgaactgcgcggcatggtgcgccgtaaagagcaatttgacatggtaatactcgatcctccggccttcgcgaagtcgcgcggttctctcgaagaagccctgcgcggctacaaggaaataaacttaagggctataaaacttgtccgcccaggcgggatctttgtaagctgttcatgcagtcaggccgtagacgagattatcttcaagcggatgatcaccgaagccgccgcagacgcggaacgccgcctgatacagcttgatttccgcttccaggcgcaggatcaccctgtgcttgccggttacggagaatcgttgtacctcaaggccgggttttaccgggttggggactag

SEQ ID NO: 37926 - protein, 291 aa, Unknown
  Obtained from environmental sample
  DOMAIN (95)...(245): Conserved hypothetical protein 95
  misc_feature (1)..(291): Xaa is any amino acid
MITEALREVVTIVTPGADNAGTAYPAAFIPDGALAGIIEKSGAHVRELEGLPLREGALWGNFPETGIVIFEGGLPFIVDLLQGQKTGFFLDQRDNRLLAGEYAAMLQKEAGTALRILDACSYTGGFGLHALRPAGKLTMLDISATALETAKKNAALNGVAPGAPDRLTVIEANVFDELRGMVRRKEQFDMVILDPPAFAKSRGSLEEALRGYKEINLRAIKLVRPGGIFVSCSCSQAVDEIIFKRMITEAAADAERRLIQLDFRFQAQDHPVLAGYGESLYLKAGFYRVGD

SEQ ID NO: 37927 - DNA, 789 bp, Unknown
  Obtained from environmental sample
  misc_feature (1)..(789): n is a, c, g, or t
ttgcatacggtcgtagaagccatttccaaaatagagaaggggaatatgacagttcgcgttggcttggagcgcagagacgagattggaatgctctccaaagcattagacagcctctcggcaaggctgcaaaccatattcaaaaatctacggcataactcagacacactcgctggctctgcggcagaactcactcacataagcaggcaactcgcgggtggcgcagaagaaaccgcgagcaagaccgtaaatgtttctggctccattgagcaggtatctgctaacgttagagatatagccggcacagccgaagaatctgcgaccagcgttgtgaatgtgacaagcgtggtggagaaggtggcaggtaacataaacgcaatagcgagcaacgcggagcaagcctctgtgaacgcaagcgaggtggcgggagccactgaagaaatgtccacaaacataagcactatagccgcggcagttgaagagatgagcgcgagcataaaccaaatatcggtaaatgccgaagatgcccgcaaagtggcaaacgaagccacatccagagctcgcgaggcaaccagcacaatgggtaaactgggtgctgcggcaaaagaaataggacacgttaccgatgtaataaaaaagatagccgaaaaaacaaatcttcttgcgctcaatgccaccatagaggcagcttctgcaggtgctgcgggtaaaggctttgctgtggttgccggagaaataaagaacttgcgaaccaaagcgcaaaaagcgcagacgacatatcccgtcgcatag

SEQ ID NO: 37928 - protein, 262 aa, Unknown
  Obtained from environmental sample
  DOMAIN (138)...(262): Methyl-accepting chemotaxis protein (MCP) signaling domain
  misc_feature (1)..(262): Xaa is any amino acid
MHTVVEAISKIEKGNMTVRVGLERRDEIGMLSKALDSLSARLQTIFKNLRHNSDTLAGSAAELTHISRQLAGGAEETASKTVNVSGSIEQVSANVRDIAGTAEESATSVVNVTSVVEKVAGNINAIASNAEQASVNASEVAGATEEMSTNISTIAAAVEEMSASINQISVNAEDARKVANEATSRAREATSTMGKLGAAAKEIGHVTDVIKKIAEKTNLLALNATIEAASAGAAGKGFAVVAGEIKNLRTKAQKAQTTYPVA

SEQ ID NO: 37929 - DNA, 1065 bp, Unknown
  Obtained from environmental sample
  misc_feature (1)..(1065): n is a, c, g, or t
ttggataacgacatttttcaggtcgcttgcaattttagcaagttcgccagcactctcattaatctgcttcgcgccttgcgcgctttcctttgcaccttgggctatgttagccatgttctggcttaccacgttggctcccttggctgcatcgcctgcgttgcgtgctatgtccttgctgcctttggctacctcgtttatggatttggagacacgctccacgcccttgttcgcttcgccggcgttgcgcgctatgtccttgctgcctttggccacttcgcctacggattcggctacgcgcttggctcccgtattggcttgcgcaacattgctcgctatctcgttgctcgctttggtctgctgggcggcgtggctggagatggcctccacgctctcgttcactttaactattatgccagagacattgtttatagccgtcaccgcttcgctagtactggattggatgccttctatgcgacgggatatgtcgtctgcgctttttgcgctttggttcgcaagttctttatttctccggcaaccacagcaaagcctttacccgcagcacctgcagaagctgcctctatggtggcattgagcgcaagaagatttgttttttcggctatcttttttattacatcggtaacgtgtcctatttcttttgccgcagcacccagtttacccattgtgctggttgcctcgcgagctctggatgtggcttcgtttgccactttgcgggcatcttcggcatttaccgatatttggtttatgctcgcgctcatctcttcaactgccgcggctatagtgcttatgtttgtggacatttcttcagtggctcccgccacctcgcttgcgttcacagaggcttgctccgcgttgctcgctattgcgtttatgttacctgccaccttctccaccacgcttgtcacattcacaacgctggtcgcagattcttcggctgtgccggctatatctctaacgttagcagatacctgctcaatggagccagaaacatttacggtcttgctcgcggtttcttctgcgccacccgcgagttgcctgcttatgtga

SEQ ID NO: 37930 - protein, 354 aa, Unknown
  Obtained from environmental sample
  misc_feature (1)..(354): Xaa is any amino acid
MDNDIFQVACNFSKFASTLINLLRALRAFLCTLGYVSHVLAYHVGSLGCIACVACYVLAAFGYLVYGFGDTLHALVRFAGVARYVLAAFGHFAYGFGYALGSRIGLRNIARYLVARFGLLGGVAGDGLHALVHFNYYARDIVYSRHRFASTGLDAFYATGYVVCAFCALVRKFFISPATTAKPLPAAPAEAASMVALSARRFVFSAIFFITSVTCPISFAAAPSLPIVLVASRALDVASFATLRASSAFTDIWFMLALISSTAAAIVLMFVDISSVAPATSLAFTEACSALLAIAFMLPATFSTTLVTFTTLVADSSAVPAISLTLADTCSMEPETFTVLLAVSSAPPASCLLM

SEQ ID NO: 37931 - DNA, 450 bp, Unknown
  Obtained from environmental sample
  misc_feature (1)..(450): n is a, c, g, or t
gtgacggctataaacaatgtctctggcataatagttaaagtgaacgagagcgtggaggccatctccagccacgccgcccagcagaccaaagcgagcaacgagatagcgagcaatgttgcgcaagccaatacgggagccaagcgcgtagccgaatccgtaggcgaagtggccaaaggcagcaaggacatagcgcgcaacgccggcgaagcgaacaagggcgtggagcgtgtctccaaatccataaacgaggtagccaaaggcagcaaggacatagcacgcaacgcaggcgatgcagccaagggagccaacgtggtaagccagaacatggctaacatagcccaaggtgcaaaggaaagcgcgcaaggcgcgaagcagattaatgagagtgctggcgaacttgctaaaattgcaagcgacctgaaaaatgtcgttatccaatttaaggtataa

SEQ ID NO: 37932 - protein, 149 aa, Unknown
  Obtained from environmental sample
  misc_feature (1)..(149): Xaa is any amino acid
MTAINNVSGIIVKVNESVEAISSHAAQQTKASNEIASNVAQANTGAKRVAESVGEVAKGSKDIARNAGEANKGVERVSKSINEVAKGSKDIARNAGDAAKGANVVSQNMANIAQGAKESAQGAKQINESAGELAKIASDLKNVVIQFKV

SEQ ID NO: 37933 - DNA, 690 bp, Unknown
  Obtained from environmental sample
  misc_feature (1)..(690): n is a, c, g, or t
gtggaagcggcccgcgccggagaggcgggcaagggcttcgcggtcgtggccgaagaggtgcgcaacttagcgatgcgcagcgccgacgccgcgaaggacacggcggacatgatcgaggagtcggttaagaacgccgacagcggcgtaaagatcaccgaggaagtggccatctccttaggccagatagtcaaccgcaccggcaaagtgggcgacctgatagccgagatcgccgcagcctccaaagagcaggcgcagggcattgagcaagtgaacaccgccgtggcgcagatgaacaaggtcacccagcaaaacgccgccaactccgaggaatccgccagcgccgccgaagagctttccgcccaagccgccgagctttcaatcatggtgaacaagttcgttttgagcgacggcgattacagcggccccggtaatgaactgcccccgccgccgaaattcgccgcccttccgaagaaagccgccgaaaagcccaaagtttcgggcgggtggatagggacgaatttcgtgaaatcagtgagatcggaggaaattatccctctgagcgacgaggatttcgcggagtnnnagcagcccggggcggcncctgccgccccccctatcctncaaaacgcaggggcggtcccgcgcgaccgcccttttttaaccgcggattaccgacctttttcaatatga

SEQ ID NO: 37934 - protein, 229 aa, Unknown
  Obtained from environmental sample
  DOMAIN (2)...(135): Methyl-accepting chemotaxis protein (MCP) signaling domain
  misc_feature (1)..(229): Xaa is any amino acid
MEAARAGEAGKGFAVVAEEVRNLAMRSADAAKDTADMIEESVKNADSGVKITEEVAISLGQIVNRTGKVGDLIAEIAAASKEQAQGIEQVNTAVAQMNKVTQQNAANSEESASAAEELSAQAAELSIMVNKFVLSDGDYSGPGNELPPPPKFAALPKKAAEKPKVSGGWIGTNFVKSVRSEEIIPLSDEDFAEXXQPGAAPAAPPILQNAGAVPRDRPFLTADYRPFSI

SEQ ID NO: 37935 - DNA, 402 bp, Unknown
  Obtained from environmental sample
  misc_feature (1)..(402): n is a, c, g, or t
ttgttcaccatgattgaaagctcggcggcttgggcggaaagctcttcggcggcgctggcggattcctcggagttggcggcgttttgctgggtgaccttgttcatctgcgccacggcggtgttcacttgctcaatgccctgcgcctgctctttggaggctgcggcgatctcggctatcaggtcgcccactttgccggtgcggttgactatctggcctaaggagatggccacttcctcggtgatctttacgccgctgtcggcgttcttaaccgactcctcgatcatgtccgccgtgtccttcgcggcgtcggcgctgcgcatcgctaagttgcgcacctcttcggccacgaccgcgaagcccttgcccgcctctccggcgcgggccgcttccacggcggcgtga

SEQ ID NO: 37936 - protein, 133 aa, Unknown
  Obtained from environmental sample
  SIGNAL (1)...(20)
  misc_feature (1)..(133): Xaa is any amino acid
MFTMIESSAAWAESSSAALADSSELAAFCWVTLFICATAVFTCSMPCACSLEAAAISAIRSPTLPVRLTIWPKEMATSSVIFTPLSAFLTDSSIMSAVSFAASALRIAKLRTSSATTAKPLPASPARAASTAA

SEQ ID NO: 37937 - DNA, 702 bp, Unknown
  Obtained from environmental sample
  misc_feature (1)..(702): n is a, c, g, or t
atgacgtggtcagatcggccgagagcgggtttccgtattatgcgtctgcatggtcttcttttggcccgccatacaggcgtgcggccatctgtagcgcatactggccgggtatccagcacacggcgcaatgtccgctggtgttccgatgcttttgaatttacctgtgatgacggccataccgtgcgtgtggtttttgctctggatgcttgtgatcgggaagtgatcgccttcacggccacaaccggcggcgtacacggcggcctgatccaggatttgatgcttgactgcattgaaaagcgttttaacgccttacaagccccctgtccggtggaatggctttctgacaatgcttcgtgctatacagccgcagaaacccgcgcctttgccgcgcaactcaacctgatcagccgcttcacgccggtccgcagccccgaaagcaacggtttggcggaagcctttgtcaaaaccttcaaacgggattatctgtttactcattgccttggtgatgcagcaagcgccatacatcatttggctgagtggtttgaaaattacaacgaattcgcgcctcacaaggccctgcggatgctttctcccagagagtttatccgctccgaacaaactgtggaatgtctcggagaaaggggcggcgcggcgcttgcgagcgacagccccacgagcatgtcgcggctgcaagcgccgtga

SEQ ID NO: 37938 - protein, 233 aa, Unknown
  Obtained from environmental sample
  DOMAIN (38)...(203): Integrase core domain
  misc_feature (1)..(233): Xaa is any amino acid
MTWSDRPRAGFRIMRLHGLLLARHTGVRPSVAHTGRVSSTRRNVRWCSDAFEFTCDDGHTVRVVFALDACDREVIAFTATTGGVHGGLIQDLMLDCIEKRFNALQAPCPVEWLSDNASCYTAAETRAFAAQLNLISRFTPVRSPESNGLAEAFVKTFKRDYLFTHCLGDAASAIHHLAEWFENYNEFAPHKALRMLSPREFIRSEQTVECLGERGGAALASDSPTSMSRLQAP

SEQ ID NO: 37939 - DNA, 411 bp, Unknown
  Obtained from environmental sample
  misc_feature (1)..(411): n is a, c, g, or t
ttgattcgttctacaaaaaatacggaaccgaatcgctctttagctaccagcccaaggacgcctttttcgcaaacgcccgcgccacaatcgcctgcacccttcgcgaattctctcctcaatgatatgaacagctgttttcgtctcgacggcgataagctccggctggagataaaggctatcccgggcgcttcaaaaaccgaattggcgggaattaaagacggacggctgcggattcgtattgccgccgcatccgaagacggcaaggcaaacgccgaaatgcttggctttctttccaaaacgcttgattgtcccaaacgcgatttacagtttctttcaggagaaaaatcgcgccttaagacaatcgccctccctcttgggtacaaggagaagctggaacagatacttaagtaa

SEQ ID NO: 37940 - protein, 136 aa, Unknown
  Obtained from environmental sample
  DOMAIN (49)...(125): Uncharacterised ACR, YggU family COG1872
  misc_feature (1)..(136): Xaa is any amino acid
MIRSTKNTEPNRSLATSPRTPFSQTPAPQSPAPFANSLLNDMNSCFRLDGDKLRLEIKAIPGASKTELAGIKDGRLRIRIAAASEDGKANAEMLGFLSKTLDCPKRDLQFLSGEKSRLKTIALPLGYKEKLEQILK

SEQ ID NO: 37941 - DNA, 876 bp, Unknown
  Obtained from environmental sample
  misc_feature (1)..(876): n is a, c, g, or t
atggaaatgaccagatatattaactgtattgcgcacagaacaagcgaaggaaacgttcttataggggatgattatacagccatttttgactgcggaatgatgcattgcgccgataaaaccataaaaaacgcgaaaaaagccctgcagggcaggcaactggactatctgtttatcacccatacccattatgaccatatgggcgcggcgccttttttcagaaaagaatggccgtcactgcgccttgttacgtcgcaagcgggagcggctgtcctcttaaaagacactccgcgcagggttatccgcgaactttcaattgtggcgggaaaagaatttaattgcgaatttgacgcctcttacagcgacgacgatttacacgcggacattatcgtcaaagagggggatattatccctctcggcggaatttcggttcaagtgctggaaacgcccggacatacaagggataccttaagtttttttataccggaacttgagatgctgatagtaagcgaaacaacaggagttttactgccggacaatactatatatcccccctatttgaccagttttatcgacacggtcaactccatagaaaaatgccgcaagataccttttaagtatttgtccctgcctcacaaagggctttcggaagaaatagacgcgaacgctttctttgacaaaacgctggcggcctgtactgaatgccgcgattttattctggaaatgaacaataaaaagctcgatcaggaagcgatgcttgattcgttctacaaaaaatacggaaccgaatcgctctttagctaccagcccaaggacgcctttttcgcaaacgcccgcgccacaatcgcctgcacccttcgcgaattctctcctcaatga

SEQ ID NO: 37942 - protein, 291 aa, Unknown
  Obtained from environmental sample
  DOMAIN (16)...(211): Metallo-beta-lactamase superfamily
  misc_feature (1)..(291): Xaa is any amino acid
MEMTRYINCIAHRTSEGNVLIGDDYTAIFDCGMMHCADKTIKNAKKALQGRQLDYLFITHTHYDHMGAAPFFRKEWPSLRLVTSQAGAAVLLKDTPRRVIRELSIVAGKEFNCEFDASYSDDDLHADIIVKEGDIIPLGGISVQVLETPGHTRDTLSFFIPELEMLIVSETTGVLLPDNTIYPPYLTSFIDTVNSIEKCRKIPFKYLSLPHKGLSEEIDANAFFDKTLAACTECRDFILEMNNKKLDQEAMLDSFYKKYGTESLFSYQPKDAFFANARATIACTLREFSPQ

SEQ ID NO: 37943 - DNA, 624 bp, Unknown
  Obtained from environmental sample
  misc_feature (1)..(624): n is a, c, g, or t
gtgggcaaaaaagaaaatagtaattcaaagacgggaaagcgaggaacaggcatgacggcggattctgcttataaagagttatacgatattgtagtaagattgcgaggtcccggcgggtgtccgtgggatatagagcaaactccttcttcacttaggggatcgttaatagaggaaacctacgagtgccttgaagccattgatgaaaaagagccttcccacattatggaagagcttggcgatttatttttgcttgcgacaatgattagctatatgcatgaacaggaaggaaaattttccgtggcggacgcgttatcaaatgtaaataaaaaactaatacgccgccatccgcatgtgtttggagaagtaaaggtaaaggacagcgctgaagttttaaacaactgggtggcgattaaagtgaatcaggagggacgaaagcccaaagattcaatacttgatgaggtaagcggcggtcttccgccgatggatcgttcttttaaattgcaaaagaaagccgccaaggcaggttttgattggcctgatatggaaggggtaattggaaaaattaaagaagagcttgacgaggtacgcgccgcggtcaacacatccgagatgaagaagaattag

SEQ ID NO: 37944 - protein, 207 aa, Unknown
  Obtained from environmental sample
  DOMAIN (46)...(119): MazG nucleotide pyrophosphohydrolase domain
  misc_feature (1)..(207): Xaa is any amino acid
MGKKENSNSKTGKRGTGMTADSAYKELYDIVVRLRGPGGCPWDIEQTPSSLRGSLIEETYECLEAIDEKEPSHIMEELGDLFLLATMISYMHEQEGKFSVADALSNVNKKLIRRHPHVFGEVKVKDSAEVLNNWVAIKVNQEGRKPKDSILDEVSGGLPPMDRSFKLQKKAAKAGFDWPDMEGVIGKIKEELDEVRAAVNTSEMKKN

SEQ ID NO: 37945 - DNA, 756 bp, Unknown
  Obtained from environmental sample
  misc_feature (1)..(756): n is a, c, g, or t
ttgctgaacgctctctgctcttttgcctctccagcgcatctgctccacattcccaccagggtagtggccgcaaggagctatttggtcgcaaagtaccagtttttttcgcttctgcacataatggccggcgaccagcaggaattcatccttccccttcgcaaggttattctgacgataatccacaccctcatggccgaagaagtctacttttcctgccttgacgattccggattttcccaggaaataaaacttaatctggcgaacgatcttatcatgctttgggacagcggcacggatccccgcacggtcaggcacttgccgtcccttgacgcactttggactgcccgcgattcttcgccccccgctttcggaacaatgaacgccacaagcgagcttctcaggatttccatagacatgggagaagactggcaggatttcctggtcgcgaatgtttcaataaacgagacccgctgggcccttgaggagtttcttttcggcctttcttacgaagaaataaattcggtgcgctcaagactaatgaaattcggcattaacgccgtgggccgcgacgagataccttcttttcttggaagccgccccgcttacggaataataaacagctccgattaccgcgcgatgtatgatttttacgttgaccgccgggatgccgcccgtctgcgccaaaagctttcagttcccggccctggcagatccctggaagaaatatacattaaataccgcatagccctgggataa

SEQ ID NO: 37946 - protein, 251 aa, Unknown
  Obtained from environmental sample
  misc_feature (1)..(251): Xaa is any amino acid
MLNALCSFASPAHLLHIPTRVVAARSYLVAKYQFFSLLHIMAGDQQEFILPLRKVILTIIHTLMAEEVYFSCLDDSGFSQEIKLNLANDLIMLWDSGTDPRTVRHLPSLDALWTARDSSPPAFGTMNATSELLRISIDMGEDWQDFLVANVSINETRWALEEFLFGLSYEEINSVRSRLMKFGINAVGRDEIPSFLGSRPAYGIINSSDYRAMYDFYVDRRDAARLRQKLSVPGPGRSLEEIYIKYRIALG

SEQ ID NO: 37947 - DNA, 1095 bp, Unknown
  Obtained from environmental sample
  misc_feature (1)..(1095): n is a, c, g, or t
gtggataaggatggcgttgcaagttatataattatgaaaattaacgattataatgaaaacggtgataataataggataatctccgccgaccgatccggctccgaggaggagcagttcgacaacgcgctgcgtccggagaatttctccgacttcataggccaggaggcgataaaggagaatttgcggatattcgtggaggcggccaaaaagcgttccgaggcgcttgaccacgtgctgttctgcggcccgccggggctcgggaaaacgacgctgtcgcgtattttggcaaacgagttgggcgtgccgatacagaccacatccggtcccgtcttagaaaagaaaggcgatctcgccggtagcttgacaaacttgacggaacgggagatattatttatcgacgagatacaccgcctgaaccgtgttgttgaggagtctctctatccggcgatggaggactttgtttttgacataacgataggcgacggtccggcggcgaggtctatacgcctcaacctcaagccgttcacgctggtcggcgcgacgacccgggcgggtatgcttacctcgcccatgcacgcgcgcttcggctacgtctgccgcttggcctattacacgccggaggagctgatgcgcgtgataacgcggtcggcgtcgatcttgggcgttgagtgcggaagcgaggcggcgcttgagttgggcaagagggcgcgcggcaccccgcgtatcgcgaacaggcttttgcggcggtgcagggacgtggcggaggtcaggggcgacgggactattacggtggagatcgtcaacaagacgctctcgcttttaggggtcgattcgagcgggttggacgagatggacaggaatatcctgctgtctattatagagcactacggcggcggcccggttggcttgggcacggtggccgtggtggtgggggaggagccggacactatcgaggaggtgtacgagccgttcctcatccagtccggatttctgaagcgcactcagcgcggtcgtgaggtgacgggtaagacgtacaagtatttcaataaagttccgccgacggggcgggcgccggatttgtttgacgttgattga

SEQ ID NO: 37948 - protein, 364 aa, Unknown
  Obtained from environmental sample
  DOMAIN (77)...(207): ATPase family associated with various cellular activities (AAA)
  misc_feature (1)..(364): Xaa is any amino acid
MDKDGVASYIIMKINDYNENGDNNRIISADRSGSEEEQFDNALRPENFSDFIGQEAIKENLRIFVEAAKKRSEALDHVLFCGPPGLGKTTLSRILANELGVPIQTTSGPVLEKKGDLAGSLTNLTEREILFIDEIHRLNRVVEESLYPAMEDFVFDITIGDGPAARSIRLNLKPFTLVGATTRAGMLTSPMHARFGYVCRLAYYTPEELMRVITRSASILGVECGSEAALELGKRARGTPRIANRLLRRCRDVAEVRGDGTITVEIVNKTLSLLGVDSSGLDEMDRNILLSIIEHYGGGPVGLGTVAVVVGEEPDTIEEVYEPFLIQSGFLKRTQRGREVTGKTYKYFNKVPPTGRAPDLFDVD

SEQ ID NO: 37949 - DNA, 495 bp, Unknown
  Obtained from environmental sample
  misc_feature (1)..(495): n is a, c, g, or t
atggtgctggatagggcaaacaaaatagcattcgcctgcaagtcgcagaggacgtttgaagaaccactgaccaagttctgccaagaactgggctacacttttttttactttgaagccgcagaccgcagcggaggccctatctatcacacaaacgtgatgatgtgcatgggcgacagctttgccgttgcctgcttagaatccatccacatcgaatcagaaaaaaaaatgttcattgatattatcaatcattgcggcaaagagatgattgacataaccatcgggcaaatggaaaaatttgctggaaatttgctgcaactaaaaaacaaagatggccgaagcctccttgtgatgtccgaaacggctaagggttctttggagccaacccaaatcgcggccatggaaagacattgcaagatagtcgcgccaagcataaagacaattgaaaccaatggcggcggctccgcccgctgcatgatagcggagattttcttttga

SEQ ID NO: 37950 - protein, 164 aa, Unknown
  Obtained from environmental sample
  misc_feature (1)..(164): Xaa is any amino acid
MVLDRANKIAFACKSQRTFEEPLTKFCQELGYTFFYFEAADRSGGPIYHTNVMMCMGDSFAVACLESIHIESEKKMFIDIINHCGKEMIDITIGQMEKFAGNLLQLKNKDGRSLLVMSETAKGSLEPTQIAAMERHCKIVAPSIKTIETNGGGSARCMIAEIFF

SEQ ID NO: 37951 - DNA, 960 bp, Unknown
  Obtained from environmental sample
  misc_feature (1)..(960): n is a, c, g, or t
ttgcctgacgcgctttcatcgacggaaaggacttgcgcttccgtaaatgtcgcctccacaaagagcggtattaacatggacgcggtgcgtcttatgggtgaaataataaaaaaaacagcagaagcgaccgcggacaggtgcggcatcggctgcgcgaaacttgttgtcttttgtaacgcgcctgaagataatccctttatggcgggggcttttcatggggtaggggaggcggagagcgtccttaacgtgggagtttcaggccccggcgtaataaaagccgcgcttgaaaattgccgtgaaatgagttttgacgcgttagctgacactattaaaaaaacggcatttaaaataacgcgcatgggccaccttgtcgggtttgaagccgcgcgccgcataggagttcccttcggcatattggatctttcacttgcgccaactcccgccgtaggggactcagttgcgcgaatacttgaagaaatgggccttgaagccgccggtacccacggaactaccgccgcacttgcgatgttaaccgacatggtaaaaaaaggcggagtaatggcgtctacccatgtaggcggcttttcaggcgcgtttattcccgtctccgaagacgaaggcatggtggcggcggttaaaggcggctcgctttcccttgataaactggaggcgatgacctgcgtatgctctgtcgggctggacatgattcccctccccggagacacgtcggcggctacaatagccgcgattatcgccgacgaaatggctataggcatggtgaacaacaagacaaccgccgtgcgcgtaattcccgtccccggcaaaaaagcgggagagtgggcggaattcggcggcctcttgggcggctccccgataatggcggttaacagcgcgaagagcgacgcgtttgtaaaccgcggcggtaggattccggcgccggtgcatagttttaggaattaa

SEQ ID NO: 37952 - protein, 319 aa, Unknown
  Obtained from environmental sample
  DOMAIN (1)...(319): Uncharacterized ACR (DUF711)
  misc_feature (1)..(319): Xaa is any amino acid
MPDALSSTERTCASVNVASTKSGINMDAVRLMGEIIKKTAEATADRCGIGCAKLVVFCNAPEDNPFMAGAFHGVGEAESVLNVGVSGPGVIKAALENCREMSFDALADTIKKTAFKITRMGHLVGFEAARRIGVPFGILDLSLAPTPAVGDSVARILEEMGLEAAGTHGTTAALAMLTDMVKKGGVMASTHVGGFSGAFIPVSEDEGMVAAVKGGSLSLDKLEAMTCVCSVGLDMIPLPGDTSAATIAAIIADEMAIGMVNNKTTAVRVIPVPGKKAGEWAEFGGLLGGSPIMAVNSAKSDAFVNRGGRIPAPVHSFRN

SEQ ID NO: 37953 - DNA, 612 bp, Unknown
  Obtained from environmental sample
  misc_feature (1)..(612): n is a, c, g, or t
ttgccggggacgggaattacgcgcacggcggttgtcttgttgttcaccatgcctatagccatttcgtcggcgataatcgcggctattgtagccgccgacgtgtctccggggaggggaatcatgtccagcccgacagagcatacgcaggtcatcgcctccagtttatcaagggaaagcgagccgcctttaaccgccgccaccatgccttcgtcttcggagacgggaataaacgcgcctgaaaagccgcctacatgggtagacgccattactccgcctttttttaccatgtcggttaacatcgcaagtgcggcggtagttccgtgggtaccggcggcttcaaggcccatttcttcaagtattcgcgcaactgagtcccctacggcgggagttggcgcaagtgaaagatccaatatgccgaagggaactcctatgcggcgcgcggcttcaaacccgacaaggtggcccatgcgcgttattttaaatgccgtttttttaatagtgtcagctaacgcgtcaaaactcatttcacggcaattttcaagcgcggcttttattacgccggggcctgaaactcccacgttaaggacgctctccgcctcccctaccccatga

SEQ ID NO: 37954 - protein, 203 aa, Unknown
  Obtained from environmental sample
  SIGNAL (1)...(27)
  misc_feature (1)..(203): Xaa is any amino acid
MPGTGITRTAVVLLFTMPIAISSAIIAAIVAADVSPGRGIMSSPTEHTQVIASSLSRESEPPLTAATMPSSSETGINAPEKPPTWVDAITPPFFTMSVNIASAAVVPWVPAASRPISSSIRATESPTAGVGASERSNMPKGTPMRRAASNPTRWPMRVILNAVFLIVSANASKLISRQFSSAAFITPGPETPTLRTLSASPTP

SEQ ID NO: 37955 - DNA, 585 bp, Unknown
  Obtained from environmental sample
  misc_feature (1)..(585): n is a, c, g, or t
ttgcgggagctgaagctggccctaagcgcctgccggtcgggcgtcgatcgtgtgcacctgatcgacggcaaggaacaaggggcggtactcaaggaacttttctccaacctcggcgtcgggaccatggtctttaccgacgaatacgagtcgatcaagccccttcacagccgggatttgccggacatactgcgcataatggagcctctgatggaatcgggcatcctcatccggcgcacggcggagcaaatccaggaaaagagggatgactacgccgtctttgagatcgacggttccgtccacgcctgcggcgccctgcacgactggggggagggccagggcgaaatcgccgccgtggcgagcgatcccctgtattccggcatgaatctgggccgccgcgtcgttggctttttaatagaaaaggcccgcaagaagggcatgaaccgcgtatttgtccttaccaccgtcacacaggactggttcgaggccctcggcttccaggaagccggcctggacagcctgcccgaaaggaagcggcaagtatacgaccaaagccgcaagagcaaagtctacgcgctggagctatag

SEQ ID NO: 37956 - protein, 194 aa, Unknown
  Obtained from environmental sample
  DOMAIN (91)...(166): Acetyltransferase (GNAT) family
  misc_feature (1)..(194): Xaa is any amino acid
MRELKLALSACRSGVDRVHLIDGKEQGAVLKELFSNLGVGTMVFTDEYESIKPLHSRDLPDILRIMEPLMESGILIRRTAEQIQEKRDDYAVFEIDGSVHACGALHDWGEGQGEIAAVASDPLYSGMNLGRRVVGFLIEKARKKGMNRVFVLTTVTQDWFEALGFQEAGLDSLPERKRQVYDQSRKSKVYALEL

SEQ ID NO: 37957 - DNA, 1119 bp, Unknown
  Obtained from environmental sample
  misc_feature (1)..(1119): n is a, c, g, or t
ttgcgaataccgtgtaatagcgaccagcggcgcgagggttgcaaagccgagcgcagaagtaaaagtcaatatctaacaaaatctttacaagaccttcacagaattgtaacattcaatatctacctttgttatgtaaaactcaacaagggggaaagtatgaaagtatatcactgtatatttatcatattcattgtagcaattttttttctaatgaattgcaaagaagataaacaagcaaaagatttacaagaatctggcaccataaccgtttatacagctttggaagatgagcttgtaacggaatatttaaaatcgttctatgtaaaacaccccaacataaaattaaaagtcgtgcgtgaatcaacaggcataataactgcacggctcatagcagaaaaagaaaatccacaagcagatgtggtatggggtacggcagcttcttctatgttggttttggatgaacgcgatcagcttgaaccatatacgccaaaaggaattgaaagaatattgccaaagtttaaatccgacaagccaactccaacatgggttggcatcactgcttgggaaacagctttcataatcaataatgtggaacttgccaaacttgggcttggaccaatgaatataaaatctttcgatgacctattgaatccaaaattgaaagggcatattgttatgtcaaatccaaattcgtctgggacgggttttctcacggttgcaggcgtgctgcaactgaaagataaaaatacaaatgcaggctgggattatctttcaaaactgcacgaaaacgtgaatcaatatgtgcattccggttcaaagcccgcaaaaatggctgctgctggcgaatgtatagttggagtgagttttggttatgctggaataagccaaaaacaaaaaggagctccagttacaacagtgttccccactgaaggctctggctgggatatggaagcaaacgctctgataaaaaagaaaaatatcaatcctgctgcaaaaacttttttggactgggcaatttccgatgaggctatggaatcttacaaaaggagctaccctattatttccacaggcaagggtggcaactacgatggctttaattcagacccaataaagcagtga

SEQ ID NO: 37958 - protein, 372 aa, Unknown
  Obtained from environmental sample
  DOMAIN (59)...(345): Bacterial extracellular solute-binding protein
  misc_feature (1)..(372): Xaa is any amino acid
MRIPCNSDQRREGCKAERRSKSQYLTKSLQDLHRIVTFNIYLCYVKLNKGESMKVYHCIFIIFIVAIFFLMNCKEDKQAKDLQESGTITVYTALEDELVTEYLKSFYVKHPNIKLKVVRESTGIITARLIAEKENPQADVVWGTAASSMLVLDERDQLEPYTPKGIERILPKFKSDKPTPTWVGITAWETAFIINNVELAKLGLGPMNIKSFDDLLNPKLKGHIVMSNPNSSGTGFLTVAGVLQLKDKNTNAGWDYLSKLHENVNQYVHSGSKPAKMAAAGECIVGVSFGYAGISQKQKGAPVTTVFPTEGSGWDMEANALIKKKNINPAAKTFLDWAISDEAMESYKRSYPIISTGKGGNYDGFNSDPIKQ

SEQ ID NO: 37959 - DNA, 417 bp, Unknown
  Obtained from environmental sample
  misc_feature (1)..(417): n is a, c, g, or t
atggtaacacacgaccaagaagaggcactcacaatggcagacagaataattgtgatgaacaacgccgtgatagaacaaattgcaaatcctcatactatatataactatccagcttctcgctttgttgcagattttataggtacgatgaatttttacaatgaaggagaagctatgcgcggtattcgccctgagaaaatcaaggtagttgaacactgggaacctcacgacattaaagctttggtaagggagcttgaattcaaaggagcgtttacccgcattcatagccacatcccaaaagaaaattccgaatttttcatagatttgccttcggaacgtgtagaaaatatgaagcttcaacgcgacactatgctttttttgcaaataccagaggaatacgctgtgaagtattctgtgtag

SEQ ID NO: 37960 - protein, 138 aa, Unknown
  Obtained from environmental sample
  misc_feature (1)..(138): Xaa is any amino acid
MVTHDQEEALTMADRIIVMNNAVIEQIANPHTIYNYPASRFVADFIGTMNFYNEGEAMRGIRPEKIKVVEHWEPHDIKALVRELEFKGAFTRIHSHIPKENSEFFIDLPSERVENMKLQRDTMLFLQIPEEYAVKYSV

SEQ ID NO: 37961 - DNA, 789 bp, Unknown
  Obtained from environmental sample
  misc_feature (1)..(789): n is a, c, g, or t
atgagtgataactatattgatattcaaaacctgaccaaatccttcatggtcagaggcgaacgcctggaggtattaaagggaatctctctgtccgtttcaagaggagacgtgttcggaatcatcgggctgtcaggagcgggaaaatccaccctggcgcgctgtatcaacagaatcgaaacgccggatacaggccgcataaacataggcggagttgatatgctgacgcttcccaaacgccgccttctggaacagcgccagcgcataggcatgatctttcagaacttcaacctttttgagtctaaaacggtttacaaaaatatcgcatatccgctcgcaatccgcggcatgaaaaaagcggaacgctcaaaacgtgtgcgtgaaatagcggaggttgtcggcctgcaggacaaactggacgcttacccggcagggctttccggcgggcagaaacaacgcgtgggcatcgccagggcgcttgcgaataacccggacattctgctttcagacgaggccaccagcgcacttgatccacagaccacattaagcattttggaactgcttaaaaacatcaaccgcgatcttgggttaaccatcatactgatcacccatgagttagatgtaattaaatacaccaccagaaacatggccgtgcttgaagacggcgtaataagcgaaagcggcagaaccaaggatattttctccaaccccaacagcgtaaccggcaagatatttcttaaagtctattttgaattgcaggataacggcctgcaggaaggagacggtatatga

SEQ ID NO: 37962 - protein, 262 aa, Unknown
  Obtained from environmental sample
  DOMAIN (35)...(221): ABC transporter
  misc_feature (1)..(262): Xaa is any amino acid
MSDNYIDIQNLTKSFMVRGERLEVLKGISLSVSRGDVFGIIGLSGAGKSTLARCINRIETPDTGRINIGGVDMLTLPKRRLLEQRQRIGMIFQNFNLFESKTVYKNIAYPLAIRGMKKAERSKRVREIAEVVGLQDKLDAYPAGLSGGQKQRVGIARALANNPDILLSDEATSALDPQTTLSILELLKNINRDLGLTIILITHELDVIKYTTRNMAVLEDGVISESGRTKDIFSNPNSVTGKIFLKVYFELQDNGLQEGDGI

SEQ ID NO: 37963 - DNA, 498 bp, Unknown
  Obtained from environmental sample
  misc_feature (1)..(498): n is a, c, g, or t
atgccgcttaccattcgtgacgtacgattggatgacgcgcaggcgttactcgacatctacgcgccctatgtggaaaccacatgggtaacttttgaaatcgaaacgccgtcattggccgaattccgcgggaggattgagcagtaccgttttaagcagtgttttccgtataaggtggctgaacttgacggcgctattgttggttatgcctacgcccacccttatcaccaaagagaggcttaccgttataccgccgaaaccaccgtttatataaaacagggctttggacgcggcggaatcgggactgaactttaccaatcagtactggaagatttgtcgcgcggaggttttcacgccgtgatagcgatagttggctaccccaacgaacccagcaaacgtttccacgaaaaacttgggttccgtgaaatcggacatttccatgaagtcgggtataagttaaatcgctggcttgacgtaggctatctggaaaaaattttataa

SEQ ID NO: 37964 - protein, 165 aa, Unknown
  Obtained from environmental sample
  DOMAIN (57)...(140): Acetyltransferase (GNAT) family
  misc_feature (1)..(165): Xaa is any amino acid
MPLTIRDVRLDDAQALLDIYAPYVETTWVTFEIETPSLAEFRGRIEQYRFKQCFPYKVAELDGAIVGYAYAHPYHQREAYRYTAETTVYIKQGFGRGGIGTELYQSVLEDLSRGGFHAVIAIVGYPNEPSKRFHEKLGFREIGHFHEVGYKLNRWLDVGYLEKIL

SEQ ID NO: 37965 - DNA, 711 bp, Unknown
  Obtained from environmental sample
  misc_feature (1)..(711): n is a, c, g, or t
atgctgatgttccacgccgagaacgctcaggattttttcgacatgatattggccgcttacgctatagccgagcaacccgaagtgcacctgccggcgggcgtcttcgccgacggattctttgtgacgcatacacgcgaagttgtaatgctgccgccggacgatatcaaactacacgcctattcgccggacatcgcgccgatacagcccttcgacatggaccacccgccggtgcgccaaaccagagacccgctgatgaacaagagcaacttcacctcatacgccgccagcgcaagttggcatcaagagatactggcggcggcggagcgggcgagaaaacatatcaaccgttttatgggcggattgatagaaatatccaatcccaacgccgagataatgataatagcctccggcaccgcggcgtcgcaaagcagggaggcaatacgggcattagagaaagatggaataaccgccggactgataaaagtgaaatccgtccgcccgttcccaacaagggaaatcatttccgcgacggaaaaagccaagttgatagcagtacctgagttcaacgcgggcgggtggttagcgagagaggtcaaggcgtcattaaacaacaatgaccgcgtactagccggcccaagagtctttgggggaatggcgttgccaagcgaggtcattgtcggggagataaaaaaatgtctatcaacgcggtaa

SEQ ID NO: 37966 - protein, 236 aa, Unknown
  Obtained from environmental sample
  DOMAIN (120)...(232): Transketolase, C-terminal domain
  misc_feature (1)..(236): Xaa is any amino acid
MLMFHAENAQDFFDMILAAYAIAEQPEVHLPAGVFADGFFVTHTREVVMLPPDDIKLHAYSPDIAPIQPFDMDHPPVRQTRDPLMNKSNFTSYAASASWHQEILAAAERARKHINRFMGGLIEISNPNAEIMIIASGTAASQSREAIRALEKDGITAGLIKVKSVRPFPTREIISATEKAKLIAVPEFNAGGWLAREVKASLNNNDRVLAGPRVFGGMALPSEVIVGEIKKCLSTR

SEQ ID NO: 37967 - DNA, 1122 bp, Unknown
  Obtained from environmental sample
  misc_feature (1)..(1122): n is a, c, g, or t
gtgttgggaagggtttacgaatacttccttggtcagtttgcccttgctgagggcaagaagggcggacagttctatacgccgcgctgtgttgttcaattgcttgttgaaatgctcgaaccttttgaagggcgtgtactcgatccctgttgcggttcaggcggtatgttcgttcaaagtgagaagtttatcgaagctcacgccgatcgatacaatggtaaagcaaaggaaattgacaagctgtttgaaagcgttgtgtctatttatgggcaggaaagcaatcaaactacatggcggttgtgcaagatgaaccttgccttacgcggcatcgacagttccaatgtaaaatggaataacgaaggttctttccttaacgacgctcatcccgatcttaaagcagattttgttattgccaatccgccgttcaacgacagcgactggtcgggcgatatgctccgtacggatggccgctggcagtacagccgcgaaacgccgccgccttacggcaacgcaaactacgcatggatacagcacttcgtctatcatttaaatccgaaaggttccgccggatttgtacttgctaaaggctctctttcatcaaaaacgaatggtgaagataaaatccgcaaggctctaattgacgaggggcttgtggattgtattgttaatttaccgacgaaactgtttctcaatacacagatacccgcttgtctatggtttctttgccgcgccaaggagagtgataaaaaacactcaagacgcgataaaattctgtttatagacgcgcggaatatgggctcgcttatcagccgaaaaacacgcgaactaactgaaaaggatacccttacaatagcggacacttaccatacatggaaatccggcaaaggttataaagatataccgggattttgcaaatctgcgcttgtcaccgaagtcgccgctcttgattatgttctcacgccggggcggtatatcggcttacccgatgacgaagacgatttcgacttcgcggaacgggtgaaaactttgaccgccgaactggaagcgcanatgaaggaaagcgttttgcttgacaagcgtatccgcgacaatctggcgaaagtggatggagtaaaaaaaggataa

SEQ ID NO: 37968 - protein, 373 aa, Unknown
  Obtained from environmental sample
  DOMAIN (1)...(332): N-6 DNA Methylase
  misc_feature (1)..(373): Xaa is any amino acid
MLGRVYEYFLGQFALAEGKKGGQFYTPRCVVQLLVEMLEPFEGRVLDPCCGSGGMFVQSEKFIEAHADRYNGKAKEIDKLFESVVSIYGQESNQTTWRLCKMNLALRGIDSSNVKWNNEGSFLNDAHPDLKADFVIANPPFNDSDWSGDMLRTDGRWQYSRETPPPYGNANYAWIQHFVYHLNPKGSAGFVLAKGSLSSKTNGEDKIRKALIDEGLVDCIVNLPTKLFLNTQIPACLWFLCRAKESDKKHSRRDKILFIDARNMGSLISRKTRELTEKDTLTIADTYHTWKSGKGYKDIPGFCKSALVTEVAALDYVLTPGRYIGLPDDEDDFDFAERVKTLTAELEAXMKESVLLDKRIRDNLAKVDGVKKG

SEQ ID NO: 37969 - DNA, 927 bp, Unknown
  Obtained from environmental sample
  misc_feature (1)..(927): n is a, c, g, or t
ttgttctgcatcttggaaaatagccgaattaaaactggagaaggcaaaaccttgatggtcgtggccgcggcgtacctaaacgcgattcccggggacggcattcatgttgtcaccgtaaacgattatcttgcggaacgcgacgcaggatggatgttgccaatatttagttacctcggcatcagcgtcggtacgattctttcccacatggacaacgatgtgcgcaaggagaattacaaatgcgacgttacttatggcacaaacaatgaatttggctttgattacttgcgcgacaatatgcaccgtgatatggaaagcagggtacagcgcggacataatttctgtatagttgatgaaatcgattcaattttaattgacgaagcgcgtactccattgatcatctcaggcgcggcggaggacgacacatacaaatttgccgaagttgacaaaatgataggcgcccttaaagaagttgaaaaaaaagaaaacggcgaatatcccgacgaaactcagggtgaaacggttataggcgattataaattaaacgagaaaaataaaagcgtttctttttccaatcaggggcaggccactatcgaggaattgttaaaaaaacgtgggcttattcaaggagcgatagtagacgaagaaaactttgagtatattcactattttacccagagcttaaaggcgcataaactttttcacatcgacgttgattatgtcgtacaggacgggcaggttcagattgtcgatgaatttacggggcgtatcttgcatggcaggcgttattctgacgggcttcatcaggctattgaggctaaggaacggattaaattgcccagcgcaacagactctggctactatcacttttcaaaattatttcaggctgtacaaaaaatctccagcatgacgggaacggcggatacctga

SEQ ID NO: 37970 - protein, 308 aa, Unknown
  Obtained from environmental sample
  DOMAIN (1)...(308): SecA DEAD-like domain
  misc_feature (1)..(308): Xaa is any amino acid
MFCILENSRIKTGEGKTLMVVAAAYLNAIPGDGIHVVTVNDYLAERDAGWMLPIFSYLGISVGTILSHMDNDVRKENYKCDVTYGTNNEFGFDYLRDNMHRDMESRVQRGHNFCIVDEIDSILIDEARTPLIISGAAEDDTYKFAEVDKMIGALKEVEKKENGEYPDETQGETVIGDYKLNEKNKSVSFSNQGQATIEELLKKRGLIQGAIVDEENFEYIHYFTQSLKAHKLFHIDVDYVVQDGQVQIVDEFTGRILHGRRYSDGLHQAIEAKERIKLPSATDSGYYHFSKLFQAVQKISSMTGTADT

SEQ ID NO: 37971 - DNA, 738 bp, Unknown
  Obtained from environmental sample
  misc_feature (1)..(738): n is a, c, g, or t
ttgatcagtcaaatttcaccgtgtccaaggcaaaaccgttgccagttttcctcttgctgggatgtcagcggttcaatgaatgaaagcgtcgggggcgaagcctcgaaaattcaggttttgaatgaggctgtcaaacaaatgatcgattcgtttgcggacgaagaaaaaatggagactgaatttctggtttctataatcaccttnggcggcacggcagaaaactatcttatgccgacagcggcttcgactgtcaaatggacggacatgacggccaatggcagtacgccgatgggagaagcgttttcaaaggcaaagctcttgattgaagacaaagaggttataccgtcccgcgcgtaccgtcctacggtggtattggtttcagacggagcaccgactgataattgggaagggtcgctggaatctttaattaccgacggccgctcttccaaatgtttttttatggcaatgggtatagggcaagatccgggtacaaaggttcttgaaaagttcatctcccaaaccccggtactggctgaagtaaacggcaataaaatcccgaataaagtgtttcacgcggctgacgcaaaaactattcatgagtttttccgtaaggtaacaatgtcggtaactacccgcagcaaatcgcaaaacccaaataatattccggcatcgtcaaattcatctgataaagacgcgggttactggtattggctcaaatggtcagagaccttgaattaa

SEQ ID NO: 37972 - protein, 245 aa, Unknown
  Obtained from environmental sample
  misc_feature (1)..(245): Xaa is any amino acid
MISQISPCPRQNRCQFSSCWDVSGSMNESVGGEASKIQVLNEAVKQMIDSFADEEKMETEFLVSIITXGGTAENYLMPTAASTVKWTDMTANGSTPMGEAFSKAKLLIEDKEVIPSRAYRPTVVLVSDGAPTDNWEGSLESLITDGRSSKCFFMAMGIGQDPGTKVLEKFISQTPVLAEVNGNKIPNKVFHAADAKTIHEFFRKVTMSVTTRSKSQNPNNIPASSNSSDKDAGYWYWLKWSETLN

SEQ ID NO: 37973 - DNA, 378 bp, Unknown
  Obtained from environmental sample
  misc_feature (1)..(378): n is a, c, g, or t
atgaatgttgttgattcttcctgttggctagaatatctcatggatacggaaataggcgcggctgtcgctcctgttatagaaaatcccgacgaactaattgtccctaccataaccttgtatgaagtctataaaaaattgttaatcgaaaagggagaagaatatgcattgaatgttgtttcatatatgcagacaggtacggtaattgaacttaatgccgatttaagcctttccgccgcagaaataagccggaaacataaactggctatggctgatagtattatttacgcaacgtcattgcactattcaacggttgtattttcatgtgataaacacttcaaagactttcccgatgttcggtattttcctaaaactaaatag

SEQ ID NO: 37974 - protein, 125 aa, Unknown
  Obtained from environmental sample
  DOMAIN (2)...(120): PIN domain
  misc_feature (1)..(125): Xaa is any amino acid
MNVVDSSCWLEYLMDTEIGAAVAPVIENPDELIVPTITLYEVYKKLLIEKGEEYALNVVSYMQTGTVIELNADLSLSAAEISRKHKLAMADSIIYATSLHYSTVVFSCDKHFKDFPDVRYFPKTK

SEQ ID NO: 37975 - DNA, 1479 bp, Unknown
  Obtained from environmental sample
  misc_feature (1)..(1479): n is a, c, g, or t
ttgccagacggtcttaccaaggttggctcccaagcactagccgatttggatgcagtaaaagaatacatgaccaagcaaacccgtggcctcgcggacgttgccgcgtcaagtgcatcatcaagcgaaagccaggcaaccgtcatcctagtggttgttattcttatcgccatcgtcctcggcatatacctaaccatgtccataaccgcccctctgtcaaggacggttggcaccctcggcaagatagagaaaggcgacatgaccgtccgtgtgaacttggagcgcggggacgaattcggtcagctctccaaatccgtggacaacgttgcctccaagcttcaaagcataatgaaagacctgcacgttgagtccgacagcctcgcaacctctgccgaggagctttccgtgataagcaagcagctcgtgaccaactcagaagaaacagcgggcaaaagcaagactgttttgggcgtaaccgaagatgcgtcaaagggcgtgacctccatagcgagcaccgccgaggaagcctccgctcaaataaccgatgtagccagcgcagttgaagagatgacagtgaacataaacaccatggcaagcaccgccgaagaagcctccgccaacataaacgatgtcgcgaacgccgttgagcaggtagcaatgaacataaacgcgatggcgagcgcggccgaggaagcctccgtgaacgccaacgaggtagcaggtgcagccgagcagatgtccactaatatgagcactatagctgctgcagttgaggagatgagctctagcataaaacaaatatcaagcaatgcaggggaagcaaacaaggtggcaaacgaagctacagtcaaatctaataacgctaccggagtgatgaacaaactcggagtagcagccaaagagatagggcaggttaccgatgtgataaagaaaatagcagacaaaactaaccttttggctttgaacgccacaatagaggcagcttctgcgggcgaagcagggaaaggctttgcagttgttgcaggagaaatcaaagagcttgccaaccaaagcgcacaaagcgcagacgacatagcacggcgcatagagggcattcaggttggcacgggagaagcggttacggttataaacgatgtgtccgatataatagtgaagataaatcagagtgttgaatccatatctggtcatgttagccagcaaacaaaggcgagcaacgagatagcaagcaatgttgcgcaagcaaacacgggagccaagcgcgttgctggtgccataggcgaggtagccaaaggcagcaaagatatagcccgcaatgccggagaggcagcaaggggcataaacgtgatgagccagaatgtagcaggcatggcgcagaatgccaaggatagtgctagagaagccaaggaaatcaatcaggaatcggacgagcttgctaggttggcaggagatcttaaaagcattttgagtcagttcaaggtgtag

SEQ ID NO: 37976 - protein, 492 aa, Unknown
  Obtained from environmental sample
  DOMAIN (45)...(114): HAMP domain
  misc_feature (1)..(492): Xaa is any amino acid
MPDGLTKVGSQALADLDAVKEYMTKQTRGLADVAASSASSSESQATVILVVVILIAIVLGIYLTMSITAPLSRTVGTLGKIEKGDMTVRVNLERGDEFGQLSKSVDNVASKLQSIMKDLHVESDSLATSAEELSVISKQLVTNSEETAGKSKTVLGVTEDASKGVTSIASTAEEASAQITDVASAVEEMTVNINTMASTAEEASANINDVANAVEQVAMNINAMASAAEEASVNANEVAGAAEQMSTNMSTIAAAVEEMSSSIKQISSNAGEANKVANEATVKSNNATGVMNKLGVAAKEIGQVTDVIKKIADKTNLLALNATIEAASAGEAGKGFAVVAGEIKELANQSAQSADDIARRIEGIQVGTGEAVTVINDVSDIIVKINQSVESISGHVSQQTKASNEIASNVAQANTGAKRVAGAIGEVAKGSKDIARNAGEAARGINVMSQNVAGMAQNAKDSAREAKEINQESDELARLAGDLKSILSQFKV

SEQ ID NO: 37977 - DNA, 561 bp, Unknown
  Obtained from environmental sample
  misc_feature (1)..(561): n is a, c, g, or t
atgccctctatgcgccgtgctatgtcgtctgcgctttgtgcgctttggttggcaagctctttgatttctcctgcaacaactgcaaagcctttccctgcttcgcccgcagaagctgcctctattgtggcgttcaaagccaaaaggttagttttgtctgctattttctttatcacatcggtaacctgccctatctctttggctgctactccgagtttgttcatcactccggtagcgttattagatttgactgtagcttcgtttgccaccttgtttgcttcccctgcattgcttgatatttgttttatgctagagctcatctcctcaactgcagcagctatagtgctcatattagtggacatctgctcggctgcacctgctacctcgttggcgttcacggaggcttcctcggccgcgctcgccatcgcgtttatgttcattgctacctgctcaacggcgttcgcgacatcgtttatgttggcggaggcttcttcggcggtgcttgccatggtgtttatgttcactgtcatctcttcaactgcgctggctacatcggttatttga

SEQ ID NO: 37978 - protein, 186 aa, Unknown
  Obtained from environmental sample
  SIGNAL (1)...(27)
  misc_feature (1)..(186): Xaa is any amino acid
MPSMRRAMSSALCALWLASSLISPATTAKPFPASPAEAASIVAFKAKRLVLSAIFFITSVTCPISLAATPSLFITPVALLDLTVASFATLFASPALLDICFMLELISSTAAAIVLILVDICSAAPATSLAFTEASSAALAIAFMFIATCSTAFATSFMLAEASSAVLAMVFMFTVISSTALATSVI

SEQ ID NO: 37979 - DNA, 1284 bp, Unknown
  Obtained from environmental sample
  misc_feature (1)..(1284): n is a, c, g, or t
atgcgaatatttctagccgctatatttgtggtttcaattgcttttgcgcaagatacactgaaaatttcaaaaatttatattcactcgaaagatgtttttgaagatgctgtagtcaaaacgcctgtagaagagaatttatacagatttgggaattggttccatataaacacaagggagtcggttataaggggcaggctcccttttgaagagggtagcgtaatatcgctgagggaaattcaagaggcagaaagaaatttacgcgctttgccttatatttcagatgctagaattgaagctataccggactcgcttggatacatagacctatatgtggagacaagtgataactggacttttgcgccagctttttcacttggaaaaccaggtgaggaatggctttggtcaatagggcttttggaaaataatttgctagggtttggacatacggttggttttttttatgaacataaagaagatagagatcaaaaatatctgctttacaaaagcgaggattttttagttccatataataagtttggttttttattgagcgaaaatacagacggattttccaggagtttggagctaggctatccgttcatcagccgttcaaaaaatcagtggtcgtacaatgcggagttgctttggtcaaaaagagatgaaaaatattatgagagcaaaaatccaatacctatagcggtagcagaaggtttaaaagaagattctttgtctctatggctttcgcgttcctttggcggttcttcgtttaaaacatatttgggtgcggggtatgatttttatagaattgatgacggagaattgaaaacggagaataattctagacttggttttagcttggcggcaagccgtatccgcttggataaaagatataatttgcatcgcgtgaaatgggcggaagatgtggaatacggttattacatcaaaggcgtagttgggaaaaatttcaaggaattaaaagcgatggacgatgattggttttttgagcataaaataaacctgtcacttggcacaagagagcattattttatggcaaacgagcgaagcctattttactataacggcgattccatcagagatatgtttagcacagtggtcagcgaatatattttcaagcctactttagcatggtcttcggttttgaaagcggaaataatttcttggcaaaaaagcagttatacgcgccagctatatttggatggcagcaacattttccctgggtttcctgcacgctatctagtgggtggaaaatacttttgcttttaa

SEQ ID NO: 37980 - protein, 427 aa, Unknown
  Obtained from environmental sample
  SIGNAL (1)...(16)
  misc_feature (1)..(427): Xaa is any amino acid
MRIFLAAIFVVSIAFAQDTLKISKIYIHSKDVFEDAVVKTPVEENLYRFGNWFHINTRESVIRGRLPFEEGSVISLREIQEAERNLRALPYISDARIEAIPDSLGYIDLYVETSDNWTFAPAFSLGKPGEEWLWSIGLLENNLLGFGHTVGFFYEHKEDRDQKYLLYKSEDFLVPYNKFGFLLSENTDGFSRSLELGYPFISRSKNQWSYNAELLWSKRDEKYYESKNPIPIAVAEGLKEDSLSLWLSRSFGGSSFKTYLGAGYDFYRIDDGELKTENNSRLGFSLAASRIRLDKRYNLHRVKWAEDVEYGYYIKGVVGKNFKELKAMDDDWFFEHKINLSLGTREHYFMANERSLFYYNGDSIRDMFSTVVSEYIFKPTLAWSSVLKAEIISWQKSSYTRQLYLDGSNIFPGFPARYLVGGKYFCF

SEQ ID NO: 37981 - DNA, 1527 bp, Unknown
  Obtained from environmental sample
  misc_feature (1)..(1527): n is a, c, g, or t
ttgcgagccgaacggaagcgcggaaaggcattgcgggaacttctgcttgaaaaagaggcaatggcgccgcttacgcggtttacgcaaagcgagttggagcgggcaaagttgaatcttttatcgtatatggaaaaacagttatcggaaaaagacaggaaggattcgcgttcatatatcagggattttacttcccactttttgtacggggaagacatggcggacgttgaatgggaaatgaacgccgttaatgccatgcttcccggaattggattaaaagaaattcggtctgccgcgaaaaaatatttttcgtataacgactgtaccgtctttttaatcgctcctgccgcagaggctggaactttaccttccaaagaacgcataaaggcgatttttgcggaggcggaaaagacggcaattacgcccagaaaagaagaatctcttaaagatgaattgttggataccgttccgccaaaggggagtattacaagcgaggttacggacagggaaacgggagcggtaattcttactttaggcaacggggcaaaggtaattcttaaagagacaaaaaataaaaacaacgagattgtcatgtacgcaatggcgaggggagggacaataaacgcttccgacagtgaatatgtttccgcaagcctcgcttcggaaatgataacggcttcaggtcttggcccttattcgcgcgtggaacttattaacaggctggccgggaaacaggtttcagcttctttctggacttcgacttattaccgcggctttcagggggcgtccaccacaaaagacataaaaacgctttttgaaatgatatacatgttctttaccgaaataaatttggatgaaaaagcggtagccgccatgcttgatcaatacaaaacaactcttgcccatcaggaagaagatcccgacaaatatttttcacgcgagttaagaaaaatattaagcggcaaccatccgcgctttaagccgctggaacttgccgatttaagtaaagtttcaatagagcaggcgttttcgtttattaacagatgcataaaccccgccgattatacttttgtatttaccggaaatctaaagttaaatgaaatgaaggatcttgccgcaggctttatcgccggtattccaaacgcgccgtctatgaacacatgggttgatcccagagtaacgcggccggtaaatattgaaagaaaactttacaaaggcaaggaagaaaagtgttccgtataccttagctggttcgcttcgggacccgccgcttttgacgaaagcaggaatcagacagcggcggttctttccgaatatcttgacattttattaaccgatgaaatccgcgaaaaactaagcggagtatattcgatttacgccgatgcgtctgtctctttaatacctaaaggcgaatacgagcttgttgtctatttccaatgcaatcccgcgcgcgtaaacgagcttatagccgctgtagaagagcgcataacgngaatctgtacgaaacgcttaatcaggatacgtaaataa

SEQ ID NO: 37982 - protein, 508 aa, Unknown
  Obtained from environmental sample
  DOMAIN (335)...(507): Peptidase M16 inactive domain
  misc_feature (1)..(508): Xaa is any amino acid
MRAERKRGKALRELLLEKEAMAPLTRFTQSELERAKLNLLSYMEKQLSEKDRKDSRSYIRDFTSHFLYGEDMADVEWEMNAVNAMLPGIGLKEIRSAAKKYFSYNDCTVFLIAPAAEAGTLPSKERIKAIFAEAEKTAITPRKEESLKDELLDTVPPKGSITSEVTDRETGAVILTLGNGAKVILKETKNKNNEIVMYAMARGGTINASDSEYVSASLASEMITASGLGPYSRVELINRLAGKQVSASFWTSTYYRGFQGASTTKDIKTLFEMIYMFFTEINLDEKAVAAMLDQYKTTLAHQEEDPDKYFSRELRKILSGNHPRFKPLELADLSKVSIEQAFSFINRCINPADYTFVFTGNLKLNEMKDLAAGFIAGIPNAPSMNTWVDPRVTRPVNIERKLYKGKEEKCSVYLSWFASGPAAFDESRNQTAAVLSEYLDILLTDEIREKLSGVYSIYADASVSLIPKGEYELVVYFQCNPARVNELIAAVEERITXICTKRLIRIRK

SEQ ID NO: 37983 - DNA, 480 bp, Unknown
  Obtained from environmental sample
  misc_feature (1)..(480): n is a, c, g, or t
atgaaagccgcgatactttttggttcaaaatctgacgcgcagacaatgaagaaggcggcggatgtttttaaggagttcggcgtttcttatgattcatatacggtttcggcgcaccgaagcccggaactgcttgccgaaattcttggcgccctggaatcagggggtacggaagtgataatcgccggcgccggtcttgcggcccaccttcccggcgtaattgccagccagacgcttatcccggttatcggagtgccaatcggttccggcgggctgggcgggctggacgcgctgctttccatcgtgcaaatgcccaaacagattcccgtagcgactgtcggcattgacaacgcggcaaacgccgcctatcttgcctgtgaaattctcgcggtaaaataccccgaattgaaaaaatcattaacagaattcagaaaaaaaatgaaagaagatctcgctaaagaaagcgggaaaacggaattatga

SEQ ID NO: 37984 - protein, 159 aa, Unknown
  Obtained from environmental sample
  DOMAIN (1)...(157): AIR carboxylase
  misc_feature (1)..(159): Xaa is any amino acid
MKAAILFGSKSDAQTMKKAADVFKEFGVSYDSYTVSAHRSPELLAEILGALESGGTEVIIAGAGLAAHLPGVIASQTLIPVIGVPIGSGGLGGLDALLSIVQMPKQIPVATVGIDNAANAAYLACEILAVKYPELKKSLTEFRKKMKEDLAKESGKTEL

SEQ ID NO: 37985 - DNA, 771 bp, Unknown
  Obtained from environmental sample
  misc_feature (1)..(771): n is a, c, g, or t
atggacgagcaacggtgccatattttggatttaacgcagcacacatcagaagatataaacacattttttttgcgtgccctcatggaatgcgagagcgatgcagttccaaaaataaaagagcatttttccaaaatggaaaaagaaaaatccatgcagtggcaattatacgatgccgaacacaaaaccagactcgcgctctttggttccaacaccgatcactgcctttacgaacttttgctctctcgcagagatggtgccttgccttgcgaatttacctgcataatttcaaaccacgcagttttagaaccacttgcaagatttttcaacctgccattctttttggttccaagcactctcccaaaacctgagcaagacaaaaaattcaacgaaattttgcacgcttcgcaaacagagggaattgtgctcgcccgctatatgcaaattatgagcaaggagttcacagaggagtggaatgagcgcataataaatatacaccacggttttttgcctgcgttcaagggtgcaaaaccctatcaccaagcctgggcaaagggtgttaagataataggagcaactgcgcatttcgcaacagcagatttagaccaaggtccaatcatttggcagggtgttcagcaagttgcagacacaggcagcattgagcagttcattcaaattggcaaagaggtggaaaagcgcactttgttacaggctctaaaactttggttggaacacagggtatttttgcacgaagggcggacttttgttttgtag

SEQ ID NO: 37986 - protein, 256 aa, Unknown
  Obtained from environmental sample
  DOMAIN (62)...(238): Formyl transferase
  misc_feature (1)..(256): Xaa is any amino acid
MDEQRCHILDLTQHTSEDINTFFLRALMECESDAVPKIKEHFSKMEKEKSMQWQLYDAEHKTRLALFGSNTDHCLYELLLSRRDGALPCEFTCIISNHAVLEPLARFFNLPFFLVPSTLPKPEQDKKFNEILHASQTEGIVLARYMQIMSKEFTEEWNERIINIHHGFLPAFKGAKPYHQAWAKGVKIIGATAHFATADLDQGPIIWQGVQQVADTGSIEQFIQIGKEVEKRTLLQALKLWLEHRVFLHEGRTFVL

SEQ ID NO: 37987 - DNA, 828 bp, Unknown
  Obtained from environmental sample
  misc_feature (1)..(828): n is a, c, g, or t
atggcaggcagggttttggctgtttattttggtgacgggcaaaacgtgaaagctggtcagaatttggtgagaatagacgatgcaaacttacgcgcagcagttataaaagccaattcaaaactcgctttttccagaagtaccgcacgtagaaaaaaacagcaatttgatgcaaaagcaatttctgcacaggagtgggaacttgttgaagcagatttgcaaacaacggaagcagattccatagatgccgcagcaaacttagcaaaagccacaattcgcgcaccctttgacggaaaactcggcattggcaaaataaatttgggaaaaaggcttgcggttggcgaatccattgtaaaaatagttcaaaaatatcccttgaaagttgatttttctgttgcagacaaatatgctcctattctgaaagtcgggatggatgtggaaattaaccgtgccggaaaaaattataaagcaaaggttgatgctttggagagttcattggatgcttctaccagaactttgctagcaagagcaattatagttgataatcccgaagaccttgtgcctggtgctcctcttgaattttcgctgaatttgccgtcaagggaatcgctcactgttccgccagaggcaataggcagcgatgcgcttggcagtaccgtgtatttatacaaaggcggcaaagcgaaacttgctcgcatagaaataggtactcgctttgtggacaaagttgaagtgctttccggtgtgagtgcaggcgacaccgttttgtgcgttggcgcatcaccggtgagagatggcggtgcggtggagataagcaggatgagaaggtaa

SEQ ID NO: 37988 - protein, 275 aa, Unknown
  Obtained from environmental sample
  misc_feature (1)..(275): Xaa is any amino acid
MAGRVLAVYFGDGQNVKAGQNLVRIDDANLRAAVIKANSKLAFSRSTARRKKQQFDAKAISAQEWELVEADLQTTEADSIDAAANLAKATIRAPFDGKLGIGKINLGKRLAVGESIVKIVQKYPLKVDFSVADKYAPILKVGMDVEINRAGKNYKAKVDALESSLDASTRTLLARAIIVDNPEDLVPGAPLEFSLNLPSRESLTVPPEAIGSDALGSTVYLYKGGKAKLARIEIGTRFVDKVEVLSGVSAGDTVLCVGASPVRDGGAVEISRMRR

SEQ ID NO: 37989 - DNA, 525 bp, Unknown
  Obtained from environmental sample
  misc_feature (1)..(525): n is a, c, g, or t
ttgatgcggacgtctgccgcataccatagggaaagcgttaccagcattgggagggatgcttttaaaggttgcgccagccttaccagcgtaaccataccgaacagcgttaccagcattgggcaacaggcttttttctcttgcgccagccttaccagcgtaacattacctaccaacgccagttttaccagcattgaacctcgtgcttttgccaattgcaccagccttaccagcgtaaccataccgaacagcgttaccagcattgggggtgccgctttttataattgtaccagccttaccagcattataatacccaacggcgttaccagcatcgggaatcaagcttttgacacttgcaccaaacttaccagcgtaacatttgaaagagcggatactcctgttcttggcaccccgtttattgacgctgataacacgacatctttgcaaacggcgtacactgccggaggcatagggacatatacgaggccggacacgacaagcacaacgtggacgaaacaacaggaataa

SEQ ID NO: 37990 - protein, 174 aa, Unknown
  Obtained from environmental sample
  misc_feature (1)..(174): Xaa is any amino acid
MMRTSAAYHRESVTSIGRDAFKGCASLTSVTIPNSVTSIGQQAFFSCASLTSVTLPTNASFTSIEPRAFANCTSLTSVTIPNSVTSIGGAAFYNCTSLTSIIIPNGVTSIGNQAFDTCTKLTSVTFERADTPVLGTPFIDADNTTSLQTAYTAGGIGTYTRPDTTSTTWTKQQE

SEQ ID NO: 37991 - DNA, 540 bp, Unknown
  Obtained from environmental sample
  misc_feature (1)..(540): n is a, c, g, or t
gtggcgcgtaccacacgggaaaaaaccataggggctacatcctgcctgccactgatacccggcgtgggattgggcagttcgggtatgttgcgcggcggtggaggtggcggcggcggttcttctaccggcggcttttcttcttcaacaggcggcggaggcggggacggtgggggtactggtctcgccgctaccggaggaggcgtggttacctgcggcggtgtttgcggcggcacttgcggtggcgcactcggcggttccggcttaggaacggaaattacgggcgggggcggcgggggaggaggaggctccggttcgggaacaacggccaccaccggcggttccggctcaataacttctaccggaggttcttcctccgccagaacgggttcttcaatcgtatcttcgacaataacttcttcagtttcttctataaaaacgtcagcttcaacgacctcttcgggaatttcgggaataggctccgccgggggcggcggggctacgctttcaggcgcttccggagcaatgctgtctgttttctga

SEQ ID NO: 37992 - protein, 179 aa, Unknown
  Obtained from environmental sample
  misc_feature (1)..(179): Xaa is any amino acid
MARTTREKTIGATSCLPLIPGVGLGSSGMLRGGGGGGGGSSTGGFSSSTGGGGGDGGGTGLAATGGGVVTCGGVCGGTCGGALGGSGLGTEITGGGGGGGGGSGSGTTATTGGSGSITSTGGSSSARTGSSIVSSTITSSVSSIKTSASTTSSGISGIGSAGGGGATLSGASGAMLSVF

SEQ ID NO: 37993 - DNA, 702 bp, Unknown
  Obtained from environmental sample
  misc_feature (1)..(702): n is a, c, g, or t
ttggcggaggctgtctttgaaacccttgccaatctcttcccttccaggtatgtgcatataggcggggatgaagtgcttttcaaccgctgggcggaatgtcctaagtgccgaaggcggatggcggagcttggccttggcgaagccgcacagctgcaaagctggattacctcgcgccttgcccaaatgctccataagcatggcaagaccgccataggttgggacgaagtcctggaaaacacagaaaaatttccgctcccccaggatatgattgtccagtcatggcgcggcgaggaaggcggcaacaaagcgacctcacttggtcactgcgtcatcatgtcgccggtaactaacggttgctacctggattccaaggccattaaccagccggaagaaatgggcaggctcagtgttggcaccatagcccagggttttagttttgatcccgtaacggaaaaaatggacgaagctgccgcttctctggttttgggcgggcaggggaacctctggtcggaagttatctatgcgggaaaaatcgctgagtacatgatcttccctaggatctgcgccatagccgaagccctctggtcgagaaggaaatcaaagacagcgcctgacctggcggaatttgccgggcggctggcggttcatcaaagtcggcttgataagctgggactgctgcaataccgcggaccgcttgggtaa

SEQ ID NO: 37994 - protein, 233 aa, Unknown
  Obtained from environmental sample
  DOMAIN (1)...(198): Glycosyl hydrolase family 20, catalytic domain
  misc_feature (1)..(233): Xaa is any amino acid
MAEAVFETLANLFPSRYVHIGGDEVLFNRWAECPKCRRRMAELGLGEAAQLQSWITSRLAQMLHKHGKTAIGWDEVLENTEKFPLPQDMIVQSWRGEEGGNKATSLGHCVIMSPVTNGCYLDSKAINQPEEMGRLSVGTIAQGFSFDPVTEKMDEAAASLVLGGQGNLWSEVIYAGKIAEYMIFPRICAIAEALWSRRKSKTAPDLAEFAGRLAVHQSRLDKLGLLQYRGPLG

SEQ ID NO: 37995 - DNA, 648 bp, Unknown
  Obtained from environmental sample
  misc_feature (1)..(648): n is a, c, g, or t
atgaaaaccattctttgctacggcgattcaaatacctggggttatgatccaaaaaagcaatgccgccatgattacaaaacgcgctggcccatggctctaaaaaacatccttaacaagaacgctccccaaaatgaacctgaatggtgggtggtggaagaaggtttgagcggaaggacaagctgccgggaagaccaaatagaaggcgataaaaacgggctgcgccagctgctgcccattctggaaagccacaagcctatagaccttgttgcggttatgctgggaaccaacgatcttaagcccagattcaacccgtctccctatgacatcgcgcagggcgtgaaaaatattgctgttgcgattcaaaagacagattttggcccagacaataaagcccccaaagttttgataatttgcccgccgccaactttggattgttcggcattaaagcagatctttggggacagcgcggagctttccaaaaagttgccgtttttctacaaagcctgcgcggccgaatgtggcgctgcttttcttgacgccggcaaatacatcaagtccagccctgtcgacggtgtccacctggaatcagaagcgcagctcgttttggctgaagcggtcgctgaaatcgtgaagagtcttttcgcttaa

SEQ ID NO: 37996 - protein, 215 aa, Unknown
  Obtained from environmental sample
  DOMAIN (4)...(206): GDSL-like Lipase/Acylhydrolase
  misc_feature (1)..(215): Xaa is any amino acid
MKTILCYGDSNTWGYDPKKQCRHDYKTRWPMALKNILNKNAPQNEPEWWVVEEGLSGRTSCREDQIEGDKNGLRQLLPILESHKPIDLVAVMLGTNDLKPRFNPSPYDIAQGVKNIAVAIQKTDFGPDNKAPKVLIICPPPTLDCSALKQIFGDSAELSKKLPFFYKACAAECGAAFLDAGKYIKSSPVDGVHLESEAQLVLAEAVAEIVKSLFA

SEQ ID NO: 37997 - DNA, 681 bp, Unknown
  Obtained from environmental sample
  misc_feature (1)..(681): n is a, c, g, or t
atggaatcggactttgactgggagcaaatttttaaagacgcaaattggtttcactttacggggataacgcccgcgctttcagataacgcggcttcaatctgtatggcggcgtgcaaggcggcgcgctcaaagggcattaccgtttcctgcgacataaattaccgcgctaatctttggactagagagaaagcccgcgatgttatgggcaaacttatggagtacgctgatatttgtatagcgaatgaagaagacgccgccgatgtctttggcattaaagcgtcgggaagcgacgtgacaaccggaaaaatcagccatgacgggtataaagaagtagccgccgcccttattaaaagatttaattttaagcaagctgcaattacattaagggaatcaatatcagctaacgacaacaactggggcgcaatgctttgtacgggtaatgatttttatttttccaaaaaatacgctgttcatatcgtggatagggtaggcggcggcgacagtttcggcgcggggttaatctacgcgaatcttcagaacatgcctcccgaagaagggctggaatttgcagttgcggcaagctgtttaaaacacacgattgagggcgatattaattatgtttccgtcgatgaagttaaaaagctggcgtcaggcaacgcgtcgggaagagtgcagaggtaa

SEQ ID NO: 37998 - protein, 226 aa, Unknown
  Obtained from environmental sample
  misc_feature (1)..(226): Xaa is any amino acid
MESDFDWEQIFKDANWFHFTGITPALSDNAASICMAACKAARSKGITVSCDINYRANLWTREKARDVMGKLMEYADICIANEEDAADVFGIKASGSDVTTGKISHDGYKEVAAALIKRFNFKQAAITLRESISANDNNWGAMLCTGNDFYFSKKYAVHIVDRVGGGDSFGAGLIYANLQNMPPEEGLEFAVAASCLKHTIEGDINYVSVDEVKKLASGNASGRVQR

SEQ ID NO: 37999 - DNA, 447 bp, Unknown
  Obtained from environmental sample
  misc_feature (1)..(447): n is a, c, g, or t
gtggagattgcttctcatctccgatgttatgattgccggcagatggcgcttgaccccgctcatgcggaacaactgctacgtgaaaaacgcaaggcttgcggttccgtgcgcggcacgcgccttgctctcgaagcgccggaaagcgaaaccttccttgacgccgctttccaaagaggccattcccccgctatgcaaacttcccgactcgtcaagctccttgacctgttcggtcgcgacgaactccgcattgccattatcgaagcccttgagcgtaacactcctgacgcctcttccgtcgctttcattctcaatcgccgacaccgccaatccattcgtcgttcctcaatgcccgtcgacctaacacgacgtcccgaattacaggcctttcatgttcatcctcatagcacggaggtttacgatgagctcatctctaacaattcaaaataa

SEQ ID NO: 38000 - protein, 148 aa, Unknown
  Obtained from environmental sample
  misc_feature (1)..(148): Xaa is any amino acid
MEIASHLRCYDCRQMALDPAHAEQLLREKRKACGSVRGTRLALEAPESETFLDAAFQRGHSPAMQTSRLVKLLDLFGRDELRIAIIEALERNTPDASSVAFILNRRHRQSIRRSSMPVDLTRRPELQAFHVHPHSTEVYDELISNNSK

SEQ ID NO: 38001 - DNA, 804 bp, Unknown
  Obtained from environmental sample
  misc_feature (1)..(804): n is a, c, g, or t
atgttcatcctcatagcacggaggtttacgatgagctcatctctaacaattcaaaataacgacctcgcctcacgtctggccggcattagtctaaagtctttggctctaaaccttgacgtttttctctcccaggccgctaataaccattggtctcccacaactgttcttgatgaactttgcaatatcgaaatcaacgagcgttccaaactcagcctccaacgccgtctccaattagccggcatcggtcgctttaaacacatctccgatttcgactggaactggccccgcaaaatcgaccgcgacatcatctctcacgccctttccctcgacttcatccaccaagccagaaacatcattctcctgggcggtaacggtctcggtaaaaccatgatcgctaagaacatcgctcatgccgccgtccttgccggccattccgtcctgttccgttctgccgctgatatcattcataatcttcaatgcgattcccccatgcttcgccgcagaagacttcgcgctttggcctctcctcatgttctcgttattgatgaactcgcctacctctcttatgacgataatgccgctgacctcctttatgaagtcgtcaaccaacggtacgagcgccgttccattattattaccactaaccgcgaatttaacgactggaacctcgtctttcccacgctacctccatctctgctctccttgacagacttactcatcatgccgatatcaccgctattgaaggcgatagctatcgcgtttatgaaagcaaactcgaaatcgcttccagaagaaaggccttaa

SEQ ID NO: 38002 - protein, 267 aa, Unknown
  Obtained from environmental sample
  DOMAIN (116)...(259): NACHT domain
  misc_feature (1)..(267): Xaa is any amino acid
MFILIARRFTMSSSLTIQNNDLASRLAGISLKSLALNLDVFLSQAANNHWSPTTVLDELCNIEINERSKLSLQRRLQLAGIGRFKHISDFDWNWPRKIDRDIISHALSLDFIHQARNIILLGGNGLGKTMIAKNIAHAAVLAGHSVLFRSAADIIHNLQCDSPMLRRRRLRALASPHVLVIDELAYLSYDDNAADLLYEVVNQRYERRSIIITTNREFNDWNLVFPTLPPSLLSLTDLLIMPISPLLKAIAIAFMKANSKSLPEERP

SEQ ID NO: 38003 - DNA, 426 bp, Unknown
  Obtained from environmental sample
  misc_feature (1)..(426): n is a, c, g, or t
ttgaaagagaaaaaatatgaaattggatacgatgtgatcgcaaagacgctgaaagaactgggataccgcttgcagttgaatcagaagatgctgcaagtcgggaaagggcatccggacagggatacgcagtttcagttcatcaataataaagcgaaaaggtttttgaaggcaggtgttcctgtgatctcaattgacgcaaagaagaaggaacacatcggaaactttataaacaagggcagaacataccgaaaaaagaaggatcccgcaaaggtggtagatcatgattttccaatcaaagaactgggtaaagtaaccccgtacggtgtatatgacataggcaggaatgaagggtttgtcaatctgggaatttcttcggacacatcggaattcgcggtagaaagcatatcaaggtggtggttgacgtga

SEQ ID NO: 38004 - protein, 141 aa, Unknown
  Obtained from environmental sample
  DOMAIN (1)...(141): Rhodopirellula transposase
  misc_feature (1)..(141): Xaa is any amino acid
MKEKKYEIGYDVIAKTLKELGYRLQLNQKMLQVGKGHPDRDTQFQFINNKAKRFLKAGVPVISIDAKKKEHIGNFINKGRTYRKKKDPAKVVDHDFPIKELGKVTPYGVYDIGRNEGFVNLGISSDTSEFAVESISRWWLT

SEQ ID NO: 38005 - DNA, 324 bp, Unknown
  Obtained from environmental sample
  misc_feature (1)..(324): n is a, c, g, or t
ttgcagcaattggcaaaccagagcggccttgaaatccatgtatcacatttcccgccgggaacaagtaaatggaataaagtagaacacaggatgttctgctacattaccagccattggaagggtcaaccattaataagcgttgagacggttatacagttgattggcagcacaacaacaacgaccggattgaaaatcatttgtgtgaaagatgatactgtttacaagattggtataaaagttaatgatgaggattttgcgacaataaatataaaaaatttgcaaacattgcctgcatggaactatatcatcttccctaacaaatag

SEQ ID NO: 38006 - protein, 107 aa, Unknown
  Obtained from environmental sample
  misc_feature (1)..(107): Xaa is any amino acid
MQQLANQSGLEIHVSHFPPGTSKWNKVEHRMFCYITSHWKGQPLISVETVIQLIGSTTTTTGLKIICVKDDTVYKIGIKVNDEDFATINIKNLQTLPAWNYIIFPNK

SEQ ID NO: 38007 - DNA, 969 bp, Unknown
  Obtained from environmental sample
  misc_feature (1)..(969): n is a, c, g, or t
atgaaacaggaaaattacagatttggcagatatatcacaaacgacagtaactcacgttgggcggattcggatgaaattaaaaacgcgtctaccataaagcgaattaatatagactccgataattgtcccgccgccggacttccggtaataagcgacggacgcactgtatatgttgataattcggatacgcattcgataatttttggatcaacaggctcaaaaaaaacccgtttattcggaatgcctttaataaatattttagcccttggcggagaatcatttattacgacggatccaaaaggagaattatatgacaagacatctggtctggtcgcggctaaaggatataaaatattcgtattaaatttccgcgatttaaaacagagcgattattggaacccgcttatgcagccgtatgtattataccatagcggacaaacagatgaagctgtatctcttataaatgattttgttaacactattgcggaaactcaaagaagcaacaccaaagatgtatattttattgaattagcctgctctcagattctcgcgaatatgttgttttttatcgctactgcctcgccggaagaagtaaatattttcagttttgccaaattttttatggcaaactcaacgcctgataagacagacagattgtcaaattttactgcggaaggctctatcgcttcaattaattttaaaagcgtattaacaaataaaacggttgaaaaaacttttgcaaatgtaacatcctgtgtagcggctatgttaaatccttttattataaggaaaacgttatgtcaggtgttatcacaaagctcattcgacttaaggagtataggaaataccaaaacagccgtttatgtaattctgccggatgaaaaaacaacgcttcattatctggtaacgatatttataaaacaaacatacgaaactctgataaacgaggcgcaccagagggaaaaatga

SEQ ID NO: 38008 - protein, 322 aa, Unknown
  Obtained from environmental sample
  misc_feature (1)..(322): Xaa is any amino acid
MKQENYRFGRYITNDSNSRWADSDEIKNASTIKRINIDSDNCPAAGLPVISDGRTVYVDNSDTHSIIFGSTGSKKTRLFGMPLINILALGGESFITTDPKGELYDKTSGLVAAKGYKIFVLNFRDLKQSDYWNPLMQPYVLYHSGQTDEAVSLINDFVNTIAETQRSNTKDVYFIELACSQILANMLFFIATASPEEVNIFSFAKFFMANSTPDKTDRLSNFTAEGSIASINFKSVLTNKTVEKTFANVTSCVAAMLNPFIIRKTLCQVLSQSSFDLRSIGNTKTAVYVILPDEKTTLHYLVTIFIKQTYETLINEAHQREK

SEQ ID NO: 38009 - DNA, 1218 bp, Unknown
  Obtained from environmental sample
  misc_feature (1)..(1218): n is a, c, g, or t
atgttcgcatacttcgcaggttatctgaaatcgtatagccaggtaaatgaacaggttgtgtcttcatatctccttataaaggatttagtcagccagtacccttaccttggcacaggcataaagatgaactttctggatcttttcaacaacatcgacaacactgtagaactttttcttaacttaaaagatccgaagctcaaggaagagtttttaaagaatatcaggctgtttataccgcactgggaagatatttatataaacctttttccgcgctatcctcataattccattattcattacatacaaaaggacggccatgcggataaactaaaaactcttacgctcaattgttttgagaatttcagggataacagggattctgtcgttttcctttttaaaaattacagcaacgaacagtggtataaagacgcgaatattccttacgaaaaacagctcatcaccctgattcatgtcatggacatttgtaaccgtgaaattgaaaaccgcagggacaccaccgagaaccgcaagctcagcaaacaggtatacacaatcctctttaaggaaggggtaattaacagttacattgactcggcggatcctgaaacaattacccgcatatatacctttatcaacgatgtcaaagatctggatcctgccgacaagatggatttgcgaaacaggatcactaanaagtatcctgactttaaattcttcggagttgcggaaaaaaagatcacaaatctgggccttttggtaacccttgccaaataccaggaaaagcagaaacagttcgctgctattatcgaagtggatattccggccaattcaaaggaaatcgaatcggcgaagcagcatggcgatctgaaagagaacgcggaatatatcgccgcgagggaaaagcagacccagcttaattccctcgcatccaggttaagcgaagagatcgacagggcgcagatttttgatccctctctggtcaatacttcaagggtttcctttgggacacatgtagtactgctgaataaaagcaacgacaaaaaagaagaatttaccatattaggcccatgggagtccgatccggacaattatatcatttcttatctttcgccttttggaggagctatcttaaacaaggctgtcggcgactatgtcgaatttacaaacaacgatgaaaagacatcgtatttgattgaaggcatttcttcggcattttga

SEQ ID NO: 38010 - protein, 405 aa, Unknown
  Obtained from environmental sample
  DOMAIN (248)...(321): Prokaryotic transcription elongation factor, GreA/GreB, N-terminal domain
  misc_feature (1)..(405): Xaa is any amino acid
MFAYFAGYLKSYSQVNEQVVSSYLLIKDLVSQYPYLGTGIKMNFLDLFNNIDNTVELFLNLKDPKLKEEFLKNIRLFIPHWEDIYINLFPRYPHNSIIHYIQKDGHADKLKTLTLNCFENFRDNRDSVVFLFKNYSNEQWYKDANIPYEKQLITLIHVMDICNREIENRRDTTENRKLSKQVYTILFKEGVINSYIDSADPETITRIYTFINDVKDLDPADKMDLRNRITXKYPDFKFFGVAEKKITNLGLLVTLAKYQEKQKQFAAIIEVDIPANSKEIESAKQHGDLKENAEYIAAREKQTQLNSLASRLSEEIDRAQIFDPSLVNTSRVSFGTHVVLLNKSNDKKEEFTILGPWESDPDNYIISYLSPFGGAILNKAVGDYVEFTNNDEKTSYLIEGISSAF

SEQ ID NO: 38011 - DNA, 351 bp, Unknown
  Obtained from environmental sample
  misc_feature (1)..(351): n is a, c, g, or t
ttgccaagcgatgatgaatgggatgcattggtgacagcggttggagatgcatctaccgcaggaactaaattaaaggctagagacggttggaattcatatagcggcgttccctctggcacagacgagtatggcttttccgcccttccaagtggcggcggcggttcggatggcattttcgacgatgtcggcacccgcggcgcctggtggagttccactgagttctgggacagtccattcggtaacgatagcaactacgccaacgtcaggtctatgagctacatcatcgagttcgtaagctgggcctcccccggtaaggacgacttattcagtgttcgttgcttgcaagactaa

SEQ ID NO: 38012 - protein, 116 aa, Unknown
  Obtained from environmental sample
  misc_feature (1)..(116): Xaa is any amino acid
MPSDDEWDALVTAVGDASTAGTKLKARDGWNSYSGVPSGTDEYGFSALPSGGGGSDGIFDDVGTRGAWWSSTEFWDSPFGNDSNYANVRSMSYIIEFVSWASPGKDDLFSVRCLQD

SEQ ID NO: 38013 - DNA, 990 bp, Unknown
  Obtained from environmental sample
  misc_feature (1)..(990): n is a, c, g, or t
atgaacgccattgccaagcgagtaacaggaacccccgccgccaatgtccaggacatggcccagcgcattgcaagggaagcgcccactctggcggacctgaacagcgagcagcttgagcagatagcccgcatggtaatggcccaaaggcttacgcaggaattgaacgccgccgcgaaccttgccgggataaactacgagaaagaaaaatccgttttcctggccaatgccgggcaaagcgcccacacgcgccggggctacgccgccgcattatcgaggcttgaagcatgggcggcccggcacaacataaacccgcttgggctggcaccggcgcaggccgacgattatatttattccctccggagcgaggcaagcgaaaagaccggcaaggcaaacagccccgcgactgtccgccttacagccgcggcggtttcaagtttttattctttcctgcaccggcggcactccgctattgaaaaccctttccgaggcacgaaagcgcggccaaaagaaaaggccgtccgggaattggcggtccctaccgcaaaagaaattaaaatcatgttgaaggagcttccggcgccggaagccgcagccgcggcgattatggcgggcctgggcatccgcgccggggcgctgccaacgatggagaggcgcggaaaccgctacaaggtttccagcaaaggcaaagagttttttatagacctgtcctcggacatggtaaagcgcataaccgccgcagggctggaccttaaaaagcctttttccggaaggaccgccaacagcatagaactgaaggttgcgtatcacataaagaaacttcaccaggcggggaaaattgccgccgcttattcctgccatgacttccggcactacttcgcggtacaggaatacaaaaaagacagggacatcgtaagggtttcaaagctgcttaaccatgccaatatttctatcactcaaaattacttgcgttccctgggcgtgtcgctatag

SEQ ID NO: 38014 - protein, 329 aa, Unknown
  Obtained from environmental sample
  DOMAIN (66)...(154): Phage integrase, N-terminal SAM-like domain
  misc_feature (1)..(329): Xaa is any amino acid
MNAIAKRVTGTPAANVQDMAQRIAREAPTLADLNSEQLEQIARMVMAQRLTQELNAAANLAGINYEKEKSVFLANAGQSAHTRRGYAAALSRLEAWAARHNINPLGLAPAQADDYIYSLRSEASEKTGKANSPATVRLTAAAVSSFYSFLHRRHSAIENPFRGTKARPKEKAVRELAVPTAKEIKIMLKELPAPEAAAAAIMAGLGIRAGALPTMERRGNRYKVSSKGKEFFIDLSSDMVKRITAAGLDLKKPFSGRTANSIELKVAYHIKKLHQAGKIAAAYSCHDFRHYFAVQEYKKDRDIVRVSKLLNHANISITQNYLRSLGVSL

SEQ ID NO: 38015 - DNA, 516 bp, Unknown
  Obtained from environmental sample
  misc_feature (1)..(516): n is a, c, g, or t
gtggctcgtgctgacccacctctcgcagggccagaccctggccaacatgtcggccctgtccgaggccagcggcctggggcggctgagcgacgtagctttcatgaagcgcctgatcaactgcgacgggtggttcgagtggatactggagcggctgggccccgccagcgtcgccggctacctgaagccaaaggggctggacaattacagggtgctggccgtggacgcgagcgtagtgaggtccggggtctcgaagttcggcaggtcctggcggctccacttcgccctcgacatattcagcctggcgagccacgagttcagggtgaccgacgacaaaacgggcgagacccttgccaacttcagggcggccgagggcgacctgttcctgggcgacagggggtacgccagcaagaggggcatgtcgcactgcctctccggcggcgcggacttcatcctgcgcctccgccacgaagcgttcgcgatgcattcggaaagcggggagaggctcgatttgcttaa

SEQ ID NO: 38016 - protein, 171 aa, Unknown
  Obtained from environmental sample
  misc_feature (1)..(171): Xaa is any amino acid
MARADPPLAGPDPGQHVGPVRGQRPGAAERRSFHEAPDQLRRVVRVDTGAAGPRQRRRLPEAKGAGQLQGAGRGRERSEVRGLEVRQVLAAPLRPRHIQPGEPRVQGDRRQNGRDPCQLQGGRGRPVPGRQGVRQQEGHVALPLRRRGLHPAPPPRSVRDAFGKRGEARFA

SEQ ID NO: 38017 - DNA, 1026 bp, Unknown
  Obtained from environmental sample
  misc_feature (1)..(1026): n is a, c, g, or t
atgatcagatggccgagagatttacaggccgcggaagtcccgctggctgttttacgccgcgcttacgagtatccgcttatgagggtgtatccattagtggggagtggggaatggggggtagggagtagggattgttgtccggatgataaagatacttacaagatagattttgatactccgaagaacattgctcattccccggtacccgatacccgctccccactccctactcccttggtcttgctgcccgtcttcccggggacaaactgtgaatgggacatggaaagggctttccgtgacgcgggcgcaaggacaaggatcgtggtttttaggaaccggaacagagaggatatagcggaatcaaaaaaggaactcgcgcaggcaatcggcgaatgtcaaatacttgcgttatcaggcggattcagcgccggcgatgagcccgacggcagcggtaaattcatcgccaatgtactacgttccgcggttatagccgatgctgttaacaatttattggaaaaccgtgacggactcatcctgggaatttgcaacggcttccaggcattgatcaagttgggcctggttccatacggcgcttaccgcatggctgaatcgtcaatgcccacgcttacctttaaccgtatcggccgccatgtttcccgtatggttcgcacgcttgtaataccgaattgttccccctggcttgcgctggataaacccagcgcggttcatgtgctgccggtaagccacggtgaaggcaggctcgttatcagtagaacagaaggggaagcgttgttcaaaaacgcgcaagttcccttttgctatgccgatgaaaacggccggccaaccatgcgggagccggataatcccaatggatcggattttgccattgagggcctatgcagtcccgacggaaggatactcggcaagatggcccattcggaacgccgcggcgaatacgttcatataaatatccccggcgacaaaaagcagaatatttttaaagccggggttcggtattttaattag

SEQ ID NO: 38018 - protein, 341 aa, Unknown
  Obtained from environmental sample
  misc_feature (1)..(341): Xaa is any amino acid
MIRWPRDLQAAEVPLAVLRRAYEYPLMRVYPLVGSGEWGVGSRDCCPDDKDTYKIDFDTPKNIAHSPVPDTRSPLPTPLVLLPVFPGTNCEWDMERAFRDAGARTRIVVFRNRNREDIAESKKELAQAIGECQILALSGGFSAGDEPDGSGKFIANVLRSAVIADAVNNLLENRDGLILGICNGFQALIKLGLVPYGAYRMAESSMPTLTFNRIGRHVSRMVRTLVIPNCSPWLALDKPSAVHVLPVSHGEGRLVISRTEGEALFKNAQVPFCYADENGRPTMREPDNPNGSDFAIEGLCSPDGRILGKMAHSERRGEYVHINIPGDKKQNIFKAGVRYFN

SEQ ID NO: 38019 - DNA, 351 bp, Unknown
  Obtained from environmental sample
  misc_feature (1)..(351): n is a, c, g, or t
gtgcccgttacgatgagattcttgaacagggacaccttgagttttttcaagggggggaagaaggattacaatagcgaagacatgaagctattgcggcggcttaaggaatataagagcgaatacttgaggtttctgtcagatttccaggtaccgtttgacaacaatctggcggagcgggatctgaggatgataaagagcaagacaaaagtgtccgggtgtttcagggggaatgagggcggcgctgtttttgcaaatatcaaaagctacacctcaacattgagaaagaattccaggaatattttcaatggcttaaaatcagccttcgtgggtgtgcctttttcctgggtttga

SEQ ID NO: 38020 - protein, 116 aa, Unknown
  Obtained from environmental sample
  misc_feature (1)..(116): Xaa is any amino acid
MPVTMRFLNRDTLSFFKGGKKDYNSEDMKLLRRLKEYKSEYLRFLSDFQVPFDNNLAERDLRMIKSKTKVSGCFRGNEGGAVFANIKSYTSTLRKNSRNIFNGLKSAFVGVPFSWV

SEQ ID NO: 38021 - DNA, 483 bp, Unknown
  Obtained from environmental sample
  misc_feature (1)..(483): n is a, c, g, or t
ttgttgcggcgaggcaatacggcaggcgctgaaaaaacacaaaatcacgcgaaaaaaaagagctttacctaccgcgagaagtctgaagaaaaacgacaggaatatgtagacaaattagcggaaataccggaaaagaaacgagtgtatgttgacgaaagcggggtgaacaaagagtttcagcgagaatacggatacgccgaacgtggccagaaggtgtgcgacacaaagaacgggaggaacagtcagcgtatgaatgtgataggaggtctttgcaacgggaaacatatcgcagttgaacagtatgaacataccaccgataccgtactttttgagcaatggttttctgaacgcctgctgaaagaggttcctagagggagtacgataatcatggacaacgcgtctttcccccgcaaggacgtgttgcttgaattgataaaaagtaactattcaaacccaggaaaaaggcacacccacgaaggctga

SEQ ID NO: 38022 - protein, 160 aa, Unknown
  Obtained from environmental sample
  misc_feature (1)..(160): Xaa is any amino acid
MLRRGNTAGAEKTQNHAKKKSFTYREKSEEKRQEYVDKLAEIPEKKRVYVDESGVNKEFQREYGYAERGQKVCDTKNGRNSQRMNVIGGLCNGKHIAVEQYEHTTDTVLFEQWFSERLLKEVPRGSTIIMDNASFPRKDVLLELIKSNYSNPGKRHTHEG

SEQ ID NO: 38023 - DNA, 777 bp, Unknown
  Obtained from environmental sample
  misc_feature (1)..(777): n is a, c, g, or t
atgaccgagaccgcggcggcggtaaaccaaattacagccaacatccagagcgtcaaagcccgcgtcataaaccagagcgccagcgtaacggaaacaaacgcgacaatggaacaggttatcgccaacatcaacagactcaacagccatgtagaagcccagagcagtaatgtttcccaggcgtcgtccgccattgaagagatggtagccaatataggttccgtcaccaacacgctgatcaacaacgccgccaacgtaaaaacattgcaggaggcatccgaagtgggaaagaccggcttgcaggaagtggcgacggacattcaggaaatatcccgcgagtccgaaggcttattggagattaacggggtaatggaaaacatcgccagccagaccaacctgctttcgatgaacgccgcaattgaagccgcgcacgccggagaggcgggcaagggcttcgcggtagtcgccgatgaaatccgcaaacttgccgaatcatcaagcgaacaatccaagaccattagctccgtattgaagaagataaaagaatcgatagacaagataaccggttccaccaataacgtactgaacaaattcgaggcgattgactcgggcgtaagaactgtatcaatgcaggaagaaaacatccgcaacgcgatggaagagcagggagaaggaagcaaacagatactggcaagcgcaggcagtttaaatgaacttacccagcaggtaaagagaggttccgaggaaatgctcgacggcagtcaggaagtaatgaaatga

SEQ ID NO: 38024 - protein, 258 aa, Unknown
  Obtained from environmental sample
  DOMAIN (51)...(258): Methyl-accepting chemotaxis protein (MCP) signaling domain
  misc_feature (1)..(258): Xaa is any amino acid
MTETAAAVNQITANIQSVKARVINQSASVTETNATMEQVIANINRLNSHVEAQSSNVSQASSAIEEMVANIGSVTNTLINNAANVKTLQEASEVGKTGLQEVATDIQEISRESEGLLEINGVMENIASQTNLLSMNAAIEAAHAGEAGKGFAVVADEIRKLAESSSEQSKTISSVLKKIKESIDKITGSTNNVLNKFEAIDSGVRTVSMQEENIRNAMEEQGEGSKQILASAGSLNELTQQVKRGSEEMLDGSQEVMK

SEQ ID NO: 38025 - DNA, 360 bp, Unknown
  Obtained from environmental sample
  misc_feature (1)..(360): n is a, c, g, or t
ttgcttccttctccctgctcttccatcgcgttgcggatgttttcttcctgcattgatacagttcttacgcccgagtcaatcgcctcgaatttgttcagtacgttattggtggaaccggttatcttgtctatcgattcttttatcttcttcaatacggagctaatggtcttggattgttcgcttgatgattcggcaagtttgcggatttcatcggcgactaccgcgaagcccttgcccgcctctccggcgtgcgcggcttcaattgcggcgttcatcgaaagcaggttggtctggctggcgatgttttccattaccccgttaatctccaataagccttcggactcgcgggatatttcctga

SEQ ID NO: 38026 - protein, 119 aa, Unknown
  Obtained from environmental sample
  misc_feature (1)..(119): Xaa is any amino acid
MLPSPCSSIALRMFSSCIDTVLTPESIASNLFSTLLVEPVILSIDSFIFFNTELMVLDCSLDDSASLRISSATTAKPLPASPACAASIAAFIESRLVWLAMFSITPLISNKPSDSRDIS

SEQ ID NO: 38027 - DNA, 360 bp, Unknown
  Obtained from environmental sample
  misc_feature (1)..(360): n is a, c, g, or t
ttggcagaactagaggccagaaaaataaaaaccgcggttctgagcaacaaaccggattcagctttacgccgtattatagccggaatctttccgaaccatcatttcaacctggtttgggggcttcgccatgacgcggcccccaagccgaatccggcgtcggtctgggaactgttggccgatataggcgtcaccccccatgaggctattctcatgggcgattccgaaattgacatggaaacggccagaaacgccggctgttacccccttggcgtaagctggggtttccgttcccgcgacacgctggaagcctccggcgcggcaaggataatcgacaagccggaagatatatttaatatttaa

SEQ ID NO: 38028 - protein, 119 aa, Unknown
  Obtained from environmental sample
  misc_feature (1)..(119): Xaa is any amino acid
MAELEARKIKTAVLSNKPDSALRRIIAGIFPNHHFNLVWGLRHDAAPKPNPASVWELLADIGVTPHEAILMGDSEIDMETARNAGCYPLGVSWGFRSRDTLEASGAARIIDKPEDIFNI

SEQ ID NO: 38029 - DNA, 693 bp, Unknown
  Obtained from environmental sample
  misc_feature (1)..(693): n is a, c, g, or t
ttgacggagagtactgccgtgccttcccacataggcataattatggacgggaacggccgctgggccaaaaaacgcgggcagttgcgcacccagggacatctggaaggcttaaaggcagccaagcgcgttgtaaaagccgccggaaattcaggcgtttgttaccttacactttacacattctccacagaaaactggaaacgcgcctccgaagaggtaggttttatcatgggcctggtaaagcagtacctaaaaggcgaaatggatttttaccgggagaacaatatcaggttgcgccatgccggaaaccgcgaagggcttccggcggatgttttacatgacctggatgaagcctgcgccgatacaagcgcattcagcggactccaggtgatcctggcgctcaactacggaggcagggacgaaatcatcagggcggttaaaaagctaattagcgcgggagattcggcgacggtagaaaacttaagccgttatatggataacccggacatccctgaccctgacctcataatcaggacagcgggagaattcagaaccagtaatttcctcctgtgggagggagcttacactgaatactacatttctgataaactatggccagactggacagaagacgatctggaaaaagcaatccttgcatataaaaacagggatcgccgcttcggaggcgtacaatga

SEQ ID NO: 38030 - protein, 230 aa, Unknown
  Obtained from environmental sample
  DOMAIN (14)...(228): Putative undecaprenyl diphosphate synthase
  misc_feature (1)..(230): Xaa is any amino acid
MTESTAVPSHIGIIMDGNGRWAKKRGQLRTQGHLEGLKAAKRVVKAAGNSGVCYLTLYTFSTENWKRASEEVGFIMGLVKQYLKGEMDFYRENNIRLRHAGNREGLPADVLHDLDEACADTSAFSGLQVILALNYGGRDEIIRAVKKLISAGDSATVENLSRYMDNPDIPDPDLIIRTAGEFRTSNFLLWEGAYTEYYISDKLWPDWTEDDLEKAILAYKNRDRRFGGVQ

SEQ ID NO: 38031 - DNA, 555 bp, Unknown
  Obtained from environmental sample
  misc_feature (1)..(555): n is a, c, g, or t
atgagcgaaaccaggaccgtggcagaagaacggatgaaaaaaaccctggcaaacctaaaggacggtttttccgcacttaggacaggcagggcttcggccgcgttattcgacaagatacgggtagatgcttacggggaaaaatccccgataaaccagttggcgaacatttccatacccgaagcgcggctcattgtaattcagccatgggacaaggcgcatatcggcgaaatagaaaaagccatacgctcgtcggagctttccctgaacccttcaaacgacggcaaggttatccgcatttccattcctcccctgacaggcgagcgccgcaaggagcttgtaaaactcgcaaaaagcaatgcggagcaaagccgggtcgcggtcaggaatatacgcagggacggcaacgaagagctgaaaaaactgttaaaggacagcaagatcaccgaggatgaggaaagcaagaccggtgaagagcttcaaaaacttaccgatctgtacattggaaagataaaccaggtcctggaagaaaaagaaaaggagataatggaagtttga

SEQ ID NO: 38032 - protein, 184 aa, Unknown
  Obtained from environmental sample
  DOMAIN (18)...(182): Ribosome recycling factor
  misc_feature (1)..(184): Xaa is any amino acid
MSETRTVAEERMKKTLANLKDGFSALRTGRASAALFDKIRVDAYGEKSPINQLANISIPEARLIVIQPWDKAHIGEIEKAIRSSELSLNPSNDGKVIRISIPPLTGERRKELVKLAKSNAEQSRVAVRNIRRDGNEELKKLLKDSKITEDEESKTGEELQKLTDLYIGKINQVLEEKEKEIMEV

SEQ ID NO: 38033 - DNA, 477 bp, Unknown
  Obtained from environmental sample
  misc_feature (1)..(477): n is a, c, g, or t
ttgcggaaggtgcggcgcaaaaaacacagatgcaggcgaaacccacagaggcgctgtcccgtgtgcggcaggattgagtttccaagaatatgtccggccgtaattatcatcattaccgacagcgaaaacaaaatccttttggctcacaataaaaaatttatcgcgaatgtttacagccacatctccggctttaacgaagcgggcgagactttggaagaaaccgtagtaagggaaatccgcgaagaggtaaacatagaagtaaaagacatcgaatacataaaatcccagccctggcctttcccctactcactgatggcaggctacaaagccaaatactcatccggaacgcttcaccccgacggcgatgagatagaagacgcccgctggttcacgaaggacaatctgccggcgttaccaagagaaggctctctgtctcgctacctaataaattgttggattaacgacaccccgtattaa

SEQ ID NO: 38034 - protein, 158 aa, Unknown
  Obtained from environmental sample
  DOMAIN (30)...(154): NUDIX domain
  misc_feature (1)..(158): Xaa is any amino acid
MRKVRRKKHRCRRNPQRRCPVCGRIEFPRICPAVIIIITDSENKILLAHNKKFIANVYSHISGFNEAGETLEETVVREIREEVNIEVKDIEYIKSQPWPFPYSLMAGYKAKYSSGTLHPDGDEIEDARWFTKDNLPALPREGSLSRYLINCWINDTPY

SEQ ID NO: 38035 - DNA, 1512 bp, Unknown
  Obtained from environmental sample
  misc_feature (1)..(1512): n is a, c, g, or t
ttgaaaagggattcgtctggtgtaacagaattggctttgagtactgttatcgcgtttcccgatctttatgaaatcggaatgtccaatcaggcacttaagatcctttacaaccggcttaacgggattgaaggtattttttgcgaccgctcttttgcgccggcccccgattttgaggagcttttaagaagccgtcatttgcccctgtacggtcttgatactggaataagccttggcgatgttgatttcttgatgtttacccttggctatgagcttttaattaccggccttctaaccatgcttgatgtttccgacattccccttcgctgccgcgatcgtggtgagaatgaccccctaattataatgggcgggccttgcgtttcaaatccgttgccatacgctgattttatcgacgctttctggataggtgaggcggaagacggctttttcgatcttgctgttgaacttcggtacgtaaaaagatcaggtggaaaaagagatgacctatataataagctcatctctcatccggctgtttggacaagcggtaaggggagagcagtcagggctgtggatggtaatttttccagccgatccggcaatcaggcggtttttccggtacccagcatgaaggtggtacaccatcacggtacggttgaaattatgcgcggctgtccaaacggttgccgcttttgccatgccggttattggtacaggccggcccgccaaaaaagcgcgtgtttgatagacgatgaagttggcttgttaataaggaacggcggctacagggagataactctttcttctctttcgtccggcaattatcagtaccttgaagatctgttggatcatctgaacaaaaagtacagctctaagcatatttcttttcagctcccttctctaagggtttcaagtttttcacttaacttgcttgaaaaaatttctttggtaagaaaaagcgggcttacctttgcggtagaaacgcccacggatttttggcaaatggcaataaataagcaggtggccggagaagacgttgtttccatacttcgcgaggctaagaagcgtggttggaagggcgcgaaattctatttcatgataggccttccgcttgaaggctctcctgtcaatgaagaatcttctcatgtagaggaacattcttctacagaagaatttgaaatagccgcctttgttgaacgggtagctcggcaaactcgaatgcactttaatataaatattggaacttttgttcccaaggcccatacgccttttcagtgggccaggcagatcagcatggaagaagccgaaaaaaaactctcttacatacgaaacaggctaaagccccaggggcacaaggtcggcatacaggatccttttatctcgattattgagggcattgcgagccgtggcgacgaaagggcaggggccatctttgaagaagccttcagatcaggttgcaggcttgattcctggacagagtatataaataaggaaatctggataaagtccttttga

SEQ ID NO: 38036 - protein, 503 aa, Unknown
  Obtained from environmental sample
  DOMAIN (218)...(382): Radical SAM superfamily
  misc_feature (1)..(503): Xaa is any amino acid
MKRDSSGVTELALSTVIAFPDLYEIGMSNQALKILYNRLNGIEGIFCDRSFAPAPDFEELLRSRHLPLYGLDTGISLGDVDFLMFTLGYELLITGLLTMLDVSDIPLRCRDRGENDPLIIMGGPCVSNPLPYADFIDAFWIGEAEDGFFDLAVELRYVKRSGGKRDDLYNKLISHPAVWTSGKGRAVRAVDGNFSSRSGNQAVFPVPSMKVVHHHGTVEIMRGCPNGCRFCHAGYWYRPARQKSACLIDDEVGLLIRNGGYREITLSSLSSGNYQYLEDLLDHLNKKYSSKHISFQLPSLRVSSFSLNLLEKISLVRKSGLTFAVETPTDFWQMAINKQVAGEDVVSILREAKKRGWKGAKFYFMIGLPLEGSPVNEESSHVEEHSSTEEFEIAAFVERVARQTRMHFNINIGTFVPKAHTPFQWARQISMEEAEKKLSYIRNRLKPQGHKVGIQDPFISIIEGIASRGDERAGAIFEEAFRSGCRLDSWTEYINKEIWIKSF

SEQ ID NO: 38037 - DNA, 327 bp, Unknown
  Obtained from environmental sample
  misc_feature (1)..(327): n is a, c, g, or t
ttgggtatagcgctcttcctttccgcttccactataaccgatatttattacataatttccagaacactaaaaaacaaaaaaactgctatgtcattattaaaaaatttattgaaaaccgttgatgttgccgccgtaaccggtaatgaaatacgtcaggctattaatttggattggagcgattttgaggatgcggtgcaatatgccgcaggagaaactattgctgtcgattatatcataacccgcaataaaaacgattttgcttccgctgttttgccggtagtaactcccgatgaatttctggcactactgataccaccaacaagctaa

SEQ ID NO: 38038 - protein, 108 aa, Unknown
  Obtained from environmental sample
  misc_feature (1)..(108): Xaa is any amino acid
MGIALFLSASTITDIYYIISRTLKNKKTAMSLLKNLLKTVDVAAVTGNEIRQAINLDWSDFEDAVQYAAGETIAVDYIITRNKNDFASAVLPVVTPDEFLALLIPPTS

SEQ ID NO: 38039 - DNA, 495 bp, Unknown
  Obtained from environmental sample
  misc_feature (1)..(495): n is a, c, g, or t
atgaaacggtttcaatgggacgctacccctattcccgcggncttcctcaaaaatctttccgctgaagatgccgccattatcaatgaaactcttaaaaaactggacctgtgggacagcaaaaatcgcatgattgatgaactgagcggcggaaccttacagcgggtttttctggcaaagacgctggcgcaaactccgcgcgtaattctgctggacgaaccggcaaatcaccttgacctgaaacatcagattgcgctgttggattatttaaaagcgtgggttaaagaaaacgacaccagtttaatcggcgtgtttcatgatcttaatttggcacggtatattggcgatagggcgttggtcatggataacggaaatgttgccgcctgcgggatgatagaagaagtgttgaatagcgcagttttggaaacggtttatggcattaatatacgcgcgtttatgcgggaagcgttggagaagtggaaaacaaataacaaataa

SEQ ID NO: 38040 - protein, 164 aa, Unknown
  Obtained from environmental sample
  DOMAIN (1)...(123): ABC transporter
  misc_feature (1)..(164): Xaa is any amino acid
MKRFQWDATPIPAXFLKNLSAEDAAIINETLKKLDLWDSKNRMIDELSGGTLQRVFLAKTLAQTPRVILLDEPANHLDLKHQIALLDYLKAWVKENDTSLIGVFHDLNLARYIGDRALVMDNGNVAACGMIEEVLNSAVLETVYGINIRAFMREALEKWKTNNK

SEQ ID NO: 38041 - DNA, 1386 bp, Unknown
  Obtained from environmental sample
  misc_feature (1)..(1386): n is a, c, g, or t
atgataacattgcaccccgcaaaaaacatgcagggaaaattccgcctccccccctctcccgacctactctacatggccgccctcgccgcgtgcgccgccaaactgcgcgtcaacatcaacggtataagcaacggcagttacgtcattgacgacatactgcggtcgctcaaaaaccacgcggatatcgaactggttgattccacgctgtcaatatcgcccaaatctaccgacggcggcgaagaggcgctgctgctgaacattcccgactcgctactcccctaccgcaccgtctatatcttcatggggcttgggatgggcaagacggtagtgtcgcgttccacgccgccgagacagatcgctgacttcatagcccgcgcaaaaaaaatcggcgtcaacttagaaaccgttgacgtgggcgaaactgcgggtctgcggacagcctcattcgacagcggcatagccgaaagctcatgccccaatgaagacgactgcgccgccctattggcctttctcttaggcaagcgcgagaaattgactttctccatcaccgactaccatttgtcaacgccgctgcgccgtttggcccacacgctcggcctcaacgtatcttcaaaacagaatacgcccgagggcgaggacagcgagatggcgaaacgtttgaggtttatgcgcagtaaacaaaaagggaatcaggacgcgcaaaatcagcagagctttattgtggaagcggacttttcaacaatcgccgccgatacggcgaacgccataaacattgcgatccccggcgacgaaacgctagccgccgctctcatcaccgcaaaagccctcgtccccaaaggagactttgaactctcgaacgtcgcgcttgacccgtgggcctcgcaagccgtctcgttcttgaaaaagatgggcacgaaaattaatacggacgaacagaccaagaccgccttcgggccggcgggcgtcgtaacggtacggaagtcggagcgcgtaggaaggaaggcgcgttgcgttccgctgtaccattacttggggcagctgccctgcatggcgatagcggcggcgttcgcggaggggaagtcggtcttcagggacttagagcctatgcgcctcttcgaccctgacggattggagcagttggagcagtgcctgcggcctctcggcatacgccacggcgaaatgccggacggcatggttatagagggcgctaaggagttcgacgggttcgacattttggagccgttaccggcgcacatagccgtcgccttttgcgtggcgggggtcaagtgccacggaaagacgtccatcgcggatgagtttgtatttgcgcggtggccggattttgaaaaaatgatgagcgagattttcgagttcagggggaaatga

SEQ ID NO: 38042 - protein, 461 aa, Unknown
  Obtained from environmental sample
  DOMAIN (59)...(452): EPSP synthase (3-phosphoshikimate 1-carboxyvinyltransferase)
  misc_feature (1)..(461): Xaa is any amino acid
MITLHPAKNMQGKFRLPPSPDLLYMAALAACAAKLRVNINGISNGSYVIDDILRSLKNHADIELVDSTLSISPKSTDGGEEALLLNIPDSLLPYRTVYIFMGLGMGKTVVSRSTPPRQIADFIARAKKIGVNLETVDVGETAGLRTASFDSGIAESSCPNEDDCAALLAFLLGKREKLTFSITDYHLSTPLRRLAHTLGLNVSSKQNTPEGEDSEMAKRLRFMRSKQKGNQDAQNQQSFIVEADFSTIAADTANAINIAIPGDETLAAALITAKALVPKGDFELSNVALDPWASQAVSFLKKMGTKINTDEQTKTAFGPAGVVTVRKSERVGRKARCVPLYHYLGQLPCMAIAAAFAEGKSVFRDLEPMRLFDPDGLEQLEQCLRPLGIRHGEMPDGMVIEGAKEFDGFDILEPLPAHIAVAFCVAGVKCHGKTSIADEFVFARWPDFEKMMSEIFEFRGK

SEQ ID NO: 38043 - DNA, 393 bp, Unknown
  Obtained from environmental sample
  misc_feature (1)..(393): n is a, c, g, or t
gtgtttgccatgcccgctcccaagggaaagaaaaccgcgatctgcttccaccccgacgcggccattacatggaattccaaaaccaagtatccccaggaatcaaaagatttcctggcatggatcgcgagccctgagggagcgactacggcgtccgcggctttgcctttgggcttcttccccatgatcaactcccccatccagcttaccgacgcccacgccaatgaattcctgggccttaacgcgggcaaagaaaccgacgcccgctttgtgtggcccaaattcatggatctctactcgcccatgaaccaggcggtgatacaggttattaaaggtgaaattaccccccgccaggcggcggacgccatggaaaccgcggcggcgaaactgcggtaa

SEQ ID NO: 38044 - protein, 130 aa, Unknown
  Obtained from environmental sample
  misc_feature (1)..(130): Xaa is any amino acid
MFAMPAPKGKKTAICFHPDAAITWNSKTKYPQESKDFLAWIASPEGATTASAALPLGFFPMINSPIQLTDAHANEFLGLNAGKETDARFVWPKFMDLYSPMNQAVIQVIKGEITPRQAADAMETAAAKLR

SEQ ID NO: 38045 - DNA, 858 bp, Unknown
  Obtained from environmental sample
  misc_feature (1)..(858): n is a, c, g, or t
gtggaaaacctttttgtacgcgcaggctacacgggcgttaggcgaagaaggaacctgcgcggcggcggcataatacaaaaccgcgtaatccccgcaaagccgaacgaggtatggaccgttgattttaagggctggtggtatactaagaacagggagaaagtaaacccgctgaccatacgcgacgaatacagcaaattcatactggcgatagatgttgtcgaaaaaggcgacaaagccacagtaaaacaggtctttcagcgtgttttcaagcaatacgggttaccgcagtgtatacgcagcgacaacggcccgccgttcgccagcgcgcttaatttctggggtttgtcaaaattatcggtgtggtggatgacgctgggaatacagcttgaccgcgacgatcccgggcatcctgaacaaaacggggggcatgaaaggatgcaccgtgacatgaaaacggaactgcaggggcagattgacggatcgcttaacgagcaccaggaagtgtttgagcagtggcgaaaagattttaacgaagtgcgtccgcatgaagcgctgggaatgaaagtgcccgccgacgtatataaaaaatctgaaataaaatttaccaacgaaaatgttgacttcagatacgggaggggttttaaagtcaggattgtcaacgacaggggttttattaatttaaatcaaaaacgggtgtttgtcgggaatccttttgctggatataacgccggtgtaaaagagtttgcggacaagccaaccgaagtatggtttgggaattatttgttaggcgtaataaacaatgacactggactcatagagcccaatttcgctataatacaatcaacaagaaattcctga

SEQ ID NO: 38046 - protein, 285 aa, Unknown
  Obtained from environmental sample
  DOMAIN (30)...(195): Integrase core domain
  misc_feature (1)..(285): Xaa is any amino acid
MENLFVRAGYTGVRRRRNLRGGGIIQNRVIPAKPNEVWTVDFKGWWYTKNREKVNPLTIRDEYSKFILAIDVVEKGDKATVKQVFQRVFKQYGLPQCIRSDNGPPFASALNFWGLSKLSVWWMTLGIQLDRDDPGHPEQNGGHERMHRDMKTELQGQIDGSLNEHQEVFEQWRKDFNEVRPHEALGMKVPADVYKKSEIKFTNENVDFRYGRGFKVRIVNDRGFINLNQKRVFVGNPFAGYNAGVKEFADKPTEVWFGNYLLGVINNDTGLIEPNFAIIQSTRNS

SEQ ID NO: 38047 - DNA, 438 bp, Unknown
  Obtained from environmental sample
  misc_feature (1)..(438): n is a, c, g, or t
ttggggttgggctggatcattatatatggaagaaacttttcacgctcgccaatagcgcttgtgatacttcacggagtcagcgcgatgccgtttgcatttaattttatttccgaaggtttccgctcccttccagccaacacactgaacgcggcggcagtcctcggcgcggatcctctgcgcgggcttttaaccgttgccctgccgctttcgctgtcccgtgtgcgttcagcgtggggtttcgccgcggcgctcagtcttggagaacttaacgccgtaatgatgcttggcatggaaggatgggaaactttgcccctgtacatctaccgcgccgtgtcagcctaccgttacggaacagcctgcgccgcgggaaccctgctgatactctgctgcgccgcctgctttctgttttctgaaacagggagaaaaaaatatgcttga

SEQ ID NO: 38048 - protein, 145 aa, Unknown
  Obtained from environmental sample
  misc_feature (1)..(145): Xaa is any amino acid
MGLGWIIIYGRNFSRSPIALVILHGVSAMPFAFNFISEGFRSLPANTLNAAAVLGADPLRGLLTVALPLSLSRVRSAWGFAAALSLGELNAVMMLGMEGWETLPLYIYRAVSAYRYGTACAAGTLLILCCAACFLFSETGRKKYA

SEQ ID NO: 38049 - DNA, 702 bp, Unknown
  Obtained from environmental sample
  misc_feature (1)..(702): n is a, c, g, or t
atgcttgaagttaaaacactaaaaaaatcttacggagacttttccgtatcgcttgatttatccgtcggcgagggagagactctttcgcttgtcggcccttccggctgcggcaagacaacggcgcttaaccttatcgcaggcatcattgagcctgagtccggaagcgtgatcattgacggcgaagacattacccgcctgcccgcgtggaagcgcaatatttccgtagtttttcaagacttggccctattcccccaccttgacgttggcggaaatatcgcttacggtctctttatccgtggagtccccaaaaaagaccgccgccttatcgttgaacaaaccctggaaattgtccgccttcaaggctattcaacacggcgcattgataccctctccggtggagagcgccaacgtgtcgccattgcgcgcgcccttgcgtccagcccacgactgcttttattggacgaacctttctcaagtttggacgcacccctgcgaaaagacctccgccgtgattttcttgaaatccgttcccactcaaaagccccctgtattttcatcacccacgaccgcgaagaagccctaatgcttggagaccaaatcgcgcttatgaccgacggtcgtatagtagaaaccgccgcaggaaaaaaattgctctccgcgccaaaaaccgattttgcaagagagttttttggagaagggtag

SEQ ID NO: 38050 - protein, 233 aa, Unknown
  Obtained from environmental sample
  DOMAIN (25)...(206): ABC transporter
  misc_feature (1)..(233): Xaa is any amino acid
MLEVKTLKKSYGDFSVSLDLSVGEGETLSLVGPSGCGKTTALNLIAGIIEPESGSVIIDGEDITRLPAWKRNISVVFQDLALFPHLDVGGNIAYGLFIRGVPKKDRRLIVEQTLEIVRLQGYSTRRIDTLSGGERQRVAIARALASSPRLLLLDEPFSSLDAPLRKDLRRDFLEIRSHSKAPCIFITHDREEALMLGDQIALMTDGRIVETAAGKKLLSAPKTDFAREFFGEG

SEQ ID NO: 38051 - DNA, 873 bp, Unknown
  Obtained from environmental sample
  misc_feature (1)..(873): n is a, c, g, or t
gtgaggaacgatatgccggacaacgcaaacatagtctatttggacaacaacgccacaacgcgcgtagcctcggaggtgcttgaggccatgatgccattcttcggcgaccgctacggcaacccttcgagcatctaccgtttcggcgggacggtgcggcggcacgtggaagaggcgcgcgagcgggtcgcggcgcttataggggcctcgcccggcgaaatcatcttcacatcctgcgggtcggagggcgacaacatggccctcaaaggcttcttccaagagcacggggagcggacgcatatcgtcaccacggcggtggagcaccccgcgatacgcaataccgcccgcttcttgggggggcgcggagccgaagtcacggaattgaccgttgacggcgacggtatgctgtcgaacggagcgctggattcgttagcgatcaaccccgacaccctcgcctccgtcatgtgggcgaacaacgagacgggcgtggtcttccccgtccgcgaactcgccgaggcggtcaaagcgcgcggcggactcttccacaccgacgcggtgcaggcggcggggaagctcgttatagacgtcaaaaagatcccggtagacatgctggccttctccggccacaagatacacgcgcccaagggcgtgggggcggcctactttaggaagggtacgcccgtcaaggccatcctccacggcggccatcaggagagcggattccgcgccggaaccgagaacgtcccctatattgtcggcctgggccgagcctgcgaacttgccgcggaacgcatatccgaagaaaatacgaacgtacgcaaattgcgcgacaagctggaaaaggcgctctggaaaaatgcgccggagcgaagctga

SEQ ID NO: 38052 - protein, 290 aa, Unknown
  Obtained from environmental sample
  DOMAIN (12)...(290): Aminotransferase class-V
  misc_feature (1)..(290): Xaa is any amino acid
MRNDMPDNANIVYLDNNATTRVASEVLEAMMPFFGDRYGNPSSIYRFGGTVRRHVEEARERVAALIGASPGEIIFTSCGSEGDNMALKGFFQEHGERTHIVTTAVEHPAIRNTARFLGGRGAEVTELTVDGDGMLSNGALDSLAINPDTLASVMWANNETGVVFPVRELAEAVKARGGLFHTDAVQAAGKLVIDVKKIPVDMLAFSGHKIHAPKGVGAAYFRKGTPVKAILHGGHQESGFRAGTENVPYIVGLGRACELAAERISEENTNVRKLRDKLEKALWKNAPERS

SEQ ID NO: 38053 - DNA, 822 bp, Unknown
  Obtained from environmental sample
  misc_feature (1)..(822): n is a, c, g, or t
atgatcagatggccgagggcgtcgagttccatccccatagacggatcgcgccacttcttctccccggagtcggtgatggagatacagcacgagctgggcgccgacatcatcatggcattcgacgagtgcccgccgtcgagcgccgacccctccaatatcgagttggcggtcagccgcacgctgttgtgggccgccagatgccgcgaacaccaccacaagcagcatttccaccacggctacccgcagcacctcttcggcatcgtgcagggcggcgtgattaaaccgctcagggagcgctgcgccagagagcttatcgcaatggacttcccggggtacgcgcttggcgggctcgccgtcggagagagcatggaatcaatgtacgaaatcgcggcctacaccgccgccctgctgccggaagagaaacctcgctatctcatgggcgtaggaacgccctccgacattctcgaatgcatatccgccggaatagacatgttcgactgcgtgctgcccacccgcaacgcccgcaacggttcggtcttcacaagcgccggcaaggtcaacatccgcaactccatgcacaccaaagatttcacccacccgctggacccgaagtgcagctgctacgcctgttgcaacttctcacgagcctacatcagacacctctacatggccggagaaattttggccatacgtctaatgacgctacacaacattcacttctacatggaactggtaagatccgccagagaacacatcataaccggaactttcagcgaatggaaaaaagagatgattacgggtatggcgagggaagacgtttaa

SEQ ID NO: 38054 - protein, 273 aa, Unknown
  Obtained from environmental sample
  DOMAIN (23)...(266): Queuine tRNA-ribosyltransferase
  misc_feature (1)..(273): Xaa is any amino acid
MIRWPRASSSIPIDGSRHFFSPESVMEIQHELGADIIMAFDECPPSSADPSNIELAVSRTLLWAARCREHHHKQHFHHGYPQHLFGIVQGGVIKPLRERCARELIAMDFPGYALGGLAVGESMESMYEIAAYTAALLPEEKPRYLMGVGTPSDILECISAGIDMFDCVLPTRNARNGSVFTSAGKVNIRNSMHTKDFTHPLDPKCSCYACCNFSRAYIRHLYMAGEILAIRLMTLHNIHFYMELVRSAREHIITGTFSEWKKEMITGMAREDV

SEQ ID NO: 38055 - DNA, 1602 bp, Unknown
  Obtained from environmental sample
  misc_feature (1)..(1602): n is a, c, g, or t
gtggacgcgcttgctaacgcggtcaaggtcacccttggacctcgcgggcgcaatgtggttctggagaagagctggggctctcccttagtaactaaagacggcgtcacagtggccaaagaggttgaacttgaggacaagtttgagaacatgggcgcgaagatggtcaaagaggtcgcctccaagaccagcgacatcgccggcgacggcaccacaacggccaccgtcctcgctcaggtcatagcgcacctaggtataaagaacgtaaccgccggttccgaccccatggcgctcaaacgcggcatagacaaggcggtcaaggcgatcaccgaacaattgaggaaagactccaagaaaatcgacggtaagaacaaggctgagatcgcgcaggtcggcgccatctccgccaacaacgacacgagcatcggcgatcttctggccgacgccatggagaaggtcggcaacgacggcgtgatcaccatagaagaggccaagagcattgagacgacgctcgaccacgtagagggcatgcagtttgaccgcggctacctctccgcctacttcgtgacaaacgccgacagccttgagtgcgtcctcgaagagccgctcatcctcatcttcgataagaagatcagcgccatgaaagacttgctgccgctcctcgaaaaggtcgctcagatgggtaaggcgctcctcatcatcgccgaggacgtggacggcgaggcgttggccacgctcgtggtaaataaactgcgcggcaccctcaagatcgccgccgtcaaagcccctggcttcggcgacaggcgcaaggcgatgctcgaagacatcgccgtactcacgggcggcacgctgatctccgaggagatgggctacaaactcgagaacacgacgatcgacgccctgggcaaggccaagcgcgttgtgatagacaaggagaacaccactattattgaaggcgccggcaagcaggcggacatcaaggcccgcgtgggcgccatcaggaagcagatcgaggacaccacctccgactacgaccgcgagaagctccaggagcgtctggcgaagctggccggcggcgttgcggtgctaaagatcggcgcggcgaccgagattgagatgaaagagaagaaggcgcgcgtcgaggacgccctgcacgccacccgcgccgcggtggaggagggcgtggtccccggcggcggcgtggccctgatccgcgcggcggcggcgatctccggcctgaaactggagggcgacgagcagatcggcgtggacatcatccgccgcgcctgcgaggagccgctgcgcatgatcacggcgaacgcgggcaaggagtcgtcggtggtctgcaacgaggtcaagaacgggaagggcgcgtacggatacaacgcgttcagcgataagtacgaggatttgatcaaggtcggcgtgattgatccgactaaggtgacgcggtcggctttggagaacgcggcgtctatagcgggattgattttgaccaccgagtgcatcatcaccgatatgccggagaagaaggataagtgcggcggggctcacggcggcgggggagggatgccgggcgggatgggcgggatggacgattattga

SEQ ID NO: 38056 - protein, 533 aa, Unknown
  Obtained from environmental sample
  DOMAIN (4)...(507): TCP-1/cpn60 chaperonin family
  misc_feature (1)..(533): Xaa is any amino acid
MDALANAVKVTLGPRGRNVVLEKSWGSPLVTKDGVTVAKEVELEDKFENMGAKMVKEVASKTSDIAGDGTTTATVLAQVIAHLGIKNVTAGSDPMALKRGIDKAVKAITEQLRKDSKKIDGKNKAEIAQVGAISANNDTSIGDLLADAMEKVGNDGVITIEEAKSIETTLDHVEGMQFDRGYLSAYFVTNADSLECVLEEPLILIFDKKISAMKDLLPLLEKVAQMGKALLIIAEDVDGEALATLVVNKLRGTLKIAAVKAPGFGDRRKAMLEDIAVLTGGTLISEEMGYKLENTTIDALGKAKRVVIDKENTTIIEGAGKQADIKARVGAIRKQIEDTTSDYDREKLQERLAKLAGGVAVLKIGAATEIEMKEKKARVEDALHATRAAVEEGVVPGGGVALIRAAAAISGLKLEGDEQIGVDIIRRACEEPLRMITANAGKESSVVCNEVKNGKGAYGYNAFSDKYEDLIKVGVIDPTKVTRSALENAASIAGLILTTECIITDMPEKKDKCGGAHGGGGGMPGGMGGMDDY

SEQ ID NO: 38057 - DNA, 486 bp, Unknown
  Obtained from environmental sample
  misc_feature (1)..(486): n is a, c, g, or t
gtgatgatgcactcggtggtcaaaatcaatcccgctatagacgccgcgttctccaaagccgaccgcgtcaccttagtcggatcaatcacgccgaccttgatcaaatcctcgtacttatcgctgaacgcgttgtatccgtacgcgcccttcccgttcttgacctcgttgcagaccaccgacgactccttgcccgcgttcgccgtgatcatgcgcagcggctcctcgcaggcgcggcggatgatgtccacgccgatctgctcgtcgccctccagtttcaggccggagatcgccgccgccgcgcggatcagggccacgccgccgccggggaccacgccctcctccaccgcggcgcgggtggcgtgcagggcgtcctcgacgcgcgccttcttctctttcatctcaatctcggtcgccgcgccgatctttagcaccgcaacgccgccggccagcttcgccagacgctcctggagcttctcgcggtcgtag

SEQ ID NO: 38058 - protein, 161 aa, Unknown
  Obtained from environmental sample
  misc_feature (1)..(161): Xaa is any amino acid
MMMHSVVKINPAIDAAFSKADRVTLVGSITPTLIKSSYLSLNALYPYAPFPFLTSLQTTDDSLPAFAVIMRSGSSQARRMMSTPICSSPSSFRPEIAAAARIRATPPPGTTPSSTAARVACRASSTRAFFSFISISVAAPIFSTATPPASFARRSWSFSRS

SEQ ID NO: 38059 - DNA, 486 bp, Unknown
  Obtained from environmental sample
  misc_feature (1)..(486): n is a, c, g, or t
atgataaaaccaaatatcaaataccgggtaaccttaagcgaggaagagagggagaggttacagaatctgattcgtaaagggaaagcagcaggatataggattcgtcacgcccagatattacttgcgctggacgagataccggagaatgcatcatggactgatgaaaagatagggaaagcatacggatcccatatacgttccattgggaagctgaggaaacgttttgtggaagaaggcttggaggcggccttggaacgtaaaaagcgggaaaggccgccgcggatcaagatagacggggaagcggaagcgaagataatcgcggtggtctgcagcgagccgcccgaaggccgctgccggtggacgctgaagctgctggcaaacaaggtggtggaactggggattttggacagtatttccgaccacggaataggggaccttttaaaaaaaacgacattaagccatggctggagaaggaatggtgcatag

SEQ ID NO: 38060 - protein, 161 aa, Unknown
  Obtained from environmental sample
  misc_feature (1)..(161): Xaa is any amino acid
MIKPNIKYRVTLSEEERERLQNLIRKGKAAGYRIRHAQILLALDEIPENASWTDEKIGKAYGSHIRSIGKLRKRFVEEGLEAALERKKRERPPRIKIDGEAEAKIIAVVCSEPPEGRCRWTLKLLANKVVELGILDSISDHGIGDLLKKTTLSHGWRRNGA

SEQ ID NO: 38061 - DNA, 1191 bp, Unknown
  Obtained from environmental sample
  misc_feature (1)..(1191): n is a, c, g, or t
atggcaaaggataaatttaatagaacaaagatccacatgaatgttggaacgattggtcacgtcgatcacggcaagactactctttctgcggctattaccatgcactgcgccagaaaattcggcgacaaggtaatgaattacgatgacattgacaatgctcccgaggaaaaagcgcgcggtattaccattaatacacgccatctggagtatcagtcagacaagcgccattatgcgcacatcgactgccccggacacgccgactatatcaagaacatgatcacgggcgccgcgcagatggacggcgctattcttgtagtgtcagcgccggactcggttatgccccagacccgcgagcatatcattctcgcccgtcaggtaggcgtacctaacatgatcgtctatcttaacaagatcgatcttcttgacgatcccgaccttgttgaacttgtcgaggaagaagtaaaagacgttcttacagctaacggtttccccggcgacaaagtcccaatcatcaaaggttccgctttcaaagccatgtcagagccggacaatcccgaagcggtcaaatcaatcgaagatttgcttaccgcgatggacacttatttccccgatccggtacgcgattctgaaaaaccgtttattatgccgattgaagacgtgtttacaatccaaggacgcggcacggtagtcacgggaaaagtggaacgcggcgtgctcaagcttaacgaagaagttgaaattgtcggtattaagcccacaaagaaaacggttattaccggtattgaaatgttcaataaattactcgatgaagcgcaggcgggcgataacgtcggtactcttcttcgcggtattgataaaaaagaagttgaacgcggacaggtactcgcgaaacccggttcaatcacacctcacaaaacattcaaggggcagatttattgtctgtccaaagaagagggcggtcgccatagcccgttctttaccggttacaggccgcagttctatttccgtaccacggacattaccggtactgtaaaacttccggagggcaaagagatggtaatgcccggcgataataccgaaattttcggggagttgattcatcctatcgccatggaaaaaggtcttcgcttcgctatccgcgaaggtggcaaaactgtcgcttccggtcaggttgtcgagataatagagtag

SEQ ID NO: 38062 - protein, 396 aa, Unknown
  Obtained from environmental sample
  DOMAIN (227)...(296): Elongation factor Tu domain 2
  misc_feature (1)..(396): Xaa is any amino acid
MAKDKFNRTKIHMNVGTIGHVDHGKTTLSAAITMHCARKFGDKVMNYDDIDNAPEEKARGITINTRHLEYQSDKRHYAHIDCPGHADYIKNMITGAAQMDGAILVVSAPDSVMPQTREHIILARQVGVPNMIVYLNKIDLLDDPDLVELVEEEVKDVLTANGFPGDKVPIIKGSAFKAMSEPDNPEAVKSIEDLLTAMDTYFPDPVRDSEKPFIMPIEDVFTIQGRGTVVTGKVERGVLKLNEEVEIVGIKPTKKTVITGIEMFNKLLDEAQAGDNVGTLLRGIDKKEVERGQVLAKPGSITPHKTFKGQIYCLSKEEGGRHSPFFTGYRPQFYFRTTDITGTVKLPEGKEMVMPGDNTEIFGELIHPIAMEKGLRFAIREGGKTVASGQVVEIIE

SEQ ID NO: 38063 - DNA, 558 bp, Unknown
  Obtained from environmental sample
  misc_feature (1)..(558): n is a, c, g, or t
gtgaaaataggctggcctcttctgccccgccttggcttccagaccctgctggaaggcactgtggaattccctgtattgggaacctatacccgtcttttaggcggagtccccattccccggggcaggaacggctttcggaaaatcattgagatttgccaaaaggcctttaaataccgccgttacctgcacttttatccggaaggggagtgttttctttacaaccagagcatcagggaattccagtcaggcgcgttcaggatagccgcggaactggacataccggtaataccgcttgtaactgttttttccaacggcccgtttaagccctggtcgttttggggccgttctctgcccattgaaaaactcgtagttctggaaccgatgtaccccgcgcaatttgtaaaacgtgacggtaaggacgaaataacaaccgaatcgataaaggaattcgcagacgcggtacgccgaaaaatgcaggctgagatcgaccggcgcaaaggctcaacggcttttttccggggccagatggaacggatgaagggaatcaatgatcaatga

SEQ ID NO: 38064 - protein, 185 aa, Unknown
  Obtained from environmental sample
  misc_feature (1)..(185): Xaa is any amino acid
MKIGWPLLPRLGFQTLLEGTVEFPVLGTYTRLLGGVPIPRGRNGFRKIIEICQKAFKYRRYLHFYPEGECFLYNQSIREFQSGAFRIAAELDIPVIPLVTVFSNGPFKPWSFWGRSLPIEKLVVLEPMYPAQFVKRDGKDEITTESIKEFADAVRRKMQAEIDRRKGSTAFFRGQMERMKGINDQ

SEQ ID NO: 38065 - DNA, 942 bp, Unknown
  Obtained from environmental sample
  misc_feature (1)..(942): n is a, c, g, or t
atgaaaccggaccgtggaagtccacgcgaaaacgcttgtcattcagagcaaggcagtccgcgcatgccgtttgaaataagcgaatccaaaaacacaagggaagaagtccgtctgtgttaccgctttctggatttaagaaacaaggatgtgaaaaaaaatattatcctgcgttcaaaggtaatcagttttttacgcgcaaggatggaagagctcggatttacggagcttcaaacgcctatactaacctcgtcctcgccggaaggcgcgcgggattacctcgttccaagccgcaaacaccgcggcaaattttacgctctgccgcaggccccgcagattttcaagcagctcctcatggtttcaggctttgaccgctattttcagatagccccctgcttccgtgacgaggacgcacgcgccgaccgttcacccggagagttttaccagcttgattttgaaatggccttcgcggggcaggaagatgtttttcgcgttgcggagacggtaatgcacggcgttttcacaacgttttcaaaaaaagcggtcagccccgcgccctttattaaaatcccatacgccgaagcgatgctcaagtacggaacggacaagcccgatctccgaaacccccttgtaatcaccgaccttaccggatttttcgcggacgttgattttcagccttttaaaagcatccctgtcaggggaattgtagcgcccggcgccgcgttgcagtcaaaatccttctttgaaaaaatgctcgccttcgccactgaaatcggcatgaagggactcggctacatttccgttatggaggacgcaagcctcaaagggcctatcgttaaattcctttctaccgaaaagcaggacgcatttaaaaaagatctcggccttaaagcaaacgacaccctgtttttatcgccgatgcgcccgatactcgtgccgatctga

SEQ ID NO: 38066 - protein, 313 aa, Unknown
  Obtained from environmental sample
  DOMAIN (226)...(310): GAD domain
  misc_feature (1)..(313): Xaa is any amino acid
MKPDRGSPRENACHSEQGSPRMPFEISESKNTREEVRLCYRFLDLRNKDVKKNIILRSKVISFLRARMEELGFTELQTPILTSSSPEGARDYLVPSRKHRGKFYALPQAPQIFKQLLMVSGFDRYFQIAPCFRDEDARADRSPGEFYQLDFEMAFAGQEDVFRVAETVMHGVFTTFSKKAVSPAPFIKIPYAEAMLKYGTDKPDLRNPLVITDLTGFFADVDFQPFKSIPVRGIVAPGAALQSKSFFEKMLAFATEIGMKGLGYISVMEDASLKGPIVKFLSTEKQDAFKKDLGLKANDTLFLSPMRPILVPI

SEQ ID NO: 38067 - DNA, 1575 bp, Unknown
  Obtained from environmental sample
  misc_feature (1)..(1575): n is a, c, g, or t
atggccggacgcgcctgccttattgatgaacgggcggcgggcgccatgctgcggacttttcactcatttggggcatggtttctcaggcgtaacggcggctgtatcggactggattccaattttgtgatttacgatgacgatgatatgatctccctgctcgcaaccatcatgcaggggtcgcctaaagcggacgttaagaaggccgcttaccatatttcccgcgctaaagattatttcctttccccggatgatcccggccttgccgcgattgacggcaaaaaaaaattccgcgaactgtacgcccgctatgaggaacgccttgcccataccggcaatgttgattttggcgacttgataaaaaagccggtggagattctccgcagggagccgcaggtggcgcagcgtctgcgggaacggttttctgtgataatggtagacgaatatcaggacgcgaatgtcgcccagtttgaattattgaaggaactgtgcggcccggatacctatgtttgtgtggtaggcgatgatgatcagtcgatttaccgctttcggggagccgaggtaaagaatattctgcaatttcccgaccgttttgccggtacggagattatccggctggaaagcaattaccgttccgccgcgcccattctcaaagtcgcgtcttcggtggtggatcacaattacggccgtttgggaaaaacgctccgcgccgaacggggcggcggcaaacagccggtgcttgcctttctgcccgatcaggatgaagaagtgaatttttgcgcctcgctgattgaaaaatccgtgaagggcggcagcgtcggcgtcggcgtcggcgtcggcgtcggcgtaagaacgccgcaaacgccgcaaacgccgcaaacaccggcggcgcgctggtcggattgggcgatattgtatcggactaacgcgcaatcgcttggttttgaaacggaattcctgcgccgtaaaattccctacaaggtagtcggctcgcttaaattctatgaacgcgaggagatcaaggacgccatcgcccttctttcgttcatggtaaacccccgcgacgaggtggcctttcgccggatggtgaacaaacccgcgcggggccttggcgcggtgacagtggatcgcctgattgacgcgagcctcgccgggggaaaggaccttcttgaaacggctaaaaatatggttcaagaaaaaaaattaagcgccaaagccggaaccgggctggagaaattcatcaaagtgattgatgagggaaaatcgccgctggataccccccaaccatcaattacaactaacgttgaaattacagctaacggggggaattctgaacagcaaaaaacaaaaaagaaaaagcaaggaaagaaagcggctgtaccgaaggacggcgatactctggtgtcaggcgaagggctttccgtgtgcgtagctcagatattgaaaaattccggcatctgtgaataccatataacgcaggacgagataacggggaaccagcggctgaacaacatgcaggaactggtgaacgcggcaagcctgtatgaaggaagcgttcaggggcttctgattccctga

SEQ ID NO: 38068 - protein, 524 aa, Unknown
  Obtained from environmental sample
  DOMAIN (1)...(440): UvrD/REP helicase
  misc_feature (1)..(524): Xaa is any amino acid
MAGRACLIDERAAGAMLRTFHSFGAWFLRRNGGCIGLDSNFVIYDDDDMISLLATIMQGSPKADVKKAAYHISRAKDYFLSPDDPGLAAIDGKKKFRELYARYEERLAHTGNVDFGDLIKKPVEILRREPQVAQRLRERFSVIMVDEYQDANVAQFELLKELCGPDTYVCVVGDDDQSIYRFRGAEVKNILQFPDRFAGTEIIRLESNYRSAAPILKVASSVVDHNYGRLGKTLRAERGGGKQPVLAFLPDQDEEVNFCASLIEKSVKGGSVGVGVGVGVGVRTPQTPQTPQTPAARWSDWAILYRTNAQSLGFETEFLRRKIPYKVVGSLKFYEREEIKDAIALLSFMVNPRDEVAFRRMVNKPARGLGAVTVDRLIDASLAGGKDLLETAKNMVQEKKLSAKAGTGLEKFIKVIDEGKSPLDTPQPSITTNVEITANGGNSEQQKTKKKKQGKKAAVPKDGDTLVSGEGLSVCVAQILKNSGICEYHITQDEITGNQRLNNMQELVNAASLYEGSVQGLLIP

SEQ ID NO: 38069 - DNA, 756 bp, Unknown
  Obtained from environmental sample
  misc_feature (1)..(756): n is a, c, g, or t
ttggaacaaagagagataagcgaaaaaacaagggatttattcggacttggatatgctcctcaagttggatttttggaagcagcggtcaataacggatttaaacccgaatctgttttaaaggcaggcctcgccgcagaaaaagacggcaaagcatttgataaattcagagatagattgatgattccgatttgcagtttgtctggtgcgatagtcggttttggcgggcgtgatttgggcgggaatagccctgccaaatatatgaactccccagaaactcttatctacaacaaaagcgaaattctctttgggctaaaccaaagccgcaaggcaatatcaaaagaaaattccgtgattttagttgaaggttattttgacgtgatttcaatgttccagagcggagtggaaaatgtggtggcaatttcgggcacagcactttctgaaactcaggcaaaattgttagccagatacacaaaatctgcatttataagcctagacggagatgctgccggacaagccgccacagaacgttgcatagaggttttgctcacgcagagttttgccattaaaattgtgaatttaacaaccgagagcggagaaaaagcagacccggattcccttgttaggcaaggtggggcggaggctttcaaaaaattgcaggagagggcaaaaaactggctcaactatttggcagacaagagtccgctttcaagtcccgaagaaaaggcaaattttgtctcaagaacaaaaaacttatag

SEQ ID NO: 38070 - protein, 251 aa, Unknown
  Obtained from environmental sample
  DOMAIN (115)...(194): Toprim domain
  misc_feature (1)..(251): Xaa is any amino acid
MEQREISEKTRDLFGLGYAPQVGFLEAAVNNGFKPESVLKAGLAAEKDGKAFDKFRDRLMIPICSLSGAIVGFGGRDLGGNSPAKYMNSPETLIYNKSEILFGLNQSRKAISKENSVILVEGYFDVISMFQSGVENVVAISGTALSETQAKLLARYTKSAFISLDGDAAGQAATERCIEVLLTQSFAIKIVNLTTESGEKADPDSLVRQGGAEAFKKLQERAKNWLNYLADKSPLSSPEEKANFVSRTKNL

SEQ ID NO: 38071 - DNA, 786 bp, Unknown
  Obtained from environmental sample
  misc_feature (1)..(786): n is a, c, g, or t
ttgaaaactgtccatttccaatatcaaacgaaactagcgttttcttcgcccgcatccaaacactgctttttgttacggatattgccgcagagcgacaacaggcagcagataaaaaaactgacgtggcacatagacccgtcccttaccgatacgctttggcaaactattgacggatttggcaacgatgcgcttgcagggtacattagcacacctcacaatcatttccacttcgggatagagggaacagcggaagtatcgggcaagccgtacacagcagcccttgagccgccacgcatattgctctacccaacggaattgacacgcgcacaccacgcccttgccgatttctacaatgacattaaccgctccgctccggctaacttattagaccgcattcaatatttttcacacgccgttcacacccacatgcgttatgagcgaggcacaaccacaagttcaacttcnngcggcaaagcgtttgatattggcgtgggcgtctgccaggattacgcacaaatattgctcgccatcctgcgcctggataaaatcccttgccgttatgttgccggtctggcctcgggctacggcgaaacccacgcctgggtcgaggcctgggcagaaaaccgctactgtgccgtagaccccacgcgcgacaaactcatagacgaaggctacattgccgtctccagaggacgcgacttcgccgacagctctattgagcgcggagtattcaccggggcgtgccgcggcacgcagacggtgaaactgagtatggagatttcgtga

SEQ ID NO: 38072 - protein, 261 aa, Unknown
  Obtained from environmental sample
  DOMAIN (3)...(85): Bacterial transglutaminase-like N-terminal region
  misc_feature (1)..(261): Xaa is any amino acid
MKTVHFQYQTKLAFSSPASKHCFLLRILPQSDNRQQIKKLTWHIDPSLTDTLWQTIDGFGNDALAGYISTPHNHFHFGIEGTAEVSGKPYTAALEPPRILLYPTELTRAHHALADFYNDINRSAPANLLDRIQYFSHAVHTHMRYERGTTTSSTSXGKAFDIGVGVCQDYAQILLAILRLDKIPCRYVAGLASGYGETHAWVEAWAENRYCAVDPTRDKLIDEGYIAVSRGRDFADSSIERGVFTGACRGTQTVKLSMEIS

SEQ ID NO: 38073 - DNA, 600 bp, Unknown
  Obtained from environmental sample
  misc_feature (1)..(600): n is a, c, g, or t
atgcccaatttgccaagcgattctgggagtaaatctgaactaggttcattcactctgccaccaatgctaactttgtccaaacctgtgaacatttttgatttgaaaaaagttccgcttgcgattataaccgatttgcattgtatttgcacatcgctccgcaaaccaactttccaacctttttcatttttttcaagcaaaaccgcttcaccttctattatttccaagccctctaaaccttccaaagtttttcgcgcaatttcgctatacaaattcatatcgcattgggcacggtttccccaaactgcgggacctttactggaattcaaggttctgaacattatccccgccttgtctgccaaaacccccattaaaccgcccatagcgtcaatatcgcgcaccatttgccccttgccaaccccacctatcgccggattgcaactcatgcgacatatactttttttgtcaaaaactagcaacgcggttttcacgccaattttccaagctgcgtttgccgcttcaatgccagcgtgtccgccgcctattacgagtgtatcaaagttcacaaggggaaatttactaatttattactatgctacctga

SEQ ID NO: 38074 - protein, 199 aa, Unknown
  Obtained from environmental sample
  misc_feature (1)..(199): Xaa is any amino acid
MPNLPSDSGSKSELGSFTLPPMLTLSKPVNIFDLKKVPLAIITDLHCICTSLRKPTFQPFSFFSSKTASPSIISKPSKPSKVFRAISLYKFISHWARFPQTAGPLLEFKVLNIIPALSAKTPIKPPIASISRTICPLPTPPIAGLQLMRHILFLSKTSNAVFTPIFQAAFAASMPACPPPITSVSKFTRGNLLIYYYAT

SEQ ID NO: 38075 - DNA, 1131 bp, Unknown
  Obtained from environmental sample
  misc_feature (1)..(1131): n is a, c, g, or t
gtgaacattatccgcatgcggcttatggaaaaacccctgcggttttctaccaatatcgacggaactattcccaacagccttatcggagacgaagtgaggctgcgccaaattttccttaaccttctgtccaatgccataaaatactcggaaaaaggccatattggtctgaccattaccacggacaaacgggatgacaaacaggtctggctcaggatagccgtatccgataccggaaaagggataaaaccggaggatcaggaaaaactcttcgacgagtttgtcaaggttgatataaagaataacaagggtatagaaggaacgggactgggactggcaattaccaaaaacctctgtaccgctatgggtggaaatttaaaagtggaaagcgaatatggcaagggcagcgtattcacggcgcttatcccccagggcattgaagcggaaacgcccttcgccgtggtagataagccggaggaaaagaagatactggtctatgagggcaggatcaattacgcaaaatcagtgtgctggactctggagaatatgagggttccttatactatggtgacaaatcaggatgattttgccgcggcgctgtaccgggaaaaatggttctatgtgttttccagctacggcctttatgaaaaaatcgagccgattatgagacaggatgatgcggctttccacggagggaaaaaaccgcctctcgccctcatgatagaatggggaaccgaaacctacatgcccggtgtgcggtttgtgtccataccggtgcagtccatttcgattgccaatgtgctgaacggcagggaggatgacaaaggttatattaaaacatccggtataatccgcttcactttccccaacgcgcggattcttgtggtggatgacattgcaactaatctcaaagttgtcgaaggccttcttgccccctatcaggtggcggtggatacctgcttgaacggtttgcagtccatagaactggtaaaacgcaacgaatatgatattgtattcatggatcacatgatgccggaaatggacggtattgaagcgacggctgttataagagaattagaaatgagtaatgaagaattaggaataaagagaaagcaaattcccattatgcgctga

SEQ ID NO: 38076 - protein, 376 aa, Unknown
  Obtained from environmental sample
  DOMAIN (290)...(371): Response regulator receiver domain
  misc_feature (1)..(376): Xaa is any amino acid
MNIIRMRLMEKPLRFSTNIDGTIPNSLIGDEVRLRQIFLNLLSNAIKYSEKGHIGLTITTDKRDDKQVWLRIAVSDTGKGIKPEDQEKLFDEFVKVDIKNNKGIEGTGLGLAITKNLCTAMGGNLKVESEYGKGSVFTALIPQGIEAETPFAVVDKPEEKKILVYEGRINYAKSVCWTLENMRVPYTMVTNQDDFAAALYREKWFYVFSSYGLYEKIEPIMRQDDAAFHGGKKPPLALMIEWGTETYMPGVRFVSIPVQSISIANVLNGREDDKGYIKTSGIIRFTFPNARILVVDDIATNLKVVEGLLAPYQVAVDTCLNGLQSIELVKRNEYDIVFMDHMMPEMDGIEATAVIRELEMSNEELGIKRKQIPIMR

SEQ ID NO: 38077 - DNA, 330 bp, Unknown
  Obtained from environmental sample
  misc_feature (1)..(330): n is a, c, g, or t
gtgggcgaagatcattacaacacggcccgccgctcgcagcagattttacaacgctacaaggaactgcaggacattatcgcaattctgggcatggacgaactttccgaggaagacaaactcaccgtcaccagggccagaaaggttcagcgttttttcagccagcccttctttgtcggggaaaaatttaccggcattcccgggtgttacgtaagcgtcaaggagaccgtgcgcggcttcaaaatgatacttgacggcgaatgtgacgcgatcccagaacaggccttctacatggccggcagcattgatgacgttctgaaaaaggcaaaataa

SEQ ID NO: 38078 - protein, 109 aa, Unknown
  Obtained from environmental sample
  DOMAIN (6)...(107): ATP synthase alpha/beta chain, C terminal domain
  misc_feature (1)..(109): Xaa is any amino acid
MGEDHYNTARRSQQILQRYKELQDIIAILGMDELSEEDKLTVTRARKVQRFFSQPFFVGEKFTGIPGCYVSVKETVRGFKMILDGECDAIPEQAFYMAGSIDDVLKKAK

SEQ ID NO: 38079 - DNA, 426 bp, Unknown
  Obtained from environmental sample
  misc_feature (1)..(426): n is a, c, g, or t
atggcagccttatttaacttcgaggttcatacgccgcgccggatcttttattcaggcagggtgcaggcgatcacaatcggccttgatgacggcgaaatcggcatatacgctaaccactccccctttaccgcacattctgttacaggcccgctccgcattaaagacgacaagggcaactggcgcaccgcgtttgtctgcggcggcatcctgcaggtaaaagaacataaaaacgtgctgatggttgaaagcgcggactggcctgaggaaataaacgttgagcatgtccttggaatcaaaatgcangccgaggaaacacttaaaaatacgcaattaaaatttgagattgacaaagctaaaaagatactgcaccacgccgaatgcagattgaaaattgtgaaagatacaggcagaggcaatgtacactaa

SEQ ID NO: 38080 - protein, 141 aa, Unknown
  Obtained from environmental sample
  DOMAIN (4)...(89): ATP synthase, Delta/Epsilon chain, beta-sandwich domain
  misc_feature (1)..(141): Xaa is any amino acid
MAALFNFEVHTPRRIFYSGRVQAITIGLDDGEIGIYANHSPFTAHSVTGPLRIKDDKGNWRTAFVCGGILQVKEHKNVLMVESADWPEEINVEHVLGIKMXAEETLKNTQLKFEIDKAKKILHHAECRLKIVKDTGRGNVH

SEQ ID NO: 38081 - DNA, 450 bp, Unknown
  Obtained from environmental sample
  misc_feature (1)..(450): n is a, c, g, or t
atgaaaatttttattgatgccgattcctgtccgcgggacgcacgggaactgactctgcgcgcagccgggcggcggggcataccggcggtatttgccgcaaaccgccccgtaccgggaatatgcggggaaaatgttactatggaaatttgcccacccgaagacaattccgctgacaaccgcattgtggaattggctgaattaggagaccttgccatcagccgcgacattgctctggcaaagcgacttctggaaaaaggcgttgctgttattgatgaccgagggcgggtattttccaaagacaccatcaacgaattgctttccctgcgcaattttacggtgagtcttgccgaaaacggactgggtatagaacggacggcaaactacggtaaaaaggaacgtaaagcttttgccgacagcctagatcgtatgctggtaaaactacttaaataa

SEQ ID NO: 38082 - protein, 149 aa, Unknown
  Obtained from environmental sample
  DOMAIN (1)...(146): Uncharacterized BCR, YaiI/YqxD family COG1671
  misc_feature (1)..(149): Xaa is any amino acid
MKIFIDADSCPRDARELTLRAAGRRGIPAVFAANRPVPGICGENVTMEICPPEDNSADNRIVELAELGDLAISRDIALAKRLLEKGVAVIDDRGRVFSKDTINELLSLRNFTVSLAENGLGIERTANYGKKERKAFADSLDRMLVKLLK

SEQ ID NO: 38083 - DNA, 798 bp, Unknown
  Obtained from environmental sample
  misc_feature (1)..(798): n is a, c, g, or t
ttgcgccttacgccttttaccggtatgtgcgggtttcgcagtcctgacgaaatacggcggcttcttgctgtttttcttgattcggcatccgccactgtacgagaaagttttgccccgttattgcagacgcttgaaatgcctaatccaactgccgccctgcggaatttttttgaaattctttttaacttttctcaaaaagcgcgtgaaacgctgacggaatttattctttcggtttatgccacggaaaaatgtgagtgggaacttatgcggaatcttgcccggctccaccccggcgatccggcagtgatagcgcccctctacctgaatattttccgccttgagccgggcgaggcgttttttctgaagaccggaattctccatgcctacattcatggttttggcgtagaactcatgaccaattccgacaatgtgttgaggggaggacttacttcaaaacatactgacattcctgagttgatcaaggtgctggactttaaccccctaaagccgcagattataaagccggaagcacattcttcctgctttacctacccggttccctgcgaagaattttcccttacggtgatgcgcggtacggcggccttgccatcggcggcaccgttggtatctgcccaaagcgcctcaataggtattgttaccgaaggggaagtttctgtttccggtatgattcttaaacagggggaatcggccttttttccccccgtcgataacggcgctccccccccggtagtacagggtgagcattttaccctttatatcgcatcggtgccgcaatga

SEQ ID NO: 38084 - protein, 265 aa, Unknown
  Obtained from environmental sample
  DOMAIN (1)...(229): Phosphomannose isomerase type I
  misc_feature (1)..(265): Xaa is any amino acid
MRLTPFTGMCGFRSPDEIRRLLAVFLDSASATVRESFAPLLQTLEMPNPTAALRNFFEILFNFSQKARETLTEFILSVYATEKCEWELMRNLARLHPGDPAVIAPLYLNIFRLEPGEAFFLKTGILHAYIHGFGVELMTNSDNVLRGGLTSKHTDIPELIKVLDFNPLKPQIIKPEAHSSCFTYPVPCEEFSLTVMRGTAALPSAAPLVSAQSASIGIVTEGEVSVSGMILKQGESAFFPPVDNGAPPPVVQGEHFTLYIASVPQ

SEQ ID NO: 38085 - DNA, 1008 bp, Unknown
  Obtained from environmental sample
  misc_feature (1)..(1008): n is a, c, g, or t
atggaaaaaacagttgagactgcggaaacgcgcaagcgctcttttttggtgggaatcagggatgaaaaaatgcgaatttccgaggcagaatcccttctaaaagagctttcgcatctggtggataccttgggtttggaaattgtgtcgatggagacggttcatttaagggaaaaacatgccaaatacggcatgggaaccggaaaagccgaagaattggcgcaaaaagccaaagaattggaagttgactgcatcattttcgatagagagataagcccatcccagcagcgcaactgggaggaattaaccggaatccccactattgaccgccaggaactaatcattcagatttttgccagccgcgccagcacacgcgaggccgaacttcaggtgcgccttgcggaacttatatatgccctgcccaggcttcagcacaagtacatagacctttccaggcagaggggcggtcgctacggtaccaggggttccggcgaaacccggcttgagacggacaggcgacgcgtggaaactcggattcatcggcttgagaaggaactggaactgctaaagcgccagaggcagattcagaggaaaaagcgcgagcgcagcggcataccggtctgcgccctggtcggctatacaaatgccggaaaatcctcgattcttaacgcgttgaccggcgcgggggttttggcggaggacaagctcttcgctactttggattccacctcgcgcaaactgcgtcttcccctgggcacagagatcctccttgttgacaccgtcgggttcataaggcgtcttccccacagcctgataaaagcttttcgatcaacccttgaagaagcaagtcattcggctctcatcctgaacgtcctggatgcctcggatgccgatgcggaagttcagtatgaaaccaccctgtcagtcctgggtgaacttaacgccggagaaattccgatgatcacggttctgaataaagctgatagagttgaatccgtagagccgctttaa

SEQ ID NO: 38086 - protein, 335 aa, Unknown
  Obtained from environmental sample
  DOMAIN (207)...(327): Miro-like protein
  misc_feature (1)..(335): Xaa is any amino acid
MEKTVETAETRKRSFLVGIRDEKMRISEAESLLKELSHLVDTLGLEIVSMETVHLREKHAKYGMGTGKAEELAQKAKELEVDCIIFDREISPSQQRNWEELTGIPTIDRQELIIQIFASRASTREAELQVRLAELIYALPRLQHKYIDLSRQRGGRYGTRGSGETRLETDRRRVETRIHRLEKELELLKRQRQIQRKKRERSGIPVCALVGYTNAGKSSILNALTGAGVLAEDKLFATLDSTSRKLRLPLGTEILLVDTVGFIRRLPHSLIKAFRSTLEEASHSALILNVLDASDADAEVQYETTLSVLGELNAGEIPMITVLNKADRVESVEPL

SEQ ID NO: 38087 - DNA, 366 bp, Unknown
  Obtained from environmental sample
  misc_feature (1)..(366): n is a, c, g, or t
ttgaatcgggcatggaagctccaaaagaaagcggctaaagtcggttttgactggccaaatctggaaggtgttgttgaaaaaatcaacgaggatctgggagaagttatggaagcggccagcggtaatacatacagtaatacagttgaggaagagctgggcgatcttcttttttctgttgtgaacctctgccgttatatgaaagtcgagccgtccgtggcccttcgccggaccaacagcaagtttatagaaaggtttaaacacatggaaaaaaagatgaaggaaacagggcaggaattgaaacaggaaaatttagaactcatggatcaattttggaatgaagcgaaaaacggagagagagggatttga

SEQ ID NO: 38088 - protein, 121 aa, Unknown
  Obtained from environmental sample
  DOMAIN (19)...(85): MazG nucleotide pyrophosphohydrolase domain
  misc_feature (1)..(121): Xaa is any amino acid
MNRAWKLQKKAAKVGFDWPNLEGVVEKINEDLGEVMEAASGNTYSNTVEEELGDLLFSVVNLCRYMKVEPSVALRRTNSKFIERFKHMEKKMKETGQELKQENLELMDQFWNEAKNGERGI

SEQ ID NO: 38089 - DNA, 726 bp, Unknown
  Obtained from environmental sample
  misc_feature (1)..(726): n is a, c, g, or t
atgaatattaaagacagcgcccagcgtttcaaggaattctggaacgattttaagaaagaaaaatcggggctggtaggccttggcattcttgctttggcggttctgatagtcatttttgaacctgttttcttgccgttcaaggacgtaaataacaactggcggaatattacttactgggagaacaatccggctgccgcggctccggtttggaccaacctgttctcaaaacaaaaatcggcttcgtcaaggcatttctctgatcctgaaatcagcgaagccgacgatcccgattatggactggttgcggtttatacattcgattatgagtataaattcgacaggccgccgcttgatttaattctgaaggcgaccgcaaacggcagggttctcatgaacatctacattgaaaggccggatggagaaaccatttcccttgggcgtgtctataaagaaggacttgagaacgatcccgtgcgcttttcggctgatactgacgcgcgcgctatggtctatgagtttgccagctggtttgccagctcctcatcaatctcgcgatcaggcggtcgcagcgccattcgcccgacaaacgtgattttttccgaaaccggtcttaatatgctggaagagcggctcccgcttaaaggcaattacaaatacatagcgaagataccgatgcaactgcttgcggacacgaatactacgtcgtcgatccgaagctttacataa

SEQ ID NO: 38090 - protein, 241 aa, Unknown
  Obtained from environmental sample
  misc_feature (1)..(241): Xaa is any amino acid
MNIKDSAQRFKEFWNDFKKEKSGLVGLGILALAVLIVIFEPVFLPFKDVNNNWRNITYWENNPAAAAPVWTNLFSKQKSASSRHFSDPEISEADDPDYGLVAVYTFDYEYKFDRPPLDLILKATANGRVLMNIYIERPDGETISLGRVYKEGLENDPVRFSADTDARAMVYEFASWFASSSSISRSGGRSAIRPTNVIFSETGLNMLEERLPLKGNYKYIAKIPMQLLADTNTTSSIRSFT

SEQ ID NO: 38091 - DNA, 585 bp, Unknown
  Obtained from environmental sample
  misc_feature (1)..(585): n is a, c, g, or t
gtgattgcggttttcatcggggttatgtacggcatagtcagcgcgtatttcgcgggttttaccgacacggtcatgtcgtttctttttgagctgttcgtgtctattccgattctccccatactgatagtcatgtcggcaatcttcaagccgaatatctggatcatcattgccacattgatagttttttcctgggtagggcctgtaaaaaccgtgcgttccatggccatgcaaataaaagaagaaacctacattgaggcggcaaaggcccttggttccggcaaatggagggtcatcttcaaacatatggcgccccttttgcttccgtattcgtttgccagcatggccttgagcgttccaggctttatcgtttttgaagcttccctttcgcttttggggctgggggacccgaccatagtatcatgggggcagatactgcacgacgcgcaatcctccggggctacgcttaacgggctttggtggtggatagtccctccgggtctgttcattgccattatgggaatgaccttcgcgtttttgggattcgcgatggacaagatccttcatcccaagcttcggacgaggtag

SEQ ID NO: 38092 - protein, 194 aa, Unknown
  Obtained from environmental sample
  DOMAIN (1)...(193): Binding-protein-dependent transport system inner membrane component
  misc_feature (1)..(194): Xaa is any amino acid
MIAVFIGVMYGIVSAYFAGFTDTVMSFLFELFVSIPILPILIVMSAIFKPNIWIIIATLIVFSWVGPVKTVRSMAMQIKEETYIEAAKALGSGKWRVIFKHMAPLLLPYSFASMALSVPGFIVFEASLSLLGLGDPTIVSWGQILHDAQSSGATLNGLWWWIVPPGLFIAIMGMTFAFLGFAMDKILHPKLRTR

SEQ ID NO: 38093 - DNA, 504 bp, Unknown
  Obtained from environmental sample
  misc_feature (1)..(504): n is a, c, g, or t
atgatcaagcacggcgttatcctgagtgcggagctgtttgaattactgaaagagccgatccagtcccagatggaagatataatagcgcgtaacgttacgatcaagcgggacattgtgatcgcggatgagaaagataccggcattcgccagatattgaacttcggtcatactatcggccacggcatcgagaaacactcaaactacggcgtgacgcacgggaaagccgtcgcaatcggtatggtaatcgccagccggggcgctgcccgcatgggtctgtgcggcgaggactgccacagggaaattgtcgaggccgttaggcgctatgagctacctgatgagactgacattctccctgaaagtttgatcgaagccgctttcttcgacaagaagcgaagcggccagcgcatcacgctgatcctgcctgagagaatcggcaagtgtgtagctaaaagcttcaccatggacgagctcgcgaatttcatccggcttggtatgagtaaatga

SEQ ID NO: 38094 - protein, 167 aa, Unknown
  Obtained from environmental sample
  DOMAIN (1)...(132): 3-dehydroquinate synthase
  misc_feature (1)..(167): Xaa is any amino acid
MIKHGVILSAELFELLKEPIQSQMEDIIARNVTIKRDIVIADEKDTGIRQILNFGHTIGHGIEKHSNYGVTHGKAVAIGMVIASRGAARMGLCGEDCHREIVEAVRRYELPDETDILPESLIEAAFFDKKRSGQRITLILPERIGKCVAKSFTMDELANFIRLGMSK

SEQ ID NO: 38095 - DNA, 603 bp, Unknown
  Obtained from environmental sample
  misc_feature (1)..(603): n is a, c, g, or t
atgacatttttggcaactgcggcctgcctgtccgcccttggcgcggaaattgaacgcgaatcgaaggcttatgttgtgcgtcccctgaaaagggaagcgaacggcggcgttacaacactgccctgtggggaaagcggtagtacatttcgattcatgttgccaatcgttagcgctctgggacgaaaagtttgcttcaccacgaaagggcggctgccggaacgcccgctctcccccttgtacgaagagcttcttcgccacggagccgaattatcgccgcaaggctccgttccgttttactcaggcgggcggcttacacctggccgctattcgctggatgcgggggtatcgtcgcaatttatcagcggcttgttgttcgccctgcctttgctcgatggcgacagcgagctcgccctgaccggaagcgtggaatcattcccttatgtcgagctgacaatggcgatgctggagacgtttggcgtaaaagcggagtatagcggcgaggtgttttttataccgggcgggcaaatgtatcggtcttccggcgttgtgcgcgtagagggcgattggtcaaacgccgcgttctggctgggtgctgggctatag

SEQ ID NO: 38096 - protein, 200 aa, Unknown
  Obtained from environmental sample
  SIGNAL (1)...(14)
  misc_feature (1)..(200): Xaa is any amino acid
MTFLATAACLSALGAEIERESKAYVVRPLKREANGGVTTLPCGESGSTFRFMLPIVSALGRKVCFTTKGRLPERPLSPLYEELLRHGAELSPQGSVPFYSGGRLTPGRYSLDAGVSSQFISGLLFALPLLDGDSELALTGSVESFPYVELTMAMLETFGVKAEYSGEVFFIPGGQMYRSSGVVRVEGDWSNAAFWLGAGL

SEQ ID NO: 38097 - DNA, 687 bp, Unknown
  Obtained from environmental sample
  misc_feature (1)..(687): n is a, c, g, or t
ttgtcgcggctgttgcttaagaaacgccttgtaggcgagatattcgcaaaatcgggaatgatctttgcctcggaattatcctgggttgcttccgaaacgctgatgatagccatgtacaataggcgaggcggcgcggaagttgtcgccggtatggcggcgggctggacgatagcgaatattttcttcatgctcttcggcggtttgtggacgacgaccggcgttttggtaggaggatctttgggagccggcaagctggacgaagcgcgcagccgcgccatgtggattaagtggggaggccttataatgggctttattatcgccattccgggagcggtgttaacatattttcttatacccgtcgtattctcaaatcttacaattgcggcaagggcaaactgcctaggtcttgtaactgtgattctcgcttatctgcccctgtggtgttttctcaacacccaattcgcgatttcacgcgccggaggcgacaccgcgatgggaatgtataccgacgtttcagttaatttcctgctcttcgcgcccggctccgtgtttctttccttttttacctctcttgcgcccgtgcctatgtttgccattttaaaagctaccgatatagtaaaatgttttgtagcgcgttatttacttcgcaaggaaaaatgggtaaaaaaccttaccgtaaattcttaa

SEQ ID NO: 38098 - protein, 228 aa, Unknown
  Obtained from environmental sample
  DOMAIN (19)...(184): MatE
  misc_feature (1)..(228): Xaa is any amino acid
MSRLLLKKRLVGEIFAKSGMIFASELSWVASETLMIAMYNRRGGAEVVAGMAAGWTIANIFFMLFGGLWTTTGVLVGGSLGAGKLDEARSRAMWIKWGGLIMGFIIAIPGAVLTYFLIPVVFSNLTIAARANCLGLVTVILAYLPLWCFLNTQFAISRAGGDTAMGMYTDVSVNFLLFAPGSVFLSFFTSLAPVPMFAILKATDIVKCFVARYLLRKEKWVKNLTVNS

SEQ ID NO: 38099 - DNA, 342 bp, Unknown
  Obtained from environmental sample
  misc_feature (1)..(342): n is a, c, g, or t
atgcttcatacagcgggaaataaaatattaaacgaaagagacgaagaagtaaggcttgtaggcgtgaatatttgcagtcttgaatggaagagcgacggagataatgtgctttcttctgtttacgaggtatttgcaaactggaattgtaatttagtgcgcctgccattatcgcaggatcgctggtttggaaaagtatcggactatagtaccccgaatccgcctgacgggagcgcacaataccaaaaaattgtcgatgatgctgtaaaactcgctttaagtttcggaaagtatatagaacttgatctgcattggtcaaatgccggggaatggggtaaaacatag

SEQ ID NO: 38100 - protein, 113 aa, Unknown
  Obtained from environmental sample
  misc_feature (1)..(113): Xaa is any amino acid
MLHTAGNKILNERDEEVRLVGVNICSLEWKSDGDNVLSSVYEVFANWNCNLVRLPLSQDRWFGKVSDYSTPNPPDGSAQYQKIVDDAVKLALSFGKYIELDLHWSNAGEWGKT

SEQ ID NO: 38101 - DNA, 435 bp, Unknown
  Obtained from environmental sample
  misc_feature (1)..(435): n is a, c, g, or t
atgtcggatcaggcgcccggactgcccggtattccccttgcgatagcgctgcctgacagtgaattcaccctgattgaacggaaaggccgaaggtcgggttttctgaggaagactctggctgccttagtgaataaaaacaataggctttccaatgtttcagtggaagaacaggaaatggaaaaagtaaaacctcatcgttttacaatggtaacattccgggctttcaagcctttggatcccagaatcctgaaaaaactcttcaggctttgcgcaaggggagggacgcttgccgcatacaaaggacggcgaagcaaagtcgaggcggaaatggcggaactcgaacaacaaatgccgaatcaaaccatacgatgggaacttataccctaccccgtcccaatgttagacgaggaaaggcatctgcttttacttagctaa

SEQ ID NO: 38102 - protein, 144 aa, Unknown
  Obtained from environmental sample
  DOMAIN (1)...(141): Glucose inhibited division protein
  misc_feature (1)..(144): Xaa is any amino acid
MSDQAPGLPGIPLAIALPDSEFTLIERKGRRSGFLRKTLAALVNKNNRLSNVSVEEQEMEKVKPHRFTMVTFRAFKPLDPRILKKLFRLCARGGTLAAYKGRRSKVEAEMAELEQQMPNQTIRWELIPYPVPMLDEERHLLLLS

SEQ ID NO: 38103 - DNA, 300 bp, Unknown
  Obtained from environmental sample
  misc_feature (1)..(300): n is a, c, g, or t
gtgctttcaggcggacagccgggaccgcacaagattcagggtataggagcgggctttcagccgcaggtttacgatccgtccgtcatcgacgaaatttaccagactgacgagaccaaagcgggaacggcggcaagacggcttgcaaaggaagaaggcatcatcgtcggaatttcgtccggctctgttcttgaagcagctcttactgtcgccaaacgccctgaaaacaacggcaagaccatagtagccgtactgccggacacgggcgagcgttatctgtcaacatggctctgggaggaataa

SEQ ID NO: 38104 - protein, 99 aa, Unknown
  Obtained from environmental sample
  misc_feature (1)..(99): Xaa is any amino acid
MLSGGQPGPHKIQGIGAGFQPQVYDPSVIDEIYQTDETKAGTAARRLAKEEGIIVGISSGSVLEAALTVAKRPENNGKTIVAVLPDTGERYLSTWLWEE

SEQ ID NO: 38105 - DNA, 1047 bp, Unknown
  Obtained from environmental sample
  misc_feature (1)..(1047): n is a, c, g, or t
atgtctatggtaaaagttcggatggattcccttatcaaatctatcgcagtcgctttggatattgttgaagggagtcttgtaggagccagtaccaatcacggtaagcggatcgccgttctatgcgcaaaaatgggaaaagttcttggaaaaaacgcggaggacatcaccgcattggctgtttgcgccctgctccacgacagcgctcttaccgaatatattctttccgagcggacagacggcgatcacgatactgccatgaaaagacactgcgaaatcggtcagcggaatatagatgatctgtatttcaaaacaaatgtaaaagattttgttctgtatcaccatgagcgcgccgacggcgcaggtccgttcggtatacgggaaggggaaggtccattggaagcggaacttatctctattgccgattcaattgacgccgctcatcatcttcaaaagcttggacaagaagaattgcccgttataagaaacataattgttaatgaaaccggaaaattctacggtaaaaaagcggcgcaagccatgctggaaattctcgacttgcctacgcttctgtctcttaaagatgatgtcattaaaaaaacagcggcgcagttcatgtctccctggactgtagacatacaagcggaaactattttcggcttggcgggttttgtggcaagaatcatcgactgtaaatcttcttttacgcataaacattcaacgcagattgccaataaagcgtggtttatgggaaagtattacaagtatgatcatgaagctctttcagaattgtaccttgcggcgtctttgcatgatctcggcaagctggcgatcccttctgaaattcttgaaaaacccggcaagcttaccaacgaagaatttgaagttataaaaagccacgtttatttaacatgggaacttcttaaagatgttgaaggatttgagactatatgccaatgggcgtccaatcatcatgaaaaanacctgcggcaacggttaccccttcaagaaaaaagcgccacgtctaggattttaagtgggatcctctag

SEQ ID NO: 38106 - protein, 348 aa, Unknown
  Obtained from environmental sample
  DOMAIN (30)...(146): HD domain
  misc_feature (1)..(348): Xaa is any amino acid
MSMVKVRMDSLIKSIAVALDIVEGSLVGASTNHGKRIAVLCAKMGKVLGKNAEDITALAVCALLHDSALTEYILSERTDGDHDTAMKRHCEIGQRNIDDLYFKTNVKDFVLYHHERADGAGPFGIREGEGPLEAELISIADSIDAAHHLQKLGQEELPVIRNIIVNETGKFYGKKAAQAMLEILDLPTLLSLKDDVIKKTAAQFMSPWTVDIQAETIFGLAGFVARIIDCKSSFTHKHSTQIANKAWFMGKYYKYDHEALSELYLAASLHDLGKLAIPSEILEKPGKLTNEEFEVIKSHVYLTWELLKDVEGFETICQWASNHHEKXLRQRLPLQEKSATSRILSGIL

SEQ ID NO: 38107 - DNA, 408 bp, Unknown
  Obtained from environmental sample
  misc_feature (1)..(408): n is a, c, g, or t
atgctcaaaccttatgatttactcgaaaatatactgcttgatattgaaagcggcgttaaaaagaatataaacgcggccgttctttccaaaaaatacgatttttcggaaggccatttgcgcaggttgttcagttttgcctttaatcagcccatagccgcttatattcgttcccgcacattggcggcaagcatttacgatttattggaaaccgatgccaatattcttgatattgcgggtgaatacggctttgaatacgaacagtcttttatcaggactttcaaacgtgaatacggaataacacccggtgatttgcgaaaaacagggcaggtaatacaaataaaaccgccgcttcatctttttgccgacagaagactggataacggtattttattcggacctgatttgtaa

SEQ ID NO: 38108 - protein, 135 aa, Unknown
  Obtained from environmental sample
  DOMAIN (62)...(106): Bacterial regulatory helix-turn-helix proteins, AraC family
  misc_feature (1)..(135): Xaa is any amino acid
MLKPYDLLENILLDIESGVKKNINAAVLSKKYDFSEGHLRRLFSFAFNQPIAAYIRSRTLAASIYDLLETDANILDIAGEYGFEYEQSFIRTFKREYGITPGDLRKTGQVIQIKPPLHLFADRRLDNGILFGPDL

SEQ ID NO: 38109 - DNA, 522 bp, Unknown
  Obtained from environmental sample
  misc_feature (1)..(522): n is a, c, g, or t
gtgtctttcaatgtcccaatggaagttatcctcgacatcaacgacttaaaaagcgatgtaatcaaggcaggagaaaccatttttatccccggcgcgagaatgaacgatttagaccttagaatgagccttggggaactgtttatttatcctgtttccggcaagtatataacaagcaattttgggatgagaaaagaccccataagcggagagctttcttttcataccggcattgatcttcgcgcgaatacaggcgcctctgttatggcttccatggaaggggttgcttccgtaataggcgaaagccggctttacgggaaacacatcatcttaagccatcctaacgggtataaaaccatgtacgcccaccttaacgccgtctctgtaaaacagggggataaggtgcttcaagggcgcaaaattggggaagcgggaaatacaggctacagtaccggcgcccatttgcactttacgatatatgacaagaacggaaaaccgataaatccgcttgatttattgaattaa

SEQ ID NO: 38110 - protein, 173 aa, Unknown
  Obtained from environmental sample
  DOMAIN (72)...(168): Peptidase family M23
  misc_feature (1)..(173): Xaa is any amino acid
MSFNVPMEVILDINDLKSDVIKAGETIFIPGARMNDLDLRMSLGELFIYPVSGKYITSNFGMRKDPISGELSFHTGIDLRANTGASVMASMEGVASVIGESRLYGKHIILSHPNGYKTMYAHLNAVSVKQGDKVLQGRKIGEAGNTGYSTGAHLHFTIYDKNGKPINPLDLLN

SEQ ID NO: 38111 - DNA, 558 bp, Unknown
  Obtained from environmental sample
  misc_feature (1)..(558): n is a, c, g, or t
gtgacgctgggcttcgccggcgagtacccgatccccgggcacggcaacggatcgctaactgtcgacgagtcgaaaaacagcttctcggtaactttgccgccatccttttgcatcggcgcggcatatacgccggacgcgcattggctcttcgtgatagacggctactccaccctatgggagttttacgaaaacgacaattactcgggatccggcaaatccgatcccgatagagacctaggcatatccgtcggggcgcggtacattccggcggctaatatcctcagttcgaagtattgggagaaggtccactacagcgccggcgtgaggtacgccacgctgccaaacgataaaacactcgacagagcgcacgaatacgcgttctctatgggagccggtctgccgatccctcgcgacggcggtatggtcgacatcatcttaagtctcggcagaaggtcggatccaaagtacagccgatacgaagagaacgtcgtaaagttgcagctgggcctaagcggcggccgtagctggttccaaaaagacacgtcaaaagattactga

SEQ ID NO: 38112 - protein, 185 aa, Unknown
  Obtained from environmental sample
  misc_feature (1)..(185): Xaa is any amino acid
MTLGFAGEYPIPGHGNGSLTVDESKNSFSVTLPPSFCIGAAYTPDAHWLFVIDGYSTLWEFYENDNYSGSGKSDPDRDLGISVGARYIPAANILSSKYWEKVHYSAGVRYATLPNDKTLDRAHEYAFSMGAGLPIPRDGGMVDIILSLGRRSDPKYSRYEENVVKLQLGLSGGRSWFQKDTSKDY

SEQ ID NO: 38113 - DNA, 729 bp, Unknown
  Obtained from environmental sample
  misc_feature (1)..(729): n is a, c, g, or t
atggcaaaatatttatgcgttaatatagaccacattgcaaccattagggaagctcgcaaggtgcgtgaaccagaaccagttgcggctgctgttatagccgagcttgctggttgcagaggcataaccgtgcatttgcggcaggaccgccgccacataaacgatggcgatgtgcatttgctgcggcacacagttgttggctcgctgaatttagaaatggcacctacggcagagatggtgcagtttgcaaaaaccgtgcttccaaatatggctactttggttcccgaaggtcccaacgagcttaccaccgaaggtggcttgaatgttgaatcaaaaatttccgagataacaactgtggttcaggctttgcgcagttctggcatattggttagcttgttcatagatccggtaaaggagcaggtgaaagcagcccgcaaggcgggcgcagattatgtggaactccacacgggttcttttgcggaggcttttgaacgccgcaatgaaagtgaaatagaacttgaagtttcaaaattgcaagaccaaattgcccttgctctgaattgcgggttaaaggtaaatgctgggcatggattgaactatcgcaacgtaaaacgcatagcaggtcttaacggaatagacgaactcaatattgggcacagcatcattgcccgctctgcattggtcggaatggacagggcagtgcgggaaatgctcgctttgataggcaactag

SEQ ID NO: 38114 - protein, 242 aa, Unknown
  Obtained from environmental sample
  DOMAIN (3)...(242): Pyridoxal phosphate biosynthesis protein PdxJ
  misc_feature (1)..(242): Xaa is any amino acid
MAKYLCVNIDHIATIREARKVREPEPVAAAVIAELAGCRGITVHLRQDRRHINDGDVHLLRHTVVGSLNLEMAPTAEMVQFAKTVLPNMATLVPEGPNELTTEGGLNVESKISEITTVVQALRSSGILVSLFIDPVKEQVKAARKAGADYVELHTGSFAEAFERRNESEIELEVSKLQDQIALALNCGLKVNAGHGLNYRNVKRIAGLNGIDELNIGHSIIARSALVGMDRAVREMLALIGN

SEQ ID NO: 38115 - DNA, 456 bp, Unknown
  Obtained from environmental sample
  misc_feature (1)..(456): n is a, c, g, or t
ttgctcggcaaccatcctccgcttgcttttaataaacctgcgtatgttattctttgcattttggcgggagctcttgttatagtagctaaaaataaaataaccaagtattggctttttgttatgataacagatgccattgggcttggtgcttttactgccataggtgcaattcatgcggaaaatgctggggcaggcggagttgccattatttgcctcgctgtgttaacggctgttggtggcggaatgctcagagatattctagctaatgaaattccgcaggtattgaaaagtgatttttatgcaaccgcagcacttataggcggttttttcttttggatttttgggctgttcaccgctgagcatcacgctataaaggtggttggaaccataaccataaccataattttgcgcttatacgcgatgtatgccaaattgggattaccgaaggtaaggtaa

SEQ ID NO: 38116 - protein, 151 aa, Unknown
  Obtained from environmental sample
  DOMAIN (40)...(124): UPF0126 domain
  misc_feature (1)..(151): Xaa is any amino acid
MLGNHPPLAFNKPAYVILCILAGALVIVAKNKITKYWLFVMITDAIGLGAFTAIGAIHAENAGAGGVAIICLAVLTAVGGGMLRDILANEIPQVLKSDFYATAALIGGFFFWIFGLFTAEHHAIKVVGTITITIILRLYAMYAKLGLPKVR

SEQ ID NO: 38117 - DNA, 366 bp, Unknown
  Obtained from environmental sample
  misc_feature (1)..(366): n is a, c, g, or t
atgaatgtagaggacggcctttgggaaaaatatgttgacgtgcctttttttgaatttcaatataccgaacaaaacaggaaaatcactgtaagaatgttgtattcaatgctgggaattgtcaggaacggaaggatatttctttattttccggttgagggcggctactccattcttgtaatgtcttcggaattcggagccgcgggggagcagcgtcagggttttatcagggtggattatgaagagcttcagtataacgcctttgatcttagcgccgacggaattttatcgggacttttggttgacgagtggctggtaaaacttgtgtggtggagaaccgacaaatttcttatagaaggctttcaataa

SEQ ID NO: 38118 - protein, 121 aa, Unknown
  Obtained from environmental sample
  misc_feature (1)..(121): Xaa is any amino acid
MNVEDGLWEKYVDVPFFEFQYTEQNRKITVRMLYSMLGIVRNGRIFLYFPVEGGYSILVMSSEFGAAGEQRQGFIRVDYEELQYNAFDLSADGILSGLLVDEWLVKLVWWRTDKFLIEGFQ

SEQ ID NO: 38119 - DNA, 741 bp, Unknown
  Obtained from environmental sample
  misc_feature (1)..(741): n is a, c, g, or t
ttgaaaaacaatacaaaaatatcggtgttctcgggaaccggcaacaacggtgccgacgctatagtaatgctccgctcgtggattctttcaggccttgtcgaagcgtcaaactgtgcgcttgttgtaagccgtcagccaaaaagcggggaaacaggcccgtggacagaaatgctaaagtcattggaaaaaatgaaggttccggtacttgcatggaacggcgaaacaggaaaggacttaatcagcaattctgatatcgtaattgacggcatttccggaaccggcatttcatgtcatattagcggtgctgctgcggaaatggttcacgtgataaattcccaaaagtcaaagaagcctctcgttgtctcggtggatatcccttcgggaaattcagacgaatggaagccgggtatgccgatagtcaaggcggacgtaactttggcaatcgagcctcaaaagtgttgtatttataatcccgctgccaggccttactccggaattattttgcctgtaaacggaatctttccaaaagaaatcatagaccgctaccgttgccgcggcgcaaaactgcttgactgggaaagcgcacgcataagggttccgaaagtaaaagcatatacccataaatacgaaaggggatgcgtggagatccgcgcgggctccgccggaacaacaggggcagctttaattgcggcgcggggcgcacaggcggggggggctgggcttgtccaccctagtggctga

SEQ ID NO: 38120 - protein, 246 aa, Unknown
  Obtained from environmental sample
  DOMAIN (2)...(154): YjeF-related protein N-terminus
  misc_feature (1)..(246): Xaa is any amino acid
MKNNTKISVFSGTGNNGADAIVMLRSWILSGLVEASNCALVVSRQPKSGETGPWTEMLKSLEKMKVPVLAWNGETGKDLISNSDIVIDGISGTGISCHISGAAAEMVHVINSQKSKKPLVVSVDIPSGNSDEWKPGMPIVKADVTLAIEPQKCCIYNPAARPYSGIILPVNGIFPKEIIDRYRCRGAKLLDWESARIRVPKVKAYTHKYERGCVEIRAGSAGTTGAALIAARGAQAGGAGLVHPSG

SEQ ID NO: 38121 - DNA, 1035 bp, Unknown
  Obtained from environmental sample
  misc_feature (1)..(1035): n is a, c, g, or t
atgtatgatatcgcgattattggactgggaccggcaggcgctacttttgcgcggttattgaatccaaagtataaagtaattgcagttgacaggaaaaaccagaatataaataaatgctgcggaggattattgtctcctgacgcgcaaaaaatgctcgctcaatttgatatttgtctaccaaacgatattttagcggatcctcaaatattttccgtaaaaacaatggattttgataataagatagaaagattttatcaacggttctatataaatatgaataggtctaaatttgataaatttttaatttctttaataccaaaaaatattgaaatatgcactgatagcgtttgtacgaagattgaaaaagagaatggcatctttcatttggaaataaaaacaaaagaagaaaaaagaattgaagaagccaaaattgtaattggagcggatggcgcaaattctattgtacggaatacattttacaaaaaaaacaaaattaaaaaatatacagctattcaggaatggtatgaaggaaaaacaatatcacctttttattcatgtatttttgacaaagagataacagactcatattgttggacaatatcaaaggataaccattttattattggtggagcgttcccaacggcgggcagtaacgaaaaatttgaattactaaaaaataaaataaaaaacagcggtatctattttgagaaattaataaaaagagaagggtgttttgtttatttgaataaagggcttaccggcacttgcacagggaaaaaaggagcgtatttaattggcgaggcggcgggaatgatcagcccaagttcattggaaggaataagttattctatggaaagctccaaaatattagcggaaataattaacgagggaattaaaaatattgggaataaatattttaataggactttagggataagattaaaattgttacttaaaatatttaaaatgccgtttatgtacaacaaatttttaagactgatggtaatgaagagcgggataaggctattaaaataa

SEQ ID NO: 38122 - protein, 344 aa, Unknown
  Obtained from environmental sample
  misc_feature (1)..(344): Xaa is any amino acid
MYDIAIIGLGPAGATFARLLNPKYKVIAVDRKNQNINKCCGGLLSPDAQKMLAQFDICLPNDILADPQIFSVKTMDFDNKIERFYQRFYINMNRSKFDKFLISLIPKNIEICTDSVCTKIEKENGIFHLEIKTKEEKRIEEAKIVIGADGANSIVRNTFYKKNKIKKYTAIQEWYEGKTISPFYSCIFDKEITDSYCWTISKDNHFIIGGAFPTAGSNEKFELLKNKIKNSGIYFEKLIKREGCFVYLNKGLTGTCTGKKGAYLIGEAAGMISPSSLEGISYSMESSKILAEIINEGIKNIGNKYFNRTLGIRLKLLLKIFKMPFMYNKFLRLMVMKSGIRLLK

SEQ ID NO: 38123 - DNA, 1083 bp, Unknown
  Obtained from environmental sample
  misc_feature (1)..(1083): n is a, c, g, or t
ttgtttatccacgtaactcttgttccttacctaaaaagctctggcgaacataaatcaaaaccaactcaacattcggtaaaagaactccgagcaatgggagtctctccaagcattataatagcgagagcagacgaacctattaacaatggcatcaaagaaaaaatagctcttttttgcaatgtaaaaccagactgtgtaattgaaaacataactctccccactttgtacgaagcaccgcttatgcttcataaaaacggcttggataatgttgtttgccgtgaattgaaattcaccgctcccgaaccggatttgaacgaatggcaagctatgatgcaaaaagttgcaacaagaaacagagaagtttgcattgccattgttggaaaatatgtgcaacttcacgatgcatatctctccattattgaaagtttgaaccacgcagggtttgaagtgggtgcaaaagtgaaaataagttggatagacagcaaaattataactaatgaaaataccggagaaatactgagcggaatagacggaatgattgtccctggtggttttggagatagaggcattgaaggaaaaatagccgcctgccgatatgcaagagaaaacaacgtgccatatttgggtatttgcctaggtatgcaaattgccgttattgaatttgcgcgcaatgtttgcgaactcaaagatgcacattccagcgaatttgacgaaacctctccgcaccgcgtcattgacctgatgcccgatcaggccggcatggttggttcaggcggcaccatgaggctgggcgcgtatccgtgcaaaattatacagggtacgctgctgcacaggctgtacggcgcggacgaaataagcgaaaggcaccgccaccgttttgaattcagcaatgactaccgcgagattctgacaggcaaaggaatggttatctgcggagtgtcgcctaacggaaatcttgtcgaggcgatagaactgccggaccgccgtttttttaccggggttcagttccatcccgagttcaagagccgccccaacaggccgcacccgctgtttttagggctggtaaaagcagcgattaaatag

SEQ ID NO: 38124 - protein, 360 aa, Unknown
  Obtained from environmental sample
  DOMAIN (123)...(339): Peptidase C26
  misc_feature (1)..(360): Xaa is any amino acid
MFIHVTLVPYLKSSGEHKSKPTQHSVKELRAMGVSPSIIIARADEPINNGIKEKIALFCNVKPDCVIENITLPTLYEAPLMLHKNGLDNVVCRELKFTAPEPDLNEWQAMMQKVATRNREVCIAIVGKYVQLHDAYLSIIESLNHAGFEVGAKVKISWIDSKIITNENTGEILSGIDGMIVPGGFGDRGIEGKIAACRYARENNVPYLGICLGMQIAVIEFARNVCELKDAHSSEFDETSPHRVIDLMPDQAGMVGSGGTMRLGAYPCKIIQGTLLHRLYGADEISERHRHRFEFSNDYREILTGKGMVICGVSPNGNLVEAIELPDRRFFTGVQFHPEFKSRPNRPHPLFLGLVKAAIK

SEQ ID NO: 38125 - DNA, 339 bp, Unknown
  Obtained from environmental sample
  misc_feature (1)..(339): n is a, c, g, or t
atgacgcggtgcggagaggtttcgtcaaattcgctggaatgtgcatctttgagttcgcaaacattgcgcgcaaattcaataacggcaatttgcatacctaggcaaatacccaaatatggcacgttgttttctcttgcatatcggcaggcggctatttttccttcaatgcctctatctccaaaaccaccagggacaatcattccgtctattccgctcagtatttctccggtattttcattagttataattttgctgtctatccaacttattttcacttttgcacccacttcaaaccctgcgtggttcaaactttcaataatggagagatatgcatcgtga

SEQ ID NO: 38126 - protein, 112 aa, Unknown
  Obtained from environmental sample
  misc_feature (1)..(112): Xaa is any amino acid
MTRCGEVSSNSLECASLSSQTLRANSITAICIPRQIPKYGTLFSLAYRQAAIFPSMPLSPKPPGTIIPSIPLSISPVFSLVIILLSIQLIFTFAPTSNPAWFKLSIMERYAS

SEQ ID NO: 38127 - DNA, 510 bp, Unknown
  Obtained from environmental sample
  misc_feature (1)..(510): n is a, c, g, or t
ttggttcttttttttgtaattaaaacaaataaaattcttcaggaagctcccgaaaacgcgagaataatgaaattaaccgacattcaggaagcccctcccccggaaccggaaattccgcaggtggaagcaattgccgaaaaaatgatagaaaccgacgtcgcgcccgtccaacaggtgcttgcggcgggagtatttcttaccgagacgtatcttgcgatgaatcaggtttccgtgcctcccaagtttgactccggcttggttatgaaatcccttgtctaccctcccatcgcgcttcgttccggcattgagggaaaggtcatccttgaattatttgtagaccgcaccggtatggtgcaaaaaattgtagtcttaaaagaagatcctcccgaccgaggtttcggcgaagcggcggtaaaggcgttcacggacagaaaaggcataccagcatacgccaacggagagcccgtctccgcaaggtaccgctacccggtgacttttaaattgaaataa

SEQ ID NO: 38128 - protein, 169 aa, Unknown
  Obtained from environmental sample
  DOMAIN (90)...(124): Gram-negative bacterial tonB protein
  misc_feature (1)..(169): Xaa is any amino acid
MVLFFVIKTNKILQEAPENARIMKLTDIQEAPPPEPEIPQVEAIAEKMIETDVAPVQQVLAAGVFLTETYLAMNQVSVPPKFDSGLVMKSLVYPPIALRSGIEGKVILELFVDRTGMVQKIVVLKEDPPDRGFGEAAVKAFTDRKGIPAYANGEPVSARYRYPVTFKLK

SEQ ID NO: 38129 - DNA, 303 bp, Unknown
  Obtained from environmental sample
  misc_feature (1)..(303): n is a, c, g, or t
atgaggcgaaagaagcggggcggagaatatcgcggtggggacaacaagcgcgcgtactttggaaagcgcgtacagcgaggggaaaattgtctctggagagggaagcaccgcaattntatttatcccggctacaaatttaaaatagcggacgctctttttacaaattttcacacccccgaatccacgcttcttatgcttgtgtcggcttttgccggaagagagttaattctggaaagttacgcacaagccgtaaaagaaggataccgctttttcagctacggcgacgctatgttgatttattga

SEQ ID NO: 38130 - protein, 100 aa, Unknown
  Obtained from environmental sample
  misc_feature (1)..(100): Xaa is any amino acid
MRRKKRGGEYRGGDNKRAYFGKRVQRGENCLWRGKHRNXIYPGYKFKIADALFTNFHTPESTLLMLVSAFAGRELILESYAQAVKEGYRFFSYGDAMLIY

SEQ ID NO: 38131 - DNA, 1023 bp, Unknown
  Obtained from environmental sample
  misc_feature (1)..(1023): n is a, c, g, or t
atgagccgtatcttattcagcaggtttactgcagcgaagccctcgcggaagaatggtaacaagccttgcatacggacatttggggcttacgcccgcgggcacaaacggcgaaggttctcttttttaatgaagacaagcgatttttcctttcatcttcccgaagctcttatcgcgcagtttccgcccgaagagcgcgggaagagcagactgatgacgctggatcacataacgggaaaaaggaatcaccgcatggttgaagaactgcccgaaattttaagcgcaaaagaatttatcagcaaagacggacgtttaccgcttttggttttcaataattcaaaagtaagaaaggcaaggcttatcggaatatctgaggaaacgggggcgaaagttgagtttcttttggttgaaaaattaaaaagcggaagctggaaaaccattgtaaagcacgcaaaacgccgcaggccttttagccgttatgtgttttacgatacggccggcgcgcaaataggaagagcgaaaatagtattaggaataaacgagtttagaatacttgaatttgaaaacccgatttcagaagactggctggaaaagtacgggcatattccgctgccgccgtatataaagcgcgaagacgccccgtccgacgcaagccgttatcagacaatttacgcgaaggaaacaggttcgtcagcggcgcctacggccggcctgcattttacgcgggaaattatggacaggctttccttaaacggaatagaaagcgtttttgtcacgcttcatgtcgggatggggactttttacccctgtagaagcgaanacattgaagatcatcccatgcacagcgaaccgttggncatagatgaaaataccgcgcgaaaaataaatgaggcgaaagaagcggggcggagaatatcgcggtggggacaacaagcgcgcgtactttggaaagcgcgtacagcgaggggaaaattgtctctggagagggaagcaccgcaattntatttatcccggctacaaatttaa

SEQ ID NO: 38132 - protein, 340 aa, Unknown
  Obtained from environmental sample
  DOMAIN (43)...(271): Queuosine biosynthesis protein
  misc_feature (1)..(340): Xaa is any amino acid
MSRILFSRFTAAKPSRKNGNKPCIRTFGAYARGHKRRRFSFLMKTSDFSFHLPEALIAQFPPEERGKSRLMTLDHITGKRNHRMVEELPEILSAKEFISKDGRLPLLVFNNSKVRKARLIGISEETGAKVEFLLVEKLKSGSWKTIVKHAKRRRPFSRYVFYDTAGAQIGRAKIVLGINEFRILEFENPISEDWLEKYGHIPLPPYIKREDAPSDASRYQTIYAKETGSSAAPTAGLHFTREIMDRLSLNGIESVFVTLHVGMGTFYPCRSEXIEDHPMHSEPLXIDENTARKINEAKEAGRRISRWGQQARVLWKARTARGKLSLEREAPQXYLSRLQI

SEQ ID NO: 38133 - DNA, 444 bp, Unknown
  Obtained from environmental sample
  misc_feature (1)..(444): n is a, c, g, or t
gtgaatatcaatgaatgtcttctcaacgacggaaacgattatccggtcggcgcgtcgacaataggcgctatgatcgcgtcgtcgggaaaagagcgcctttgggacgagcgggcgggcggtattgatattgtcgataccatcgttatccactacatgagcgccgtagccgtcgcccctgatgatccgtacaatctcggtcaactcctgaaaatattctgcgatttcggtgtaagcagccattatttaatcaatcgtgacggagatatccgcaacttagtccccgaggataagaaagcctggcatgccggaacaagcataatgccggagccggacaaccgtacgggtgtcaacgaattttccatagggattgagcttgcggcaacggaaagtccgggttcacgtccgtcccatacgagtcgcttcgcgggtatgtatggatattga

SEQ ID NO: 38134 - protein, 147 aa, Unknown
  Obtained from environmental sample
  misc_feature (1)..(147): Xaa is any amino acid
MNINECLLNDGNDYPVGASTIGAMIASSGKERLWDERAGGIDIVDTIVIHYMSAVAVAPDDPYNLGQLLKIFCDFGVSSHYLINRDGDIRNLVPEDKKAWHAGTSIMPEPDNRTGVNEFSIGIELAATESPGSRPSHTSRFAGMYGY

SEQ ID NO: 38135 - DNA, 465 bp, Unknown
  Obtained from environmental sample
  misc_feature (1)..(465): n is a, c, g, or t
ttggttcataatgcattttcagaatataggattagaaacaatagagaattttttgaaatggatccagaaagggccgtttccgcattaagaatatcaggagcgcctgaaattaaattagataatgagatgatcgatgaagaaggcacgattattgaagagaataaatcaaaaatatacaaaaaacgtttttccttcagttatgtgaatatacctattggggcagaattaacttacactcgtgatgataatataaaatgcattgtatcatctgataatgaggttgaatataatgataaaaaatattcattaagcaaacttgctgatgaattattatctgagaatgggtataattggaaatctgtacagggccctttatattttaaatataatgaaaaaacactttatgagatgaaaaaagaaattgaaaaaaaattattaaatgaagataatgaaaatgaacaatga

SEQ ID NO: 38136 - protein, 154 aa, Unknown
  Obtained from environmental sample
  misc_feature (1)..(154): Xaa is any amino acid
MVHNAFSEYRIRNNREFFEMDPERAVSALRISGAPEIKLDNEMIDEEGTIIEENKSKIYKKRFSFSYVNIPIGAELTYTRDDNIKCIVSSDNEVEYNDKKYSLSKLADELLSENGYNWKSVQGPLYFKYNEKTLYEMKKEIEKKLLNEDNENEQ

SEQ ID NO: 38137 - DNA, 462 bp, Unknown
  Obtained from environmental sample
  misc_feature (1)..(462): n is a, c, g, or t
atggcaatgaaaagaacagacggcccaattgtggtgggcccttacaaggcagaacacagttgttttgcgaaagaagatcccgaatggaagaataagctccgcacaggcgcttacatcgttaaaaagcctgccgggcctgccgatgtggttcttatcgccaccggttcggaagtaaacctcgccctggcagccgcggagctttcaggaaaaaatgtgcaggtggtttccatgatcagccgggaactctttgattcccaaagcgaagccgtcagaaacagcgttgttcccccgggcgtgagaacggttgtctgcgaagctgctgtccgccagggctgggaacgctgggcaaaacccgaagacatcttcacaatcgaccgcttcggcgagtcaggcccctatgagaaagcggcggaacatcttgggtttacggcgaaggcgttggctggggtcattgggcgatga

SEQ ID NO: 38138 - protein, 153 aa, Unknown
  Obtained from environmental sample
  DOMAIN (37)...(147): Transketolase, C-terminal domain
  misc_feature (1)..(153): Xaa is any amino acid
MAMKRTDGPIVVGPYKAEHSCFAKEDPEWKNKLRTGAYIVKKPAGPADVVLIATGSEVNLALAAAELSGKNVQVVSMISRELFDSQSEAVRNSVVPPGVRTVVCEAAVRQGWERWAKPEDIFTIDRFGESGPYEKAAEHLGFTAKALAGVIGR

SEQ ID NO: 38139 - DNA, 729 bp, Unknown
  Obtained from environmental sample
  misc_feature (1)..(729): n is a, c, g, or t
gtgaaaaagataaatactgccgctatacttgaagctgtcgcgattattgtttttattatttatatgctgccgttctttcttataataataaattcatcaaagccgtctttgaaaattattatgaacccgcttgctcttccggacagcccgtctcagcttataaaaaatattaaaacggttttcggaagttccaatgtccgttatgtgtcgtcatttttttctacaataataataacggtaatttccgtagggcttcttgtgctgatttcctcaatggcctcctgggtgcttgtgcgcacaaaaacaaagctgtcaagcgcggtattcatggtatttgtcgcggctatggtaattccgtttcaggttgtaatgtttcctctgattacatggtttcatattatagaagtaaaactcgggctttttgagactcctttccggctgctacagaattatccgggaattatttttgcttatctgggtttcggctcgtcgctttcaatattcctcttccacgggtttatcaaatccgttccgcttgagcttgaggaagccgcaactatagacggctgtacaaaaccggaaacattttttaagattgttttccctatactgacaccgattaccgttaccgtgatcatcttaaacggaatgtggatttggaatgattttcttctgcccctgcttgtacttggttcggaaatatggtgcggacgctgccgctggctgtag

SEQ ID NO: 38140 - protein, 242 aa, Unknown
  Obtained from environmental sample
  DOMAIN (68)...(241): Binding-protein-dependent transport system inner membrane component
  misc_feature (1)..(242): Xaa is any amino acid
MKKINTAAILEAVAIIVFIIYMLPFFLIIINSSKPSLKIIMNPLALPDSPSQLIKNIKTVFGSSNVRYVSSFFSTIIITVISVGLLVLISSMASWVLVRTKTKLSSAVFMVFVAAMVIPFQVVMFPLITWFHIIEVKLGLFETPFRLLQNYPGIIFAYLGFGSSLSIFLFHGFIKSVPLELEEAATIDGCTKPETFFKIVFPILTPITVTVIILNGMWIWNDFLLPLLVLGSEIWCGRCRWL

SEQ ID NO: 38141 - DNA, 810 bp, Unknown
  Obtained from environmental sample
  misc_feature (1)..(810): n is a, c, g, or t
atggtcgtttattccgacaacgggtttgttttgggaaattacctgccggaatttatagggaaacagattgacacggaaacgcaatacggcccttacttgaaagaagtcaaagaggtcatcaaaaacgcgcaggaatggcagggaaaagcttacgaccccgaactgaaaacaaacatggtaatggcggtagccaatatccccataggggtttccccgacaacatggtctgtaatggtcggttcaaccgaggcttacatcctgaaagacgtcaacgcgatgagaaactttgtcattgtccttgcctcaatagccctcgcggtggcggtggcgcttatataccttgtcctgagcaggaccaccgctccgatcgtcaaagtggcggacacgctgaaagacatctccgaaggcgaaggcgacctgacgcggactattaccgtcagttccaacgacgagataggcgacctcgccctgtacttcaacaatacgctggaaaaaatcaagaatatgatcatccatatcaaggacgaggcgaacggcctgtcggagataggcaacgacctcgccggcaacatgaccgagaccgccgccgcggtgaaccagattaccgccaacatccagagcatcaagggcaggattattaaccagagcgccagcgtcacccagaccaacgccaccatggaacaggtcatcgtcaacatcaacaagctcaacgaccatgtggaagaccagagcactaacatttcccaggcttcgtcagccattgaagaaatggtggccaatgttaattcggtaaccccaaaccctgggtaa

SEQ ID NO: 38142 - protein, 269 aa, Unknown
  Obtained from environmental sample
  DOMAIN (98)...(168): HAMP domain
  misc_feature (1)..(269): Xaa is any amino acid
MVVYSDNGFVLGNYLPEFIGKQIDTETQYGPYLKEVKEVIKNAQEWQGKAYDPELKTNMVMAVANIPIGVSPTTWSVMVGSTEAYILKDVNAMRNFVIVLASIALAVAVALIYLVLSRTTAPIVKVADTLKDISEGEGDLTRTITVSSNDEIGDLALYFNNTLEKIKNMIIHIKDEANGLSEIGNDLAGNMTETAAAVNQITANIQSIKGRIINQSASVTQTNATMEQVIVNINKLNDHVEDQSTNISQASSAIEEMVANVNSVTPNPG

SEQ ID NO: 38143 - DNA, 570 bp, Unknown
  Obtained from environmental sample
  misc_feature (1)..(570): n is a, c, g, or t
gtggagaactgtgtcatccttatcattggcgctaaatattctggtaaacgcctgtgtgccagggctttaagtgaaattattggcggcaaggctgttgacctggatgggcttgtggaagagcaaactggcaagacaccgagggaactttttatcgagggacatgtcttttttaaaaaagctgaagtccgcgctctggcctctgtgattcaagggcccatgtctcaaatagaaggggaaaatctggtcattgccgcgggcggcggaattatcgacaatgacgaagccatgacacttatttcgaaagccagggttccgtccgcggacaggcagttaatcaccgtttatctggaaatatccgctgaaaccgcatggcagcacataatagatagctcaaacgatggggggcttccgcctttgatcaatacaaataaccccaaagaaacccattttgctttgcataatcgcagggcaaaagcctatagggcagtagccggcatcacaatcctttcggaaaacaaaagccctgaagaaattgcaagggaaattgccgatagcctttcaaaaatctga

SEQ ID NO: 38144 - protein, 189 aa, Unknown
  Obtained from environmental sample
  DOMAIN (14)...(187): Shikimate kinase
  misc_feature (1)..(189): Xaa is any amino acid
MENCVILIIGAKYSGKRLCARALSEIIGGKAVDLDGLVEEQTGKTPRELFIEGHVFFKKAEVRALASVIQGPMSQIEGENLVIAAGGGIIDNDEAMTLISKARVPSADRQLITVYLEISAETAWQHIIDSSNDGGLPPLINTNNPKETHFALHNRRAKAYRAVAGITILSENKSPEEIAREIADSLSKI

SEQ ID NO: 38145 - DNA, 780 bp, Unknown
  Obtained from environmental sample
  misc_feature (1)..(780): n is a, c, g, or t
gtgatttttctgcataaattttttactttcaaaagggttatttcggacgcttttcttgaaaaatcaggcttgttttcctcaaattataaaaacatgccgctgtttacgggaaggctcatgttcccaatcgcggacaggcagggcagaattgtagcttttggaggcagggcaatgcccggagtcgtgcaaagcgacggaaaagagcctccaaaatacataaattccccggaaacggaaatttacaaaaagggccagaccctttacgctcttgacttggcccttcccgaaataaggaaatcaaagtcagtataccttgccgaggggtacatggacgtaatagcgcttcatcaggcggacattacaaacgccgtcgccccccttggaaccgcgtttacggaagagcaggccgcgcttttgcgccgctgggcggacaaaatcgtccttgtttttgacacggacgacgccggagaaaaggcggcgtataaggcgattatcacatgccgtaaaatagggtttaactgcgcgcttgcttccatgcggcagggcttgaaaaacgaggtacctcaggcggatagcgggaaatttaaggatcctgccgatattttacaaaaattcgggcctgagatattgaaaaaagttataaattgtactataaatgactttgagtaccttatttcgcgcagtaaattacagtataaagcgcaggggagcggaattaaccgcgcttcggaatttatgtttccgtatttggacgcgcttgacactgaagtgaacggataa

SEQ ID NO: 38146 - protein, 259 aa, Unknown
  Obtained from environmental sample
  DOMAIN (101)...(177): Toprim domain
  misc_feature (1)..(259): Xaa is any amino acid
MIFLHKFFTFKRVISDAFLEKSGLFSSNYKNMPLFTGRLMFPIADRQGRIVAFGGRAMPGVVQSDGKEPPKYINSPETEIYKKGQTLYALDLALPEIRKSKSVYLAEGYMDVIALHQADITNAVAPLGTAFTEEQAALLRRWADKIVLVFDTDDAGEKAAYKAIITCRKIGFNCALASMRQGLKNEVPQADSGKFKDPADILQKFGPEILKKVINCTINDFEYLISRSKLQYKAQGSGINRASEFMFPYLDALDTEVNG

SEQ ID NO: 38147 - DNA, 399 bp, Unknown
  Obtained from environmental sample
  misc_feature (1)..(399): n is a, c, g, or t
ttggaagactccaaaaagacgatgatcaacgggctggaacacgtcttgctgcgcttctgcgtggaactaacgaagaagattttgtcgtgcgaactggagacgaacaaggagataatcaccgcgacgataaagcgggcgctgtctatgatcgccgatcgcgagaacgtggtgatccgcgtgtcgccgggcgacatggaagcggccagcggcaataaagattttctaagctcggtgacggaacggttagagaatgtgcgtatagaggaagacacgcgaataagcaagggcgggtgcattatagaatcaaactccgggacggtggacgccaggctcggagtgcagctggatgaggtggcggatatggtggaaaaagcgtgggaatcatcggatatgtcgtga

SEQ ID NO: 38148 - protein, 132 aa, Unknown
  Obtained from environmental sample
  misc_feature (1)..(132): Xaa is any amino acid
MEDSKKTMINGLEHVLLRFCVELTKKILSCELETNKEIITATIKRALSMIADRENVVIRVSPGDMEAASGNKDFLSSVTERLENVRIEEDTRISKGGCIIESNSGTVDARLGVQLDEVADMVEKAWESSDMS

SEQ ID NO: 38149 - DNA, 900 bp, Unknown
  Obtained from environmental sample
  misc_feature (1)..(900): n is a, c, g, or t
gtgttgttctcaagcgccaaggttagcgactcaacctctttcttcagagtgtcgaccgtggagaatatgaggtctatggccgcgctgttgagcacgaagaccttctcccgcgccttgtccatgagactttcggtggcgtgggcgagcgcttggatggcgtcgagcgataggaagccggcgacgccctttatggtatggaagacgcggaacagttcgtttatgatgtcgacgtcggcaggtgtgaccctcagccttagcagcgcagcgtcggcgtttgcgaagtgctcctgcgcctcggctatgaactcggtgagcagcgacgcgtcgagggtggagacatcaatctcccgtttgaacttcacggcgggcttggccttcgccgtcgggtctacgaagaagccgtcggcgtcctgcttgagcggcggggcggcgggcttgggcggttcgtcttcggcggcgtccatatcgaaattgaggtctttggcaatgtcgcccccggcgttcacgggcgccgcctctccttcgccgccgccctcgccgtactggcactcgcggcgcaacacggtgagcgcctcgcctagcttagcgattccgtcggtcggggtgagctcctggaatatgatcttctcaacgagggctatgcaatcgttggcccccttctggacgcgttcgtcctcagagagcccgcgcaacttctcgaacttggagtggatgtccaccgcgagcgcctggttgtcggaggggtctacgaggatgagcgcccccgatatttcgtccaccatttcaagaaccgcggccatcgggtcggcgccatcgtccgcgccgccgctgcacttgcgtataagcgccgcgagcgcctccgcgaccttcgtcttgccgtcggccggagagatctcctga

SEQ ID NO: 38150 - protein, 299 aa, Unknown
  Obtained from environmental sample
  misc_feature (1)..(299): Xaa is any amino acid
MLFSSAKVSDSTSFFRVSTVENMRSMAALLSTKTFSRALSMRLSVAWASAWMASSDRKPATPFMVWKTRNSSFMMSTSAGVTLSLSSAASAFAKCSCASAMNSVSSDASRVETSISRLNFTAGLAFAVGSTKKPSASCLSGGAAGLGGSSSAASISKLRSLAMSPPAFTGAASPSPPPSPYWHSRRNTVSASPSLAIPSVGVSSWNMIFSTRAMQSLAPFWTRSSSESPRNFSNLEWMSTASAWLSEGSTRMSAPDISSTISRTAAIGSAPSSAPPLHLRISAASASATFVLPSAGEIS

SEQ ID NO: 38151 - DNA, 549 bp, Unknown
  Obtained from environmental sample
  misc_feature (1)..(549): n is a, c, g, or t
atggagttaaaactatcctatgcgtttaaagatattgatggattgaaattgtcaggtagttcgataccgttagaattaattgtacaggtttacaatataaattacggtcataattcggaaatactgaaaaaatgtgaaacattggatggatacagtaaatttataggcaaaataagagaatatcagaaaaagaaaaacccacttgaagaagcggcaataaatgcgataaactattgtataaagaacaatatacttaaagactatttagaggctcatgcctcggaggtattaaatatgctgataacggaatggaatcaagaggaatatttagaagtcgcaatcgaagaagcgcgtgaagaaggtcttgaacagggtcttaacgagggtcgcgaacaaggattagaacaaggaagagaacagggcatggaacaaggtcttaaacaaggcaaacaaataatcgcaaaaaatttactcgcagagggttcaacgccggaatttgtacagcgtatcacagggctttctttggaagaaatagagcgaaatggatag

SEQ ID NO: 38152 - protein, 182 aa, Unknown
  Obtained from environmental sample
  misc_feature (1)..(182): Xaa is any amino acid
MELKLSYAFKDIDGLKLSGSSIPLELIVQVYNINYGHNSEILKKCETLDGYSKFIGKIREYQKKKNPLEEAAINAINYCIKNNILKDYLEAHASEVLNMLITEWNQEEYLEVAIEEAREEGLEQGLNEGREQGLEQGREQGMEQGLKQGKQIIAKNLLAEGSTPEFVQRITGLSLEEIERNG

SEQ ID NO: 38153 - DNA, 384 bp, Unknown
  Obtained from environmental sample
  misc_feature (1)..(384): n is a, c, g, or t
ttgatcacttttgatgtgaatggtccgcgtaaaaacgccgttctttaccgaagcgcacagcctgtaagggagccgcgtgatttattaaacgccgttatggtgcaatcagggcttaggtctccatttattgattatcctgttcccggtctttcttattattacgcgcttgtttatgaagatgaaatatcangcggcagtctgaaaattacccccggtattaacgcgacaatttccgccgtaaccgtatacggcggcggcatgacggaaagggcgctgcgccctataccgcttccagccatgacattgaacaacgcttttgccggacggctatttcctgccgggactcaagcgttccgcctcattgagcggcgcttcattgagtga

SEQ ID NO: 38154 - protein, 127 aa, Unknown
  Obtained from environmental sample
  misc_feature (1)..(127): Xaa is any amino acid
MITFDVNGPRKNAVLYRSAQPVREPRDLLNAVMVQSGLRSPFIDYPVPGLSYYYALVYEDEISXGSLKITPGINATISAVTVYGGGMTERALRPIPLPAMTLNNAFAGRLFPAGTQAFRLIERRFIE

SEQ ID NO: 38155 - DNA, 990 bp, Unknown
  Obtained from environmental sample
  misc_feature (1)..(990): n is a, c, g, or t
ttgatactcgacaagctgccctttaagctgctggaagggattattatcgccggcctcacttttaaggccagggccggatatatttatgttcgcggtgagtatcgcaacattcagaagcggctgattgaagccattaaaaacacaaaggacgcgggcttccttggcaagaacatacttggcactggatttgactttgacattcatgtaatatccggcgccggcgcttatgtttgcggcgagaattccgcgctgcttaattccaccgagggtaaggtcggcaggccccgcatcaaaccgccccatcttgccgaggttggactgttcctaaagcctacgctagtaaacaatgtcgaatcgctcgcgagcatccccgctattatcgaactgggaggagatgaatacctgaaaataggccatcccgattccggtggaacaaagctgatatgcctgtccggccatgttcagaaccggggagtcttcgagattccgctcggcaagctgaccctgcgggagattatctacgatcctgaattgggaggcggaattcaacaaggcaaaaaacttaaatttttccaccttggcgggcaaagcggccccataggcgggccggaacttttggacaccgtatacagttataccgatatgagaaaagccggtctgggagtcggttccggcgcaatcgttgtcatggacgagacagtttcgattcttgaatatctgcaaagcgtcagtgaatttttcatccatgaatcctgcggcaagtgcataccctgccgcgagggcaacagacaggttttaacgatacttaaaaaaatctcagcatcaggagcaggcgtcgctgttagcgccgatgaacatgatctggataccctgcgccgccttatccgtaccatgacagacgcttcgttctgcggccttgggcagacagccgccaaagccctggagagcgcgtggaaatgctttaagacggaaattgaggtgaaaccatga

SEQ ID NO: 38156 - protein, 329 aa, Unknown
  Obtained from environmental sample
  DOMAIN (1)...(196): Respiratory-chain NADH dehydrogenase 51 Kd subunit
  misc_feature (1)..(329): Xaa is any amino acid
MILDKLPFKLLEGIIIAGLTFKARAGYIYVRGEYRNIQKRLIEAIKNTKDAGFLGKNILGTGFDFDIHVISGAGAYVCGENSALLNSTEGKVGRPRIKPPHLAEVGLFLKPTLVNNVESLASIPAIIELGGDEYLKIGHPDSGGTKLICLSGHVQNRGVFEIPLGKLTLREIIYDPELGGGIQQGKKLKFFHLGGQSGPIGGPELLDTVYSYTDMRKAGLGVGSGAIVVMDETVSILEYLQSVSEFFIHESCGKCIPCREGNRQVLTILKKISASGAGVAVSADEHDLDTLRRLIRTMTDASFCGLGQTAAKALESAWKCFKTEIEVKP

SEQ ID NO: 38157 - DNA, 714 bp, Unknown
  Obtained from environmental sample
  misc_feature (1)..(714): n is a, c, g, or t
atggagcagagggcgccggggcatacggtttgcgacggcaaaatatacagggaaggctttcttgattataagaaaaaaatcgggaaggaacttgaaaagattgattacatcaatgacccaaaggcctttgaaaagcaggaagaactcaaggcgatggctatttgctgcgacgcgataatcatctacgccaaccgctacgccgacgaagccgagcgcctggccgcgcttgaaacgaacaagtcccgcaaggaagagctgcttgccatcgcgaaaaattgccgccgcgtccccgcccacaagcctgaaaatttttggcaggctcttcagatgtactggttcgttcatgtttcggtaacttcagagcttaacacctgggatgcgttttcgcccggcagactcgaccagcatttatacccgttctacaaaaaagagtgccgggaaggaaaccttagcgaagagagagccagggaactcttgcagtgcttctgggtaaaattcaacaaccagccggcgcctccgaaggtgggcattacccttgcagagagcgggacctacaccgacttctgcaacataaactctggcggcctgacctccgacggcagcgacggggtaaacgatgtcacatatctggttttggaagttattgacgagatgcagcttgtccagccgagcagcaacattcagttgagcaagaaaacccggacaagttcttaa

SEQ ID NO: 38158 - protein, 237 aa, Unknown
  Obtained from environmental sample
  misc_feature (1)..(237): Xaa is any amino acid
MEQRAPGHTVCDGKIYREGFLDYKKKIGKELEKIDYINDPKAFEKQEELKAMAICCDAIIIYANRYADEAERLAALETNKSRKEELLAIAKNCRRVPAHKPENFWQALQMYWFVHVSVTSELNTWDAFSPGRLDQHLYPFYKKECREGNLSEERARELLQCFWVKFNNQPAPPKVGITLAESGTYTDFCNINSGGLTSDGSDGVNDVTYLVLEVIDEMQLVQPSSNIQLSKKTRTSS

SEQ ID NO: 38159 - DNA, 309 bp, Unknown
  Obtained from environmental sample
  misc_feature (1)..(309): n is a, c, g, or t
gtggaagaacttgtccggcagggaaaaaagatagaggatgccagggacggcggcacttccggctgcgttgaggccggaacattcggcaaggaatgttacgctttaacaggctatttcaaccttgttaaggttttggaaattacgctgaataacggctatgacccaatcgcgaaaaaacagcttgggccaaaaacaggcgaggcttcatcatttaaaactttcgaagatctattcaccgcttacgaaaagcaggtaaggcattttatcgatataaaagtcgcaggcnataatataatcgaagcgctttaa

SEQ ID NO: 38160 - protein, 102 aa, Unknown
  Obtained from environmental sample
  misc_feature (1)..(102): Xaa is any amino acid
MEELVRQGKKIEDARDGGTSGCVEAGTFGKECYALTGYFNLVKVLEITLNNGYDPIAKKQLGPKTGEASSFKTFEDLFTAYEKQVRHFIDIKVAGXNIIEAL

SEQ ID NO: 38161 - DNA, 990 bp, Unknown
  Obtained from environmental sample
  misc_feature (1)..(990): n is a, c, g, or t
atgctgggagtttcctataaccggcctgtttttattgacgagaacataaaacttgaattttacgatgccggccacattctgggttccgcaatggcttttcttacggttaagaaagacggtaaggaggtaaaaattctcgcttcaggagaccttggccggcccggaaaaccaatcatccgtgatccggacaagcccccagccccggactacgttatccttgaaagcacctatggtgacaggcttcatgaaaaatcaactgatgccatggagaagctggccgagattaccaagcgggtagtaaaaaacaggggaaagctgctgattccgtcttttgctatagagagaacacaggaattagtctactttttccaccttatggtcgacgatgggatcattcctgaaataccgatctatgtggattcgcctatggctacaaacgccactaccatcttccaggtacatcctgagtgttacgatgaggaaatcaaggaagcttttgtaaagcatcataataatcctttcgggtttaactcacttcattttactaccagtgtttttgagtccaaggctctgaacaaccgccctggaccgcttatcatcatttccgcggacggtatgtgcgaagccggacgcattcaacatcacctggcccataacataggagaccccaataccatcgttttgatcgtgggctttatggcggaaaataccctgggccgccgtatccttgaaaaagctgatgaggtaaagattcacaataattggctgaaacgtcgcgctgccgttgaaaagatcaacgctttcagcgcccacgcggattacggcgaggcgataaaatggcttaaatcactggacacttcccacctgaaaaaaatctttatggttcacggagaacccaaaggccaggctatttttaagaagcatcttggcgaagcaggcttttcaaacgtggatattgtgaagtatgggcaggtttatgatttgagttag

SEQ ID NO: 38162 - protein, 329 aa, Unknown
  Obtained from environmental sample
  DOMAIN (254)...(300): RNA-metabolising metallo-beta-lactamase
  misc_feature (1)..(329): Xaa is any amino acid
MLGVSYNRPVFIDENIKLEFYDAGHILGSAMAFLTVKKDGKEVKILASGDLGRPGKPIIRDPDKPPAPDYVILESTYGDRLHEKSTDAMEKLAEITKRVVKNRGKLLIPSFAIERTQELVYFFHLMVDDGIIPEIPIYVDSPMATNATTIFQVHPECYDEEIKEAFVKHHNNPFGFNSLHFTTSVFESKALNNRPGPLIIISADGMCEAGRIQHHLAHNIGDPNTIVLIVGFMAENTLGRRILEKADEVKIHNNWLKRRAAVEKINAFSAHADYGEAIKWLKSLDTSHLKKIFMVHGEPKGQAIFKKHLGEAGFSNVDIVKYGQVYDLS

SEQ ID NO: 38163 - DNA, 702 bp, Unknown
  Obtained from environmental sample
  misc_feature (1)..(702): n is a, c, g, or t
ttgactgcttacggtcaaaaaatcgaggggagtaaaccaaaaggggcagagagggtcgaattaaaagcctatactctggcgggtttcatcccctggttcgatgaatttgaagaagacgttttcactgatctgggggctatgttcgtggatgagtttttggaaacttatggacaggaatttgaccgccagtgtctactcgccgataacgatccgttcaccggggctatgtcatgcgccgatgtaacgaaagttacgattgccggaaactccattgacgatctggcatggaaagattttagggacgcggtttatagggttccggcagaggaacggaaagattgttgctggtttttgaatgaaaccgtgctaaaccatgttgccaatatcgaggacactacaggccgtccgatttggcggcggcctacagaggctatgccggggcgtctggatttgtacccttaccatgaggtttcaatacttccgcagattgcggatattgaagaagaccaggcgtttgctattttttgtaatccaaaaagaattcagcatggcaacaggcggggaattgaattgaaaaaatttgacgctactactgaaagtctggaatatggggaactgtttttaaggttcagaaagcgtgatggttttttggtaacacgcccaaaggggaatatggtcattctgaaaactaaagcttcttaa

SEQ ID NO: 38164 - protein, 233 aa, Unknown
  Obtained from environmental sample
  misc_feature (1)..(233): Xaa is any amino acid
MTAYGQKIEGSKPKGAERVELKAYTLAGFIPWFDEFEEDVFTDLGAMFVDEFLETYGQEFDRQCLLADNDPFTGAMSCADVTKVTIAGNSIDDLAWKDFRDAVYRVPAEERKDCCWFLNETVLNHVANIEDTTGRPIWRRPTEAMPGRLDLYPYHEVSILPQIADIEEDQAFAIFCNPKRIQHGNRRGIELKKFDATTESLEYGELFLRFRKRDGFLVTRPKGNMVILKTKAS

SEQ ID NO: 38165 - DNA, 810 bp, Unknown
  Obtained from environmental sample
  misc_feature (1)..(810): n is a, c, g, or t
atgaaagtaatattagccggctacggtaaaatggggcggctccttgaaaccaagctccacgaaaagggccataatgtccttgctgcggttgatccgtcgctttcaggaagcagcgccaatgcctcttccactgtgttttacccttccctaaaagatgccttaggcggcaatccggggagaagccttaaagacgccgatgtggttatagaattctccctgcccagcgtagcaccagttaatctcctttttcttaccaatgagaaaatccccgtagtaacaggtactacaggctggtacggcaaactgcctgaaatcagcaaggccgtagattcctccggctcttccctgctttggtcatccaatttttccctcggggtcaatcttttttaccgtatagcttgctacgcagcgcgcctggctgacccgtttaaggagtatgatgtggcgggttttgaaacccaccacaacaacaaagcggacagcccttcaggtaccgcaaagaccctggtcgatctggtgcttggccagatgaccagaaaaaagaaagctgtgtaccagacgctggaaagaaaaccggaagaggatgagcttcactttgccagcctccgcgttggttcagtgccgggaacacacagccttgtctttgattcaaacgcggacaccatccagataacgcacacagcccgcagccgcgaaggctttgcctcaggcgcggttttggcggcggaatggctttccgccgaaaaacgggccggaatttttacaatggacgatgtcttaaataccgtcctaaaggaattattgaaatga

SEQ ID NO: 38166 - protein, 269 aa, Unknown
  Obtained from environmental sample
  DOMAIN (1)...(122): Dihydrodipicolinate reductase, N-terminus
  misc_feature (1)..(269): Xaa is any amino acid
MKVILAGYGKMGRLLETKLHEKGHNVLAAVDPSLSGSSANASSTVFYPSLKDALGGNPGRSLKDADVVIEFSLPSVAPVNLLFLTNEKIPVVTGTTGWYGKLPEISKAVDSSGSSLLWSSNFSLGVNLFYRIACYAARLADPFKEYDVAGFETHHNNKADSPSGTAKTLVDLVLGQMTRKKKAVYQTLERKPEEDELHFASLRVGSVPGTHSLVFDSNADTIQITHTARSREGFASGAVLAAEWLSAEKRAGIFTMDDVLNTVLKELLK

SEQ ID NO: 38167 - DNA, 819 bp, Unknown
  Obtained from environmental sample
  misc_feature (1)..(819): n is a, c, g, or t
atggctttccgccgaaaaacgggccggaatttttacaatggacgatgtcttaaataccgtcctaaaggaattattgaaatgaaagcattatccggagcatttaccgcccttgttaccccgatgaaagaaaacggagacgtggattacgacggtttcaggagactgattaattttcagctggaacagggaattgacggccttgttccccttggcactaccggggaaaccccgacactggaagaagacgaagaagaaaaacttatccgtattgccgttgacgaggttaagggcgccgttccggttattgtcggcacaggatccaacgatacaaaacacatgatcgcatatactagaagggctaaagacatgggtgcggacgccgccctggtggtaaccccctattacaacaagcccaacgacgacggcctttacaggcattttgaagccgccgccgccgtgggtattcctatcgtggtttacaacatcgcctcgcgaacggggcggaacatccccacccccctgatggaaaaaatagcctcgataagcggcatcgcaggcgtcaaggaagcctccggcgacctgggccagatgggggatgttttgcaaaccattgctttgccgcgaaaggacggtgcaaatcccttcgtcatcttctcgggggacgacggctttaccctgccgcttatttccctgggcggagacggcgtgatttcggttatttcanacctcgtaccggccagagtaaaagccctgacaaaagcgtgcctttcaggcgattttaaggagggcgaaagattcactttgaactgctcccgctga

SEQ ID NO: 38168 - protein, 272 aa, Unknown
  Obtained from environmental sample
  DOMAIN (29)...(272): Dihydrodipicolinate synthetase family
  misc_feature (1)..(272): Xaa is any amino acid
MAFRRKTGRNFYNGRCLKYRPKGIIEMKALSGAFTALVTPMKENGDVDYDGFRRLINFQLEQGIDGLVPLGTTGETPTLEEDEEEKLIRIAVDEVKGAVPVIVGTGSNDTKHMIAYTRRAKDMGADAALVVTPYYNKPNDDGLYRHFEAAAAVGIPIVVYNIASRTGRNIPTPLMEKIASISGIAGVKEASGDLGQMGDVLQTIALPRKDGANPFVIFSGDDGFTLPLISLGGDGVISVISXLVPARVKALTKACLSGDFKEGERFTLNCSR

SEQ ID NO: 38169 - DNA, 519 bp, Unknown
  Obtained from environmental sample
  misc_feature (1)..(519): n is a, c, g, or t
ttgcaaaacatcccccatctggcccaggtcgccggaggcttccttgacgcctgcgatgccgcttatcgaggctattttttccatcaggggggtggggatgttccgccccgttcgcgaggcgatgttgtaaaccacgataggaatacccacggcggcggcggcttcaaaatgcctgtaaaggccgtcgtcgttgggcttgttgtaatagggggttaccaccagggcggcgtccgcacccatgtctttagcccttctagtatatgcgatcatgtgttttgtatcgttggatcctgtgccgacaataaccggaacggcgcccttaacctcgtcaacggcaatacggataagtttttcttcttcgtcttcttccagtgtcggggtttccccggtagtgccaaggggaacaaggccgtcaattccctgttccagctgaaaattaatcagtctcctgaaaccgtcgtaatccacgtctccgttttctttcatcggggtaacaagggcggtaaatgctccggataa

SEQ ID NO: 38170 - protein, 172 aa, Unknown
  Obtained from environmental sample
  misc_feature (1)..(172): Xaa is any amino acid
MQNIPHLAQVAGGFLDACDAAYRGYFFHQGGGDVPPRSRGDVVNHDRNTHGGGGFKMPVKAVVVGLVVIGGYHQGGVRTHVFSPSSICDHVFCIVGSCADNNRNGALNLVNGNTDKFFFFVFFQCRGFPGSAKGNKAVNSLFQLKINQSPETVVIHVSVFFHRGNKGGKCSG

SEQ ID NO: 38171 - DNA, 552 bp, Unknown
  Obtained from environmental sample
  misc_feature (1)..(552): n is a, c, g, or t
atgcctttactgccattttctaatttccaaattaccggacatcagccttctgaaatgagtcaggcaaaactcgcggttcttatcgacgcggacaatacgcagcccggcatcattgaagggctgcttgacgaagtcgcgaaatacggcattgccagcgttaagcggatatacggcgactggacaagcaccaacctgcgttcatggaaagacaggctgctggaatacgccatacagccaatccagcaattcgcgtacaccgccgggaaaaacgccacggactcggccatgataattgacgcgatggatcttctctacacggaaaagcttgacggtttctgcattgtgtcaagcgattctgacttcacgcgccttgcggctcgcctgcgggaaagcggccgtaccgtctacggtttcggcgaaaagaaaacgccccgggcatttgtttctgtttgtgataaatttatttacacggagatcctcaaagaagatcaggaagaatccgaagacgaggacaacaggcacgcggcgaagccaaaaaaggattcaaggtga

SEQ ID NO: 38172 - protein, 183 aa, Unknown
  Obtained from environmental sample
  DOMAIN (21)...(165): Protein of unknown function DUF88
  misc_feature (1)..(183): Xaa is any amino acid
MPLLPFSNFQITGHQPSEMSQAKLAVLIDADNTQPGIIEGLLDEVAKYGIASVKRIYGDWTSTNLRSWKDRLLEYAIQPIQQFAYTAGKNATDSAMIIDAMDLLYTEKLDGFCIVSSDSDFTRLAARLRESGRTVYGFGEKKTPRAFVSVCDKFIYTEILKEDQEESEDEDNRHAAKPKKDSR

SEQ ID NO: 38173 - DNA, 303 bp, Unknown
  Obtained from environmental sample
  misc_feature (1)..(303): n is a, c, g, or t
gtgcgaatcacagtaaaagacgcggttgtccgttatgagaaacttgaggcgcggggtttggattatacgggcaaaaccatgatcgcgaaacaggcgatagccaggcggatgccggtagaagcaagctggccgggacggcagaaacaggagagcgttatcggcattccaaaagcgctggaaaaaaaagacgacgaaagcgttctggtcatggagtcggcggacggaaataccgttcatttaccactggggaagatcagccttttgcggcggatcaaaaaatccatttttgaaaataataattag

SEQ ID NO: 38174 - protein, 100 aa, Unknown
  Obtained from environmental sample
  misc_feature (1)..(100): Xaa is any amino acid
MRITVKDAVVRYEKLEARGLDYTGKTMIAKQAIARRMPVEASWPGRQKQESVIGIPKALEKKDDESVLVMESADGNTVHLPLGKISLLRRIKKSIFENNN

SEQ ID NO: 38175 - DNA, 753 bp, Unknown
  Obtained from environmental sample
  misc_feature (1)..(753): n is a, c, g, or t
atggattctccatttacactgttaatgtaccctgagattacatataacgacgcgatagaacttgcctctatttcccgcgttaccggaaccggattgaatgtcagctttgagataaacaaagacaccgccgtctcggcatttaaccggggtatttccgccgccgccgccatagatcttttacagcggctgtcaggaaaccgaatcgatgaaaacacggcttttaccctgcttgattgggaaaaacgccacaaggaggtaagccttagaaaagggctggtattgagcctttctcccgaacgcagctatcttgccgagacaaggccgctgtctaaatatatcagcgcaaaactggcgccgggaatatatatgattccggaaaacatggaagaaaaagtttatacagccctgaaaaaagccggtgtcaccatttttgcaagaccggacaacaccggcgcgcctaaccgcgcgagccgcgccgatgatggcaatatattgaacagcacgacagattcccgcatttattttccgcatattaataccgaagcgccccatgctgaaaaaatcaggcaattcgagaccggaaaaaatgaggacggtattaacacttcaacatcgcaaagcgatgcgccgtcggcatctgccttaattgataggttccattctattattaacaaaatgcatcttgggcccgaacagcgggacgaactcacggcccgtattaaccgtcggctggttctgtgcgaatcacagtaa

SEQ ID NO: 38176 - protein, 250 aa, Unknown
  Obtained from environmental sample
  misc_feature (1)..(250): Xaa is any amino acid
MDSPFTLLMYPEITYNDAIELASISRVTGTGLNVSFEINKDTAVSAFNRGISAAAAIDLLQRLSGNRIDENTAFTLLDWEKRHKEVSLRKGLVLSLSPERSYLAETRPLSKYISAKLAPGIYMIPENMEEKVYTALKKAGVTIFARPDNTGAPNRASRADDGNILNSTTDSRIYFPHINTEAPHAEKIRQFETGKNEDGINTSTSQSDAPSASALIDRFHSIINKMHLGPEQRDELTARINRRLVLCESQ

SEQ ID NO: 38177 - DNA, 480 bp, Unknown
  Obtained from environmental sample
  misc_feature (1)..(480): n is a, c, g, or t
atgaaaaattttggcggcgaagttttattccttgatcgcggtgatattaataccgatgaaattatccccgcaaaatatttaaccgaggatacaagaatggcgttaaagccccatcttctggaagacttaaaaattaaaggctttgatcccgggaaagatattataggaaagggtgcggtactggcgagggcaaattttggatgcggttcatcgcgcgaacacgctccgtgggcgtttgaggtaaacggcattaacatcgttatcgctgaaagttttgcccgtatcttccgtcagaatatgtacaattgcggcatgatcgcctgtgaagtttcagcggtaactatagaagagttgttcaaggaattcgcaaatgaaaaaacaacattgaccgttgatacggacaagggaagtttgagttttaaagctggaggaaaagaaaagacagtttctttcaccttaaaaaattttgaaaaagcttag

SEQ ID NO: 38178 - protein, 159 aa, Unknown
  Obtained from environmental sample
  DOMAIN (1)...(113): Aconitase C-terminal domain
  misc_feature (1)..(159): Xaa is any amino acid
MKNFGGEVLFLDRGDINTDEIIPAKYLTEDTRMALKPHLLEDLKIKGFDPGKDIIGKGAVLARANFGCGSSREHAPWAFEVNGINIVIAESFARIFRQNMYNCGMIACEVSAVTIEELFKEFANEKTTLTVDTDKGSLSFKAGGKEKTVSFTLKNFEKA

SEQ ID NO: 38179 - DNA, 1161 bp, Unknown
  Obtained from environmental sample
  misc_feature (1)..(1161): n is a, c, g, or t
ttgacttcggacgaggactttactaatttatatatagaccccttcacagacacttatctttgcagcgcgtgggtgaatattgcggtgaatattttaatccgtaatgtcgcccgcgcggatttcattctcgaaagagatgggattgaattaaagaatggttacctctattccctgttccaccgaccgaatgagcatttaagccgtttcgatttgtggaaggaaaccgccgcatggtggttattagagggtgaggcgttttggtggttcgggcctgactactccggcggaataccaaaacaactgtacattctcaatcccaggaaactccaacttgagggagaggggttggacgtgcaggatagtgtcgcaaacaaaaatcggcgctggttttatcatgccggaaccgaattagtacctatcttttccgatgagcttgtccactttagggattggaacccgtggaaccctctgcgcggtgttaatcctcttgtctctttaactcttgagcttgaacaagatttttatgccaataaagctaattctaccttactcaaaaataacgctattccccaggggcttctcaaaactgaacagaccctgcggccggaagaagcggacgcattagaacggagatgggagagcaaatacggacaggcaaaggcggggcgaaaaatcgccgtgcttggcaagggaaccagttttgaggctctatcattcaatcctgatgttgtcaaattatttgaactaaaacgctggaacttgtacacgatattggcaaagtacggtataccgccgaaggttgcaaatatctctgacaggtctacggctttatcaggcaaagataccaaagaacaacattccgcattttggcaatacacattaattcccttacttagacaatttgaacaaaccttagaaagccaatnttttatgcgtttcaatttgaaagaaaaaggccgttttgacctttgggatataccggaactaatggaaagcgaagactcgcaaagcaggagagatattgcggaaataaacgccggtattaaaacaataaatgaagtgcttaaagaacgtggaaaagagcctaaaccgtggggggatgtttggtatagaccgaaaaatatgatttcaactaacggtaaaaatggggatggggaataa

SEQ ID NO: 38180 - protein, 386 aa, Unknown
  Obtained from environmental sample
  DOMAIN (6)...(356): Phage portal protein
  misc_feature (1)..(386): Xaa is any amino acid
MTSDEDFTNLYIDPFTDTYLCSAWVNIAVNILIRNVARADFILERDGIELKNGYLYSLFHRPNEHLSRFDLWKETAAWWLLEGEAFWWFGPDYSGGIPKQLYILNPRKLQLEGEGLDVQDSVANKNRRWFYHAGTELVPIFSDELVHFRDWNPWNPLRGVNPLVSLTLELEQDFYANKANSTLLKNNAIPQGLLKTEQTLRPEEADALERRWESKYGQAKAGRKIAVLGKGTSFEALSFNPDVVKLFELKRWNLYTILAKYGIPPKVANISDRSTALSGKDTKEQHSAFWQYTLIPLLRQFEQTLESQXFMRFNLKEKGRFDLWDIPELMESEDSQSRRDIAEINAGIKTINEVLKERGKEPKPWGDVWYRPKNMISTNGKNGDGE

SEQ ID NO: 38181 - DNA, 1026 bp, Unknown
  Obtained from environmental sample
  misc_feature (1)..(1026): n is a, c, g, or t
ttgtatatgagcaacaggaagcgcgttatcgcaggatttattatctcgcttttactcatcatggccgccgcctctctgggcagttccggcattagcctgggcgatactgttttaatcgttctgcataaagttttcaggcttccccttcaggcggatattgaccccaagaacgtttcgattgtctggctgctgcggtttcctcgagtgctgttggcttttcttacaggcggctgtcttgcgatgagcggcgcggtctgccagtccgttttgcgcaatccccttgcctcgccttacattttgggcgtctcgtccggggcgtccctgggcgcgggaataatcatcatcagcggaatcgcgcttccgttgctgggcattattaccctgccgctgacgggttttatcttcggtcttttaaccgttttttttgtagcctccttttcctcccgcattgacaagtcaatgtcgaataacacaatcattctctgcggcatggtcttctcactttttttaaacgccctgcttactctgttaagcgctattttttccgatgacctaaagcgcataacgctgtggcagatggggagtttcgccatgcgcggctggacttatgttcaactgctgctgccgtttttgatcatagggattgcgggcatatacctctacgccaaagaaatggacattatgacatttgacgatgatcaggcgcaatcggcgggcgtggaaaccggcgcactgcgaaaaaaactgctggttctctgttcggtattgacaggcgcggccgtcgcgttaagcggcgttatcggctttgttgaccttatcgccccgcatgcggcgcggaaaataaccggctcgcggcacaggtatttaattcccatgtcgtttatcctcggcggctcgttgatggtaataaccgatttaatcgccagaacgatcatttcaccttcggaactgccggtgggggcgataaccgcccttatcggagcgccgttttttgcctgggtgtatttcaaagggcgcggacgatga

SEQ ID NO: 38182 - protein, 341 aa, Unknown
  Obtained from environmental sample
  SIGNAL (1)...(27)
  DOMAIN (89)...(338): ABC 3 transport family
  misc_feature (1)..(341): Xaa is any amino acid
MYMSNRKRVIAGFIISLLLIMAAASLGSSGISLGDTVLIVLHKVFRLPLQADIDPKNVSIVWLLRFPRVLLAFLTGGCLAMSGAVCQSVLRNPLASPYILGVSSGASLGAGIIIISGIALPLLGIITLPLTGFIFGLLTVFFVASFSSRIDKSMSNNTIILCGMVFSLFLNALLTLLSAIFSDDLKRITLWQMGSFAMRGWTYVQLLLPFLIIGIAGIYLYAKEMDIMTFDDDQAQSAGVETGALRKKLLVLCSVLTGAAVALSGVIGFVDLIAPHAARKITGSRHRYLIPMSFILGGSLMVITDLIARTIISPSELPVGAITALIGAPFFAWVYFKGRGR

SEQ ID NO: 38183 - DNA, 408 bp, Unknown
  Obtained from environmental sample
  misc_feature (1)..(408): n is a, c, g, or t
atgncgtataacataatcgcaatctttgattgcgccggcgccgtatccggcggacagcccctttacctcaattgccgcgctcatcgtccgcgccctttgaaatacacccaggcaaaaaacggcgctccgataagggcggttatcgcccccaccggcagttccgaaggtgaaatgatcgttctggcgattaaatcggttattaccatcaacgagccgccgaggataaacgacatgggaattaaatacctgtgccgcgagccggttattttccgcgccgcatgcggggcgataaggtcaacaaagccgataacgccgcttaacgcgacggccgcgcctgtcaataccgaacagagaaccagcagtttttttcgcagtgcgccggtttccacgcccgccgattgcgcctga

SEQ ID NO: 38184 - protein, 135 aa, Unknown
  Obtained from environmental sample
  misc_feature (1)..(135): Xaa is any amino acid
MXYNIIAIFDCAGAVSGGQPLYLNCRAHRPRPLKYTQAKNGAPIRAVIAPTGSSEGEMIVLAIKSVITINEPPRINDMGIKYLCREPVIFRAACGAIRSTKPITPLNATAAPVNTEQRTSSFFRSAPVSTPADCA

SEQ ID NO: 38185 - DNA, 639 bp, Unknown
  Obtained from environmental sample
  misc_feature (1)..(639): n is a, c, g, or t
atgccgtctttcaatagtaccattaatgacatagacccaaaggggctgcgcctggaccgctgcattgcggagattttatgcctgctttcccgttcccagataaaggcgcggaatttggaagcgcgggttaacggcaaaccagtaaagatttccaggatagtaaaaaacggcgacaagattgaactgtcatggaatgaagcggagccgcttgaccttatcccggaaaatatcccgctggatattatttttgaaaacaaccgggccgtggtaataaacaagccccaggggatggttgttcatcccggcgcgggtaattggcaggggactctcgcaaacgcgctgtatcaccgcaggcttgaattgtgtcacctaacagatgacggggctcacacagaagccccaaggcccggacttaggcccggaatagtccaccggctggacaaggacacctcaggcgtaataatcgccgcgtacgacgatgagacaaccgcgtttctggcggaacagttcaagtccaggaaagcaagaaaaacgtacattgccattgtcagcggaatccccaaagaaagaaagggccgtatagaaacctttatcgcccgcgacccaaaagatcgcaagcgtttcacggntaagcgctaa

SEQ ID NO: 38186 - protein, 212 aa, Unknown
  Obtained from environmental sample
  DOMAIN (87)...(212): RNA pseudouridylate synthase
  misc_feature (1)..(212): Xaa is any amino acid
MPSFNSTINDIDPKGLRLDRCIAEILCLLSRSQIKARNLEARVNGKPVKISRIVKNGDKIELSWNEAEPLDLIPENIPLDIIFENNRAVVINKPQGMVVHPGAGNWQGTLANALYHRRLELCHLTDDGAHTEAPRPGLRPGIVHRLDKDTSGVIIAAYDDETTAFLAEQFKSRKARKTYIAIVSGIPKERKGRIETFIARDPKDRKRFTXKR

SEQ ID NO: 38187 - DNA, 807 bp, Unknown
  Obtained from environmental sample
  misc_feature (1)..(807): n is a, c, g, or t
atgcgactgccccgtaaggtagtcgccggttactggcaggataaggaacttcgccgccgcatggacgtgtggatgcgcgccgcagcagcgagaaaagacggaatagattcaaccgttatgcggtttggggacaatatgcgggaagtggcagtaaccgagggcgacaaagtcgaggctcaaatcaagtttggctggcaggttaacacatggggtataggcgacctcgccgcccgttacgcgaaaatcaacgatgcggcggcggaaaaattggcggaagaatacgccgctttatacaatattgcgcctgaacttaaacaagcaggcaaggcgagagacgcaatgcttgaacaagcaaaaattgaaatcgcccttaaagaaatgcttgaaagcgaacacgccggggcttttaccactaccttccaagaccttcacggccttccgcaattacccggccttgcctgccagcggcttatggaacagggttacggcttcggcgctgaaggagactggaaacagtccatgctgacacgggccgcaaaagttatggcttcgggattatcaggcggcgtttcctttatggaagattacacctaccactttgagccgggcaaagaagccgctctcggcgctcacatgcttgagatatgcccctcaatcgcaagcggcaaaccgcgtattgaagttcatccgctgggaatcggcggcaaagcggatcccgcccgtatggtatttgacgccgctcccgggcaggcggtactcgcgacactaatcgatcttggcagccgtttcagaatgatcgtaaaatga

SEQ ID NO: 38188 - protein, 268 aa, Unknown
  Obtained from environmental sample
  DOMAIN (1)...(268): L-arabinose isomerase
  misc_feature (1)..(268): Xaa is any amino acid
MRLPRKVVAGYWQDKELRRRMDVWMRAAAARKDGIDSTVMRFGDNMREVAVTEGDKVEAQIKFGWQVNTWGIGDLAARYAKINDAAAEKLAEEYAALYNIAPELKQAGKARDAMLEQAKIEIALKEMLESEHAGAFTTTFQDLHGLPQLPGLACQRLMEQGYGFGAEGDWKQSMLTRAAKVMASGLSGGVSFMEDYTYHFEPGKEAALGAHMLEICPSIASGKPRIEVHPLGIGGKADPARMVFDAAPGQAVLATLIDLGSRFRMIVK

SEQ ID NO: 38189 - DNA, 924 bp, Unknown
  Obtained from environmental sample
  misc_feature (1)..(924): n is a, c, g, or t
ttgctcgacatggctgaaattgacaggctggtactttttcgtaaccacatggagtccgacggtttccatttaacacaagtttaccgctggggcagggattccgggggtagtacagatttactagaattgctgttcgctgacgtaccttacatgaagctcatgccgaattgggaaagccatttggcgaatggtaattccctaaacggcccatcaaggctgatgtctgtaccagaagccagcgtactccaatcgtttggaattctctcggtcgctgccataccgatacttatcaataatgttttttgggggtttacgcttttcgcagataccagaaatgaacgttcttttgaagaagatgtcattgaaatgcttcgttcagcggcatttttattcgctaacgctttcattcgcgccgaagttgagtatgacgggcttaccggaatttataacagacggttctttgataaaaacatgaagcgtattataagctccttgtcccgctcaggcagtttattaagcctgctgatgatcgacattgacttatttaagcggtataacgatacatacggccatgtcgaaggcgataaatgccttaaaattgtagcgcagacgctttccaaaagtataacaagagcagatgattttgttgccagatatggcggagaagaatttgtcatggttctacccaataccaatgagtatggcgcacgattaatagctgaaaaactgcttgaaaatatacggaaatgcaatataccgcatgaaaaaaatgatgcggcngattgccttacaatttccatcggcgccaccaccggaaaagttctgcatacacacaccacggatgattttgtaaaaaaagccgatgagatgctgtataaggcgaagcaaaacgggcggaataagtatttttttgagcagctttga

SEQ ID NO: 38190 - protein, 307 aa, Unknown
  Obtained from environmental sample
  DOMAIN (136)...(301): GGDEF domain
  misc_feature (1)..(307): Xaa is any amino acid
MLDMAEIDRLVLFRNHMESDGFHLTQVYRWGRDSGGSTDLLELLFADVPYMKLMPNWESHLANGNSLNGPSRLMSVPEASVLQSFGILSVAAIPILINNVFWGFTLFADTRNERSFEEDVIEMLRSAAFLFANAFIRAEVEYDGLTGIYNRRFFDKNMKRIISSLSRSGSLLSLLMIDIDLFKRYNDTYGHVEGDKCLKIVAQTLSKSITRADDFVARYGGEEFVMVLPNTNEYGARLIAEKLLENIRKCNIPHEKNDAADCLTISIGATTGKVLHTHTTDDFVKKADEMLYKAKQNGRNKYFFEQL

SEQ ID NO: 38191 - DNA, 630 bp, Unknown
  Obtained from environmental sample
  misc_feature (1)..(630): n is a, c, g, or t
atgcacagtgaaattattaaaacaataaattcaacaatctctgaatatgaagatattaacaatttaaacaacttatggagagagtctatcatcgaaattatttcggcgaagaatgaaaaattacgagaattaaaacaaattgtgtctttagaacatttattgccttgtgatatactaccggacgcaaagagcattatcagcttttttattccgtttagtgaaaatattgttaaaagcaacattaacggaacaatggcgtcaaaagaatgggcgcaagtctatattaaaacaaatgatttaataaaaacaattaatgacaagatagaagaattaatgggaaaaaacggatataaagccggaaaaataccggctacacataattttaatgaaaaaacgctgataagcaattggtctcacaggcacatagcgttcatagcgggcataggtacattcggaataaataatatgcttataacaaaaagaggatgctgcggaaggcttggaagcataattattgattatgagttagaaaattataaaaatgccggcaaagtaaaagaaaaatgtttacataaactaaacggtaattgcggaatatgtcaaagaagatgcatagcaaagcgcgtataa

SEQ ID NO: 38192 - protein, 209 aa, Unknown
  Obtained from environmental sample
  misc_feature (1)..(209): Xaa is any amino acid
MHSEIIKTINSTISEYEDINNLNNLWRESIIEIISAKNEKLRELKQIVSLEHLLPCDILPDAKSIISFFIPFSENIVKSNINGTMASKEWAQVYIKTNDLIKTINDKIEELMGKNGYKAGKIPATHNFNEKTLISNWSHRHIAFIAGIGTFGINNMLITKRGCCGRLGSIIIDYELENYKNAGKVKEKCLHKLNGNCGICQRRCIAKRV

SEQ ID NO: 38193 - DNA, 429 bp, Unknown
  Obtained from environmental sample
  misc_feature (1)..(429): n is a, c, g, or t
atgacctggataatggatgaaattcccccgccccccaccccaaatgggacggccctttccccaaatggaacgtccccccggaaggtcccggaaaaggcccgaaaacctcttttcaaaaaaaatttgaaaaaatggggggaaaaccccccccccctttttttaaaaacttttttctttcccgggggaaaaaccttttatgggccccccccccccccggggggaaaaaaaaaagtgtgtgggccccccccccttttgggggcccccccccttggggaaaaaatttttaaaaaaacccccccccccccccccccccccccctcttgggggggaaaaaaaaaaaaaaagggggttcccttttttttttttnnccnncccccccccccccccnnaaaaaagagttgtggtttttgccccccccccccccaataa

SEQ ID NO: 38194 - protein, 142 aa, Unknown
  Obtained from environmental sample
  misc_feature (1)..(142): Xaa is any amino acid
MTWIMDEIPPPPTPNGTALSPNGTSPRKVPEKARKPLFKKNLKKWGENPPPLFLKTFFFPGGKTFYGPPPPPGGKKKVCGPPPLLGAPPLGEKIFKKTPPPPPPPPSWGGKKKKKGVPFFFFXXPPPPPXKKSCGFCPPPPQ

SEQ ID NO: 38195 - DNA, 513 bp, Unknown
  Obtained from environmental sample
  misc_feature (1)..(513): n is a, c, g, or t
atgagcggcagcggaaggggtgcagataaccgggggccccaccggaaaccctttaagcgccgggataaccagccacaaaacaaggattcacccaagaacgaaaaaaaacccgttggtatttctatggatgccaatgtaaagtttgaaaagaaacggggaggcttcgttgaacggccaaaatgggttccgccgaaacagcccgcgttttcccctccttctgtcacctgcgcctggtgcggcaaaccaatcaaggaaatttctaccgctatttcagagcctgtcagcggaaagcccgtgcattttgactgcgcgataagcaagattgtcgaagaagaaacccttgaaagaggcgatactgtaagttatattggcggcgggcgttttgggataatccattacaataaccccccggatataagagatttcaaaatacgaaaagtccttgaatgggagaacaaggaaaaccgttctgaatggcgccttgcaataagcgaacattttacgattacttaa

SEQ ID NO: 38196 - protein, 170 aa, Unknown
  Obtained from environmental sample
  misc_feature (1)..(170): Xaa is any amino acid
MSGSGRGADNRGPHRKPFKRRDNQPQNKDSPKNEKKPVGISMDANVKFEKKRGGFVERPKWVPPKQPAFSPPSVTCAWCGKPIKEISTAISEPVSGKPVHFDCAISKIVEEETLERGDTVSYIGGGRFGIIHYNNPPDIRDFKIRKVLEWENKENRSEWRLAISEHFTIT

SEQ ID NO: 38197 - DNA, 360 bp, Unknown
  Obtained from environmental sample
  misc_feature (1)..(360): n is a, c, g, or t
atgagcaggaatactgtcagtcaggggaaggaaggcgaaaacagggctgttgaggcgctccagtctgccggtatgagcgttattacccggaatttccgttcccgccagggggaaattgacataatcgccctggacggggaaacccttgtttttgtcgaagtaaaggcatattcccggttcggtcttgagagcctggcgtacagtgtcagccaaaaaaaacagcgccggatcatagagacagctaaatatttcctctcaatcaatcgacaatattatggaagggctattcgtttcgatgtagtttttatcggaaatgggacggttagccatcttgcatctgccttcatggagcgtgtataa

SEQ ID NO: 38198 - protein, 119 aa, Unknown
  Obtained from environmental sample
  DOMAIN (11)...(104): Uncharacterised protein family UPF0102
  misc_feature (1)..(119): Xaa is any amino acid
MSRNTVSQGKEGENRAVEALQSAGMSVITRNFRSRQGEIDIIALDGETLVFVEVKAYSRFGLESLAYSVSQKKQRRIIETAKYFLSINRQYYGRAIRFDVVFIGNGTVSHLASAFMERV

SEQ ID NO: 38199 - DNA, 402 bp, Unknown
  Obtained from environmental sample
  misc_feature (1)..(402): n is a, c, g, or t
atgggcgccaggatagtgtccattgccgacgcatttgaagccatggtaagccccaagccgtaccgtaattccataacaggcaatcaggcggtaaaaaacctcctctccgacaattcacgccgttttgaccctacgatcctgaaggcatttgtccttattatggggatttatcccattgggtccatagtccgcctgaacaacggcgcggttgcgcggatatcggaagttcgcgccatcgcgccattgcgccccaaagtccagataatagttgatcaaaccaatcagatataccgtaatgaacagggcgcttttcttgatctgctgacggaaaagagcctgtatattgccaaagcaatggacacgaaagagtttttagagcaatacgcccagaataatacataa

SEQ ID NO: 38200 - protein, 133 aa, Unknown
  Obtained from environmental sample
  misc_feature (1)..(133): Xaa is any amino acid
MGARIVSIADAFEAMVSPKPYRNSITGNQAVKNLLSDNSRRFDPTILKAFVLIMGIYPIGSIVRLNNGAVARISEVRAIAPLRPKVQIIVDQTNQIYRNEQGAFLDLLTEKSLYIAKAMDTKEFLEQYAQNNT

SEQ ID NO: 38201 - DNA, 429 bp, Unknown
  Obtained from environmental sample
  misc_feature (1)..(429): n is a, c, g, or t
gtgttggatacccagctcaaatacgtgttcttcatgtgccaggccgtggcccggcacatgcgcgacaacgcgatccggggcaagatcgtcaacctcgcctctctgaccagcgtctttggcttcagaaacatcgcgccctatgtggcctccaaggggggcatcgcccagctcaccaaagtccttgccaatgaatgggcggaatacggcatcaacgtcaacgccatcgggcccggctattttgaaacggagatgacgaaagcgctgttccaggatccggccacggtcaagcgttttacggaacgtctgcccatgcggcgcacgggactgccctccgatctcatgggcgcggccgtttttctggcttcgtccgcttccgactatgtaaccggccagactgtatatgtggatggaggctggctgacgaattag

SEQ ID NO: 38202 - protein, 142 aa, Unknown
  Obtained from environmental sample
  misc_feature (1)..(142): Xaa is any amino acid
MLDTQLKYVFFMCQAVARHMRDNAIRGKIVNLASLTSVFGFRNIAPYVASKGGIAQLTKVLANEWAEYGINVNAIGPGYFETEMTKALFQDPATVKRFTERLPMRRTGLPSDLMGAAVFLASSASDYVTGQTVYVDGGWLTN

SEQ ID NO: 38203 - DNA, 738 bp, Unknown
  Obtained from environmental sample
  misc_feature (1)..(738): n is a, c, g, or t
gtggtatttagtatgatattatgtgaaaatctttctaaaatattcagttcaaattccggaataaaaaatatcaatcttcaatttacaccgggaattatttacggcattatcggctataatggggctggtaaaacaacattatttaactgtattgaaggtctttacactcctacatcggggtcagtttcccataataatattaaaacggtaaatgaagaagaattcctgccctgtcgaaaaaatattgcttttctgccaagcgaagattatttgtatccgtatttaacttgtatggaaaatattgagttggcgacaatcttaaaaaccggaaagaatgagctattaaatgaaactgatgaattaatccgctattttgaaatagatgaatatctgcataaaatattcaaggaatgttctaccggaatgaaaaagaaagtacagatgattataagtttaatcggagatattaataccattatttgggacgagccgaataatggacttgatattgtttcaaatataaaaattaaaaatttactcaatcattataagagtaaaaataaaaccatactattttcaagccatgttattgaatttcttgaaaattttgtggatcattgtatattaatacataagggagaggtaattgaaaataatgatgtgcaaaatattggatcattagagaaattatttcttaagaatataccggaaaatgaattgattttaaatattaattaa

SEQ ID NO: 38204 - protein, 245 aa, Unknown
  Obtained from environmental sample
  DOMAIN (31)...(213): ABC transporter
  misc_feature (1)..(245): Xaa is any amino acid
MVFSMILCENLSKIFSSNSGIKNINLQFTPGIIYGIIGYNGAGKTTLFNCIEGLYTPTSGSVSHNNIKTVNEEEFLPCRKNIAFLPSEDYLYPYLTCMENIELATILKTGKNELLNETDELIRYFEIDEYLHKIFKECSTGMKKKVQMIISLIGDINTIIWDEPNNGLDIVSNIKIKNLLNHYKSKNKTILFSSHVIEFLENFVDHCILIHKGEVIENNDVQNIGSLEKLFLKNIPENELILNIN

SEQ ID NO: 38205 - DNA, 495 bp, Unknown
  Obtained from environmental sample
  misc_feature (1)..(495): n is a, c, g, or t
ttgtcggtaaaagtagacatgggccgcgcggaactgcacccctcaaaaatccctgtaaaacttttcggcgagaacgtaatcgcaagacctgtaagaatcggcggcaaggaatataagatcacctgtgtttctatgggcaacccccatgccgtagttttctgcgatagaataggaaaacttgacctgcacgaaatcggcccattatttgaaaacgacccgatgtttccggaaagggtaaacacggagtttgtcgaaatcatggacaggaaccatcttaaaatacgcgtatgggagcgcggcaacggagaaacccaggcttgcggaacgggagcttgcgcctcagcagttgccgccgtcctgaacggatacagcgacaagggaacggatatcaaagtgcagcttcccggcgggaatctgattattaattacaccgatgatgcggtttacatgacaggcgattgcgtgaaagtgtttgacggcgttgtggagatataa

SEQ ID NO: 38206 - protein, 164 aa, Unknown
  Obtained from environmental sample
  DOMAIN (41)...(157): Diaminopimelate epimerase
  misc_feature (1)..(164): Xaa is any amino acid
MSVKVDMGRAELHPSKIPVKLFGENVIARPVRIGGKEYKITCVSMGNPHAVVFCDRIGKLDLHEIGPLFENDPMFPERVNTEFVEIMDRNHLKIRVWERGNGETQACGTGACASAVAAVLNGYSDKGTDIKVQLPGGNLIINYTDDAVYMTGDCVKVFDGVVEI

SEQ ID NO: 38207 - DNA, 1215 bp, Unknown
  Obtained from environmental sample
  misc_feature (1)..(1215): n is a, c, g, or t
atgttaacggctgtagccctatgcgcggtaggcgcggaaaaaatagtctcaaatgaacttcgaaagcttaaactcagtataagcgagagcggattcggccgcgtacgctttaaaacggatattgaaggcctttaccgctgcctgatcggcttgcgcgccgctgaccgcgtcctgttggaaatagcctggtttaaggcgaccgactttgacgccctctttgaaggggtaaggcagcaaccctttgaggaatacataccgccgggcatggggctccgggtggccaaggtaaggacaaaccgatctgtcctggaagccgaaaccagcatacaggctgtggttcacaaggcggctgccgacaggctttgtgcgaagaggcggataaaccggcttccagaaaacggcgatgaagcggagctgcgcgtatacatcgaaaaagaccaggcttcggttcttctggatctttcaggggaaccgctttttaaacgcgggtacaggataaggggaggaatcgcccctttaagggaaactactgctgcggcaattatccttcattcagggtggcggaggaaattccccttgtacgatcctttctgcggttccggcactatcgccatagaagcggcattgtacgcctgggacatggctcccggtatcgcgcggacaggaggcttcgccattgacaggctgctaattgccgataaaaaaaccgaagaaacagtccgctctgattttcgcgccaggatcaattttgaacgcgtcatccgccttgccggcagcgacgaagaccctgcgtcttctgcgctggctttgtcaaacctgaataaggtccatgcgttagcagggaacagggaactcgccaacaaagttggcgcgggaacagggaacagagaagagaacaatgagcctgcgggcaggcttccgcttgttacgacaacgcccatgaacatggcgtggcctccctttgaaactaatgaagaaccgcggggctttatcattaccaatccgccctacgggaagcggctggggaatatggaggcgtcgcttgaaatttacagcgggatggcggttctggcgaaaaactttccgggctggaaacttgccgtgataagcgaccatcccggctttgagtcttttttcggaaggaaagcggattcatgccgcgagattacgggcggggccgttcccgcctacttttaccaatatgaaaaaatctaa

SEQ ID NO: 38208 - protein, 404 aa, Unknown
  Obtained from environmental sample
  DOMAIN (162)...(400): Putative RNA methylase family UPF0020
  misc_feature (1)..(404): Xaa is any amino acid
MLTAVALCAVGAEKIVSNELRKLKLSISESGFGRVRFKTDIEGLYRCLIGLRAADRVLLEIAWFKATDFDALFEGVRQQPFEEYIPPGMGLRVAKVRTNRSVLEAETSIQAVVHKAAADRLCAKRRINRLPENGDEAELRVYIEKDQASVLLDLSGEPLFKRGYRIRGGIAPLRETTAAAIILHSGWRRKFPLYDPFCGSGTIAIEAALYAWDMAPGIARTGGFAIDRLLIADKKTEETVRSDFRARINFERVIRLAGSDEDPASSALALSNLNKVHALAGNRELANKVGAGTGNREENNEPAGRLPLVTTTPMNMAWPPFETNEEPRGFIITNPPYGKRLGNMEASLEIYSGMAVLAKNFPGWKLAVISDHPGFESFFGRKADSCREITGGAVPAYFYQYEKI

SEQ ID NO: 38209 - DNA, 915 bp, Unknown
  Obtained from environmental sample
  misc_feature (1)..(915): n is a, c, g, or t
ttggggcgcaaagacaggcgggcgttccggcaatcagcaaccggggcggggaagattaccgtaagtttgccggcgaaatcgtacaaaaacgcggaagtcttgctgtatacggtaaacgggaagcggattttgcgtcggaaagtgtccgcctcaaactcggttaacagcatatcgcgtaataatttagcgacgggggtctatttgttgtcggtgagggggacggccattgaagccattaccgcgcgccttaaccacggcggcggggaggttaacatcaatgtggcgttcggggacgtgggcgaaaacctctccgcggcttctcagatgtctaagaaagcggcggatgcggtgttgaagtggactgttaccgtatcggcggcggcggaggggtacaaagacagagtgtttacgattcagcccgttgcgggaaagaacgcaatgcagaatataaaggtgcttgcggacccggacgcggtagttaaaggaacgttcaccgatatcagaaacggtcaggaatacaagacggtcaagataggcgaccagacgtggatggcggagaatttgaattatcaaacggatagttcttggtgtttcaaaaatgctgattccaactgcgttaaatacggcagactgtataagtgggtgatgacggtaggcgtgtgccctacggggtggcatctgtcttctcatgaggagtggagggatttggttagagccaccggcgccggttcagggacggctgaaacgcttaaagcagagagcggttgggctaaatattcgtttatgaattgttgtaacggcaccgatgattacggattttcggccctgcctagcggcagacggatgtgggggtcctccggcgtctttgattatgctaaaaactgcctattggtggacggctacggagagagatag

SEQ ID NO: 38210 - protein, 304 aa, Unknown
  Obtained from environmental sample
  misc_feature (1)..(304): Xaa is any amino acid
MGRKDRRAFRQSATGAGKITVSLPAKSYKNAEVLLYTVNGKRILRRKVSASNSVNSISRNNLATGVYLLSVRGTAIEAITARLNHGGGEVNINVAFGDVGENLSAASQMSKKAADAVLKWTVTVSAAAEGYKDRVFTIQPVAGKNAMQNIKVLADPDAVVKGTFTDIRNGQEYKTVKIGDQTWMAENLNYQTDSSWCFKNADSNCVKYGRLYKWVMTVGVCPTGWHLSSHEEWRDLVRATGAGSGTAETLKAESGWAKYSFMNCCNGTDDYGFSALPSGRRMWGSSGVFDYAKNCLLVDGYGER

SEQ ID NO: 38211 - DNA, 885 bp, Unknown
  Obtained from environmental sample
  misc_feature (1)..(885): n is a, c, g, or t
gtgaactttctccaaatgttttctatattaccccaaaacccaaaaggaggccataaaatggcaaagatcaaaaatgtagttggccgtcaaattttagattcgcgcggcaacccgaccgttgaagttgaaatcactttggatacaggctttgttgcccgtgccgctgttcctagcggagccagcactggtgaatacgaagcttgtgaacttcgtgataacaacaaaaaagtctatggcggcttaggtgtgttaaaggcagtggctgccgttaacggacccattgctcgcttgctcaaaggcaaagaccctctgaaacaggctgcccttgacgatgccatgattaggctagacggcacaaaaaacaaaagcaaactcggcgcaaatgcaattctcggtgcttctatggcaatcaccgttgctggcgcaagcgtgagcaaattgccgctttggaaatatatcggcaaattacacggcaacaaaagcaaattcatacttccaaccccaatggcaaacattgtgaatggcggcaaacacgcagacaataaaatcgactttcaggaatttatgattatgccagtaggcgcaaaatccttctccgaagggcttcgctggataaccgagattttccacacccttaaaaaattgctcaaaaaagacaggcaggcaacatctgttggtgacgaaggcggctttgcccctaacttgaccaacgatcaggctttggaatacattatgaaagccattaaagaagctggctacaaacctggcactcaaattggcattgcccttgactgtgcttcttccgaactctttgacgagggcggtcgcaaaggctacaaattctggaaatccgacctggcanacttcactccgcaaaagagatga

SEQ ID NO: 38212 - protein, 294 aa, Unknown
  Obtained from environmental sample
  DOMAIN (162)...(292): Enolase, C-terminal TIM barrel domain
  misc_feature (1)..(294): Xaa is any amino acid
MNFLQMFSILPQNPKGGHKMAKIKNVVGRQILDSRGNPTVEVEITLDTGFVARAAVPSGASTGEYEACELRDNNKKVYGGLGVLKAVAAVNGPIARLLKGKDPLKQAALDDAMIRLDGTKNKSKLGANAILGASMAITVAGASVSKLPLWKYIGKLHGNKSKFILPTPMANIVNGGKHADNKIDFQEFMIMPVGAKSFSEGLRWITEIFHTLKKLLKKDRQATSVGDEGGFAPNLTNDQALEYIMKAIKEAGYKPGTQIGIALDCASSELFDEGGRKGYKFWKSDLAXFTPQKR

SEQ ID NO: 38213 - DNA, 312 bp, Unknown
  Obtained from environmental sample
  misc_feature (1)..(312): n is a, c, g, or t
ttgtctgcgtgtttgccgccattcacaatgtttgccattggggttggaagtatgaatttgcttttgttgccgtgtaatttgccgatatatttccaaagcggcaatttgctcacgcttgcgccagcaacggtgattgccatagaagcaccgagaattgcatttgcgccgagtttgcttttgttttttgtgccgtctagcctaatcatggcatcgtcaagggcagcctgtttcagagggtctttgcctttgagcaagcgagcaatgggtccgttaacggcagccactgcctttaacacacctaagccgccatag

SEQ ID NO: 38214 - protein, 103 aa, Unknown
  Obtained from environmental sample
  misc_feature (1)..(103): Xaa is any amino acid
MSACLPPFTMFAIGVGSMNLLLLPCNLPIYFQSGNLLTLAPATVIAIEAPRIAFAPSLLLFFVPSSLIMASSRAACFRGSLPLSKRAMGPLTAATAFNTPKPP

SEQ ID NO: 38215 - DNA, 465 bp, Unknown
  Obtained from environmental sample
  misc_feature (1)..(465): n is a, c, g, or t
ttgagacgattggatatttttaacnccaagccgcatattttgcaatcatctcttttgcggagtgaagtntgccaggtcggatttccagaatttgtagcctttgcgaccgccctcgtcaaagagttcggaagaagcacagtcaagggcaatgccaatttgagtgccaggtttgtagccagcttctttaatggctttcataatgtattccaaagcctgatcgttggtcaagttaggggcaaagccgccttcgtcaccaacagatgttgcctgcctgtcttttttgagcaattttttaagggtgtggaaaatctcggttatccagcgaagcccttcggagaaggattttgcgcctactggcataatcataaattcctgaaagtcgattttattgtctgcgtgtttgccgccattcacaatgtttgccattggggttggaagtatgaatttgcttttgttgccgtgtaa

SEQ ID NO: 38216 - protein, 154 aa, Unknown
  Obtained from environmental sample
  misc_feature (1)..(154): Xaa is any amino acid
MRRLDIFNXKPHILQSSLLRSEVCQVGFPEFVAFATALVKEFGRSTVKGNANLSARFVASFFNGFHNVFQSLIVGQVRGKAAFVTNRCCLPVFFEQFFKGVENLGYPAKPFGEGFCAYWHNHKFLKVDFIVCVFAAIHNVCHWGWKYEFAFVAV

SEQ ID NO: 38217 - DNA, 924 bp, Unknown
  Obtained from environmental sample
  misc_feature (1)..(924): n is a, c, g, or t
atgatgggatttttagaacgactgaaggacgggctcagcaagacccgcacccaaatagccgccatagtgaagagcggcgccgccatagacgacgagttcttcgagacgctgtctgaggcgctcatagccgcggatgtgggcgtggatcttgtcgaccgcatttttgacgactaccgcgatgaaataaagcgcaggggcgtgagcgggcgtccggaggcctacgcgctcatcaaggagatgctcgtcgaggacctcacggttactaaagccatggaagattttccgcccaagccgtgggttgtgcttgtggtgggtgtaaacggcgtgggcaagaccacgactatcgggaagatggcgcacgagttgcgcgtagccgggaagcgggtgacgctgggcgccgccgacacgttcagggccggggcgatagagcagctcaagatatgggccgatcgtacggagagcgactttgtggcgcagcacgagggcgcggacgcggccagcgtagctttcgacgccatggaggccgctaaaaaccgcggggcggacgtgctgatactcgacaccgccggcaggctccacgtcaagaccaaccttatgaacgagttggagaagatactgagggttataaggcgcaatacgccgcacgccccgaacgagatactgctggtggtggacgcgaccaacggccaaaacgccatgaagcaggcggaggcgttcaacgagaccgtggggcttaccggccttgtgataacaaagctggacgggacggcgaagggcggcatagcgatagcgctgacgcggaggttcaacatccctataaggaagataggcgtgggcgaggggatagaggatttgcaggattttgatccggtggcgtacgtggacgctatgctcggggacgccgtgccggacgacgttgcgtga

SEQ ID NO: 38218 - protein, 307 aa, Unknown
  Obtained from environmental sample
  DOMAIN (100)...(284): CobQ/CobB/MinD/ParA nucleotide binding domain
  misc_feature (1)..(307): Xaa is any amino acid
MMGFLERLKDGLSKTRTQIAAIVKSGAAIDDEFFETLSEALIAADVGVDLVDRIFDDYRDEIKRRGVSGRPEAYALIKEMLVEDLTVTKAMEDFPPKPWVVLVVGVNGVGKTTTIGKMAHELRVAGKRVTLGAADTFRAGAIEQLKIWADRTESDFVAQHEGADAASVAFDAMEAAKNRGADVLILDTAGRLHVKTNLMNELEKILRVIRRNTPHAPNEILLVVDATNGQNAMKQAEAFNETVGLTGLVITKLDGTAKGGIAIALTRRFNIPIRKIGVGEGIEDLQDFDPVAYVDAMLGDAVPDDVA

SEQ ID NO: 38219 - DNA, 678 bp, Unknown
  Obtained from environmental sample
  misc_feature (1)..(678): n is a, c, g, or t
ttggccgttggtcgcgtccaccaccagcagtatctcgttcggggcgtgcggcgtattgcgccttataaccctcagtatcttctccaactcgttcataaggttggtcttgacgtggagcctgccggcggtgtcgagtatcagcacgtccgccccgcggtttttagcggcctccatggcgtcgaaagctacgctggccgcgtccgcgccctcgtgctgcgccacaaagtcgctctccgtacgatcggcccatatcttgagctgctctatcgccccggccctgaacgtgtcggcggcgcccagcgtcacccgcttcccggctacgcgcaactcgtgcgccatcttcccgatagtcgtggtcttgcccacgccgtttacacccaccacaagcacaacccacggcttgggcggaaaatcttccatggctttagtaaccgtgaggtcctcgacgagcatctccttgatgagcgcgtaggcctccggacgcccgctcacgcccctgcgctttatttcatcgcggtagtcgtcaaaaatgcggtcgacaagatccacgcccacatccgcggctatgagcgcctcagacagcgtctcgaagaactcgtcgtctatggcggcgccgctcttcactatggcggctatttgggtgcgggtcttgctgagcccgtccttcagtcgttctaa

SEQ ID NO: 38220 - protein, 225 aa, Unknown
  Obtained from environmental sample
  misc_feature (1)..(225): Xaa is any amino acid
MAVGRVHHQQYLVRGVRRIAPYNPQYLLQLVHKVGLDVEPAGGVEYQHVRPAVFSGLHGVESYAGRVRALVLRHKVALRTIGPYLELLYRPGPERVGGAQRHPLPGYAQLVRHLPDSRGLAHAVYTHHKHNPRLGRKIFHGFSNREVLDEHLLDERVGLRTPAHAPALYFIAVVVKNAVDKIHAHIRGYERLRQRLEELVVYGGAALHYGGYLGAGLAEPVLQSF

SEQ ID NO: 38221 - DNA, 594 bp, Unknown
  Obtained from environmental sample
  misc_feature (1)..(594): n is a, c, g, or t
atgttgaacctccgcgtcagcgctatcgctatgccgcccttcgccgtcccgtccagctttgttatcacaaggccggtaagccccacggtctcgttgaacgcctccgcctgcttcatggcgttttggccgttggtcgcgtccaccaccagcagtatctcgttcggggcgtgcggcgtattgcgccttataaccctcagtatcttctccaactcgttcataaggttggtcttgacgtggagcctgccggcggtgtcgagtatcagcacgtccgccccgcggtttttagcggcctccatggcgtcgaaagctacgctggccgcgtccgcgccctcgtgctgcgccacaaagtcgctctccgtacgatcggcccatatcttgagctgctctatcgccccggccctgaacgtgtcggcggcgcccagcgtcacccgcttcccggctacgcgcaactcgtgcgccatcttcccgatagtcgtggtcttgcccacgccgtttacacccaccacaagcacaacccacggcttgggcggaaaatcttccatggctttagtaaccgtgaggtcctcgacgagcatctccttgatgagcgcgtag

SEQ ID NO: 38222 - protein, 197 aa, Unknown
  Obtained from environmental sample
  SIGNAL (1)...(21)
  misc_feature (1)..(197): Xaa is any amino acid
MLNLRVSAIAMPPFAVPSSFVITRPVSPTVSLNASACFMAFWPLVASTTSSISFGACGVLRLITLSIFSNSFIRLVLTWSLPAVSSISTSAPRFLAASMASKATLAASAPSCCATKSLSVRSAHILSCSIAPALNVSAAPSVTRFPATRNSCAIFPIVVVLPTPFTPTTSTTHGLGGKSSMALVTVRSSTSISLMSA

SEQ ID NO: 38223 - DNA, 540 bp, Unknown
  Obtained from environmental sample
  misc_feature (1)..(540): n is a, c, g, or t
atgcgcaaaatcacggaaaacgtacgcctcgccgacaagacctcctaccggataggcgggccggcgcggtactacgcggagccgcgttccgagggagatatcgcggaggcctgccgctttgccgcagagaaaggcataccgctcttcatcctcggcaacgggtccaacgtgctgataagcgacgccggcttcggcggccttgcggtgaacctatccaaatatttctcggcgctcacttgggacaaagccacggctttcgtgctgggcggttttccgttggacgatctggccgccgccgcggcggagagaggctgcgccgggatcgagcgcctgtcgggcatccccgggacggtaggcggcgcggtggcgatgaacgccggcgcctttgacaccgacatctcccaaacattgcgcagcgcgcgcgtattgaagatttccgcgcataccatagagacggtttcaaccaaggatttgaatctcggatacagaaccagcgcgataaaaacagcggcgacgtgctgctctcctcggccgatctga

SEQ ID NO: 38224 - protein, 179 aa, Unknown
  Obtained from environmental sample
  DOMAIN (22)...(154): FAD binding domain
  misc_feature (1)..(179): Xaa is any amino acid
MRKITENVRLADKTSYRIGGPARYYAEPRSEGDIAEACRFAAEKGIPLFILGNGSNVLISDAGFGGLAVNLSKYFSALTWDKATAFVLGGFPLDDLAAAAAERGCAGIERLSGIPGTVGGAVAMNAGAFDTDISQTLRSARVLKISAHTIETVSTKDLNLGYRTSAIKTAATCCSPRPI

SEQ ID NO: 38225 - DNA, 1362 bp, Unknown
  Obtained from environmental sample
  misc_feature (1)..(1362): n is a, c, g, or t
atggttccgtggatttcggaagaagcggcgctcaaggcttgcgtcaaggcggagatagccctcgtcattgcccaccttgcagtccggggcaaagccacgcatgagatcaggacacagcttgaagaagcgggcaacagcgttgatcctgcagaggtttacgcggaagaagaaaaaacccgccataacatccgggccctggtgaatgtgctcaaaaaaaagctccctgcggaatattcgccactgatacaccttggagctaccagcgtcgatattcttgacacaagcctcgcctggcgcatccgtggcgttacacgcgaagtggtgctgccggaactaaaaaagctggagctcctgctttgcgatttggcggaaaaggaagctgagacagcgcaggtgggccgcacgcacggtcagcacgcccttcccatcaccgtaggttttgcgatggcggaatacgtttcacggcttggcaagtccatacttgaaatcaggcgccttgaaaaaaaccttaaaggcaagctcgccggtgcggtgggctcttacaacgcgaccgccatgatcgtaaaagaccccgaagagcttgaacggctttacctggcggagttgggccttgagccttccgaacattccacccagcttgtggaacccgaataccttttaagactgcttttggaattcaacaccgcattcggaataatcgcaaaccttgcggatgatcttcgcaatttacagcggagcgaaataggagaagtgcgcgaagggtttgccgcggaacaggtcggctcatccaccatgccgcagaagcgcaatccgtggaattcggaacatgtaaaaagtttgtggaaggcgtttatgcccagagtgaacacgtttttcatggaccagataagcgaacaccagcgcgatctttccaattcggcaagccagcgtttcatttcagactacattgccggcttctgtctcgcggtctcgcgcatggctaaggttatcgaggggcttggcgccgacagggaaagattgctcgccaacctgcgcggcggcgggatacccggcggagtaatggcggagcccgcctacatactgttagctgaaaccggagtaagcgacgcacatgaagttatacgcaagataacccttgccgccgaaaaagaaaatataagttttgccgccgcccttgccaaagagccggaagtattgaaaaaaatcggcggcaaattggcggagttgggattaatcgcggcgaaagcggaagtgtcaaaagaggcgttatcattctttgaaaacccggagcgttattgcggacttgcggcaaaaaaagcaaaaacgctcgcggaaaaatacaaggcgttaatgggagggtaa

SEQ ID NO: 38226 - protein, 453 aa, Unknown
  Obtained from environmental sample
  DOMAIN (2)...(285): Lyase
  misc_feature (1)..(453): Xaa is any amino acid
MVPWISEEAALKACVKAEIALVIAHLAVRGKATHEIRTQLEEAGNSVDPAEVYAEEEKTRHNIRALVNVLKKKLPAEYSPLIHLGATSVDILDTSLAWRIRGVTREVVLPELKKLELLLCDLAEKEAETAQVGRTHGQHALPITVGFAMAEYVSRLGKSILEIRRLEKNLKGKLAGAVGSYNATAMIVKDPEELERLYLAELGLEPSEHSTQLVEPEYLLRLLLEFNTAFGIIANLADDLRNLQRSEIGEVREGFAAEQVGSSTMPQKRNPWNSEHVKSLWKAFMPRVNTFFMDQISEHQRDLSNSASQRFISDYIAGFCLAVSRMAKVIEGLGADRERLLANLRGGGIPGGVMAEPAYILLAETGVSDAHEVIRKITLAAEKENISFAAALAKEPEVLKKIGGKLAELGLIAAKAEVSKEALSFFENPERYCGLAAKKAKTLAEKYKALMGG

SEQ ID NO: 38227 - DNA, 498 bp, Unknown
  Obtained from environmental sample
  misc_feature (1)..(498): n is a, c, g, or t
atggctgagaaaggctttaccgatgttgagtcttatctggcggccgtacatcctcagggcgaggcggactcccttccccgcgataataaattacgtgccctgcttgcaagtatccccatcccaaaagcgatacttaccaactcgcccagagaacacgctgatctgattctggacaagcttgggattgccgatctctttacagacatttttgacatacggcaatgcggtttcaaaggcaagccgcggaaagaagtttttgaccacgcattaaacagcctcagggctcgcgcggacgaggttctctttattgacgacaatcctcataatgttgaagtttttatctcccttgggggcaacggcctcatctttgacgagaatgacatccacggtgattgttctctgccaaggatacgggagctcagtgaaatcgctgacaaaatagcaaaggaagatagggagtcgggaattgggagtcggaagtcgggttattgttcgtaa

SEQ ID NO: 38228 - protein, 165 aa, Unknown
  Obtained from environmental sample
  misc_feature (1)..(165): Xaa is any amino acid
MAEKGFTDVESYLAAVHPQGEADSLPRDNKLRALLASIPIPKAILTNSPREHADLILDKLGIADLFTDIFDIRQCGFKGKPRKEVFDHALNSLRARADEVLFIDDNPHNVEVFISLGGNGLIFDENDIHGDCSLPRIRELSEIADKIAKEDRESGIGSRKSGYCS

SEQ ID NO: 38229 - DNA, 807 bp, Unknown
  Obtained from environmental sample
  misc_feature (1)..(807): n is a, c, g, or t
gtggggcttaagaagccgaaggggttggcgctgggagcggccaccgccccggtggaaccggcgataagcctcagcgccgcatcgtggcggggaatacgaaccgcaactgtcggcaggccgctggtggcaaggtcgggtacggcgctttgtttgggtacgatcacggtgagcggaccgggccaaaattgcgcggacagggcggcaagatttttttgcgccgccgcgtccagcagggagaggtcggctattgtttccaatgccgcaatttcggcaatgtggacaatcagcgggtcaaagcgggggcgttgttttaccgcaaagatttttgcgagggcggcggggttggcggcgtcacctcccagcccgtacaccgtttcggtcggaaaagccgcaatccctccgcggacaatatgcgccgccgcctgccttattgtttcgttgctaatttttaaaagaggcatgaatctacaataccaagagaaaagagaagagggaagagggaagagggagtcgggagtggggagtagggagtggggtttctgtccgcaatcatttcatgttgctttcacgattagattacgaacaataacccgacttccgactcccaattcccgactccctatcttcctttgctattttgtcagcgatttcactgagctcccgtatccttggcagagaacaatcaccgtggatgtcattctcgtcaaagatgaggccgttgcccccaagggagataaaaacttcaacattatgaggattgtcgtcaataaagagaacctcgtccgcgcgagccctgaggctgtttaa

SEQ ID NO: 38230 - protein, 268 aa, Unknown
  Obtained from environmental sample
  SIGNAL (1)...(25)
  misc_feature (1)..(268): Xaa is any amino acid
MGLKKPKGLALGAATAPVEPAISLSAASWRGIRTATVGRPLVARSGTALCLGTITVSGPGQNCADRAARFFCAAASSRERSAIVSNAAISAMWTISGSKRGRCFTAKIFARAAGLAASPPSPYTVSVGKAAIPPRTICAAACLIVSLLIFKRGMNLQYQEKREEGRGKRESGVGSREWGFCPQSFHVAFTIRLRTITRLPTPNSRLPIFLCYFVSDFTELPYPWQRTITVDVILVKDEAVAPKGDKNFNIMRIVVNKENLVRASPEAV

SEQ ID NO: 38231 - DNA, 495 bp, Unknown
  Obtained from environmental sample
  misc_feature (1)..(495): n is a, c, g, or t
atgcctcttttaaaaattagcaacgaaacaataaggcaggcggcggcgcatattgtccgcggagggattgcggcttttccgaccgaaacggtgtacgggctgggaggtgacgccgccaaccccgccgccctcgcaaaaatctttgcggtaaaacaacgcccccgctttgacccgctgattgtccacattgccgaaattgcggcattggaaacaatagccgacctctccctgctggacgcggcggcgcaaaaaaatcttgccgccctgtccgcgcaattttggcccggtccgctcaccgtgatcgtacccaaacaaagcgccgtacccgaccttgccaccagcggcctgccgacagttgcggttcgtattccccgccacgatgcggcgctgaggcttatcgccggttccaccggggcggtggccgctcccagcgccaaccccttcggcttcttaagccccacccgcgcggaacacgtctttgagtcgttagggtga

SEQ ID NO: 38232 - protein, 164 aa, Unknown
  Obtained from environmental sample
  DOMAIN (15)...(164): yrdC domain
  misc_feature (1)..(164): Xaa is any amino acid
MPLLKISNETIRQAAAHIVRGGIAAFPTETVYGLGGDAANPAALAKIFAVKQRPRFDPLIVHIAEIAALETIADLSLLDAAAQKNLAALSAQFWPGPLTVIVPKQSAVPDLATSGLPTVAVRIPRHDAALRLIAGSTGAVAAPSANPFGFLSPTRAEHVFESLG

SEQ ID NO: 38233 - DNA, 645 bp, Unknown
  Obtained from environmental sample
  misc_feature (1)..(645): n is a, c, g, or t
atgctgggtatggcctttgacggcccgttgcgcggacgcggcatgcctctgctgccggtattctggacggattggcaatccgccgcccgggctttccccgacgccccggtgcttgccccgcctctggattccaaaagggcttacggacgtgatccctacggcagctatttccgccgtgacagctattaccagaacgatatcctgatctacccggtcagccggctggatcgccgtttccaccgcaaaacgcccatgctgggtcttgaatacaacgactttcgcatagggatagacattccctatgtgaaaaaaaacggcgcggtgaactttttcgtgggcgacaaggcgcttgtggccgtccatgacacgcactcaggcatcgtgcgtatttttgaccgtcagatttgggcaaaacccgcgctattcgtcaaggaagccgggcggctcaaggatctgggcacccgcagctattggaacaacgacggcaagtgcgttgaaggcggtctgcaaggcgcgtccatgaaagaaatattcggcatctatgccatgtggttcgcgtggttctccatgaacccggaaacgctcatcctgcccggcccgggtgaagtggacaaggcgctgctggtggacgccccgccgcaatag

SEQ ID NO: 38234 - protein, 214 aa, Unknown
  Obtained from environmental sample
  misc_feature (1)..(214): Xaa is any amino acid
MLGMAFDGPLRGRGMPLLPVFWTDWQSAARAFPDAPVLAPPLDSKRAYGRDPYGSYFRRDSYYQNDILIYPVSRLDRRFHRKTPMLGLEYNDFRIGIDIPYVKKNGAVNFFVGDKALVAVHDTHSGIVRIFDRQIWAKPALFVKEAGRLKDLGTRSYWNNDGKCVEGGLQGASMKEIFGIYAMWFAWFSMNPETLILPGPGEVDKALLVDAPPQ

SEQ ID NO: 38235 - DNA, 789 bp, Unknown
  Obtained from environmental sample
  misc_feature (1)..(789): n is a, c, g, or t
atggggaatgccatcccggaagagaaaacagaggaagcgcgctggcaggaataccgcaaaacacgggatcctaaaatccgtgaggctttcatcaagcaatatgcgccattagttaagtatgtggcggcaaaagtcgccataggaatgccaaataatgtagaatttgacgatctggtgggctttggggtctttgggctgatagacgccatagataaatacgacacggaaaaaaacgtaaaattcaagacctacgcggtaacgcgcatacggggggctattttcgatgaactcaggcagattgactgggtgccgcgttccgtaaggcagaaaaccagggagattgagtctacaatcagctctcttgaagcccaacttggaaggacagcttccgaccaggaaatcgccggagctctggggatgaacgaggatgagtatttaaaaaccctgcagaaaatctccagcacatcaatactttcccttcacgacgtttggttttccggggatgaaaaggaccgaatttccattgtagacagcatagaagcaccttccagcctgaaccctgacattatggtggaaaaggaggtcatgcgccaggtgataatagccgcgattaacgaactgcccgacaaggaaaagaaaatactgattctctattattacgaagacctgaccttacgggatatcggcagggtgcttgaagtaaccgaatcccgcgtctcccagcttcacagcaaagccatactccacctgcgatccaaattgacaaatatccgtaaaggcattgtgtag

SEQ ID NO: 38236 - protein, 262 aa, Unknown
  Obtained from environmental sample
  DOMAIN (104)...(186): Sigma-70 region 3
  misc_feature (1)..(262): Xaa is any amino acid
MGNAIPEEKTEEARWQEYRKTRDPKIREAFIKQYAPLVKYVAAKVAIGMPNNVEFDDLVGFGVFGLIDAIDKYDTEKNVKFKTYAVTRIRGAIFDELRQIDWVPRSVRQKTREIESTISSLEAQLGRTASDQEIAGALGMNEDEYLKTLQKISSTSILSLHDVWFSGDEKDRISIVDSIEAPSSLNPDIMVEKEVMRQVIIAAINELPDKEKKILILYYYEDLTLRDIGRVLEVTESRVSQLHSKAILHLRSKLTNIRKGIV

SEQ ID NO: 38237 - DNA, 867 bp, Unknown
  Obtained from environmental sample
  misc_feature (1)..(867): n is a, c, g, or t
gtggcgctggcagcctgcctgtccatggttgaagaatcgttttttgacgaaaacggcggatacgctgggcttcctgtcagagccgtagctccggccaagccgggccgcaggcctatccccgtttcgccaataagcggcaagggctatgataacctgttgttctatgagcgatcgttcgcctcaatggacacccatgatacccgcacgccggaagagatattcaagactctccccgcgggcaaaatattagccgacaacaacactttactggcggcgaagattaccggggcgaattacggcacggccaaaaagatagcggtaagcgggatgccctttacccaggcttgggaggtaacggtcaaccagaagccgtcgaacagttacggctaccaactggtgctgcccagccttaagagtgacgattttattgaaggcgactcaatgctgctcgtaatcagcatgcagacgctgagcacccccatggaagacagcaccggtaaaattcaggtaatcgtggaaaaggaaaccgcgcccaacgataaaacgcttatggaaaacgtttataccctggacggagggggctggttcatcgcgtacctgccctttcgggcgaaaaccggctacacccgcctctgcgtgcggctcggctacggtctgcaaaccgtgcagttcggcgggtaccaaatcatcaattatgaaaagaaggtcgatttcttccaactgcccagctcttccattatggagaaaaaaaactacgggcgggaactatttgacaaggataacgcgtggcgcagggacgcctgggcgcggatcgaacaaatcagaaagggggatattaccgtcaatgtcacggactcgtccgggtag

SEQ ID NO: 38238 - protein, 288 aa, Unknown
  Obtained from environmental sample
  misc_feature (1)..(288): Xaa is any amino acid
MALAACLSMVEESFFDENGGYAGLPVRAVAPAKPGRRPIPVSPISGKGYDNLLFYERSFASMDTHDTRTPEEIFKTLPAGKILADNNTLLAAKITGANYGTAKKIAVSGMPFTQAWEVTVNQKPSNSYGYQLVLPSLKSDDFIEGDSMLLVISMQTLSTPMEDSTGKIQVIVEKETAPNDKTLMENVYTLDGGGWFIAYLPFRAKTGYTRLCVRLGYGLQTVQFGGYQIINYEKKVDFFQLPSSSIMEKKNYGRELFDKDNAWRRDAWARIEQIRKGDITVNVTDSSG

SEQ ID NO: 38239 - DNA, 723 bp, Unknown
  Obtained from environmental sample
  misc_feature (1)..(723): n is a, c, g, or t
ttggggaggtttgtaatgaaaaacgtatttaatttgagagctatgcgcaacatggcaattatcgcacttgttgcggtaattggattttcaatagcggcttgcggtgacggcggaggaggtgataacaataataacaacaacaataataacaacaacaataacaacggaacagtaaccgccgcttcgctttatgggacatggtggtttgttggagagggagcggattcaattgtttttggtaaagacggcggacaagataaatatctttgggacggttatacttatgatggcagtgtagtatcttccggcaattattctgtttccggctctactcttaaacttgttcaatgggacaatacaaaaagtgatagcggtaatgttaccatttcaggaagcggaaatacaattaccctttcaggattctcaaagatgagcagattaaatggatcatggtataaagatggcgcaagcgtaagcagtggacctgttaccttaaacagcgtaaccgccaatggttcgagcacattaactaccacagagttagtcttgatatttaacgagaagatcaacggtctttcagcggctgacatcactttaagcggagtatcgggcgttaccaaaggaacattaacaggtggaccaaaatacgttttaccaatcagcggatttaccgcaggcggaacgttgaatgtggcggttgcaaaattcgggctttactattag

SEQ ID NO: 38240 - protein, 240 aa, Unknown
  Obtained from environmental sample
  misc_feature (1)..(240): Xaa is any amino acid
MGRFVMKNVFNLRAMRNMAIIALVAVIGFSIAACGDGGGGDNNNNNNNNNNNNNNGTVTAASLYGTWWFVGEGADSIVFGKDGGQDKYLWDGYTYDGSVVSSGNYSVSGSTLKLVQWDNTKSDSGNVTISGSGNTITLSGFSKMSRLNGSWYKDGASVSSGPVTLNSVTANGSSTLTTTELVLIFNEKINGLSAADITLSGVSGVTKGTLTGGPKYVLPISGFTAGGTLNVAVAKFGLYY

SEQ ID NO: 38241 - DNA, 648 bp, Unknown
  Obtained from environmental sample
  misc_feature (1)..(648): n is a, c, g, or t
atgtacgtaggacaatcggagtcgcaattaaaagacgccctcgccactgcggaacacgtctccccctgcgtgctttggatcgatgaaatagaaaaagggttatccgggcacggtggcaacctcgacggaggcgtatctacacgaatggtaggacagtttttgttttggctgcaagaatgcaagaagcaagtttttgtagtggctaccgccaacgatgtgtccaaacttccaccggaattgctccgacgcggccgctttgacgaactcttctttgtagatttacctaccgccgaagaacggcgcgaaatacttaccatgtattttaaaaaatacctgaccatgaattttgcgggtgatttcatcgacaaaatcgtagttatcaccgagggattcaccggtgcggacttggaatctacggttagagagctgacctaccgcaaggtggcgaacaatagctttgatttggttgaaagcaatattatatctgcgttcaataatgtcgttccgctatcccaaaccagcccggaaacaatcgaggcgatccgtgactggggcaaagaacgggccgttccggcttcaggaaaaccgataggcggccaagaactctcacacaaaaccggagtgaggatgcggaaagtattagtatga

SEQ ID NO: 38242 - protein, 215 aa, Unknown
  Obtained from environmental sample
  DOMAIN (1)...(149): ATPase family associated with various cellular activities (AAA)
  misc_feature (1)..(215): Xaa is any amino acid
MYVGQSESQLKDALATAEHVSPCVLWIDEIEKGLSGHGGNLDGGVSTRMVGQFLFWLQECKKQVFVVATANDVSKLPPELLRRGRFDELFFVDLPTAEERREILTMYFKKYLTMNFAGDFIDKIVVITEGFTGADLESTVRELTYRKVANNSFDLVESNIISAFNNVVPLSQTSPETIEAIRDWGKERAVPASGKPIGGQELSHKTGVRMRKVLV

SEQ ID NO: 38243 - DNA, 684 bp, Unknown
  Obtained from environmental sample
  misc_feature (1)..(684): n is a, c, g, or t
atgggacggcgtactgttcgccaaagacaagaagagcggcgaaaaatgatagaggaacttttaggattcgtcggccatgaaaccccactggaagccgcctttgcccaccacaacaaaggccgctccgttgtctatatcggcaagaccggcagcggcaaaaccacgctcatagccgagagtgcccggctgatgagcgagcgcaaggcgcaatccctacctatgtttttggaattttgcaacccgataaagcaatttgtgctattgcttgtcgagaagttacaccgccgaaaactcttgacgcaacaactaaacgcaacggactgggacacattgcaaaaacgcctaaaccgcctccactaccgccacgcgatgaaaatagccctctccgcgatccgagcctaccccggtctgtttatcggcgttgatgatgtcgatacactaacccccaacggtcgagccatccttgtatcgataatagacgcaggagcaatagtatgttgcgcggctaccaagagaacgcacaccctaacccgcgtcatgtaccgcctacatgtagtacccatcccgccgatacaagattcggttatccgcagtattacagaggagtttttgaatcgtcgcggtctacttgtcgaagaccggcaacactttatagaaaatataacatggaaatcagcccggtaa

SEQ ID NO: 38244 - protein, 227 aa, Unknown
  Obtained from environmental sample
  misc_feature (1)..(227): Xaa is any amino acid
MGRRTVRQRQEERRKMIEELLGFVGHETPLEAAFAHHNKGRSVVYIGKTGSGKTTLIAESARLMSERKAQSLPMFLEFCNPIKQFVLLLVEKLHRRKLLTQQLNATDWDTLQKRLNRLHYRHAMKIALSAIRAYPGLFIGVDDVDTLTPNGRAILVSIIDAGAIVCCAATKRTHTLTRVMYRLHVVPIPPIQDSVIRSITEEFLNRRGLLVEDRQHFIENITWKSAR

SEQ ID NO: 38245 - DNA, 372 bp, Unknown
  Obtained from environmental sample
  misc_feature (1)..(372): n is a, c, g, or t
gtggttaccgccgcagctcccgcgatttcaaagggcccggttaggatgacgccgatgtattcggtggttgttgccaacgagctttttcataacggaaacgtggaagcctggaagcgcattgtcgcgagttataacgcaaaatacccggagcttcaggtgtatatttattatgaaggcgagcgcattctggacatcaactccctgtttaagtggggaaaggtgaagcacggaagctcgattcagtttgctgtttccggcaacgagatcaaagacgtagcaaaattgcagcgttatctggttcagggagccagcaagcagtttgaagcgttcctgcacggcccggtgaacaacgtgttaaagctttttggttag

SEQ ID NO: 38246 - protein, 123 aa, Unknown
  Obtained from environmental sample
  misc_feature (1)..(123): Xaa is any amino acid
MVTAAAPAISKGPVRMTPMYSVVVANELFHNGNVEAWKRIVASYNAKYPELQVYIYYEGERILDINSLFKWGKVKHGSSIQFAVSGNEIKDVAKLQRYLVQGASKQFEAFLHGPVNNVLKLFG

SEQ ID NO: 38247 - DNA, 1632 bp, Unknown
  Obtained from environmental sample
  misc_feature (1)..(1632): n is a, c, g, or t
atgaccagccgggtacaggaaaacatgaaccgtgtccgcgacgaatccgcctttgtggaagccacggggaaacgcatcagcgaggtaaaaaacaagcttgcggagtttgaaaaagaactggtgaatgccgggaaaaagtgcgaaaaagatcttgaagacatagaaaaaaagtttgaaaaagaaaacgccgattcccttgaaaaagccgcagatgcagttatggcgggggtaaaatccacggtctctgatctaagggcgactgaggaagtcatcgaacgcaaagtggaggagcaccgccttgcggttataaaaattgaagaagcccgcgccgcaaatctggccagggatacggattacgtagataaactattggcgaaagcggtcgagcaggccggaaaaagggcggacaaaatggaagaagccgccgttgccaagctgaaagagcaggccgaagagcggatactcaaactgaaaactgccgaagaagaacgcctgcgctcctttcaggaaagcgccaaggcgaggatcctcgaagttcaggctttggttaaaagtatccgggaagactggcgcagcgaaagaagcgactgggagagcaaggacaaggctgtacgcgacgagcgaaagaaggatctggaagtttttgcctcaatgttcgatgcctccaaaaagcaaatggaagatttttccgcgcaggtaaatagcattataacttcgcaaaaagccctgctgcttaaagccaccgaggaagcaaagcaggccctggttaagaatatcagggaagaatggcgcacggaaagaagcgaatgggagacccaggataaggctgtacgcgacgagcgaaagaaagacctggaagtttttgcctcaaagtttgacgcttccaaaaagcaaattgaagagttttccgcgcaggtaaatggcattataaattcgcagaaagctctgctgcttaaagaatccgaggaaatgaagcagaccctggttaaaaatattagggaagaatggcagaccgaaagaaacgaatgggaaaccaaagacaaggctatacgcgacgagcgaaagaaagacatggaagttttcgccgcaatgtttaacgcttccaaaaagcagatagaagatttttccggtcgcgtaaatgaacttataagttcccaggaagcaatgtttcttaaagtgtccgaggaaacgaagcaggctctggttaaaaacttccaggacgaatggcgtgcagaaagaagcgaatgggaaaccaaggacaaggctatacgtgacgagcgaaagaaagacatggaagttttcgccgcaatgttcaacgcctccaaaaagcagacagaagatttttcaacacgcgtaaatgaaattataaagtctcaggaagccatgtttcttaaagtgtccgaggaaacgaagcaggctctggttaaaaacgtccaggaagaatggcgtgcggaaagaaacgaatgggaaaccaaagacaaggctatccgcgacgagcgaaagaaagacatggaagttttcgccgcaatgtttaacgcctccaaaaagcagatagaagatttttcaacacgcgtaaatgaaattatcaagtctcaggaagccatgttcttaaagttccctcgtccgatctga

SEQ ID NO: 38248 - protein, 543 aa, Unknown
  Obtained from environmental sample
  misc_feature (1)..(543): Xaa is any amino acid
MTSRVQENMNRVRDESAFVEATGKRISEVKNKLAEFEKELVNAGKKCEKDLEDIEKKFEKENADSLEKAADAVMAGVKSTVSDLRATEEVIERKVEEHRLAVIKIEEARAANLARDTDYVDKLLAKAVEQAGKRADKMEEAAVAKLKEQAEERILKLKTAEEERLRSFQESAKARILEVQALVKSIREDWRSERSDWESKDKAVRDERKKDLEVFASMFDASKKQMEDFSAQVNSIITSQKALLLKATEEAKQALVKNIREEWRTERSEWETQDKAVRDERKKDLEVFASKFDASKKQIEEFSAQVNGIINSQKALLLKESEEMKQTLVKNIREEWQTERNEWETKDKAIRDERKKDMEVFAAMFNASKKQIEDFSGRVNELISSQEAMFLKVSEETKQALVKNFQDEWRAERSEWETKDKAIRDERKKDMEVFAAMFNASKKQTEDFSTRVNEIIKSQEAMFLKVSEETKQALVKNVQEEWRAERNEWETKDKAIRDERKKDMEVFAAMFNASKKQIEDFSTRVNEIIKSQEAMFLKFPRPI

SEQ ID NO: 38249 - DNA, 489 bp, Unknown
  Obtained from environmental sample
  misc_feature (1)..(489): n is a, c, g, or t
atggaacagataggattttttgacgaaaacaaccggttatgggaattgagcaggcttggcgacccattggaaaagctcaatgagtatattgcttgggaagatattcgggagacactaaacaaagcgcttgaaaaagaacataaagggcttggcggcaggccgccgtttgattatgtgctaatgtttaaaatacttatcctacagaaactctataatatatcagatgacaaggctgaatatttaattatggatcggttaagctttcagcggtttttagggctccaactatgcaataaaatccctgacgctaagacaatatggaatttccgcgaagggttaaacaaagcggaagtactggaaacagtattcgacggtttcgtccaacaattagagggaaaagggatagtgacgcgcagcgggagcatagtggatgccacatttgtggacgtgccgcgcagcggaatacgagggaagagaataaagaaataa

SEQ ID NO: 38250 - protein, 162 aa, Unknown
  Obtained from environmental sample
  misc_feature (1)..(162): Xaa is any amino acid
MEQIGFFDENNRLWELSRLGDPLEKLNEYIAWEDIRETLNKALEKEHKGLGGRPPFDYVLMFKILILQKLYNISDDKAEYLIMDRLSFQRFLGLQLCNKIPDAKTIWNFREGLNKAEVLETVFDGFVQQLEGKGIVTRSGSIVDATFVDVPRSGIRGKRIKK

SEQ ID NO: 38251 - DNA, 522 bp, Unknown
  Obtained from environmental sample
  misc_feature (1)..(522): n is a, c, g, or t
atgctgatactgggcgggtatgtaacgcaaaacgtaaatgacaagaaggaaatgaagcctgcggcagcgggcgttgataaagaagtgcgggaaataaacacaatatgttttgatacgggattctacagcgaagaggcggtagccgcggtagaaaaaataaatgaagaaggaaagcgggaagggcctgaagtattttgcgcggtagagaaagggcatcacgggaaaacggtagaagatttgaaaaacaaagggcccaaggggcggcctcctgcaaacatgagcgcgaaagaaaagatggcgaggaaactgaaaacgcagagagggaaagagatatacaagaaacggaaagaaacggtagagcctgtattcgggataataaaaagtataatggggtttcggcaatttatgctgagagggatagagaaagtgaataccgaatgggcgttagtgcgtgtagcgtataactttaaaaggctgcaccggctgatgggagggaaacgggtggccgaatgcttagcatag

SEQ ID NO: 38252 - protein, 173 aa, Unknown
  Obtained from environmental sample
  misc_feature (1)..(173): Xaa is any amino acid
MLILGGYVTQNVNDKKEMKPAAAGVDKEVREINTICFDTGFYSEEAVAAVEKINEEGKREGPEVFCAVEKGHHGKTVEDLKNKGPKGRPPANMSAKEKMARKLKTQRGKEIYKKRKETVEPVFGIIKSIMGFRQFMLRGIEKVNTEWALVRVAYNFKRLHRLMGGKRVAECLA

SEQ ID NO: 38253 - DNA, 684 bp, Unknown
  Obtained from environmental sample
  misc_feature (1)..(684): n is a, c, g, or t
ttggccatcactaaggagttggcggacaaaatgggcggcagtgtcgatgtggaaagccaatacggcatgggtagtactttcatgttcaaggttcgccagggctttgtaagtaaagataccatcggcagaataaccgcggaagaattaaaagccaacgaatacaactgcgggcgcagggccataaacataagcattaaccgggcatatattccctatgccagagttctggcggtagacgatatggatggcaatctggaggtaatcaggggaatgatgaggccgtacgggataactgtggactgcgttaattcaggtcagggagctattgatgtggttaaaaacggaaaaataaagtacaacgcgatttttatggattacataatgccggaaatggacggccttgaaaccacccgtatcatccgtaatgagatagggagtgaatatgcccgaacagtgccgatcatagcccttactgccgatgccgttgccggcagcgccgaaatgtttttacaaaacggttttcatgcttgtatttctaaacccataaacatgaaggaaatgaattcggttatcaatacctttgtccgtaataaggaatatgaaacaggcgaagaaagaagaacaagagtattacaagacatcgaccaagtaacatgcaacagctgtcttactgttcccgcttag

SEQ ID NO: 38254 - protein, 227 aa, Unknown
  Obtained from environmental sample
  DOMAIN (73)...(192): Response regulator receiver domain
  misc_feature (1)..(227): Xaa is any amino acid
MAITKELADKMGGSVDVESQYGMGSTFMFKVRQGFVSKDTIGRITAEELKANEYNCGRRAINISINRAYIPYARVLAVDDMDGNLEVIRGMMRPYGITVDCVNSGQGAIDVVKNGKIKYNAIFMDYIMPEMDGLETTRIIRNEIGSEYARTVPIIALTADAVAGSAEMFLQNGFHACISKPINMKEMNSVINTFVRNKEYETGEERRTRVLQDIDQVTCNSCLTVPA

SEQ ID NO: 38255 - DNA, 378 bp, Unknown
  Obtained from environmental sample
  misc_feature (1)..(378): n is a, c, g, or t
atgaacaggatgattccgccctccgatgcctgtacctcgtggatgacagccttcaggcgttcttcaaattcccctcgaaacttggcccccgcgattaacgcgcccaaatccagggcaaggagcttctttccctttagcccctcgggaacgtccccagccacaatccgccgtgcaaggccttccacgatggctgtctttccgacgcctggttcgccgatcagcaccgggttgttcttggtacggcgggacagaacctgcatacagcggcgtatctcttcgtctctgccaataaccggatcgagcttttcctgtctggcaagggcggtaaggtcgcggcagtatttgtccagaaccttgtacttctcttcggggttttga

SEQ ID NO: 38256 - protein, 125 aa, Unknown
  Obtained from environmental sample
  misc_feature (1)..(125): Xaa is any amino acid
MNRMIPPSDACTSWMTAFRRSSNSPRNLAPAINAPKSRARSFFPFSPSGTSPATIRRARPSTMAVFPTPGSPISTGLFLVRRDRTCIQRRISSSLPITGSSFSCLARAVRSRQYLSRTLYFSSGF

SEQ ID NO: 38257 - DNA, 459 bp, Unknown
  Obtained from environmental sample
  misc_feature (1)..(459): n is a, c, g, or t
gtgccggttcttttagcgtttttaagtttatgtataagctcatgcaactccgatatgatatacgaagacaatataaaaattgcttcaaaaggatggcatcggtcggatattgtgcgtttcgaagttgacataacagatattgacagtccttacaacgtatatattaatgtgcgcaacaacaataattacaaatatatggaactttggctttttgttgatgtgcattcgccggctggcacagttgagcgcgacactgctaaaatcatgcttgccgaccatcggggcaaatggctcggaaatggtctcggcagcaagttcgatacacggttattcttccgtagtaatgtacggtttccatctgcaggaaaatatattttcgaatatgaacaggctacacgtgatgaattattgcctggaatagacgatataggactgagcattgagaaagtgaaaatatga

SEQ ID NO: 38258 - protein, 152 aa, Unknown
  Obtained from environmental sample
  SIGNAL (1)...(17)
  misc_feature (1)..(152): Xaa is any amino acid
MPVLLAFLSLCISSCNSDMIYEDNIKIASKGWHRSDIVRFEVDITDIDSPYNVYINVRNNNNYKYMELWLFVDVHSPAGTVERDTAKIMLADHRGKWLGNGLGSKFDTRLFFRSNVRFPSAGKYIFEYEQATRDELLPGIDDIGLSIEKVKI

SEQ ID NO: 38259 - DNA, 561 bp, Unknown
  Obtained from environmental sample
  misc_feature (1)..(561): n is a, c, g, or t
atgcccgcagacatcgtaaacctgtcaaaaagtatgctatacaaacctgaaagaatagaagtaactccggcatcttcggttgtggacacgatagagcaaagtttgtactttgtggagaaacctcaaaaaaacgacttgcttttcttgattttgagagacagaccaaataaaccaacgttagttttttcacgcacaaaacatggcgctgataaaattgcgaaggttctgaacagaagaggtatcggctgcgaagcaattcacgggaacaaatcacagggcgcccgacaaagcgctctcagcaatttaaaatcgggaaaaaccagcgtgattatcgcaacggatattgccgcaagaggtattgacattgtaaatctggacacagtcatcaattacgatttgccagatgtagccgaaacttatgtacaccgtatcggtcgtaccggacgtgccggcaatagtggaacggcacttacattctgctcacaggacgaacatgttatggtaagggatattcaaaaattaacaggcagaatattgaatgttgtatctttaacagcataa

SEQ ID NO: 38260 - protein, 186 aa, Unknown
  Obtained from environmental sample
  DOMAIN (75)...(151): Helicase conserved C-terminal domain
  misc_feature (1)..(186): Xaa is any amino acid
MPADIVNLSKSMLYKPERIEVTPASSVVDTIEQSLYFVEKPQKNDLLFLILRDRPNKPTLVFSRTKHGADKIAKVLNRRGIGCEAIHGNKSQGARQSALSNLKSGKTSVIIATDIAARGIDIVNLDTVINYDLPDVAETYVHRIGRTGRAGNSGTALTFCSQDEHVMVRDIQKLTGRILNVVSLTA

SEQ ID NO: 38261 - DNA, 573 bp, Unknown
  Obtained from environmental sample
  misc_feature (1)..(573): n is a, c, g, or t
atgaaaattcataatccagtagaacgcattgatgacccaaatgcggcattgcaaatgctaaaggacggaaatgagcgttatttaaaagggaaccttacagcaaagacagattataaggaagagcgggatgccctcgacgatgagcaagacccttttgcggtagtcctgacttgctcagattcacgggcggcgccggaaatattttttgacctgaaattgggtgatatctttgttatccgcaatgccggaaatgttgccgacacggaagctcttggcagtatagagtacgcggttgagcatcttaaaactaaattggttgttgtatgcgggcacaggcattgcggcgcggtaacggcggcatactcaagcggggaatttccgaaaaacatcaagcgtattgtagatcttataaaacccgcggtggaaaaaggcggcgatttggataaggtaatccataacaatgtggaaataatggtagaaaagataaaatcagatgagataatcaaacatttggaggttaaagtcgtcggcgcttactatgacatacatagcggcgtggtcgaatggctttaa

SEQ ID NO: 38262 - protein, 190 aa, Unknown
  Obtained from environmental sample
  DOMAIN (46)...(188): Carbonic anhydrase
  misc_feature (1)..(190): Xaa is any amino acid
MKIHNPVERIDDPNAALQMLKDGNERYLKGNLTAKTDYKEERDALDDEQDPFAVVLTCSDSRAAPEIFFDLKLGDIFVIRNAGNVADTEALGSIEYAVEHLKTKLVVVCGHRHCGAVTAAYSSGEFPKNIKRIVDLIKPAVEKGGDLDKVIHNNVEIMVEKIKSDEIIKHLEVKVVGAYYDIHSGVVEWL

SEQ ID NO: 38263 - DNA, 375 bp, Unknown
  Obtained from environmental sample
  misc_feature (1)..(375): n is a, c, g, or t
gtggcaaaagggcttctttctccctacggaacgcagataaccctgtgcaagagcggcaagatggcgttaaacgcgataaaaaataaccgctttgacgtggtatttatggatcacaggatgccggatatggacggcattgaaacgactcagcatatcagagctatgggagatgaagatccctattataaaaatgtgccgattatagcgttaaccgccgatgccgtatccggcataaaagaaatgtttttggaaaacggcctgaatgattttatatcaaagccgattgatacgatcaaactgaactctgtcctggagaaatggatacccagggaaaaacagcatggttcggttgttaataccaggaaggagaagtaa

SEQ ID NO: 38264 - protein, 124 aa, Unknown
  Obtained from environmental sample
  DOMAIN (2)...(105): Response regulator receiver domain
  misc_feature (1)..(124): Xaa is any amino acid
MAKGLLSPYGTQITLCKSGKMALNAIKNNRFDVVFMDHRMPDMDGIETTQHIRAMGDEDPYYKNVPIIALTADAVSGIKEMFLENGLNDFISKPIDTIKLNSVLEKWIPREKQHGSVVNTRKEK

SEQ ID NO: 38265 - DNA, 705 bp, Unknown
  Obtained from environmental sample
  misc_feature (1)..(705): n is a, c, g, or t
gtgacggcggcgacggcgctttcggcaaagatcgtccttgataacggaattgacataaacgttatcaaggaaataaggataaccggcgcgggcgccgccaaaataaaaagcgatatttttggaatccataccgaaagggtcggcgagataaaggccatcggcaggggagggatgttcctctccggcctggataatatcataatagccaatatcggaaccgggaccgttataatagaggcaaacgagcgcgggatttcgcatttcggcggttccggcgtaggcggcggaacgattatcgggctggcgaagaagctcctgccgaccgccgaattcaacgggattataaaccttgcgcagacgggcgacctgagccatgttgacctgttattggaagacataatggaaacggatttaagtttcctgaacaaggagaccacggtcgccaatttcgcgaagatgtcggatcgcgccggcagcgaggacatagctctggcaatcatcaacatggtgtaccaggttatcggggtgctttccgtttttgccgccaaagcaaaaggccttaagcgcgttattgtcaccggcaacggcagcggcaacaaactcgggcagaaggttcttgccaatataaccggaatgtacggcgttgaatttatctatcccgccgacgccgaatacaccaccgcggtgggagccgggctggtttaa

SEQ ID NO: 38266 - protein, 234 aa, Unknown
  Obtained from environmental sample
  DOMAIN (9)...(234): Fumble
  misc_feature (1)..(234): Xaa is any amino acid
MTAATALSAKIVLDNGIDINVIKEIRITGAGAAKIKSDIFGIHTERVGEIKAIGRGGMFLSGLDNIIIANIGTGTVIIEANERGISHFGGSGVGGGTIIGLAKKLLPTAEFNGIINLAQTGDLSHVDLLLEDIMETDLSFLNKETTVANFAKMSDRAGSEDIALAIINMVYQVIGVLSVFAAKAKGLKRVIVTGNGSGNKLGQKVLANITGMYGVEFIYPADAEYTTAVGAGLV

SEQ ID NO: 38267 - DNA, 426 bp, Unknown
  Obtained from environmental sample
  misc_feature (1)..(426): n is a, c, g, or t
atggtttttcaagaaactggcgcgtcattaaacccatgtaaaaacatcggctggcttatggaagagcctcttttcattcacagaatcggaaacaaagaagaacgcaagcgcaagatcgacagaatgttattaagagtcggtcttgacccgtcctacaaaacacgccgcgttagcgagttaagcggcggacaaaaacagcgcgtctgtattgcccgcgccctgattctatccccgcgtcttttaatcgccgatgaagcgatcagttcccttgacgtatcggccggcgcgcagatactaaaccttttcagggaactgcacaaaaatatggaacttacgattcttttcatttcgcataacaaagatgcggtggagtacgtttgtgacagaatggcggttatggagaatgggcggttgatattaagttga

SEQ ID NO: 38268 - protein, 141 aa, Unknown
  Obtained from environmental sample
  DOMAIN (1)...(136): ABC transporter
  misc_feature (1)..(141): Xaa is any amino acid
MVFQETGASLNPCKNIGWLMEEPLFIHRIGNKEERKRKIDRMLLRVGLDPSYKTRRVSELSGGQKQRVCIARALILSPRLLIADEAISSLDVSAGAQILNLFRELHKNMELTILFISHNKDAVEYVCDRMAVMENGRLILS

SEQ ID NO: 38269 - DNA, 306 bp, Unknown
  Obtained from environmental sample
  misc_feature (1)..(306): n is a, c, g, or t
atgaccacgcccttgagccccggcggcgccttgagcgacgagtcgcgcacgtcaccggccttctcgccgaatatcgccctcagcagcctctcctccggcgacaactccgtctcgcccttgggagtgaccttgccgacgagtatgtcgcccggctcaacctccgtgcctatccttatcacgccgttctcatctaagttgctgaccgcgtcgtcgctgacgttgggaatctcccttgtcaactcctccggcccgcgtttcgtatcgcgcacctccgtctcaaaaacctcaatatgcacggacgtatag

SEQ ID NO: 38270 - protein, 101 aa, Unknown
  Obtained from environmental sample
  misc_feature (1)..(101): Xaa is any amino acid
MTTPLSPGGALSDESRTSPAFSPNIALSSLSSGDNSVSPLGVTLPTSMSPGSTSVPILITPFSSKLLTASSLTLGISLVNSSGPRFVSRTSVSKTSICTDV

SEQ ID NO: 38271 - DNA, 903 bp, Unknown
  Obtained from environmental sample
  misc_feature (1)..(903): n is a, c, g, or t
atgatcagatcggccgagaggctttctttccaatactcctttatgaaataccgcatagacctctccaaatgtaagcattgcgatttatgcgttaaaagttgcagggcatcttgcatagatacaaaagagggaaaaatagattatacccgttgcataacttgtgaaaaatgcaaaaaagtttgcccgtcaaaagctatttcatactccaagcctttatcttgttccaagccttctaaaaaagctgtgcaaaaagaagcggaaattttaagcgaaagcggtgcggcgcggcgcagtatttttgttggttctaccattgcggcattgagttgtgccaccaaattgcaagctagtagtggagatgggggcttaaccgagttaaaagacaaaaaagttccaaaccgcaaaagaccgatagttccagcgggtgcaggaagtttcaaacatttccacgaccattgcttaggttgccagttgtgcgcttctgtttgcccaaacgatgtgttatccaacaaagctcatggaaacacaaaaccaaatatgtcttatgaacgcggttattgcaggccggaatgcgttaagtgttctgaggtttgcccaaccggagcgataaagcctatcacaagagccgaaaaatcttccatacaaataggctgtgccgtgtggaacaaggaactttgcattgtaaataccgacaaagtggtttgcgacttatgctcacgcnaatgcccaaacgctgcgatagctatgatacctcaaagcgcagatgcccccccagatgctccaaaaatcccaatgatagacacagaacgttgcatcggttgcggtgcctgcgagcatttatgccccgcccgcccgtatagcgcaaatgttgtgggaggtgttgaggttcatagggtggtgtaa

SEQ ID NO: 38272 - protein, 300 aa, Unknown
  Obtained from environmental sample
  DOMAIN (17)...(40): 4Fe-4S binding domain
  misc_feature (1)..(300): Xaa is any amino acid
MIRSAERLSFQYSFMKYRIDLSKCKHCDLCVKSCRASCIDTKEGKIDYTRCITCEKCKKVCPSKAISYSKPLSCSKPSKKAVQKEAEILSESGAARRSIFVGSTIAALSCATKLQASSGDGGLTELKDKKVPNRKRPIVPAGAGSFKHFHDHCLGCQLCASVCPNDVLSNKAHGNTKPNMSYERGYCRPECVKCSEVCPTGAIKPITRAEKSSIQIGCAVWNKELCIVNTDKVVCDLCSRXCPNAAIAMIPQSADAPPDAPKIPMIDTERCIGCGACEHLCPARPYSANVVGGVEVHRVV

SEQ ID NO: 38273 - DNA, 531 bp, Unknown
  Obtained from environmental sample
  misc_feature (1)..(531): n is a, c, g, or t
ttgaaaagcggttggcgtagctttgagaggcagcttttgatttggaatgaaaaaggcttgggaaaaaagaaaatcttagacgaaatgggaaaaccgctaaacagagacgaactctccgatttggaatgtatgaaagcgattttgctttggagtgctttgcctggcaccagcaggcacgaatggggtacagatatcgatgttatagatgcggctgcggttccagaaggctacgaggcagaactgagtttagaagaatcttttggtgtttttggaaaatttcacaaatggctggattctcaaattgaaagcggaaactcctttggattcaggagagtttttttgccaggcataggcagggtacagcaggagccctggcatttgagctatgtgcccgaatccaaaaaaattgaggaaaacttcacgccagaaaatctaaccgagcgtttggaaaaaagcgatatattattgctaccccaaattctagaaaatttggactggattttagaaaaaccacgtggtgtgttattttag

SEQ ID NO: 38274 - protein, 176 aa, Unknown
  Obtained from environmental sample
  DOMAIN (3)...(132): D-alanyl-D-alanine carboxypeptidase
  misc_feature (1)..(176): Xaa is any amino acid
MKSGWRSFERQLLIWNEKGLGKKKILDEMGKPLNRDELSDLECMKAILLWSALPGTSRHEWGTDIDVIDAAAVPEGYEAELSLEESFGVFGKFHKWLDSQIESGNSFGFRRVFLPGIGRVQQEPWHLSYVPESKKIEENFTPENLTERLEKSDILLLPQILENLDWILEKPRGVLF

SEQ ID NO: 38275 - DNA, 900 bp, Unknown
  Obtained from environmental sample
  misc_feature (1)..(900): n is a, c, g, or t
atgaccgtgaatttttcggacggcagcaagccgataaatttgcgttcccccatagttttagccgcaggtgcaaacaaaaatggcaaaggcataaacagctacgcaaaccttgggcttggcggaataacagttggcacagccactagaaatttcagaattggaaacacccacaggccaagagttggcttagacgaatccaaccgccttattcacaactctatgggactaaacaacgatggggtagagaaaatatccgcaagggtagagaagcaaattggcaaggcgagcagaaataaattcgcagttggaatttccgttgcagaaacacccggaatagcagaagaaaacaggcggcaagatttgttggaaactttttcaatagcgtacaaagcagctgattatttggaagtaaatgtgagctgcccaaacacaggcgaagaacgtttggatttagatacgtgttttatgaaagagattttttctgaaattgagagttttagaaaaaacgctccttgccgcaaagcggtttatgcaaaactaagcccagacctaacagacaaacagttgctttctcttttagatttgctcgctcaatttggcgtgaatggaattattctgggaaacacttacccaagcgaaaaactctcttattcattgcccgctttaaatgaaaaaggcacaagcggcggaatttcaggtcgggttatttacgaaaacacatttgcaaaaacagtgcttgcaaaaaaacattttcctaatttttcccttgttgcctgcggtggaatagaccacggtttgaaagtgaaggatttgctaggtgaaggcgtggattttgttcaggtgtattccgtatttgctttagaggatggcagcgcagaagatattatagcctcgcgataa

SEQ ID NO: 38276 - protein, 299 aa, Unknown
  Obtained from environmental sample
  DOMAIN (1)...(295): Dihydroorotate dehydrogenase
  misc_feature (1)..(299): Xaa is any amino acid
MTVNFSDGSKPINLRSPIVLAAGANKNGKGINSYANLGLGGITVGTATRNFRIGNTHRPRVGLDESNRLIHNSMGLNNDGVEKISARVEKQIGKASRNKFAVGISVAETPGIAEENRRQDLLETFSIAYKAADYLEVNVSCPNTGEERLDLDTCFMKEIFSEIESFRKNAPCRKAVYAKLSPDLTDKQLLSLLDLLAQFGVNGIILGNTYPSEKLSYSLPALNEKGTSGGISGRVIYENTFAKTVLAKKHFPNFSLVACGGIDHGLKVKDLLGEGVDFVQVYSVFALEDGSAEDIIASR

SEQ ID NO: 38277 - DNA, 372 bp, Unknown
  Obtained from environmental sample
  misc_feature (1)..(372): n is a, c, g, or t
ttgtataattgggaaacggctatgaaatcttgtccgagcggttggcatttgccgagtaatgacgaatggaaaacgtgcgtagattttgttggcggtgataaagtagcaggcaaatatttaaagtcaaagagtggctggctcgaaaacggcaacggcgaggacaagtacggtttttccgcactgccgggtggcagcgaccttcctagtggcgatctcaactttgtcggtaaattcggtgtctggtggagtagttcagagttcagcccttacggtgcttaccgctggagtatgcactacaacagcgagagcgcatactactactacgacgaaggtaagtacttcctgtacaatgttcgttgtttgcaggattaa

SEQ ID NO: 38278 - protein, 123 aa, Unknown
  Obtained from environmental sample
  misc_feature (1)..(123): Xaa is any amino acid
MYNWETAMKSCPSGWHLPSNDEWKTCVDFVGGDKVAGKYLKSKSGWLENGNGEDKYGFSALPGGSDLPSGDLNFVGKFGVWWSSSEFSPYGAYRWSMHYNSESAYYYYDEGKYFLYNVRCLQD

SEQ ID NO: 38279 - DNA, 423 bp, Unknown
  Obtained from environmental sample
  misc_feature (1)..(423): n is a, c, g, or t
atgaaaagaagtcgcggaaaatcactgaaccaagagatgaacttgaccaacatgatagatgtggtttttgccatcttgatagtttttttaatatctgcccctcttatgagccaaggcataaaggtagatttgccaaatgccgaagcaaatactattccgcaagaagaagatatgctcaaagttaccatagacaaggcagaaaaaatttttgttgcggatatggaagtacacatagacaactttgatgaaatcttcaaatcgctttggaaagacaatgcgcctgtggttataaatgccgattcatctgtgcactatggcattgttatgaaagttgtgtctctggttcaggttgctggtgttaaacaactcggttttttaaccttagacaaagatgaaaagaagattaagaagaggaaaagatga

SEQ ID NO: 38280 - protein, 140 aa, Unknown
  Obtained from environmental sample
  DOMAIN (6)...(130): Biopolymer transport protein ExbD/TolR
  misc_feature (1)..(140): Xaa is any amino acid
MKRSRGKSLNQEMNLTNMIDVVFAILIVFLISAPLMSQGIKVDLPNAEANTIPQEEDMLKVTIDKAEKIFVADMEVHIDNFDEIFKSLWKDNAPVVINADSSVHYGIVMKVVSLVQVAGVKQLGFLTLDKDEKKIKKRKR

SEQ ID NO: 38281 - DNA, 519 bp, Unknown
  Obtained from environmental sample
  misc_feature (1)..(519): n is a, c, g, or t
atgaaaggaatttacgcatttcaaggaaaagagcctgttgttggcaagggcgtgtacatagctccgggtgcccgcgttataggcgaggtggaactctcggatgatgtttccatttttcacaatgcggttttgcgtggagatataaacagcataaaagttgggaaaaattcaaatatccaagacaactcaactgtgcatttggcaagcgataaaggcgtggttataggagagggtgttactgttggtcacaatgccattatccacgcttgcacagttgaggattattgcatcatcggtatggggggctgtgttatggacggagctgtaattggccaccacagcattgttggtgcctgcgcccttgtcaccagcggcaaagaatttccaccttattccctaataaccggaagcccagcacgcagagttagggatttgacagaagatgaaataaaacactgcgagtggagtgcaaaaaaatatgttgaagttaaaaataattttttggagaaaaactcgtaa

SEQ ID NO: 38282 - protein, 172 aa, Unknown
  Obtained from environmental sample
  misc_feature (1)..(172): Xaa is any amino acid
MKGIYAFQGKEPVVGKGVYIAPGARVIGEVELSDDVSIFHNAVLRGDINSIKVGKNSNIQDNSTVHLASDKGVVIGEGVTVGHNAIIHACTVEDYCIIGMGGCVMDGAVIGHHSIVGACALVTSGKEFPPYSLITGSPARRVRDLTEDEIKHCEWSAKKYVEVKNNFLEKNS

SEQ ID NO: 38283 - DNA, 504 bp, Unknown
  Obtained from environmental sample
  misc_feature (1)..(504): n is a, c, g, or t
ttgaacagattgtgggggctgcgttccagctcagaggaattagaagaaataggggggggtataggagccgatattgccttttttgtgaaaggcggagcggcgtttgcaactggcattggcgagattttaacaccgcaaaacacaatagagagcgattgctgcataattttagccacgcccaaatgctcagtttccaccgccgatgcctataaagacgttatacctgccggcaccctgcactggcaaaattttttgaagaatacaaaccctctagacaatttatacaatcaatttgaagaaaccgtgctcgaaaaatatccccttataaattctttaaagcaaaaattaaatgactgcggaggaaactctctgctctctggtagcggatccagcgttttttctctgttttattctttggaaagtgcggtgaatgcttatgaaacggttaaaaacgattgcaggttcttgcggattacgagtttttctccaaaaaattatttttaa

SEQ ID NO: 38284 - protein, 167 aa, Unknown
  Obtained from environmental sample
  misc_feature (1)..(167): Xaa is any amino acid
MNRLWGLRSSSEELEEIGGGIGADIAFFVKGGAAFATGIGEILTPQNTIESDCCIILATPKCSVSTADAYKDVIPAGTLHWQNFLKNTNPLDNLYNQFEETVLEKYPLINSLKQKLNDCGGNSLLSGSGSSVFSLFYSLESAVNAYETVKNDCRFLRITSFSPKNYF

SEQ ID NO: 38285 - DNA, 810 bp, Unknown
  Obtained from environmental sample
  misc_feature (1)..(810): n is a, c, g, or t
ttgaataaaacaactgattttttgcaaaaacacggagtgccaaatgccaaattggattcgcagcttctgctttcgcacggtcttggcttaaagagaatggatttattcctgaattttgaccgccccttgcaagaaaaagaactgtccgtgcttcgccaaattgtggcaaggcgagccaaaagagaacccttgcagcacataatcggaagcgtaagttttagaggacaccaaataaaatgcgataaaagagcattagttcctaggcaagaaacggaattgattttagatatattaaaagagaaaatggataatgttttagatatagggaccggtagcggagccattgcaatagcagctgccttggaattaaatgcaaatgttattgcttgcgatgtttcagaagaagcacttagccttgcaaaagaaaatgttgccttgcataaattggaagaaaaaatttctcttgttaaaagcgatttgctctctaatgtgccaaacaatattaaatttgacgctttactcgcaaatttgccctacattcctcttggcgataaaaactctttgcaaccagaagtccttaatggcgaccctcacatagcgctttttggcggtacagacggcttggagctaattcgccgcctcctaaacacctgcgcaaactatttaatgcctgatgctcctgtgattttggaaattgcaagtggtcaggaaaaaattttgcaaagcgaaaattttgccggagttaaatgggttgaaaaccgaaaagattatgacgagcaagcaagattttctatattcaaaaaatgctag

SEQ ID NO: 38286 - protein, 269 aa, Unknown
  Obtained from environmental sample
  DOMAIN (91)...(241): Methyltransferase small domain
  misc_feature (1)..(269): Xaa is any amino acid
MNKTTDFLQKHGVPNAKLDSQLLLSHGLGLKRMDLFLNFDRPLQEKELSVLRQIVARRAKREPLQHIIGSVSFRGHQIKCDKRALVPRQETELILDILKEKMDNVLDIGTGSGAIAIAAALELNANVIACDVSEEALSLAKENVALHKLEEKISLVKSDLLSNVPNNIKFDALLANLPYIPLGDKNSLQPEVLNGDPHIALFGGTDGLELIRRLLNTCANYLMPDAPVILEIASGQEKILQSENFAGVKWVENRKDYDEQARFSIFKKC

SEQ ID NO: 38287 - DNA, 537 bp, Unknown
  Obtained from environmental sample
  misc_feature (1)..(537): n is a, c, g, or t
gtggctacaatggcggatggcagtctctgggagtgggggggctctgctgatacacctgcccgtactggcttggacagtgactgggcaatcgtgtcgactggataccatagctcggcagcaataaagaccgacggcagtctttgggcgtggcaatccacttgggtggactctagtcctggctacatcacgaaccagccatattctgactcaccaaggcgcgtaggcgcggacagcgattgggtgtccgtatcggtcggacgtttgcacacgcttgccttacgggcagacgggagcctctgggcttggggaatcaatgtttggggacagcttggcgatggcagcaatacgacaggacacattgaaaatcctgtccgcgtagccgcagacaacagttgggcagctgtatcggttggcgaggatcacacacttgctctcaagaaggatggcagcctctgggcatggggttacaacagtgacggtaggctcggtctcggcgactattccgaccagatacatcccagagcgcgtgggcactga

SEQ ID NO: 38288 - protein, 178 aa, Unknown
  Obtained from environmental sample
  misc_feature (1)..(178): Xaa is any amino acid
MATMADGSLWEWGGSADTPARTGLDSDWAIVSTGYHSSAAIKTDGSLWAWQSTWVDSSPGYITNQPYSDSPRRVGADSDWVSVSVGRLHTLALRADGSLWAWGINVWGQLGDGSNTTGHIENPVRVAADNSWAAVSVGEDHTLALKKDGSLWAWGYNSDGRLGLGDYSDQIHPRARGH

SEQ ID NO: 38289 - DNA, 936 bp, Unknown
  Obtained from environmental sample
  misc_feature (1)..(936): n is a, c, g, or t
ttggccgagctccttcacaatcaggttgaagggctgacagggcagatcgatgatacgaagaccattgcccaggaagaaaaagatccccagatgcgggaacttgccagggaagaattaaaggaactggaaacaaaattacaggagtatgaggagaaattgaaattcctcctcatcccaaaagatccgctggatgaaaaaaatatcatcatggaaataagggcgggaaccggcggagaggaggcggccctgttcgcgtcggatatgtaccgcctgtattcacgctttgcggaaacaaagggctggaaatttgagataatgaattccaatgaaaccgagcttggcggcataaaggaaatagttttttcgatcagcggcaataatgtgtacgagaacctccgttacgagtcaggagtccaccgtgtccagagggttccagcgactgagtcatccggcagaatccacacttcggcggtaacggtggcagtgctgcccgaggcggatgaaaccgaaatcgacatcaagccggacgaccttcgcattgatgtaatgcgtgccggcggccccggcggacagtgcgtcaacacgacggattccgccgtgcgtatcactcatctcccgaccggcattacagttcattgtcaggacgaaaaaagccagattaaaaacaaggccaaggcgatgcggatactgcgggcgcgtatctatgaaatggaagaagcaaaagcggcagcggaacgagccgaaaaccggaaatcccaggttggtacaggcgaccgttccgagaggatcaggacttacaattttcccgacaaccgcgtcaccgaccaccgcataggccttaccctttacaaactggaccgcatcatggaaggcgaagtcgccgaagtctttgacgcccttaaactctcggcccgtgaaagaatgctgcgaaattaa

SEQ ID NO: 38290 - protein, 311 aa, Unknown
  Obtained from environmental sample
  DOMAIN (21)...(135): PCRF domain
  misc_feature (1)..(311): Xaa is any amino acid
MAELLHNQVEGLTGQIDDTKTIAQEEKDPQMRELAREELKELETKLQEYEEKLKFLLIPKDPLDEKNIIMEIRAGTGGEEAALFASDMYRLYSRFAETKGWKFEIMNSNETELGGIKEIVFSISGNNVYENLRYESGVHRVQRVPATESSGRIHTSAVTVAVLPEADETEIDIKPDDLRIDVMRAGGPGGQCVNTTDSAVRITHLPTGITVHCQDEKSQIKNKAKAMRILRARIYEMEEAKAAAERAENRKSQVGTGDRSERIRTYNFPDNRVTDHRIGLTLYKLDRIMEGEVAEVFDALKLSARERMLRN

SEQ ID NO: 38291 - DNA, 687 bp, Unknown
  Obtained from environmental sample
  misc_feature (1)..(687): n is a, c, g, or t
ttgattaattggcggaatattgcgactaacgcagccgaaatactgtcgtttccggcggctgttagtttggaacggctggtgttaaggacttcggcaaggagcagggaggaatcaagagcgggggtttctatgcctgttgccgtgagggaggcggttccttcggcaagggcttcgtgtattgtcataggatgcaaattaatttcgcagcattctttcacgggccgagagtttaagggcgtcaaagacttcggcgacttcgccttccatgatgcggtccagtttgtaaagggtaaggcctatgcggtggtcggtgacgcggttgtcgggaaaattgtaagtcctgatcctctcggaacggtcgcctgtaccaacctgggatttccggttttcggctcgttccgctgccgcttttgcttcttccatttcatagatacgcgcccgcagtatccgcatcgccttggccttgtttttaatctggcttttttcgtcctgacaatgaactgtaatgccggtcgggagatgagtgatacgcacggcggaatccgtcgtgttgacgcactgtccgccggggccgccggcacgcattacatcaatgcgaaggtcgtccggcttgatgtcgatttcggtttcatccgcctcgggcagcactgccaccgttaccgccgaagtgtggattctgccggatga

SEQ ID NO: 38292 - protein, 228 aa, Unknown
  Obtained from environmental sample
  misc_feature (1)..(228): Xaa is any amino acid
MINWRNIATNAAEILSFPAAVSLERLVLRTSARSREESRAGVSMPVAVREAVPSARASCIVIGCKLISQHSFTGREFKGVKDFGDFAFHDAVQFVKGKAYAVVGDAVVGKIVSPDPLGTVACTNLGFPVFGSFRCRFCFFHFIDTRPQYPHRLGLVFNLAFFVLTMNCNAGREMSDTHGGIRRVDALSAGAAGTHYINAKVVRLDVDFGFIRLGQHCHRYRRSVDSAG

SEQ ID NO: 38293 - DNA, 645 bp, Unknown
  Obtained from environmental sample
  misc_feature (1)..(645): n is a, c, g, or t
ttgacgcccttaaactctcggcccgtgaaagaatgctgcgaaattaatttgcatcctatgacaatacacgaagcccttgccgaaggaaccgcctccctcacggcaacaggcatagaaacccccgctcttgattcctccctgctccttgccgaagtccttaacaccagccgttccaaactaacagccgccggaaacgacagtatttcggctgcgttagtcgcaatattccgccaattaatcaagcgtcggcgttccggggaatgtattgcatatatattaggcagaaaagaattttacggtctggaatttctggtaaatccttcggtattggttccaaggccggatacggagatgttagttgaaacagcaaggaatagggttcggggttcggggttcggggttcgggaacaaccgcttcgcgtgcttgacctatgcaccggatcaggtgcaatcgcgatcgcgctgaaacacacaatgccgggactggaagtgtgggccacggatatttccgctgaagcccttgaaaccccccaaaaaaacgccacccgcctcttgcccccgaattcaatccgcttcttccacggcgacctctacgacgcccttcccccccgaaccccgaaaccccgaaccccgaaccctttataa

SEQ ID NO: 38294 - protein, 214 aa, Unknown
  Obtained from environmental sample
  DOMAIN (100)...(210): Methyltransferase small domain
  misc_feature (1)..(214): Xaa is any amino acid
MTPLNSRPVKECCEINLHPMTIHEALAEGTASLTATGIETPALDSSLLLAEVLNTSRSKLTAAGNDSISAALVAIFRQLIKRRRSGECIAYILGRKEFYGLEFLVNPSVLVPRPDTEMLVETARNRVRGSGFGVREQPLRVLDLCTGSGAIAIALKHTMPGLEVWATDISAEALETPQKNATRLLPPNSIRFFHGDLYDALPPRTPKPRTPNPL

SEQ ID NO: 38295 - DNA, 717 bp, Unknown
  Obtained from environmental sample
  misc_feature (1)..(717): n is a, c, g, or t
gtggtgggcaagccggacgacccggaagccagcctttggcttaacccgcaaagctgggcaatcatcagcggctttgccccgcaagagcgcggcacggcaattatggatctggtctacaaacagctcaacaccaaatacggagcgcggctcatggccccctcttatcgccaccatgcctttgacggggctttggccctgctgttcaacccttccaccaaagaaaacggtgctatctttttgcagacccaaggctggctgattttggcggaagccttgctgggccggggagggagggcctttgaatactatctggaaagctgtcccgccgcgcagaaccccatagccgagacgcgccttttggaaccctatgtgtattcccaatttaccgaaagcgttgacagcccttttgagggccgcagtcatgtgcattggctgaccggcaccgccagcaccgtcatggtcggctgtgtggaagggatactgggactgcgccccgatattaacggcctgcgcctgtctccggcggttccctcttcatggaaaaatttctgcatggaaaaaatattccgcggcaagaaacttcgcatacagatactaaaccctcagggacacgaaagcggctgccggaaattaacggtcaacggcgctgaaatggcggacaattacattcctgcctcagtgctaaaggcggacaatgaagttatactggagatgtaa

SEQ ID NO: 38296 - protein, 238 aa, Unknown
  Obtained from environmental sample
  misc_feature (1)..(238): Xaa is any amino acid
MVGKPDDPEASLWLNPQSWAIISGFAPQERGTAIMDLVYKQLNTKYGARLMAPSYRHHAFDGALALLFNPSTKENGAIFLQTQGWLILAEALLGRGGRAFEYYLESCPAAQNPIAETRLLEPYVYSQFTESVDSPFEGRSHVHWLTGTASTVMVGCVEGILGLRPDINGLRLSPAVPSSWKNFCMEKIFRGKKLRIQILNPQGHESGCRKLTVNGAEMADNYIPASVLKADNEVILEM

SEQ ID NO: 38297 - DNA, 795 bp, Unknown
  Obtained from environmental sample
  misc_feature (1)..(795): n is a, c, g, or t
ttggcaaaatctgtggaagaagcgagggagtttccagccgttggcgatattgcccttattggtgaaaattttatcattggattaaagcctcgcaaaagcgttttaactcgcccgggccctcgcacaagggagagtcaagagcttgttcaggcggcaaacatagaccaaattgccatagtgatgagccttgaaaacccgcctttcaattttggcttcgcagaccgttttttgctcacagcaaatttcaacaacttgccctttattttaattctcaacaaatgcgatttaatggaaaacattccaagcgaaattcaggaatttattgagctaacggataataccattttaacaagtgcggaaagcggcaagggcatagaagaattaaaggaaaaattgcatagcaaaatttctgtttttagcggtcaaagcggggttggaaaatcctctttgataaataaacttgtgccaagtgctttgctgaataccagcgaggtcagaaaaaaagacggcaagggcaggcacacaaccgttgcatcttcttatttggatttacctgaaggcggtgcagtgatagacacgccaggcatccgcgcccttggaattatgaacctgagcacagacgaactagcccgctgtttcccaggtttttttgaaagcgatgtatttgattgtaaattcaaagactgcaaacaccagagcgaaccggactgcgcagttttgaaaagaatatcggatgggcagatttccgaagcgagatataagagttatttgcggattttgggttcgcttttgtga

SEQ ID NO: 38298 - protein, 264 aa, Unknown
  Obtained from environmental sample
  DOMAIN (3)...(261): Protein of unknown function, DUF258
  misc_feature (1)..(264): Xaa is any amino acid
MAKSVEEAREFPAVGDIALIGENFIIGLKPRKSVLTRPGPRTRESQELVQAANIDQIAIVMSLENPPFNFGFADRFLLTANFNNLPFILILNKCDLMENIPSEIQEFIELTDNTILTSAESGKGIEELKEKLHSKISVFSGQSGVGKSSLINKLVPSALLNTSEVRKKDGKGRHTTVASSYLDLPEGGAVIDTPGIRALGIMNLSTDELARCFPGFFESDVFDCKFKDCKHQSEPDCAVLKRISDGQISEARYKSYLRILGSLL

SEQ ID NO: 38299 - DNA, 591 bp, Unknown
  Obtained from environmental sample
  misc_feature (1)..(591): n is a, c, g, or t
gtgcatgaaggcgtttaccgcgaatgggttaatcccttgaggggcggcacggaagacaaacgcattgtttaccaggccgcgcccggagaaaaagtaaccattaccggcgcggaaattattacggactgggaaaatgtaggcggcactgtctggaagactgtaatacccaattcgttttttggctcgtacaacccctataaagaagttatctacggtgactggctttttacgcgagacaaagtttttcataccggcgaagtctacctgaacggaaaatccatgtacgaaactgtgcttcttgaaggcgtgatgaatcccaaagaatgtgaaacgtccatggataagccatggtcaacccatacctggttctgcgcggcggacgacagggaaacaatcatttgggcaaatttccagggcgaggatccccggaacggcaatgtggaaataaatgtccggccctttgttttctggcccgagaaaaacctgaccaattacattaccgtcaagggcttctccctgaagcaggctgcgacaaactgggcgccacccaccgctttgcagacagggcttgtcgggccgcattgggcttag

SEQ ID NO: 38300 - protein, 196 aa, Unknown
  Obtained from environmental sample
  misc_feature (1)..(196): Xaa is any amino acid
MHEGVYREWVNPLRGGTEDKRIVYQAAPGEKVTITGAEIITDWENVGGTVWKTVIPNSFFGSYNPYKEVIYGDWLFTRDKVFHTGEVYLNGKSMYETVLLEGVMNPKECETSMDKPWSTHTWFCAADDRETIIWANFQGEDPRNGNVEINVRPFVFWPEKNLTNYITVKGFSLKQAATNWAPPTALQTGLVGPHWA

SEQ ID NO: 38301 - DNA, 735 bp, Unknown
  Obtained from environmental sample
  misc_feature (1)..(735): n is a, c, g, or t
ttgggggcggttttcagcttgatagaaaacaaccatatttaccggattaaccacaagcgccaattccacggggccgaagtcggcggtataaagctgcacgccgccattgataccacgattcgggaaaacgttatccatgactgttaccgcggattatggcttgactggcaggctcagggaacccatgtgtgtcagaatcttttttggaacaactcccaggaagatttctttgtcgaggtaagccacgggccgtatctcgttgatcataacctgttcctttccaccgtcaattacagggaaatgtcccagggcggcgcgtttgttcacaatctttttgcgggtaaactctgcgccataccggagatgaagcgcttcacgccgtatcacttcccccatgagactgagataatgggggtgatgaccatttccggcggggacacccgtttctacaacaaccttttcatcggcgacaaggatgtggatctgccgaatgaacctgtcggtatctggtcagacgcgcctgtcgcgaatctcgggcttcccccggaagcggcggctaacatgccgtcgtatattaggaaacctgtagggaccggccagtacgactattatcccggcgaaaacgattccgccccggtggctccctcctcccgtccaaagtcccggttttcgggccccggtttccggcggcggccgttttcccccatgccaggtttaactgccggtgttacttaa

SEQ ID NO: 38302 - protein, 244 aa, Unknown
  Obtained from environmental sample
  misc_feature (1)..(244): Xaa is any amino acid
MGAVFSLIENNHIYRINHKRQFHGAEVGGIKLHAAIDTTIRENVIHDCYRGLWLDWQAQGTHVCQNLFWNNSQEDFFVEVSHGPYLVDHNLFLSTVNYREMSQGGAFVHNLFAGKLCAIPEMKRFTPYHFPHETEIMGVMTISGGDTRFYNNLFIGDKDVDLPNEPVGIWSDAPVANLGLPPEAAANMPSYIRKPVGTGQYDYYPGENDSAPVAPSSRPKSRFSGPGFRRRPFSPMPGLTAGVT

SEQ ID NO: 38303 - DNA, 519 bp, Unknown
  Obtained from environmental sample
  misc_feature (1)..(519): n is a, c, g, or t
atgagccaaaattataaaaggcgcgctctggataagataaaattccccattagcgccaagttaattatcattatttctttgattgtaatagtttctcttggttccattacagctcttgtttcatggctggttcaaacagatttaagaataaccgcggaagagaataattttgagacaaaccgacgttccgcgatagaagcggagactctgttggaaaacacacgatctaattcaaggatactaattcaatctatcagcgcattaggctcacaaacaactgctgtaaaagaaatgacggattttttctggaaagaaaatccgcagattgcggcgattttttttgtcgtttccggtaaacaggaacggctgataatcaacaagcagttttttatttcgcgtcaaattgatgaaacatttgttacttctttttttgatatgcaaagacctgcgctgggaagagccgtacgcggcgagactgttcttcttaacgcggctccttttttttcagagcgattttag

SEQ ID NO: 38304 - protein, 172 aa, Unknown
  Obtained from environmental sample
  misc_feature (1)..(172): Xaa is any amino acid
MSQNYKRRALDKIKFPISAKLIIIISLIVIVSLGSITALVSWLVQTDLRITAEENNFETNRRSAIEAETLLENTRSNSRILIQSISALGSQTTAVKEMTDFFWKENPQIAAIFFVVSGKQERLIINKQFFISRQIDETFVTSFFDMQRPALGRAVRGETVLLNAAPFFSERF

SEQ ID NO: 38305 - DNA, 810 bp, Unknown
  Obtained from environmental sample
  misc_feature (1)..(810): n is a, c, g, or t
atggacaacaaagcgcgttataaaaaaagaagcgattttcgttttcttgatttatttataattgttttttttctctctatcgctgttgtaagcctttatttattcaggcaggacttgttaaatacttttagactgcagaatgtcgagcctgccggaaccgtagtaattaaaaaaaatacagtccaaagacggcttggcgatcgcgttatatgggacaggttaaataccgaatcacccgtatatgtgggtgatttaatccgcgttgcggatatttccgccgcgactctctatataaaaggcaatagcatagaattagacgaaaacacgcttatccgtatcgttctttctcccgacggcgaaggcttgcaaattataatgacttccggaactgtagctgtttttgccgaaaagggagcggaaaaagtttctattaatttaaacggacaggaagtaaaatcggaaccgggaaccgttgtacgcgcctctatgcccgaaaaaggagagccgactttaaaggtttacgaaagcgtccagaaatttgtcgaggaagtgcctccgcgtaaaatacaggaaccccgtcttttaagtcccgccgcaaacagtattattcattacggtgaagaacttccgtccttgaatttccaatggacaagcatagatgaagcctcctcttatgttttgcagatcagctcttctccggatttttccagtttgcgcatgaatataaatacgaccgcagcgtcagtatctgtaaatactttggggcagggattatggtattggcgcgtaatgctctcgtgccgattctga

SEQ ID NO: 38306 - protein, 269 aa, Unknown
  Obtained from environmental sample
  misc_feature (1)..(269): Xaa is any amino acid
MDNKARYKKRSDFRFLDLFIIVFFLSIAVVSLYLFRQDLLNTFRLQNVEPAGTVVIKKNTVQRRLGDRVIWDRLNTESPVYVGDLIRVADISAATLYIKGNSIELDENTLIRIVLSPDGEGLQIIMTSGTVAVFAEKGAEKVSINLNGQEVKSEPGTVVRASMPEKGEPTLKVYESVQKFVEEVPPRKIQEPRLLSPAANSIIHYGEELPSLNFQWTSIDEASSYVLQISSSPDFSSLRMNINTTAASVSVNTLGQGLWYWRVMLSCRF

SEQ ID NO: 38307 - DNA, 678 bp, Unknown
  Obtained from environmental sample
  misc_feature (1)..(678): n is a, c, g, or t
ttgtttaagatgtacagaacttatttggaaaataaaggtttcaaagtagaggtcaccgatattagcgagggaacagttggagggttcaaagaaatttgcctttttataactggcgatggagcctacggagttttgaaatttgagagcggtgctcatagggttcaacgggttccagaaaccgaatctcaggggcgtgtgcatacctcggcggcaacggttgcggttatgccagaagctgaagaagttgatgttgaagttagaacagaagatttaaaagttgatgtttacagggcaagcggagcgggtgggcaatacataaacaaaaccgattccgctgttcgcataactcacattccaagcggcgtggttgtatcttgccaaaccgagcgcagccaaattcaaaaccgttcaaaagccatggaacttttgcgttcccgtttgctagatcacgccatttccgaaaagcaaaaaaaagaatctgctgaaagaaaaagcctcgttggcacaggagaccgtagcgataaaattcgcacatacaattttccacaaaatagagtaaccgaccatcgcataaacttaactctttataacctagacaacataataacaggcgatttgcaagagataatagacgctctgcatttggcagatgcacagagcanactggcaaacagctga

SEQ ID NO: 38308 - protein, 225 aa, Unknown
  Obtained from environmental sample
  DOMAIN (1)...(48): PCRF domain
  misc_feature (1)..(225): Xaa is any amino acid
MFKMYRTYLENKGFKVEVTDISEGTVGGFKEICLFITGDGAYGVLKFESGAHRVQRVPETESQGRVHTSAATVAVMPEAEEVDVEVRTEDLKVDVYRASGAGGQYINKTDSAVRITHIPSGVVVSCQTERSQIQNRSKAMELLRSRLLDHAISEKQKKESAERKSLVGTGDRSDKIRTYNFPQNRVTDHRINLTLYNLDNIITGDLQEIIDALHLADAQSXLANS

SEQ ID NO: 38309 - DNA, 951 bp, Unknown
  Obtained from environmental sample
  misc_feature (1)..(951): n is a, c, g, or t
ttggtgaataaaccggcgtttgaaaacttgtactatgaagcggatgatatcgcgggggaattccgctcttacaaggaaagccttgcctttgatccgcaaagacttgaagaagtaaatgaacgccttgtgtttttgaataaattaaaaaagaagtacgcaaaagacagccttgccggaaacgaggaagaggctattttattatacaaaaccaacgcgcaggcggaaattgaagcccttagcagcgcggaagaaaacaggggcaagttaaaagaagcaatcagcgctttggaaaaaaagatagtttcaaaagctcaaggtttaagggaaaaaagaaatgccgcaagcgtaaaattaagccggcttattaccgaaatactgaaaaatcttggaatgccgaacgcccgttttcaggcgtcagtcgcgccgaaacagaatgaggggcagactacgtttggaccctacggcgcggaagaaatcgagtttttgatttccgcaaatacgggcgaaccgcttaaagatttggcaaaaatagcctcaggcggcgagctttccagagttatgctggcgataaaaaccgcccttctatccgacgaccgccgcgatgaatccgaaagcgtcgaaactctgatttttgacgagattgacgcgggtatcggcggtgaagttgctttgaaagtaggggagtatcttgtaaaaataggcaaatttaagcaaattttttgcgttacacatctagcgagtatcgcagttcgtgccgataatcattttaaggtagaaaaaaagctggctggagaaagaaccgtgacggaggtctccgaaataaaaggcccggaaagacggcaggaaatagccaggatgcttgccggcgattcaggagaggtggctcttgcccatgcggatgaattactggcaaaatacagtggagtgaaaaatggcgaaagtaacaaatga

SEQ ID NO: 38310 - protein, 316 aa, Unknown
  Obtained from environmental sample
  misc_feature (1)..(316): Xaa is any amino acid
MVNKPAFENLYYEADDIAGEFRSYKESLAFDPQRLEEVNERLVFLNKLKKKYAKDSLAGNEEEAILLYKTNAQAEIEALSSAEENRGKLKEAISALEKKIVSKAQGLREKRNAASVKLSRLITEILKNLGMPNARFQASVAPKQNEGQTTFGPYGAEEIEFLISANTGEPLKDLAKIASGGELSRVMLAIKTALLSDDRRDESESVETLIFDEIDAGIGGEVALKVGEYLVKIGKFKQIFCVTHLASIAVRADNHFKVEKKLAGERTVTEVSEIKGPERRQEIARMLAGDSGEVALAHADELLAKYSGVKNGESNK

SEQ ID NO: 38311 - DNA, 801 bp, Unknown
  Obtained from environmental sample
  misc_feature (1)..(801): n is a, c, g, or t
atggccgagcctttgtatctgttacctgttatttattatttaattatgtttgacgcgaaaaaagtgacggaagagattgtccaatggatacgggaatactttgacaaaaacgccagggactgccatgccgttgtgggccttagcggaggcaaagacagctcgacagtcgccgccttgtgcgtcaaagcccttggcgcggacagggtcttcggcgttcttatgccgcagggagagcagtgggatataggcttctcgcatgagttagccgatcatttggggataaaaaaatgcgtcgtcaatattaaggatggcgtggacgccgtttttaagtcattgaaagagagcggattgctgctgaacaggcaggcgacaattaacaccccggcgagaatcagaatgtccgtcctctacgctgtttccgccattatcggcggacgtgtggcgaatacctgcaaccttagcgaggactgggtcggctattccacgaaattcggggacagcgccggcgatttcagccctatctccggattgactgttaccgaggtaaaggctgtagggaaggaacttgcgttgccgtcaaaatttatcgaaaagctgccggcggacgggctttccggcctgtccgatgaggaaaacctcgggttttcctataatgtccttgacaagtatatccgggaaggaatctgcgaaaataaaaccatcaaagaaaaaatcgacaatctgcacaagaacaacctgcacaagcttaccctcatgccggcttatcaattaacaattaacagggaacagggttgttattag

SEQ ID NO: 38312 - protein, 266 aa, Unknown
  Obtained from environmental sample
  DOMAIN (22)...(252): NAD synthase
  misc_feature (1)..(266): Xaa is any amino acid
MAEPLYLLPVIYYLIMFDAKKVTEEIVQWIREYFDKNARDCHAVVGLSGGKDSSTVAALCVKALGADRVFGVLMPQGEQWDIGFSHELADHLGIKKCVVNIKDGVDAVFKSLKESGLLLNRQATINTPARIRMSVLYAVSAIIGGRVANTCNLSEDWVGYSTKFGDSAGDFSPISGLTVTEVKAVGKELALPSKFIEKLPADGLSGLSDEENLGFSYNVLDKYIREGICENKTIKEKIDNLHKNNLHKLTLMPAYQLTINREQGCY

SEQ ID NO: 38313 - DNA, 891 bp, Unknown
  Obtained from environmental sample
  misc_feature (1)..(891): n is a, c, g, or t
ttgccgcgtcagaagaactgtggggggattttgatggagaagaaagggcagtcagccctgtttacggattattacgcccttaccatgtcgcaggggtattggaaacacaacccccagcggcaggcggtttntgagatgtctttcagacggcagccattcgctggcggttatacgatattcgccggcctgggaaccctgcttgaaaacctcgccggcctttctttttccgatgatgatattgaatacataaggagccttggcgggtttgacgaaaagttccttgaatacctgaaacattttcgctttaccgcttcgctgtgggccgttgacgagggcactgtggtttttccccaggaaccgctaatcagaatcaaaggcaacctcatcgaatgtcagattattgaagcgatgctccttaataccattaattttcaaagcctgattgcgaccaaaacccggcgcgtctggcttgcttccggaaaaggctcgataatggaattcgggctgcgccgcgcgcaggggcccgatggggcgatgtccgcgtcaagggcggcgtttataggcggcgccatcggaacatccaacacccttgcgggaaaaatatacggcattcccgtaatgggaaccatgggccactcatgggtaatgtcatttcccgaagaggtaaattcttttgacgcgtatgcgggactctacccggacagatccgtgttccttatagacacgtatgacaccttaaaacacggcatagtaaacgcgattaaagccggtagaaaattgaatgaacagggtaaaaaattcggagtgcgccttgattccggggatatcgagtacctttctaccgaggtaaggaagatgctggatgacgcggggttaacgacgcgagtataa

SEQ ID NO: 38314 - protein, 296 aa, Unknown
  Obtained from environmental sample
  misc_feature (1)..(296): Xaa is any amino acid
MPRQKNCGGILMEKKGQSALFTDYYALTMSQGYWKHNPQRQAVXEMSFRRQPFAGGYTIFAGLGTLLENLAGLSFSDDDIEYIRSLGGFDEKFLEYLKHFRFTASLWAVDEGTVVFPQEPLIRIKGNLIECQIIEAMLLNTINFQSLIATKTRRVWLASGKGSIMEFGLRRAQGPDGAMSASRAAFIGGAIGTSNTLAGKIYGIPVMGTMGHSWVMSFPEEVNSFDAYAGLYPDRSVFLIDTYDTLKHGIVNAIKAGRKLNEQGKKFGVRLDSGDIEYLSTEVRKMLDDAGLTTRV

SEQ ID NO: 38315 - DNA, 1413 bp, Unknown
  Obtained from environmental sample
  misc_feature (1)..(1413): n is a, c, g, or t
atgcgcaagcaggtaaaagacgtgcccgtgtttgattatgttgagaagcggcagaaaatgctctttgaagaatttgccgcgcctgcattaattgagaataactccagcggaggcatagaaccttcggttcgtaaggcgcaaagaaattttgttgttggcattccacgggcgttttccgttcatacgctttatcctctttatagttggttttttcatgagttgggaattaaaacattcctttctacggaagtagcccatgccggagtagcgcgggctgaatcaacctattgtttcccggcggaaatcgcgcatggggcgattcaagattgtcttgataagggggctgattatgtgttgatgccccatttccgcgatatgccaagttacgaagagaaagtacatgcgaatttctgtcctattacccaggcgcttccttattatatggaaaaggcttttcctgatatcgataaaaagaaatggttgccgcttgtcgtgagtttcaaatttggcgaaggaaaggcgcttgaattattctgcgagatgacaaaattgttgggtatcggcgaagcggaaacaaaaaccgcgtttgatacggctttggcaaaacagaaaagttattttgaagcggttgaaaaaatgggtcatcaggcgcttgaagacgcgcgtaagtcggacaggcccgttattgccgtgttaggaagaccttacaacgccttcacgcctgaagcgaatatgggtattccgcgcaagtttaccacgcgcggctattcaatcattccatttgacatcttgccgttccacgatgaagttatcttcccgaatatgtattggttcttcggccagcaggatttaaaagcgtcaaaactcctcaaaaaagaagacaatatttatcttacgtttgtttccaatttttcatgcgctcccgattccttcattctccattatgtgaaatggatgatggggcaaaaaccgttcctcgtgcttgagttggattcccactcagccgacgcgggcgttgatacgcgcgtagaggcgttcctcgatataattgacggttaccgcgcaaagagaaatcagtttgaagacgagcgttatgacaacggaatgaggtttgtctgcgaaaaaatgtattcgggcgaatacgatttgcgcatagacaataaaaaaacaggggagaggattccggttatagacaataagagggtaaaagtactgttgtccaatatgggaaatatttccaccgagtacatgggcgcggcgatacgcagtttgggcattaacgccgaggcgatgcccgtcgctaccgccaagacgattcaagccgcgcgcgcccacgcgtcggggaaggaatgtgtcccgagccatttggttcttggaagcgcgttggaattttcttcagtgataataccgtaa

SEQ ID NO: 38316 - protein, 470 aa, Unknown
  Obtained from environmental sample
  misc_feature (1)..(470): Xaa is any amino acid
MRKQVKDVPVFDYVEKRQKMLFEEFAAPALIENNSSGGIEPSVRKAQRNFVVGIPRAFSVHTLYPLYSWFFHELGIKTFLSTEVAHAGVARAESTYCFPAEIAHGAIQDCLDKGADYVLMPHFRDMPSYEEKVHANFCPITQALPYYMEKAFPDIDKKKWLPLVVSFKFGEGKALELFCEMTKLLGIGEAETKTAFDTALAKQKSYFEAVEKMGHQALEDARKSDRPVIAVLGRPYNAFTPEANMGIPRKFTTRGYSIIPFDILPFHDEVIFPNMYWFFGQQDLKASKLLKKEDNIYLTFVSNFSCAPDSFILHYVKWMMGQKPFLVLELDSHSADAGVDTRVEAFLDIIDGYRAKRNQFEDERYDNGMRFVCEKMYSGEYDLRIDNKKTGERIPVIDNKRVKVLLSNMGNISTEYMGAAIRSLGINAEAMPVATAKTIQAARAHASGKECVPSHLVLGSALEFSSVIIP

SEQ ID NO: 38317 - DNA, 1170 bp, Unknown
  Obtained from environmental sample
  misc_feature (1)..(1170): n is a, c, g, or t
atgatcatctgcgggcttgcggcatctcttgtaacggaagataaaaaattgataaagatagccaggatatataacgatgattatatgcagtttattcagccggaaggcggacagctnttaggcatagatcatnttatccatcntgatatggaagccgcgtgttcaataatcaaggcgattgaacatggcgttataggagatattgtttcattctcagataccccatacgaactaggttcaattgaaattgtaaaaggcagcgcaatggacggtcttgcgcttatggattaccgcaaactggtaacgcatgaaagccttgtaactctggtagagcatgataatgaggttgtgcttccgtcaggttcgactgttttaaaatacggcgaccgcattcacgttcttgcggataacaaaaatctgcccgcgatttacaaattggcaggggatactcaaaaacctatccgcaaaatcggcattgcgggcggcggcaagcttggcgtactgattgcggaagggctgctggaaaaagacagtattataaaccaaaacattaaaaacagaaaacagacaacaaaccgccgtgtaatttttattgaacaggattccaaaatatgctataaacttgccgcccgttttccgtctgcgctggttctgcgcgaagatatttccgatgaaagtttttcttccgacgaagaattaaacagtcttgactgccttattaccgctacagctaacgaagaactaaacatcattaccgctgtatacatgaaaacaaaaggcgttacgcgaactatcgcaattgttaacggctccggctatgcggctatggcgcggcacttgggcgttgatgttgtaattccgatgatgtccgttgttgtagattctattctttctcatcttatgggcagtaatgttaaagaagtacattctttgggatacgataacattgatttaatcgaagctgaaatcggcaaaaacgctcctgtcattgacaagccgatttccgcgttcaaactgtcggagggcggccttctgctccttgttaaacgggaaggggtatcgttcattccaaaaggcgattatgtattcaaagaaggcgaccgtattgtcgtaattgccaacgtggacagccattctgagatagagaaatattggcgctctaagctgtaa

SEQ ID NO: 38318 - protein, 389 aa, Unknown
  Obtained from environmental sample
  DOMAIN (157)...(288): TrkA-N domain
  misc_feature (1)..(389): Xaa is any amino acid
MIICGLAASLVTEDKKLIKIARIYNDDYMQFIQPEGGQLLGIDHXIHXDMEAACSIIKAIEHGVIGDIVSFSDTPYELGSIEIVKGSAMDGLALMDYRKLVTHESLVTLVEHDNEVVLPSGSTVLKYGDRIHVLADNKNLPAIYKLAGDTQKPIRKIGIAGGGKLGVLIAEGLLEKDSIINQNIKNRKQTTNRRVIFIEQDSKICYKLAARFPSALVLREDISDESFSSDEELNSLDCLITATANEELNIITAVYMKTKGVTRTIAIVNGSGYAAMARHLGVDVVIPMMSVVVDSILSHLMGSNVKEVHSLGYDNIDLIEAEIGKNAPVIDKPISAFKLSEGGLLLLVKREGVSFIPKGDYVFKEGDRIVVIANVDSHSEIEKYWRSKL

SEQ ID NO: 38319 - DNA, 651 bp, Unknown
  Obtained from environmental sample
  misc_feature (1)..(651): n is a, c, g, or t
gtggaagaaaagcttgcccaggtttccggctcggacgatctgctgcaaaacatgcaggtacaactgcgccgtctggaagacacgttaaaagaaaccgaagaaaaatacaaacgtgtggaaaacaagaccaaaaccctgcaggagacaaacgacggcataaaccggaatttcaaggctttgcaggaaaacgaacagacggccaagcggcttgatgatgccgtttcccagttgaaaacagacctggactccatacgcagttcaatagaagccctctccgccgagaacgataaggcccgcgataccgctgaaaaactttcttcgctggatgaaaacatccaatggctggaaaaacgcatagaagaaatgaataaagcccgcgaaagcctcgcgcggcttgccaccgaactgcaaaaccttgaaaaaaaggccaaagaccaggttaaactcgtccaatccgtgacacgcggcgaaggacaaccggcagggggcaagaagggtaaaacaggcgacggggctccgacgacgaacgtccgtgaaaacatcaaaaaactcaaagcgcaaggctggaccattgatgagatcgccaaagcatatcatatgtccaaaggcgaggtggagcttaccctggaactcccctccaaagacgcgtga

SEQ ID NO: 38320 - protein, 216 aa, Unknown
  Obtained from environmental sample
  misc_feature (1)..(216): Xaa is any amino acid
MEEKLAQVSGSDDLLQNMQVQLRRLEDTLKETEEKYKRVENKTKTLQETNDGINRNFKALQENEQTAKRLDDAVSQLKTDLDSIRSSIEALSAENDKARDTAEKLSSLDENIQWLEKRIEEMNKARESLARLATELQNLEKKAKDQVKLVQSVTRGEGQPAGGKKGKTGDGAPTTNVRENIKKLKAQGWTIDEIAKAYHMSKGEVELTLELPSKDA

SEQ ID NO: 38321 - DNA, 1095 bp, Unknown
  Obtained from environmental sample
  misc_feature (1)..(1095): n is a, c, g, or t
atgcgctcttcatggaagggcgaggccaatgaaatacgcgattcatgggaaagcgagtcgggtaagtataaagctgatttgcaggcgctgcgccaggacatggcggggatagatgatggattgcgccggtcaatgagggagacgatagacaaggtcaacggcgactttgccctttttggaaatgaaatacgtaattcctgggaaagcgcgtcgggagaatatacggaaaaactacaggcattacggcaggaactggcgggaatagagcaggaattacaggggattaaagaaaaatcatttaacaatgtctcgaaaaagctcaaagggttcgaagacgatttccttgccagcctcagccggcgcagcggagagatcgacaagcagcttgaagcctggaagaacgagcttgacaagcggctggacgaggaactggaaaaagcttccagggaggaaggcgaaaaaataacatcgggtttgaagcgtttcaaagacgagacaacggcgcttgaaaaaaacatacgcgaagaaatccgcgcaacggaagaatccaaaagaacgttcagcgaacagtttaccaaagacctggaagacgcgagaaagacaatggacattatccgcctggaaatcgcggctcagaataatcttgccggtcaaaccgaaacactcaggacggaacttgagcagtacattaaaaatatgagcagcaccatagaccgcatatccctgatagaaactgaaatcagccgctatgactcgcaactggcccagataaaacgcatggaagaagatgtgaacgccaagatgacccgcttcctttcggaaaaacaccgcatcgaggtaatggaaaacggaatttacccgcctgctccagacatcccaatccgtggaagaaaagcttgcccaggtttccggctcggacgatctgctgcaaaacatgcaggtacaactgcgccgtctggaagacacgttaaaagaaaccgaagaaaaatacaaacgtgtggaaaacaagaccaaaaccctgcaggagacaaacgacggcataaaccggaatttcaaggctttgcaggaaaacgaacagacggccaagcggcttga

SEQ ID NO: 38322 - protein, 364 aa, Unknown
  Obtained from environmental sample
  misc_feature (1)..(364): Xaa is any amino acid
MRSSWKGEANEIRDSWESESGKYKADLQALRQDMAGIDDGLRRSMRETIDKVNGDFALFGNEIRNSWESASGEYTEKLQALRQELAGIEQELQGIKEKSFNNVSKKLKGFEDDFLASLSRRSGEIDKQLEAWKNELDKRLDEELEKASREEGEKITSGLKRFKDETTALEKNIREEIRATEESKRTFSEQFTKDLEDARKTMDIIRLEIAAQNNLAGQTETLRTELEQYIKNMSSTIDRISLIETEISRYDSQLAQIKRMEEDVNAKMTRFLSEKHRIEVMENGIYPPAPDIPIRGRKACPGFRLGRSAAKHAGTTAPSGRHVKRNRRKIQTCGKQDQNPAGDKRRHKPEFQGFAGKRTDGQAA

SEQ ID NO: 38323 - DNA, 417 bp, Unknown
  Obtained from environmental sample
  misc_feature (1)..(417): n is a, c, g, or t
ttgaatattctttataaagaagaatcatataaaatcatcggggcagcgatgacggttcataatgaaatcggcttcggttttttagaagccgtttaccaagaagcacttgaaaaagagttttgttttcaaagtgttccatataaacgggaagtatcattacctatttattataaaggtgaaatattatcaaaaagttatatagcggattttgtatgttatgaaaatataattgtagaattgaaagcggtttcatcattatcttccgaacataaagcgcaagtattaaattatcttaaagcagcaaaatttgaactaggtcttttgattaattttggtgaaagtatattaaaatatgaacgtcttattcgtgttaattcgcgtgattcgttgatcaaagaaggagacacccatgcctga

SEQ ID NO: 38324 - protein, 138 aa, Unknown
  Obtained from environmental sample
  misc_feature (1)..(138): Xaa is any amino acid
MNILYKEESYKIIGAAMTVHNEIGFGFLEAVYQEALEKEFCFQSVPYKREVSLPIYYKGEILSKSYIADFVCYENIIVELKAVSSLSSEHKAQVLNYLKAAKFELGLLINFGESILKYERLIRVNSRDSLIKEGDTHA

SEQ ID NO: 38325 - DNA, 939 bp, Unknown
  Obtained from environmental sample
  misc_feature (1)..(939): n is a, c, g, or t
atgcctgataataacacttccgctattacccaaaaagtgtggagtatgtgcggcgttctctacgatgacggggtcagttatggcgattatcttgaacagcttacctatttgatctttctgaaaatggcagatgaatattcaaaaccaccgtacaaaagaaacctcggtatacctgagaaacttaactgggaaaaactttatccgctttcgggagcggaactggaaaaccattacaaaaagacacttgaagctctggcgaagctgggtgggattttgggcgaaatatttacaggagcgcagaacaagttgagcgaagccgccaagttaaaacgcatcgtcaacatgataggcgaagtgaattgggtgtccatgtccgccgatgtaaagggggatatttacgaggggcttttagagaaaaatgccgaagacaccaagagcggcgcgggtcaatattttacgccgcgtccgcttatcagggcgatggtcgcctgcctgaaacctgaacctgaaaaaaccatcgtagacccggcatgcggaacaggaggtttttttcttgcctcttatgattacttgaccaatcccgataattacaaacttgaccgtaaacagcgggaatttttgaagtataaaacgtttcacggctgggaaattgtcccaaataccttccgcctttgtctgatgaatctgtttctgcacaacatcggcgatttggacgggaaagttcccgttatccgcaatgacgcgctcctttccgcgccaaaagataattttgattatgttttaactaatcctcctttcggcaaaaaaagcagtatgacttttaccaatgatgaaggcgaacaggaaaaagaagatcttgtttacaaccgtcaggatttttgggccactacttcaaacaaacaactcaactttgttcaacatattcacagtatcccttaa

SEQ ID NO: 38326 - protein, 312 aa, Unknown
  Obtained from environmental sample
  DOMAIN (124)...(312): N-6 DNA Methylase
  misc_feature (1)..(312): Xaa is any amino acid
MPDNNTSAITQKVWSMCGVLYDDGVSYGDYLEQLTYLIFLKMADEYSKPPYKRNLGIPEKLNWEKLYPLSGAELENHYKKTLEALAKLGGILGEIFTGAQNKLSEAAKLKRIVNMIGEVNWVSMSADVKGDIYEGLLEKNAEDTKSGAGQYFTPRPLIRAMVACLKPEPEKTIVDPACGTGGFFLASYDYLTNPDNYKLDRKQREFLKYKTFHGWEIVPNTFRLCLMNLFLHNIGDLDGKVPVIRNDALLSAPKDNFDYVLTNPPFGKKSSMTFTNDEGEQEKEDLVYNRQDFWATTSNKQLNFVQHIHSIP

SEQ ID NO: 38327 - DNA, 1005 bp, Unknown
  Obtained from environmental sample
  misc_feature (1)..(1005): n is a, c, g, or t
gtgaaagtccaatgtttagctaatcccatctactctccccccaaaaccgccagccgtaatttcagtatactaaacatggctttcaaacagcgtttattttatggggggaggcgccaaaagttcaccggaaaagagcgggacgctgaaaccggcctgtattactacggcgcgcgctatttagactccaaaacaagccgctggctctcgggcgaccccgcgatgggcgagtatctgccctccgcgccggtgaatgacgaggcgaagaagcgcaacgggaacctgccggggcagggcggcgtgttcaaccacgtgaacctgcacgcgtaccactacgcggggaacaacccggtgaagtacgtggatccggatgggagggaaagtggttatgtacgagagaaaaatgcagtacacggtatggggcatgccgggctattcacaagaggtgccaatggaagttatgtttttatggaaatatttcgtattgcaaataggaaagataaaaatggcaatactataacagccgaagaccgcgctgttgtaacaagaaaagggtatataaacactggtggtggttatattaatctttttaataacgaagaaatagttgcacttcgatttgaatttgatactaaggatttgatgattgaatttcttaggaataatagatttactgattatattgaatttgaaaccacccctcaacaagaagctgccattatagaagcaggttggttattaggcagagattatacagattatatggttccaggtaatcattgtggaatttatgcagaaaaagcgcttggcgcaggcggtgcagggataaaaacttatgcaaacaccagaggtttaagtacaattggagctataggaaaaatattgtttggcaatttgagtacaaaagcattcggtttatgggaagggataaatctgcaatctccaaataaaattggagaccaattaatgattttaaataaagggaaagtagtagaactcaatgaataa

SEQ ID NO: 38328 - protein, 334 aa, Unknown
  Obtained from environmental sample
  misc_feature (1)..(334): Xaa is any amino acid
MKVQCLANPIYSPPKTASRNFSILNMAFKQRLFYGGRRQKFTGKERDAETGLYYYGARYLDSKTSRWLSGDPAMGEYLPSAPVNDEAKKRNGNLPGQGGVFNHVNLHAYHYAGNNPVKYVDPDGRESGYVREKNAVHGMGHAGLFTRGANGSYVFMEIFRIANRKDKNGNTITAEDRAVVTRKGYINTGGGYINLFNNEEIVALRFEFDTKDLMIEFLRNNRFTDYIEFETTPQQEAAIIEAGWLLGRDYTDYMVPGNHCGIYAEKALGAGGAGIKTYANTRGLSTIGAIGKILFGNLSTKAFGLWEGINLQSPNKIGDQLMILNKGKVVELNE

SEQ ID NO: 38329 - DNA, 438 bp, Unknown
  Obtained from environmental sample
  misc_feature (1)..(438): n is a, c, g, or t
atggccgagcatgccattcagggacatcaccccgaaatgtgggttgccgatgattacaaacttgtattgcggtcgttccttgccggcgggcgttttctgcatctcgacctgcttggctgtttgcagacgctcacaggcgacaacaccacaggctaccgtcgcgacgccattcaaacaatggtaaacgccgtgcttgcaacagccgacgaatatataaaacggcagtttgaggcgagaggaatgaacgactgggcatacgaataccataaggagcatttcgggttcgggacgcttcgctactgggacgttccaaatcgcgacggtgcaggagggataaacagcgtaaaggaaactgctaaaaactgtaattgtaatgctgaacttgttgcgtatcaagtcagcaatgacgaaaggcaattcccaatccgtaattcgtaa

SEQ ID NO: 38330 - protein, 145 aa, Unknown
  Obtained from environmental sample
  misc_feature (1)..(145): Xaa is any amino acid
MAEHAIQGHHPEMWVADDYKLVLRSFLAGGRFLHLDLLGCLQTLTGDNTTGYRRDAIQTMVNAVLATADEYIKRQFEARGMNDWAYEYHKEHFGFGTLRYWDVPNRDGAGGINSVKETAKNCNCNAELVAYQVSNDERQFPIRNS

SEQ ID NO: 38331 - DNA, 354 bp, Unknown
  Obtained from environmental sample
  misc_feature (1)..(354): n is a, c, g, or t
atgaatttacaaaaagggcaaaagcttgattccgggtttactgttattgacatagtcgatcttgctgagttaaaggcggttggaatttgggcaaagcatgataaaaccaacgctgaggtttttcacgttctcaatgatgacagcgagaatcttttcgcttttgcttttgccacaacaccgcaggatgataccggcgtgtcacatatccttgaacactcggtgctgtgcggatcggaacgctatccgcttaaagacgcgtttcttgttcttgcgcagggaagcctgcaaactttccttaacgcgtggactttccccgataaaaccgttacccggccagttcctcggccaatctga

SEQ ID NO: 38332 - protein, 117 aa, Unknown
  Obtained from environmental sample
  misc_feature (1)..(117): Xaa is any amino acid
MNLQKGQKLDSGFTVIDIVDLAELKAVGIWAKHDKTNAEVFHVLNDDSENLFAFAFATTPQDDTGVSHILEHSVLCGSERYPLKDAFLVLAQGSLQTFLNAWTFPDKTVTRPVPRPI

SEQ ID NO: 38333 - DNA, 972 bp, Unknown
  Obtained from environmental sample
  misc_feature (1)..(972): n is a, c, g, or t
atggttcaagttgattcatggcatgaatgtgacgatggaacaaaattgtatctgcgccgatgggaaatcgggtctgttgcgcaacccaaggctgtggtgcatatactgcacggaatggcggaacactcacagcgttacagccgtcttgcggaaaaactctgcggggctggaattgaagtatgggccgcggatcagaggggacatggaaaaaccgcagatttaaacgtcaatgcccctggtaaaggcggaatattggggcactgcgccgataatgatacctttgaacaaatcgcctgcgacgcgctcagtataaaccaaacaatactaaagacacacccggggattcctctgttcctgatgggtcattcctggggttcatttatcgcgcagcattatatcgaaaaccatgactgcaaggatctcgcaggatgcatactctccggtacgaggggaccaggcggaataattatcagcgcggggattcccttaatgatctttctggccgctgtccgcggccccagacgcgggtcgtcgatatcgcgcgcgctggccgacgggccttataaccggcctttccgccccaaccgcacgccttttgactggatttcacgtgatgaagccgaagtagacgcctatgtcaatgatcctctatgcgggtttctctgctcatcgggtttctaccgcgatctgacaaagggcctgcgtcagattcaccgtaaaaaagctatgacccggatccgccgggatctgcctgtttatatcttttgcggcagcaatgatcccgtcgggaatatgggagccagcccggctgcgctggtcaacgcatatcgctcactgggattacagaaccttgaatttgtacagtacaccggagccaggcacgaaacgttaaacgaaatcaaccgtgaagaagtaatgagcggtttgtccgcgtggataattaagataataacaatgagcaatgagcaatga

SEQ ID NO: 38334 - protein, 323 aa, Unknown
  Obtained from environmental sample
  DOMAIN (58)...(308): alpha/beta hydrolase fold
  misc_feature (1)..(323): Xaa is any amino acid
MVQVDSWHECDDGTKLYLRRWEIGSVAQPKAVVHILHGMAEHSQRYSRLAEKLCGAGIEVWAADQRGHGKTADLNVNAPGKGGILGHCADNDTFEQIACDALSINQTILKTHPGIPLFLMGHSWGSFIAQHYIENHDCKDLAGCILSGTRGPGGIIISAGIPLMIFLAAVRGPRRGSSISRALADGPYNRPFRPNRTPFDWISRDEAEVDAYVNDPLCGFLCSSGFYRDLTKGLRQIHRKKAMTRIRRDLPVYIFCGSNDPVGNMGASPAALVNAYRSLGLQNLEFVQYTGARHETLNEINREEVMSGLSAWIIKIITMSNEQ

SEQ ID NO: 38335 - DNA, 1185 bp, Unknown
  Obtained from environmental sample
  misc_feature (1)..(1185): n is a, c, g, or t
ttgccacattttttttataaatttttatttgtggtagcgcattttaaatataaaatgcctatttttgcgcccataaatgaagtactcgacatgaatggtaaaatattaattatagacgacaacgaagacgtactctttgccctcaacctcttgcttcaatcgcatttcgaaagcgtccgcgtaagcacagaccctgccaaaatagtccgatttatggagcaatatcagcccgacataatactgctcgatatgaatttcaggcgcgacacaagcaacggacaggaaggcttctactggttgcaaaaaatcctgagcatagacccgcaggctgtcgtggttttcatgaccgcatacgcagataccgaaaaagcagtgcaggcagtgaaagccggcgctaccgactttatccccaaaccgtgggaaaacgataaattgctcgccacactatcgtcggcgctacagttgcgaatgtcgcgccgcgaagttgaaaacctgcgcaaacaggtatctatccttcaccgcgaacccgtacaggaaatgattggcgactcggaagctatcaaagaaatattttacatgatacaccgattgtccgaaacagacgcaaacgttcttatactgggcgaaaacggaacaggtaaagatttggtggcttctgctattcatcgcaaatccccacgtcgcgacgcgctgtttgtttcaatagacttgggaagcatccccgaaaccatctttgaaagcgaactgtttggacacgaaaaaggcgctttcacggatgcggtttccacgcgcaaggggcgttttgaattggcgcacggcggaacgctctttcttgacgagataggcgatatgagtctttcggcgcaggcaaaagttttgcgtgtaattcaagaacagaaaattgagcgtgtcggcggagaaaaaacaatagagaccgatgtgcgcatcatagcggctacaaatcaggatttagaaaacgcctgcaaagacggccggttcaggcaggatttatttttcagattaaatgtaattccgattcattccccttctttgagggaaaggaaggaagatatcccccatctgctttgtcattttttaaaaatattgggaaaggaaacaacgctggaatccggcgctatggaacttctttccgagcataattggcccggaaacgtcagggaataa

SEQ ID NO: 38336 - protein, 394 aa, Unknown
  Obtained from environmental sample
  DOMAIN (203)...(349): ATPase family associated with various cellular activities (AAA)
  misc_feature (1)..(394): Xaa is any amino acid
MPHFFYKFLFVVAHFKYKMPIFAPINEVLDMNGKILIIDDNEDVLFALNLLLQSHFESVRVSTDPAKIVRFMEQYQPDIILLDMNFRRDTSNGQEGFYWLQKILSIDPQAVVVFMTAYADTEKAVQAVKAGATDFIPKPWENDKLLATLSSALQLRMSRREVENLRKQVSILHREPVQEMIGDSEAIKEIFYMIHRLSETDANVLILGENGTGKDLVASAIHRKSPRRDALFVSIDLGSIPETIFESELFGHEKGAFTDAVSTRKGRFELAHGGTLFLDEIGDMSLSAQAKVLRVIQEQKIERVGGEKTIETDVRIIAATNQDLENACKDGRFRQDLFFRLNVIPIHSPSLRERKEDIPHLLCHFLKILGKETTLESGAMELLSEHNWPGNVRE

SEQ ID NO: 38337 - DNA, 1029 bp, Unknown
  Obtained from environmental sample
  misc_feature (1)..(1029): n is a, c, g, or t
atgcccggcggctctcaggcggcatggcctgaagttaaaaatatttttcaggcaatcagcgcaaaggtcgagggaaacacgccctgctgcgattgggtgggcgaaaacggcgcaggccactttgtaaaaatggtgcataacggcattgaatacggcgatatgcagcttatctgcgaaacctacgatttaatgaaaaacgtcctatgtttaagttacgaagaaatgggcaatgtgtttgacgaatggaacaaaggccggcttggaagttatctgatagaaattacccgcgacattctgcgttttaaagacgaagacggcaagcctttggcggaaaaaatactggacaccgccgggcagaaaggaaccggcaagtggacaggtattgccgcccttgagttcggcgtacctcttactttaatcggcgaggccgtttttggccgctgtctttccgccgcaaaggacgaacgcgtaaaagcggcaaaagttttttccgctccgaagatcacttccccggcggacaagaccgcgtttatcaaagatttggaaaaggccctttacgcgtcaaagattgtctcttacgcgcaagggtatctcttgatgagggaagcggcaaaagagtacaaatggaatcttaactacggcggtatcgcccttatgtggaggggcggctgcattatccgttccgtctttcttgggaaaataaaagaagcgtttgacagaaagcaggatttggaaaatctcctgcttgatcctttctttacaaaaataatcgaagacgcaggaacgccgtggcggcgtgttgtttccaccgccgtccttaacggcattcccgcccctgccctgacaagcgctctctcttactttgacggttaccgcagcgaacggctgcccgcgaatcttttgcaggcgcaaagggattatttcggcgcgcatacatacgagcgtttggacaaaccgcgaggtgaatttttccatacaaactggacgggacacggaggcacgacaagcgcttctacctatactgtttaa

SEQ ID NO: 38338 - protein, 342 aa, Unknown
  Obtained from environmental sample
  DOMAIN (39)...(329): 6-phosphogluconate dehydrogenase, C-terminal domain
  misc_feature (1)..(342): Xaa is any amino acid
MPGGSQAAWPEVKNIFQAISAKVEGNTPCCDWVGENGAGHFVKMVHNGIEYGDMQLICETYDLMKNVLCLSYEEMGNVFDEWNKGRLGSYLIEITRDILRFKDEDGKPLAEKILDTAGQKGTGKWTGIAALEFGVPLTLIGEAVFGRCLSAAKDERVKAAKVFSAPKITSPADKTAFIKDLEKALYASKIVSYAQGYLLMREAAKEYKWNLNYGGIALMWRGGCIIRSVFLGKIKEAFDRKQDLENLLLDPFFTKIIEDAGTPWRRVVSTAVLNGIPAPALTSALSYFDGYRSERLPANLLQAQRDYFGAHTYERLDKPRGEFFHTNWTGHGGTTSASTYTV

SEQ ID NO: 38339 - DNA, 1215 bp, Unknown
  Obtained from environmental sample
  misc_feature (1)..(1215): n is a, c, g, or t
gtgctcctgcggcggatcgggatacggatcgtcctcgtccccggctcgcgtatgcgcatcgacgaggtgctctccgcctacaagatcgagtgcccctacgtcgacggggttcgcgtctcctacccggaggccgtccccttcatcaacatggccgctttcgacgtctccaaccgcatcatgaccatgctcgccgagaacgaggcgggggcgatcatcggcaactgggtgcgggcaaagggcatcggcgtgcgcaacggggtggactaccgccactccggcgtcgtggagagcctgcaaaccgacttgctgcgcaagatactggacgaggggatcatccccatcttcccgtgcgtcggctggagcgccaagggaaagccctacaacctctcgtcaaacgacctcgccttcacgataagcgtgaagctcgaggccgccaagctattcttcgtaaccgagtacggcggcataaagtccgagggtttcaagatacccgacgaggcctacatctccgagttcggcaccatatcgcagatgacgatggcgcaggcggggcagttcctcgacatgaacgccgaagagggcttcgacgccgagcgcgacctcgtctcctacgcctaccgcgcctgcaaacagggcgtccgccgcgtgcacatcatagacggaaccgccgagggcatgctcctcaaagagatattctccaaccgcggccacgggactatggtctacgccaacctgcacgaaaacatccgccaaatgaccgcgaccgacatccccggcgtcctctcgctgatgcagccgcaggtagacgaaggcgccctggtggcgcggaccgccggagacctggccgacaaaatggccgactacgccgtctacgtggttgacggaaccccccacgcctgcggggccctccacaccttccccgacaaacagggcgagatcgccgccatagtggtagacgaaaaatacgccagccgcggcataggcaaaaaaatgatctcatacttgatagagcaggccacgaaggcgaagctgaaatcggtatttgtattgacgacgctcaccgcggattggttcaagcagttaggttttgtggaagcggatataaatgatttgccggaggagaagaggggcaaatacaacacaggaagaaatagtttggtgctaaagtacaatatatcatcacgtcgtgaggggatggagtttggggtggagtag

SEQ ID NO: 38340 - protein, 404 aa, Unknown
  Obtained from environmental sample
  DOMAIN (289)...(364): Acetyltransferase (GNAT) family
  misc_feature (1)..(404): Xaa is any amino acid
MLLRRIGIRIVLVPGSRMRIDEVLSAYKIECPYVDGVRVSYPEAVPFINMAAFDVSNRIMTMLAENEAGAIIGNWVRAKGIGVRNGVDYRHSGVVESLQTDLLRKILDEGIIPIFPCVGWSAKGKPYNLSSNDLAFTISVKLEAAKLFFVTEYGGIKSEGFKIPDEAYISEFGTISQMTMAQAGQFLDMNAEEGFDAERDLVSYAYRACKQGVRRVHIIDGTAEGMLLKEIFSNRGHGTMVYANLHENIRQMTATDIPGVLSLMQPQVDEGALVARTAGDLADKMADYAVYVVDGTPHACGALHTFPDKQGEIAAIVVDEKYASRGIGKKMISYLIEQATKAKLKSVFVLTTLTADWFKQLGFVEADINDLPEEKRGKYNTGRNSLVLKYNISSRREGMEFGVE

SEQ ID NO: 38341 - DNA, 897 bp, Unknown
  Obtained from environmental sample
  misc_feature (1)..(897): n is a, c, g, or t
gtgaatccgcgacatcgtgctcctgcggcggatcgggatacggatcgtcctcgtccccggctcgcgtatgcgcatcgacgaggtgctctccgcctacaagatcgagtgcccctacgtcgacggggttcgcgtctcctacccggaggccgtccccttcatcaacatggccgctttcgacgtctccaaccgcatcatgaccatgctcgccgagaacgaggcgggggcgatcatcggcaactgggtgcgggcaaagggcatcggcgtgcgcaacggggtggactaccgccactccggcgtcgtggagagcctgcaaaccgacttgctgcgcaagatactggacgaggggatcatccccatcttcccgtgcgtcggctggagcgccaagggaaagccctacaacctctcgtcaaacgacctcgccttcacgataagcgtgaagctcgaggccgccaagctattcttcgtaaccgagtacggcggcataaagtccgagggtttcaagatacccgacgaggcctacatctccgagttcggcaccatatcgcagatgacgatggcgcaggcggggcagttcctcgacatgaacgccgaagagggcttcgacgccgagcgcgacctcgtctcctacgcctaccgcgcctgcaaacagggcgtccgccgcgtgcacatcatagacggaaccgccgagggcatgctcctcaaagagatattctccaaccgcggccacgggactatggtctacgccaacctgcacgaaaacatccgccaaatgaccgcgaccgacatccccggcgtcctctcgctgatgcagccgcaggtagacgaaggcgccctggtggcgcggaccgccggagacctggccgacaaaatggccgactacgccgtctacgtggttga

SEQ ID NO: 38342 - protein, 298 aa, Unknown
  Obtained from environmental sample
  misc_feature (1)..(298): Xaa is any amino acid
MNPRHRAPAADRDTDRPRPRLAYAHRRGALRLQDRVPLRRRGSRLLPGGRPLHQHGRFRRLQPHHDHARRERGGGDHRQLGAGKGHRRAQRGGLPPLRRRGEPANRLAAQDTGRGDHPHLPVRRLERQGKALQPLVKRPRLHDKREARGRQAILRNRVRRHKVRGFQDTRRGLHLRVRHHIADDDGAGGAVPRHERRRGLRRRARPRLLRLPRLQTGRPPRAHHRRNRRGHAPQRDILQPRPRDYGLRQPARKHPPNDRDRHPRRPLADAAAGRRRRPGGADRRRPGRQNGRLRRLRG

SEQ ID NO: 38343 - DNA, 1254 bp, Unknown
  Obtained from environmental sample
  misc_feature (1)..(1254): n is a, c, g, or t
gtgctgcgctgcctgcccagcgatggggggctttatgtcccttcaaacgtgatcgatctgcgtcagttttttctatacatggatgagggaaccagctatccggaactggtggctactgtggcgcctatactgcttcaaggggaactaaacccgttttccgcagccagagtagcggagagctcttttgattttgagcctgagctaacccaactggatgaaaatctatcaattcttaacctgtataacggcccgaccggaactttcaaggatttcggcgcttcttttcatgcggcggttctggaggagctgttaaaaaattactcaggcgccatcatactttcggcagtcaggggagacagcggcgcctgtttgggcagggcgttttacgggcgcagggggcttactacggtaatgctcttcccgtccgggcagcccataaggggaattgaccctgccttttttatacataacggcggaaacataatcccgatacagatacgcgggagccttgacgattgccagcgccttgtgagagaaacaatcaacgacaggccttttgcggaaaggcattgcataaccagtgccaatgccattaacccgggcaggcttttgccccaggcttttttctacctttatgcgtttgttaagataaaaaaacggcttccaggaggccttttcttcagcgttccatcgggtaatttcggcaaccttatttccgggctttatgcctggaaattcggccttccggtcaacggctttatcgccgccatgaacgccaacaacccatttggcgattttatccggggaagggaatttaagccccgcccggtggttgcgaccaattcgccggccctgatgtcagcgttccctccaatttgcccgcttcagttcctttacgaggaagctcctgcggtaatgcgccaccttgtcttcccggcctccattggtgacacagccacgcttaaggcaatggaacttgcctggatacaatacggcatgctgttggatcctcacggcgctgtggctctggccgcagcgagggattttttcaatcaggataaaaattccaataatcacataattgttcttgcgacaggtcatcctgccagagaagcggctatagttgaagaggcaacgcagcaaaaggtctctctgccggaaaaacttgctctgctgaagaaagaagcggagccaatcgcggtaatcgatccgcatcttggtactttagaggggctattggcgagctgcctttag

SEQ ID NO: 38344 - protein, 417 aa, Unknown
  Obtained from environmental sample
  DOMAIN (61)...(367): Pyridoxal-phosphate dependent enzyme
  misc_feature (1)..(417): Xaa is any amino acid
MLRCLPSDGGLYVPSNVIDLRQFFLYMDEGTSYPELVATVAPILLQGELNPFSAARVAESSFDFEPELTQLDENLSILNLYNGPTGTFKDFGASFHAAVLEELLKNYSGAIILSAVRGDSGACLGRAFYGRRGLTTVMLFPSGQPIRGIDPAFFIHNGGNIIPIQIRGSLDDCQRLVRETINDRPFAERHCITSANAINPGRLLPQAFFYLYAFVKIKKRLPGGLFFSVPSGNFGNLISGLYAWKFGLPVNGFIAAMNANNPFGDFIRGREFKPRPVVATNSPALMSAFPPICPLQFLYEEAPAVMRHLVFPASIGDTATLKAMELAWIQYGMLLDPHGAVALAAARDFFNQDKNSNNHIIVLATGHPAREAAIVEEATQQKVSLPEKLALLKKEAEPIAVIDPHLGTLEGLLASCL

SEQ ID NO: 38345 - DNA, 411 bp, Unknown
  Obtained from environmental sample
  misc_feature (1)..(411): n is a, c, g, or t
atggttgaatctattgccgaaaccatgattgaaacagaagaagtgccggaacagatcattgtcgcccccggctctattaccgcttccgccccttcctgggacgattaccttcccatgcacaaggtcacggatccgccaaagttcaatgaaaaggaattattggccgaccttgtttaccctcccatcgccctgcgttccggtattacaggtagtgttattgttgaactcttcattgaccgtaacgggcaaattcaacgagtactgattatgcaggagaaacctgaaaaccgtggatttggcgaggccgcggtaaaagccttcaccggaaagcgcgtagtcccggcctacgcgaacggagagccggtctccatacgtttccgttatccggtcagattcacgataaaacaatga

SEQ ID NO: 38346 - protein, 136 aa, Unknown
  Obtained from environmental sample
  DOMAIN (56)...(90): Gram-negative bacterial tonB protein
  misc_feature (1)..(136): Xaa is any amino acid
MVESIAETMIETEEVPEQIIVAPGSITASAPSWDDYLPMHKVTDPPKFNEKELLADLVYPPIALRSGITGSVIVELFIDRNGQIQRVLIMQEKPENRGFGEAAVKAFTGKRVVPAYANGEPVSIRFRYPVRFTIKQ

SEQ ID NO: 38347 - DNA, 468 bp, Unknown
  Obtained from environmental sample
  misc_feature (1)..(468): n is a, c, g, or t
gtgcgctccgataagcttcttattcatgctgaccgtattgaaatacacggaagcgataacaggttcatcgactgcagcggtaatgttcagggatttgaggaagaaaaaaatatattatttataaccgaccgtatgcgttatgaccggactttaaaaattgcccgcctggaagggaattccacaatggaagacaggaaaaatgaaatagtcgcccgtggccgctccattgaatatgacgatgaaaatgaaattgccattctgatggtttctgtaaggctgtttaaggataatctggtatgccgctctgattatgccgtataccgccgcgtggagaaaacacttgccctttcaggctttcctctggtttataaaaaggatgatgaatatcgggcagacagaataagggtggatcttgataccgacgatgtagtcatggaaggagatgtaaaaggttcattaaagaactaa

SEQ ID NO: 38348 - protein, 155 aa, Unknown
  Obtained from environmental sample
  misc_feature (1)..(155): Xaa is any amino acid
MRSDKLLIHADRIEIHGSDNRFIDCSGNVQGFEEEKNILFITDRMRYDRTLKIARLEGNSTMEDRKNEIVARGRSIEYDDENEIAILMVSVRLFKDNLVCRSDYAVYRRVEKTLALSGFPLVYKKDDEYRADRIRVDLDTDDVVMEGDVKGSLKN

SEQ ID NO: 38349 - DNA, 867 bp, Unknown
  Obtained from environmental sample
  misc_feature (1)..(867): n is a, c, g, or t
atgaaaataagaagagtccggttcagaaaaccgccgcagaaaagaataccgttaaaaaggcagcctataaaagttttttcaagagaagatttaaaaaaaggcatttatattattccttccctgtttacatgcggaaatatggcttttgggctcctctcggttattgcgtctatcaggggtcattttattcccgcggcgtggtttttggtaggcgcgcttggctgcgacattttagacggcagaatcgcgaggatgaccaaaacaaccagtacgttcggcatggaactggattccttaagcgatcttgtttcgttcggggtagcgcccgcgataatgatgtatatgctggtgttaaacaccatgggaaaaataggaatcgccattgccgtgctttatgttttatgctgcgccctgcgtcttgcgcgttttaatgttcttgcccactcaggcgaggttcacaagcactttgtggggcttcccactcccgcatccgccggcgtaattatttcgtttgtattaagttatcagcttttggttccggaaggatactcccttaattttaagacaattcacaagttaatggaatttatgccgacatttttcagaataatgcctattgttatagttgtgctttctttcctgatggtttcaaatattccgtatctgtcttttaaaaaagtaaaattgtccaaaatacacacaatagaacttttggccgtgttaatcgtgcttataatattaattgttattttcccgcagaataccatatttattatttttacaatttacgcgctgtcgggacttttattttatgtgccaagccttattttaaaagaaaaaaagcgccggacaagcaggcggaaatag

SEQ ID NO: 38350 - protein, 288 aa, Unknown
  Obtained from environmental sample
  DOMAIN (66)...(227): CDP-alcohol phosphatidyltransferase
  misc_feature (1)..(288): Xaa is any amino acid
MKIRRVRFRKPPQKRIPLKRQPIKVFSREDLKKGIYIIPSLFTCGNMAFGLLSVIASIRGHFIPAAWFLVGALGCDILDGRIARMTKTTSTFGMELDSLSDLVSFGVAPAIMMYMLVLNTMGKIGIAIAVLYVLCCALRLARFNVLAHSGEVHKHFVGLPTPASAGVIISFVLSYQLLVPEGYSLNFKTIHKLMEFMPTFFRIMPIVIVVLSFLMVSNIPYLSFKKVKLSKIHTIELLAVLIVLIILIVIFPQNTIFIIFTIYALSGLLFYVPSLILKEKKRRTSRRK

SEQ ID NO: 38351 - DNA, 1098 bp, Unknown
  Obtained from environmental sample
  misc_feature (1)..(1098): n is a, c, g, or t
atggcgagctccttggagatgagaccccgcaagccgcgctttaaattaaaaggtcccgatgttatatcgacaattttaatgcttggtttgcaaggttccggaaaaaccacaagcgcggcgaaacttgccctgcgtcttaaaaaagagggacgcaaacctctgcttgttgcgtgcgacttaattcgtcccgccgcgatggaacagcttgccgtacttggcggacaaataggaattcccgttcacaaagaagacggcgcaaaggacagcgtaaaagtttatcaaaacgccttgtcgtgggcaaaacaaaatatgatcgatactctcatcatcgacacaacgggacgaatgcaaattgacgaaccgatgatgcaggagctttccaatcttaaaaacgccgcggctcccgatgaaatgcttttagtagccgactcgatgacgggacaagccgccgcggacattgcaaaaacatttgacgaaaaaatcgggcttaccggagtaatcttaagcaagttcgactccgacacacgcggcggcgcggcgctatcgcttaaaacagtaacgggaaaaccattaaagtttacaggtacgggagaaaagccggaagattttgaacctttccaccccgaaagaatcgccggacgcatactcggcatgggcgatgttgtaagtcttgtagaaaaagctcaggaagttatagatcataaagaagcattagaactccagaaaaaaatggagaaagaaaattttactcttgacgactggctgaaccaaattcgttcccttaaaaaaatgggttctctgcaaaaaatgttagagatgattcccggtatgcagggacagataagcgaagatgatattgataaagaagaactaaaatatcaggaagcgatactaagctccatgacccttaaggagcgcaataatcacttaatcatcggaccgccgcgcagaagcagaatcgcccgcggttcgggaacgtccgtcgccgaagtagcgagactgttaaaaaagtttgaaaaaatgcgcggcatgatgaaaaaaatggcaaaaagcgcgaaaggcggcggtatgccaaacatgccgggaatgttccgataa

SEQ ID NO: 38352 - protein, 365 aa, Unknown
  Obtained from environmental sample
  DOMAIN (248)...(345): Signal peptide binding domain
  misc_feature (1)..(365): Xaa is any amino acid
MASSLEMRPRKPRFKLKGPDVISTILMLGLQGSGKTTSAAKLALRLKKEGRKPLLVACDLIRPAAMEQLAVLGGQIGIPVHKEDGAKDSVKVYQNALSWAKQNMIDTLIIDTTGRMQIDEPMMQELSNLKNAAAPDEMLLVADSMTGQAAADIAKTFDEKIGLTGVILSKFDSDTRGGAALSLKTVTGKPLKFTGTGEKPEDFEPFHPERIAGRILGMGDVVSLVEKAQEVIDHKEALELQKKMEKENFTLDDWLNQIRSLKKMGSLQKMLEMIPGMQGQISEDDIDKEELKYQEAILSSMTLKERNNHLIIGPPRRSRIARGSGTSVAEVARLLKKFEKMRGMMKKMAKSAKGGGMPNMPGMFR

SEQ ID NO: 38353 - DNA, 375 bp, Unknown
  Obtained from environmental sample
  misc_feature (1)..(375): n is a, c, g, or t
atgccgagtatgcgtccggcgattctttcggggtggaaaggttcaaaatcttccggcttttctcccgtacctgtaaactttaatggttttcccgttactgttttaagcgatagcgccgcgccgccgcgtgtgtcggagtcgaacttgcttaagattactccggtaagcccgattttttcgtcaaatgtttttgcaatgtccgcggcggcttgtcccgtcatcgagtcggctactaaaagcatttcatcgggagccgcggcgtttttaagattggaaagctcctgcatcatcggttcgtcaatttgcattcgtcccgttgtgtcgatgatgagagtatcgatcatattttgttttgcccacgacaaggcgttttga

SEQ ID NO: 38354 - protein, 124 aa, Unknown
  Obtained from environmental sample
  misc_feature (1)..(124): Xaa is any amino acid
MPSMRPAILSGWKGSKSSGFSPVPVNFNGFPVTVLSDSAAPPRVSESNLLKITPVSPIFSSNVFAMSAAACPVIESATKSISSGAAAFLRLESSCIIGSSICIRPVVSMMRVSIIFCFAHDKAF

SEQ ID NO: 38355 - DNA, 615 bp, Unknown
  Obtained from environmental sample
  misc_feature (1)..(615): n is a, c, g, or t
gtgtaccgttatcacggtccatgcctcggtctgggttacactttcgattttgaaaatttttatcagatggaaaacgcggtaatgcccttcaacagaaacggcgcccttttcccccgcaagattggaataatttacgcaatgtacagccgccccagcgattcagggcataccccctttggcgatattatttattctgaaagccccgatctggtttactggggcaaacaccgtcatgttatggctcctacaagcggctggcaaagcacaaaagtgggagcgggcccctgccccattgaaacatcggaaggctggcttgttttttatcacggggtactgacaagctgcaacggctttgtgtattcattcagcgcagcattgatggatattgaaaaaccgtggaaagttatagcgcggccaaaaccgtacatcattaaccctcgggaactctatgaattagcgggcgacgtgcccaacgttacattccccgtagccgcgcttattgacaaagacacaggcagagtggcgatttactacggctgcgcggatacggtaacaggacttgtctttggcaagatagacgagattgtcgattggataaaagcgaataaaatttaa

SEQ ID NO: 38356 - protein, 204 aa, Unknown
  Obtained from environmental sample
  DOMAIN (1)...(201): Domain of unknown function (DUF377)
  misc_feature (1)..(204): Xaa is any amino acid
MYRYHGPCLGLGYTFDFENFYQMENAVMPFNRNGALFPRKIGIIYAMYSRPSDSGHTPFGDIIYSESPDLVYWGKHRHVMAPTSGWQSTKVGAGPCPIETSEGWLVFYHGVLTSCNGFVYSFSAALMDIEKPWKVIARPKPYIINPRELYELAGDVPNVTFPVAALIDKDTGRVAIYYGCADTVTGLVFGKIDEIVDWIKANKI

SEQ ID NO: 38357 - DNA, 1344 bp, Unknown
  Obtained from environmental sample
  misc_feature (1)..(1344): n is a, c, g, or t
ttggggggcgggtttttaggcccgggacgggggggaaaaaagatttcggaaggggtgttgggacttaaagcgaaaaaactgacgggcgatttcggatatttggccaatagcacgggggctttccggcggatgacacaagaaattgaatttttaagacaagccttatggagcttcgcgtgggaanccggccttatggggcgtgttttcaacgggcttggagagcctattgacggatacggaagcatcttttcgtcaaaaacttgtgatattaacggccttccgataaacccttacgcccgaacctacccgcgcgattttattcaaacaggaatttcctcgatagacggaatgaacaccctcatccgcggacagaaacttcctatattttcaggtaacggccttcctcataaccgccttgccgcgcagattgtgcgtcaggcgaaaattctttcttttgacggcagcgaagaggcgaaagcctccgaacagtttgtaattgttttttgcgcaatggggataaaaaacgacgtcgccagattctttcttgatgattttgagcaatcgggtgttctttcaagggttgtcgtgttcctttcgcttgcggactctccctcgcttgaaaggcttatagcccctcgctgcgcccttaccgccgccgaatatctggcttacgaaaaaaatatgcacgttcttgtcgtcatgacagacatgacaaattactgcgaggcgttacgcgaagtttcttcaatacgcggggaagttcccagccgcaaaggctaccccggctatctttactccgaccttgcctcgctttacgaaagagcgggaaaaataaaaggggcgacaggctcaattacgcagataccgattctttccatgcccaacgacgatatcagccatcctataccggacttgtcgggttacataacggaaggtcagattgttcttgaccgcgaacttttccagcgcggcatttacccgcccgtagcggggcttccaagcctttcccgtttgatgaaggacggaataggaccgggcatgacaagagaggatcacaaagacgtatcaagtcagctttttgccgcttacgccagagttaaacaggtacgaaacctcgcctcaattatcggggaggaagaactttccgcggacgataaaaggtatttaaaattcggagaaaagtttgagcagatattcctgatacagggtgaatatgaaaaccgtgacataggcaaaactctggatctcggctggaaagtgcttgcggatctaccgagagaggaattattgcgcgtaaaagaagaatttatagaaaagtatttagagcctgctgcaaggatgtaa

SEQ ID NO: 38358 - protein, 447 aa, Unknown
  Obtained from environmental sample
  DOMAIN (353)...(442): ATP synthase alpha/beta chain, C terminal domain
  misc_feature (1)..(447): Xaa is any amino acid
MGGGFLGPGRGGKKISEGVLGLKAKKLTGDFGYLANSTGAFRRMTQEIEFLRQALWSFAWEXGLMGRVFNGLGEPIDGYGSIFSSKTCDINGLPINPYARTYPRDFIQTGISSIDGMNTLIRGQKLPIFSGNGLPHNRLAAQIVRQAKILSFDGSEEAKASEQFVIVFCAMGIKNDVARFFLDDFEQSGVLSRVVVFLSLADSPSLERLIAPRCALTAAEYLAYEKNMHVLVVMTDMTNYCEALREVSSIRGEVPSRKGYPGYLYSDLASLYERAGKIKGATGSITQIPILSMPNDDISHPIPDLSGYITEGQIVLDRELFQRGIYPPVAGLPSLSRLMKDGIGPGMTREDHKDVSSQLFAAYARVKQVRNLASIIGEEELSADDKRYLKFGEKFEQIFLIQGEYENRDIGKTLDLGWKVLADLPREELLRVKEEFIEKYLEPAARM

SEQ ID NO: 38359 - DNA, 819 bp, Unknown
  Obtained from environmental sample
  misc_feature (1)..(819): n is a, c, g, or t
atgacagatcggcgacgccgaactgggtcggggcttgcgggcgcccagaatattgtccgcctgaccgcggctttgcgcccttctttcataagcgtcacttatggcgcgggcggggggacgagcgagcatacggtaagcctcgcggatgaagcccagaagcagggaataccggcgctggcgcacttgacctgcgtttcttcggatcgaaaaacaataaaagaagttttatcaaaacttaaagaaggcaatatcgaaaacatcctcgcccttcgcggagatattcccgacggacaggctttccccacagacgcccagtatcaccatgcctgcgatttaatgaaagagattcaaaactcaggcggtttttgtattggcggcgcgtgttatccagaagggcatcctgaatcggaaaaccttgacaaggacatagaaagcctgaaaattaaaacggactgcggatgcagttttttaactacgcagatgttctttgataacaatattctgtataactttttgtaccgtcttttacaccataaaattgacgtgcctgtaatcgcagggataatgcctgtaataaacggacagcagatcgcccgcatttgtaaaatttccggtacggtcctgcctccccgtttccgcgcgattgtggataaattttcacataacagcgccgccatgaatcaggccggcattgcttacgctaccgaacagattatagaccttgttgcgaacgacgtccgtaatattcatatctataccatgaacaaaccggatatagccggaaaaatcatggaaaatttgtcggaaatatttagataa

SEQ ID NO: 38360 - protein, 272 aa, Unknown
  Obtained from environmental sample
  DOMAIN (1)...(268): Methylenetetrahydrofolate reductase
  misc_feature (1)..(272): Xaa is any amino acid
MTDRRRRTGSGLAGAQNIVRLTAALRPSFISVTYGAGGGTSEHTVSLADEAQKQGIPALAHLTCVSSDRKTIKEVLSKLKEGNIENILALRGDIPDGQAFPTDAQYHHACDLMKEIQNSGGFCIGGACYPEGHPESENLDKDIESLKIKTDCGCSFLTTQMFFDNNILYNFLYRLLHHKIDVPVIAGIMPVINGQQIARICKISGTVLPPRFRAIVDKFSHNSAAMNQAGIAYATEQIIDLVANDVRNIHIYTMNKPDIAGKIMENLSEIFR

SEQ ID NO: 38361 - DNA, 684 bp, Unknown
  Obtained from environmental sample
  misc_feature (1)..(684): n is a, c, g, or t
atgttaacctccgcaggttttataaaagcggcggctacagtccaaccgcccgataccgtcatcgtcagtcttgatatttcttgtgaggaaatattagcgtccatgaaatcaaaatggcgctacaatgtttctttagcggaaaaaaagggagtaaaagttaacgtatgcggggtaggggatatcgaagtattttataatcttttaaaagaaacggcggcaagggacggtatcgccgttcatggaattaattattacaggacgctttttgaagtatgcgaaaagcaaaataaaagaaatcaatttatccgtttgtatacggcggaacatgagggcgatactattgcggccatcgtcgtgctttttcgtggaaaagatgcgacatatctttacggagcgtcttcaaacaataaacgaaatttaatggccccatacgcgcttcaatggaaagccatgcaggacgcaaaagaagcgggatgtttaaattacgatcttttcggcatacctccgaatgaagatcccaatcatcctatggcgggtctttacaggtttaaaactggatttggcggacagatcatacatcgtccgggaagctgggattatcggtataaaaaggtaatgtacaatctttttaacaaggcggaagccctgcgaaaaaaattgcgcgatttaaaaaagaaacgataa

SEQ ID NO: 38362 - protein, 227 aa, Unknown
  Obtained from environmental sample
  DOMAIN (1)...(215): FemAB family
  misc_feature (1)..(227): Xaa is any amino acid
MLTSAGFIKAAATVQPPDTVIVSLDISCEEILASMKSKWRYNVSLAEKKGVKVNVCGVGDIEVFYNLLKETAARDGIAVHGINYYRTLFEVCEKQNKRNQFIRLYTAEHEGDTIAAIVVLFRGKDATYLYGASSNNKRNLMAPYALQWKAMQDAKEAGCLNYDLFGIPPNEDPNHPMAGLYRFKTGFGGQIIHRPGSWDYRYKKVMYNLFNKAEALRKKLRDLKKKR

SEQ ID NO: 38363 - DNA, 762 bp, Unknown
  Obtained from environmental sample
  misc_feature (1)..(762): n is a, c, g, or t
gtgcggcgacaggagacggcgatacgcgtccttacctccatcgccgacttggaactcgaaaacgccgcgctctaccgtctgctgggctataggctgaaggaattcggcgagtacgcgctcgaaaagttcgtctgtcaaaaagtagtccaatggcgccccatggaaccgcaaagccgccgcgactacgccaacgccctcgccgacaatggagaggcgcaggcggcgctcgacatgctctacgagtcattaacaagagagtattcggaaaatatcagaaaccgcaacaaaggagtggaagaggtcacggtcaccgagataaaccgcttaatagccaaatacccgaatcttaataagtcgaagattcataaacgcctgctgataaacattccggtcgatatccgcgtggttataaactggaatatgaacagcaccgacatcgacctgcacgtagtagacccgacaggcgttacgtgctactacaagaaccgcgaaacaaagatcggcggccgcataagcgcagacattacaaacggatacggcccggaacaattcatcttgaaaaaagctaaaaagggaaaataccaagtctacgtaaattactacggcgaccgccaattcacatcatccggtccgtcaaccgtaatggcggaaattttcacaaaatacgccgacaagacagaacaacgcanagtcgtatgtttacagatgtcaaacgccaaaggaagtaacgggatggtaatgatcgcggaatttgagttttga

SEQ ID NO: 38364 - protein, 253 aa, Unknown
  Obtained from environmental sample
  misc_feature (1)..(253): Xaa is any amino acid
MRRQETAIRVLTSIADLELENAALYRLLGYRLKEFGEYALEKFVCQKVVQWRPMEPQSRRDYANALADNGEAQAALDMLYESLTREYSENIRNRNKGVEEVTVTEINRLIAKYPNLNKSKIHKRLLINIPVDIRVVINWNMNSTDIDLHVVDPTGVTCYYKNRETKIGGRISADITNGYGPEQFILKKAKKGKYQVYVNYYGDRQFTSSGPSTVMAEIFTKYADKTEQRXVVCLQMSNAKGSNGMVMIAEFEF

SEQ ID NO: 38365 - DNA, 384 bp, Unknown
  Obtained from environmental sample
  misc_feature (1)..(384): n is a, c, g, or t
atggtcaaaaaaggcgcaggcagcgtagaatatcctcgcggcaacgagccgcagtcaaggccgctcgttatcgcgaacggccgtgtgatcgaccctgtttccggcatcgacggatcgcgaaccattgcggttgacaaaggtattatcaaatccgttatcgataagccttttgtcaagtctatgtgcggcgaattgtttccgggctacggcgagaacggcgtagaggtgattgacgccgccggattgtgggtcgttccgggacttgtggatatgcacgtccacctccgcgagcccggtcgggaggacaaagagactatagctacgggcgcccaagccgccgccgccggggggttaccgccgtggcctgctcgtgccgaattctga

SEQ ID NO: 38366 - protein, 127 aa, Unknown
  Obtained from environmental sample
  misc_feature (1)..(127): Xaa is any amino acid
MVKKGAGSVEYPRGNEPQSRPLVIANGRVIDPVSGIDGSRTIAVDKGIIKSVIDKPFVKSMCGELFPGYGENGVEVIDAAGLWVVPGLVDMHVHLREPGREDKETIATGAQAAAAGGLPPWPARAEF

SEQ ID NO: 38367 - DNA, 570 bp, Unknown
  Obtained from environmental sample
  misc_feature (1)..(570): n is a, c, g, or t
atggcagtaacaacgagtgacaggccaatcccgaccggggaaggcattactttcgagaaagtctgggcaatgtttcaggaaaccgcccagcagatgaaggaaaccgaccggaaaatggccagactcgaaaagcagatgggcggcttgcacaacagcttcggggaaatggcggaacaccttgtcgccccgagcatcgggaagcggtttaacgaattgggctatcattttaacgccgtcgctcccggcggctataaagtctttgatgacacgggaaaagtcgtggcgcaagtggacattctgctggaaaacagcgactacattatggcggtggaagtaaaagcaaaagtacacataaatgatatggaacatcatgcaaaacggctggaattactgaaagaacattgggagaaacaccatgatacgcgcaaaatacggggagccatagcgggcgcgatattcgggaacacggaaaaaaaggcggtcattaaggcgggcttttacgtgctggaacaatcgggagatactgtgaagatggaaataccggaggggtttgttcccagggagtggtga

SEQ ID NO: 38368 - protein, 189 aa, Unknown
  Obtained from environmental sample
  misc_feature (1)..(189): Xaa is any amino acid
MAVTTSDRPIPTGEGITFEKVWAMFQETAQQMKETDRKMARLEKQMGGLHNSFGEMAEHLVAPSIGKRFNELGYHFNAVAPGGYKVFDDTGKVVAQVDILLENSDYIMAVEVKAKVHINDMEHHAKRLELLKEHWEKHHDTRKIRGAIAGAIFGNTEKKAVIKAGFYVLEQSGDTVKMEIPEGFVPREW

SEQ ID NO: 38369 - DNA, 621 bp, Unknown
  Obtained from environmental sample
  misc_feature (1)..(621): n is a, c, g, or t
ttgcgagtatcccataagaacagaccggcggcgcgggccagttcgggcgggtggcaggatacatggagccgtacccggaaggcgactacgaagtttgtaaaccaggtaaagggcggctctattcccaccgaatatgtgccaagttgcgacaagggttttaaggaagctatcaaaaaaggcacgcttatcggcttccctattgtcaatatacgctgccttatcaacgacggccaaagccacccggtagactcatcggacatcgcgttccagcaggcggcaatcggcgcgttccgcgaagcgtataacaaggccaaaccctgcatactcgagccaatcatgaaagtgtcggtggaaggccccgcggaattccagggcaacgtttttggttccatcaaccagcggcgcggcatgattttatcatccaccgaggacggggttaactcccgcgttgacgcggaagtcccccttagcgagatgttcggttactccacggttctccgctccctgacgcagggcaaggcggaatttacaatggagtttgaaaaatacggcaaggttccccaaagcgtctcggaagctttgataaaggaatacatcgccaaaaaacaggcgcagcgctaa

SEQ ID NO: 38370 - protein, 206 aa, Unknown
  Obtained from environmental sample
  DOMAIN (1)...(105): Elongation factor G, domain IV
  misc_feature (1)..(206): Xaa is any amino acid
MRVSHKNRPAARASSGGWQDTWSRTRKATTKFVNQVKGGSIPTEYVPSCDKGFKEAIKKGTLIGFPIVNIRCLINDGQSHPVDSSDIAFQQAAIGAFREAYNKAKPCILEPIMKVSVEGPAEFQGNVFGSINQRRGMILSSTEDGVNSRVDAEVPLSEMFGYSTVLRSLTQGKAEFTMEFEKYGKVPQSVSEALIKEYIAKKQAQR

SEQ ID NO: 38371 - DNA, 735 bp, Unknown
  Obtained from environmental sample
  misc_feature (1)..(735): n is a, c, g, or t
atggtaaaggaagaattaattcaacgcagcccgttgcgtatttttgaacagtctattcacggcgggttaaagaccggcgaagtggggatcatcgtttcccagcccggtatcgggaaaacgtccatgctggttcagcttgccatggacaaactgctccagggaaaaaaggtgatacatgtttcctttacgcagcatacccattatgtgctggcatggtatgaggatatttttgacgagctgatcaacaaaaaagaactggttaacgccgcagatgtaaaagatgaaattgtaaagaaccgcgtgctgatgaatttcaaccaggaagtaatgtcaggtgagcagatcctcaagagcctgcgtgcgatgattaaagagggcggcttcgccgccgaatcggtcattgttgacggctttgatttttccaacgccggaatcggcgccgccggcaacggcgccgccacccgcgagcgaatcgataatgttaaagcctttgccaaagaattggggctttcggtgtggtacagctgcaccataaatgaaaatggcgactggtatgataacgacaagatgcctctggctattaaagactttgccgatcttgttgacattgtaatcgtgctggaacccaaggcggatcacattgagctttcggtttccaaagaccgttgcgcaggaagcactaaacccctggcgatgcggcttgacccgaagactttgctgattctggaagggtaa

SEQ ID NO: 38372 - protein, 244 aa, Unknown
  Obtained from environmental sample
  misc_feature (1)..(244): Xaa is any amino acid
MVKEELIQRSPLRIFEQSIHGGLKTGEVGIIVSQPGIGKTSMLVQLAMDKLLQGKKVIHVSFTQHTHYVLAWYEDIFDELINKKELVNAADVKDEIVKNRVLMNFNQEVMSGEQILKSLRAMIKEGGFAAESVIVDGFDFSNAGIGAAGNGAATRERIDNVKAFAKELGLSVWYSCTINENGDWYDNDKMPLAIKDFADLVDIVIVLEPKADHIELSVSKDRCAGSTKPLAMRLDPKTLLILEG

SEQ ID NO: 38373 - DNA, 1554 bp, Unknown
  Obtained from environmental sample
  misc_feature (1)..(1554): n is a, c, g, or t
ttgactggtcctaacagtaccaagcaaatcaactttaccaaagataccgtaccgccgacggtcaacttcggcaacatcgacggtaccaaaacattgaccaaggctgaatggcaaaccgcaagccccacattcgagctgacggcgctaaaaaatctgctggcgacgctgaatcccaaacaaatgggttctgacgcggcgatccagggttccttctacgacgtgaataacgaccttgcgcccagcttccagtaccgtatttacaactccgacactttgaagggtacatggactgacgctgttaccacgcccggaactccggtgtggacatcagttaaccttccttccggaacgaaaaagtccgcgaactggagcatccccctgaatgaagccggcgcttactggtcggggaacagtatccctgacggaatatggtggctggacctccgtattctggacaaaaccggcaatgcctcgtactacaaaaacatcgtctttacggtagacaagggcgacccgacgattaccatcgacacagtcagcgataagccgagcaccaatggcgtcactgaagccgttccctttgtctacggcaaaaaggccagcggcacggtatttaccctgaatggaacggcacaggatgtggacctgaggagcgtgctagttagactatcaggcaacaacaccagcaacgggaacatggctactgatacggtaagcgatgctcctcaaaccgacggcagtactatccgtacgtggaagaggatttttgatgcggcgactttcacccagacagcggcaggcgcgacggtgagttacaccgtccttcccgatggaacatatacggtaaccgctacggcctctgacgccagcagaaccgcctctgacacctatacctttattaaagacaccaccgaccctgcggtgaaattcctcaccactgccgtcaactttgacagtaacaacataagtatccagggctcggcgaccgacacgggcggggtatattcgatttggacctacatcgaagaagagaaggttctcgccagcaacgagtggacaaaagtaacagacgatactgtcccggatggtttaggattaacgaccgcggtaaaacaaaccgtggatggcaaggaattcaccctgcttgaccgagccacgagcctggaaggattgggaaccacggtcacctggaccaaagatattgtcccgaccgatggcagtcctactactggtcccaagctgaaactgtccgaaggacgctaccggatttacgtctacgtagtcgaccgcgcgactcccgccaatgtgtttatgagcgatgagaagagattcacgatagacaccgacaggccgacaataaacctcgacgcatccccgaactttcatcacggcaggaaccatataagcggccatcccttctatcatgagaattcgcagggggtgaacgacgcttcctatccgaaaggtcctgccactcctcccgcggcggcccgtgactatcccgttgtttctaccgacgaaggcctctacatcacggggaacggcagtttctaa

SEQ ID NO: 38374 - protein, 517 aa, Unknown
  Obtained from environmental sample
  misc_feature (1)..(517): Xaa is any amino acid
MTGPNSTKQINFTKDTVPPTVNFGNIDGTKTLTKAEWQTASPTFELTALKNLLATLNPKQMGSDAAIQGSFYDVNNDLAPSFQYRIYNSDTLKGTWTDAVTTPGTPVWTSVNLPSGTKKSANWSIPLNEAGAYWSGNSIPDGIWWLDLRILDKTGNASYYKNIVFTVDKGDPTITIDTVSDKPSTNGVTEAVPFVYGKKASGTVFTLNGTAQDVDLRSVLVRLSGNNTSNGNMATDTVSDAPQTDGSTIRTWKRIFDAATFTQTAAGATVSYTVLPDGTYTVTATASDASRTASDTYTFIKDTTDPAVKFLTTAVNFDSNNISIQGSATDTGGVYSIWTYIEEEKVLASNEWTKVTDDTVPDGLGLTTAVKQTVDGKEFTLLDRATSLEGLGTTVTWTKDIVPTDGSPTTGPKLKLSEGRYRIYVYVVDRATPANVFMSDEKRFTIDTDRPTINLDASPNFHHGRNHISGHPFYHENSQGVNDASYPKGPATPPAAARDYPVVSTDEGLYITGNGSF

SEQ ID NO: 38375 - DNA, 525 bp, Unknown
  Obtained from environmental sample
  misc_feature (1)..(525): n is a, c, g, or t
atgaaacaggcaatgattgactgcattaaaaacgaaaagcgcgatcatttcgacacgcctgcctatgcggtaaagccgttgttgccctatataaatccagaatggattatatgggaaccgaccgatacgacgggtaaaagccaaatagcaaaaatactgcgcaagcatgggtgcaaggtaatttcgacggcgcagaaagattttgattttttaaaagacgcgcccgatttttattttgactgcatagtgacaaaccctccgtactcgttgaaggacgaatttattttcaggtgcaacgaattgtgtatgcgtcttaggcagtcgtgggcacttttgatgccgcttactgcgctggaaggcgtaacaaggggggaaatatttcgggatatgggaatcgactttaggctgctagtgcttgacaggcgcgttgagtatacgggcggttccgtttggtttaacacgtcgtggttctgcgctggcattttgccgaagcagcttttgtttgcagaactaaagaaggagtaa

SEQ ID NO: 38376 - protein, 174 aa, Unknown
  Obtained from environmental sample
  misc_feature (1)..(174): Xaa is any amino acid
MKQAMIDCIKNEKRDHFDTPAYAVKPLLPYINPEWIIWEPTDTTGKSQIAKILRKHGCKVISTAQKDFDFLKDAPDFYFDCIVTNPPYSLKDEFIFRCNELCMRLRQSWALLMPLTALEGVTRGEIFRDMGIDFRLLVLDRRVEYTGGSVWFNTSWFCAGILPKQLLFAELKKE

SEQ ID NO: 38377 - DNA, 888 bp, Unknown
  Obtained from environmental sample
  misc_feature (1)..(888): n is a, c, g, or t
ttgaaaaatttatatcccagtaacattattcatattataacgtatggagcgcctatgatcccattgcataaactgactcaacttccacgttcgcaaaggttacgaaaagcggctaacctcgtaaggaacgcagaaaggcgctttattttttttgagcatcttgaggctggcgaagtagaatactttgaaaggcttttgaaattactttcggaagacgaggactttcccgccactgccgaggcagcgctgaaaacagcctgtaatatatttgcagatagtaaaatggacgaaaaggaaatgcgccgtacccttaacactatccatcagatcctgcttgccgaaaccgggcgctatcaggcagactgggatttttttgagcctacaggcgcgttggatcccctaaagcgccaagttttcccagaaatgtatgtataccttgaagacatacgctcgccctttaatgttggttccatgttcagagccgctgattcttttggtgtagagaagatctggctttcgcccctttgtgccagccctctgcacaagagggctcagcgtaccgcgatgggttgtgttgatgttatccactgggagtttcttcctcatgatccatttgatgatcattctgctttgcactttttacaggggccattttttgcccttgaaaccggtggtactcccttggcggattttagctttccatcacgagggattttgatcgtaggctcggaagaacttggagtaagcccccgtgcgcttgcagcggcggattcctctctcggaagggtcagcatccccacctggggcgcanaaggctcgctgaacgtgtccagcgctttcgcaattgtcatgcacgcctgggcagttaccataaacggcaagtgttaa

SEQ ID NO: 38378 - protein, 295 aa, Unknown
  Obtained from environmental sample
  DOMAIN (141)...(285): SpoU rRNA Methylase family
  misc_feature (1)..(295): Xaa is any amino acid
MKNLYPSNIIHIITYGAPMIPLHKLTQLPRSQRLRKAANLVRNAERRFIFFEHLEAGEVEYFERLLKLLSEDEDFPATAEAALKTACNIFADSKMDEKEMRRTLNTIHQILLAETGRYQADWDFFEPTGALDPLKRQVFPEMYVYLEDIRSPFNVGSMFRAADSFGVEKIWLSPLCASPLHKRAQRTAMGCVDVIHWEFLPHDPFDDHSALHFLQGPFFALETGGTPLADFSFPSRGILIVGSEELGVSPRALAAADSSLGRVSIPTWGAXGSLNVSSAFAIVMHAWAVTINGKC

SEQ ID NO: 38379 - DNA, 1428 bp, Unknown
  Obtained from environmental sample
  misc_feature (1)..(1428): n is a, c, g, or t
ttgaaaaaaacaatgtcaaaaggtacgcatttggagcttgatgtcgccaatgtcgtcgccaatgcgatgaaaaactgggcggttgaacgcggcgcaacccactttacacactggttccagcccatgaccggcacaacggcggaaaaacacgacagctttatttccccgacaagcgacggtaaaattatcatggaattttcgggaaaagaacttgtccgcggcgaaccggacgcttccagtttcccgtcgggcggcttacgcgccacctttgaagcgagaggctacaccgtttgggacgtaacttcttttgcgtttatcaaagacgatactttgtgtatccccaccgcattctgttcgtattcaggcgaagcgcttgataaaaagacccccttgctccgttcaatggaagccatcagcaaacaggctctccgcatactcaaacttttcggcgacacaacggcacagcgcgttctttcaacagtcggtcccgaacaggaatatttccttattgataaagaggtttatcttcaacgccccgatttaatctacacaggcagaactcttttcggctcanaaccgcccaaaggacaggagcttgaagatcattatttcggtgctatcaaaccgcgcgtctccgcttttatgaaagagcttgatgaagagctttggaaactcggagtaaacgcgaagacaaaacacaacgaagtcgccccggcccagcacgaacttgcgcctattttctcaacgacaaatatcgccaccgaccataaccagctgacgatggaactgatgaagagcatagcgaacaagcacggtcttgcctgtctgcttcacgaaaaaccgtttgccggagttaacggcagcggaaagcacaacaactggtcaatcagcaccgacacaggcgtgaaccttcttgaacccggagatactccgaatgacaacgcgcagttccttctgttccttgtcgcggttatcaaagctattgacgaatatcaggaccttttgcgcgtatcagtcgcgagcgcgggaaacgaccacaggcttggcgcgaacgaagcgccccccgccatcgtatccatgttcctcggcgaagaattaacggaaatcattgaagcgattgaatccggcaagggttataaaaacaaagaaaaactcgacatggaaatcggcgtatccgttctgccgcacttccccaaagacacgacagaccgcaacaggacgtctcctttcgcgtttaccggcaacaagtttgaattccgcatggtcggctcagcgttctcaatcggcggcccgaacattgtattaaacacaattgttgccgaatcattaagccagttcgcggactcccttgaaaaatcgaaaaactttaaaggagaccttgcggcgttaatcaagaaaacaatcagcgatcacaagcggattttttaa

SEQ ID NO: 38380 - protein, 475 aa, Unknown
  Obtained from environmental sample
  DOMAIN (132)...(424): Glutamine synthetase, catalytic domain
  misc_feature (1)..(475): Xaa is any amino acid
MKKTMSKGTHLELDVANVVANAMKNWAVERGATHFTHWFQPMTGTTAEKHDSFISPTSDGKIIMEFSGKELVRGEPDASSFPSGGLRATFEARGYTVWDVTSFAFIKDDTLCIPTAFCSYSGEALDKKTPLLRSMEAISKQALRILKLFGDTTAQRVLSTVGPEQEYFLIDKEVYLQRPDLIYTGRTLFGSXPPKGQELEDHYFGAIKPRVSAFMKELDEELWKLGVNAKTKHNEVAPAQHELAPIFSTTNIATDHNQLTMELMKSIANKHGLACLLHEKPFAGVNGSGKHNNWSISTDTGVNLLEPGDTPNDNAQFLLFLVAVIKAIDEYQDLLRVSVASAGNDHRLGANEAPPAIVSMFLGEELTEIIEAIESGKGYKNKEKLDMEIGVSVLPHFPKDTTDRNRTSPFAFTGNKFEFRMVGSAFSIGGPNIVLNTIVAESLSQFADSLEKSKNFKGDLAALIKKTISDHKRIF

SEQ ID NO: 38381 - DNA, 714 bp, Unknown
  Obtained from environmental sample
  misc_feature (1)..(714): n is a, c, g, or t
gtggacatagaagaagaatattatagtgagttaagaaaatgtttagataaaaaaagaatgggtggtgtaaaaaaactcaacgaagaatttttagagataaaaacattactagaaatacatttaggaaagatatcggatattacttatcctgaagcagaccaaattattcaacatttaaaaatggtagccccttcgggaaaaactgttaacgatatgatttttctaaattttaattatacggacactataaatttttacgccgatcgtggtgagcaagtcattcatatacacggcaaattaaaagattccgataatcctataattttcggatatggagacgaacttgacgaaaatcacaaactgattgaaaacataaatgacaatgaatacctcaagcatataaaatcaattgagtatttgaaaaccaataactataaaaagttgcaagcatttattgagtctgacgaatatgaaatattcgtcatgggacactcttgcggtatttcagaccggacactactaaacaatctatttgaacataaacactgcaaatcaataaaggtattttatcataaggaagaggatggtacagataattataatgatcttgtgtgtaatatatacagaaactttaatgataagaacgcaatgaggaataaggttgttagcaaggaagaatgcaagccattacttgaaaggacaaaacaagtatga

SEQ ID NO: 38382 - protein, 237 aa, Unknown
  Obtained from environmental sample
  misc_feature (1)..(237): Xaa is any amino acid
MDIEEEYYSELRKCLDKKRMGGVKKLNEEFLEIKTLLEIHLGKISDITYPEADQIIQHLKMVAPSGKTVNDMIFLNFNYTDTINFYADRGEQVIHIHGKLKDSDNPIIFGYGDELDENHKLIENINDNEYLKHIKSIEYLKTNNYKKLQAFIESDEYEIFVMGHSCGISDRTLLNNLFEHKHCKSIKVFYHKEEDGTDNYNDLVCNIYRNFNDKNAMRNKVVSKEECKPLLERTKQV

SEQ ID NO: 38383 - DNA, 837 bp, Unknown
  Obtained from environmental sample
  misc_feature (1)..(837): n is a, c, g, or t
ttgacggcaggagtcgagcgttggaaagaatacagcgaacaattaacacagttaaagaagaaaccgatcttgtttgtgatgatgaacgacacaaaagaagcggacgacatcggcgattggctacgaacaaaatatccctccgatttcgggggagaaaagacattagtcattcacaccgacaatagcggcgacgtttctaaaaaagatttggatgccgcccgcaaaacagcgcgggatgttgaccacgaaaaaagccccgtcaacgcgatagtctccgtcttaatgcttcgtgaggggtgggatgtccaaaacgtaaccgttgtgatcggattgcgtccatatacatcaaaagcgaacatcttaccggaacaaaccattggtagaggattgcggttaatgtttcgcgacaatgccggcggttacatagaacgtgtggatattatcggcaatagagcgttcatggagtttgttgaagacctcgaaaaattagaagatttgaaacttgatacattccaacttggagcggataaattaaccattcttattgtgcaaccggaagaacgtaaaaaagattttgacatagggattcctgagattacgccgttgatttcacggaaaaaatcattaaccgaggaaatcggcgctattgatgtgatggcgttcgatataaacaaactaccgttaggaaatgacataaccgacatcaaaaagtttatttatgaggggcgagatattttaaccgatgaaaaacttgtggaacgtgagtattctattccgcaagcgcagaccgctgaagagatatcggctattacgcgagacagattgcgcaaaatgtaa

SEQ ID NO: 38384 - protein, 278 aa, Unknown
  Obtained from environmental sample
  misc_feature (1)..(278): Xaa is any amino acid
MTAGVERWKEYSEQLTQLKKKPILFVMMNDTKEADDIGDWLRTKYPSDFGGEKTLVIHTDNSGDVSKKDLDAARKTARDVDHEKSPVNAIVSVLMLREGWDVQNVTVVIGLRPYTSKANILPEQTIGRGLRLMFRDNAGGYIERVDIIGNRAFMEFVEDLEKLEDLKLDTFQLGADKLTILIVQPEERKKDFDIGIPEITPLISRKKSLTEEIGAIDVMAFDINKLPLGNDITDIKKFIYEGRDILTDEKLVEREYSIPQAQTAEEISAITRDRLRKM

SEQ ID NO: 38385 - DNA, 885 bp, Unknown
  Obtained from environmental sample
  misc_feature (1)..(885): n is a, c, g, or t
atggcgagggagaaggttttgcattggctctgccgctttacagctattgcgcttttggcagcatatatagaagaggtaaaactctggcttggaaaaattgctgcaagttcaaacggaacattcaaagcgggttctgttgtatttgcaagttctgaagaaaatctcgcaaactacccctttacctcagaccttgctgttagaataatagacaatggaaacagagcaataaattcagacggaacattgatgggtttggttgcgcacagtgcgaatatatccgattttcttgttgcatataatttaactcttatgaacccaactttgctctgcggattatttataggagcaatgatggctttccttttctgttccatgagcatccaagctgtgggcagagcggcaggagcaatggtggaagaagttcgccgccagttccgcgaaataaaaggtatcatggatggaacaggcaagcccgactatgcgcgttgcgttgcgattagtacagcaggtgcgcaaagagaaatgattttgccatctttgatggctgttataattcccattttggtaggcttgattttaggtgttccgggtgtgttcggtcttttagctggcagtttggcgactggtttttctcttgcaactatgctgaacaattccggcggtgcatgggacaatgccaagaaattcattgaaaaaggcaatcacggcggcaaaggctcagacacgcacaaatccgctgttacaggcgacaccgttggcgatcccttcaaagacaccgctggtccttcgttgaacattttgatgaagctgatgactatggtgagcgttgtgttttctgggcttattgttaaatatagcgaagtgtttatgggggtgtttaagtaa

SEQ ID NO: 38386 - protein, 294 aa, Unknown
  Obtained from environmental sample
  DOMAIN (1)...(279): Inorganic H+ pyrophosphatase
  misc_feature (1)..(294): Xaa is any amino acid
MAREKVLHWLCRFTAIALLAAYIEEVKLWLGKIAASSNGTFKAGSVVFASSEENLANYPFTSDLAVRIIDNGNRAINSDGTLMGLVAHSANISDFLVAYNLTLMNPTLLCGLFIGAMMAFLFCSMSIQAVGRAAGAMVEEVRRQFREIKGIMDGTGKPDYARCVAISTAGAQREMILPSLMAVIIPILVGLILGVPGVFGLLAGSLATGFSLATMLNNSGGAWDNAKKFIEKGNHGGKGSDTHKSAVTGDTVGDPFKDTAGPSLNILMKLMTMVSVVFSGLIVKYSEVFMGVFK

SEQ ID NO: 38387 - DNA, 501 bp, Unknown
  Obtained from environmental sample
  misc_feature (1)..(501): n is a, c, g, or t
ttgcggtattcggaaagcgtagtcgcccctatgcattgtatgtcgccgcgggaaaggcccggtttaagcatattggaagcgtcgatagtgccttccgctccaccggcgccgattatagtatgtatctcatcgatgaacaggataacattcccggcctgcgtgatttccctggtgattttctttatcctttcctcaaattcgccccggtacttggttccggcgactattgaacccatgtcaagggaaagtatgcgtttgcccgaaagagcttcaggcgcgttcacggaaacaagcatctgggcaaggccttcgacaatggcagtcttgccgactcccggctcccccaccaggatggggttgttttttgcccgcctggcgagtatccgcacaatgcggttcatctctttttccctgccgattaccggatccagtttaccggatctcgcaaacgcggtcagatcgcgggagaaattatccagcgtaggtgtaagcacggggtaa

SEQ ID NO: 38388 - protein, 166 aa, Unknown
  Obtained from environmental sample
  misc_feature (1)..(166): Xaa is any amino acid
MRYSESVVAPMHCMSPRERPGLSILEASIVPSAPPAPIIVCISSMNRITFPACVISLVIFFILSSNSPRYLVPATIEPMSRESMRLPERASGAFTETSIWARPSTMAVLPTPGSPTRMGLFFARLASIRTMRFISFSLPITGSSLPDLANAVRSREKLSSVGVSTG

SEQ ID NO: 38389 - DNA, 585 bp, Unknown
  Obtained from environmental sample
  misc_feature (1)..(585): n is a, c, g, or t
gtgctcgtaatcctgcgcgtttacaagaaggcttttttcttcggtcaggccgttaatctccgcctcgatgcccgctatttcaggcggttcatcgctgtcgctgtattccagtttccgcatcgccccggcttcatcaaggatgtcgattgccttgtcaggcatgaaacggccggtaacataacgctttgcgagttttactgtcagttcgactgccgcatccgtgtatgctactttatggtggtcttcgtattttttcctgatgccgtgaagtatttgcagggtttcgtctacgctggtttcctcaacaagaatagcctggaaccggcgctcaagggcaggatctttctcaaagtgtttgcggtattcggaaagcgtagtcgcccctatgcattgtatgtcgccgcgggaaaggcccggtttaagcatattggaagcgtcgatagtgccttccgctccaccggcgccgattatagtatgtatctcatcgatgaacaggataacattcccggcctgcgtgatttccctggtgattttctttatcctttcctcaaattcgccccggtacttggttccggcgactattga

SEQ ID NO: 38390 - protein, 194 aa, Unknown
  Obtained from environmental sample
  misc_feature (1)..(194): Xaa is any amino acid
MLVILRVYKKAFFFGQAVNLRLDARYFRRFIAVAVFQFPHRPGFIKDVDCLVRHETAGNITLCEFYCQFDCRIRVCYFMVVFVFFPDAVKYLQGFVYAGFLNKNSLEPALKGRIFLKVFAVFGKRSRPYALYVAAGKARFKHIGSVDSAFRSTGADYSMYLIDEQDNIPGLRDFPGDFLYPFLKFAPVLGSGDY

SEQ ID NO: 38391 - DNA, 375 bp, Unknown
  Obtained from environmental sample
  misc_feature (1)..(375): n is a, c, g, or t
atggaaattgacacccaaaagaaggatttagacaaccgatacggggaaattgtccaaatggcgcaggaattggaaatacaaaagagcgcccttgaagacttggagaaatctcttaacgccgataaaaaagaagccgaaaataaagataggaatgtcgagcagaatgcccggtatctgacaggcatgcctccgcagaatgcggtaggcatcatcgccaagttggatgatcagaccgctatcgacgttctccggaagaccgaggaaatagccagagccgaaggtacaacgtccgttgtcgcttattggttctccctgatggacccggttcgggctgccgagctgcaaagaaaaatggcaagcagaccgaacttgtaa

SEQ ID NO: 38392 - protein, 124 aa, Unknown
  Obtained from environmental sample
  misc_feature (1)..(124): Xaa is any amino acid
MEIDTQKKDLDNRYGEIVQMAQELEIQKSALEDLEKSLNADKKEAENKDRNVEQNARYLTGMPPQNAVGIIAKLDDQTAIDVLRKTEEIARAEGTTSVVAYWFSLMDPVRAAELQRKMASRPNL

SEQ ID NO: 38393 - DNA, 465 bp, Unknown
  Obtained from environmental sample
  misc_feature (1)..(465): n is a, c, g, or t
atggaactaacaggtagaccgatgttaagctcggatgaaagactccagctagacaaatttgttcacgactacaacgtcggcttaaatccgacgcgtcagccgcagcaaaacttgggtaaagacgatttcttgaaaatccttattacccagctttcgtatcaagacccgacagcgccgatggaagacaaagaattcatcgcgcagatggcgcaattttcaacattggaacaaatgacagcgatggcaaaagatttttccaagcttacttctatgctcatggggaacgaggcgtcaagcgctttgggaaagagcgttgaaatagtcgagggggaacgcactgtacagggagttgttcaggcggttaccaggggagaaacacctgaggtgttggtaaacggaaacttttatgattggaaccaagtaatcaaggtttttgcagatgaaaaggagagtgtagacttatga

SEQ ID NO: 38394 - protein, 154 aa, Unknown
  Obtained from environmental sample
  DOMAIN (6)...(148): Flagellar hook capping protein
  misc_feature (1)..(154): Xaa is any amino acid
MELTGRPMLSSDERLQLDKFVHDYNVGLNPTRQPQQNLGKDDFLKILITQLSYQDPTAPMEDKEFIAQMAQFSTLEQMTAMAKDFSKLTSMLMGNEASSALGKSVEIVEGERTVQGVVQAVTRGETPEVLVNGNFYDWNQVIKVFADEKESVDL

SEQ ID NO: 38395 - DNA, 1143 bp, Unknown
  Obtained from environmental sample
  misc_feature (1)..(1143): n is a, c, g, or t
gtgcttgtaataacttctatccttgggacggtaatactaatcctttttaccaggcgccttaccaaccccctgaaacgggtagttgacgccatgaacgacatcacctccagcggcgaactttcttcgagggtggaagtggagtacaacgacgaaacagggaaactggcttctacttttaacatgatgatttcggagctggaaaaagcctacacccagataaagcgttacgccttcgaagcggttttggccggaaaaaaagaacagaggatacgccagatcttccagaagtacgttcccaaagatcttatcgataaattctttgcctcaccggaatccatgctggttggcgaaaacaggacactggcgatacttttttccgacatacggagcttcacaaccatttccgaaaacatggctccggacgatcttgttaattcgctcaacagatatttttccggccaggttgatatcattatgaaccggaacggaattgtcgacaaatacatcggcgacgcgataatggctttttggggcgctcccgttaaacacgacgacgacgccctgcaggccgtcctttcggggctcgacatgatcgaagccgttaaggccttcaacgagaaccagctaaagctggggaagcccgagttccacataggcattggaattaactacggaaccgtaacggtaggcaacatcggcagcgaaaggaagatggattacacggtcattggcgatatggtaaacttggcttcacgtatggaagggctgacaaaaacttatcactctgaaatactaatttcagagacccttcacgacgcccttgttaaatcggtggaaaccgcttcgcttttctacaggcttctggacactgtggcggtaaagggaaaaaccaggggggtgaaaatttacaccgcgaaaaaagcgctgggcgaaacggaaacgaaagcgtggaactaccacaaccacggaatggagctttactacaaacgcgatttcgcggccggggcaaaatatttcgctgctgtccataacctgcttccgggcgattttaacgcggcaaacctttacaagcgctgcaaaagatatgaaacctcccctcctccgcctgactgggacggcgttgaagtgatgcacacaaagtag

SEQ ID NO: 38396 - protein, 380 aa, Unknown
  Obtained from environmental sample
  DOMAIN (2)...(68): HAMP domain
  misc_feature (1)..(380): Xaa is any amino acid
MLVITSILGTVILILFTRRLTNPLKRVVDAMNDITSSGELSSRVEVEYNDETGKLASTFNMMISELEKAYTQIKRYAFEAVLAGKKEQRIRQIFQKYVPKDLIDKFFASPESMLVGENRTLAILFSDIRSFTTISENMAPDDLVNSLNRYFSGQVDIIMNRNGIVDKYIGDAIMAFWGAPVKHDDDALQAVLSGLDMIEAVKAFNENQLKLGKPEFHIGIGINYGTVTVGNIGSERKMDYTVIGDMVNLASRMEGLTKTYHSEILISETLHDALVKSVETASLFYRLLDTVAVKGKTRGVKIYTAKKALGETETKAWNYHNHGMELYYKRDFAAGAKYFAAVHNLLPGDFNAANLYKRCKRYETSPPPPDWDGVEVMHTK

SEQ ID NO: 38397 - DNA, 765 bp, Unknown
  Obtained from environmental sample
  misc_feature (1)..(765): n is a, c, g, or t
ttgccacactttgctcactgtccgcactttgctcattgctcactgctaactgctcactgttccctgctaactgctcactgctcagtactaactgctcattgctctctgctaactgctcactgctcagtactaactgctcattgctctctgctaactgctcactctcactgttcactgttaactgttcactgttcactgctaactgttccctgttccctgcctgatttttcggaactgttgaacatgaaactattagcgccaataaagggtataaaaataaatatggttttctcaagggacactctccataatctcgtcaaccgttttttctatctgctccctccattcctgttcaccgtctttaagggggtcttgccaccagggcatcgcatcaacggcattccactgtgtccgtttttcccgctccagtatcacgccggggacaaaatcaggctcatcaggaaagaaaagatcctctgcgggaatacgccgggtcatgacgctgctagccggaggagcatccggcttgacagtgttgtctttggccaacagcgacacccctgtaatgaaaaaaagaagaatatccggaatcccaattgccgttgtcaggacaacccgccggtccgtcggaaatttggcaatcagtttgttcagttcttctttcagactgccccgcggttctgttgttttgtctcctgcccggcggaaaaacccgccgataccgtccacggctttggagaaaaacgattgtataaattcgggtaa

SEQ ID NO: 38398 - protein, 254 aa, Unknown
  Obtained from environmental sample
  misc_feature (1)..(254): Xaa is any amino acid
MPHFAHCPHFAHCSLLTAHCSLLTAHCSVLTAHCSLLTAHCSVLTAHCSLLTAHSHCSLLTVHCSLLTVPCSLPDFSELLNMKLLAPIKGIKINMVFSRDTLHNLVNRFFYLLPPFLFTVFKGVLPPGHRINGIPLCPFFPLQYHAGDKIRLIRKEKILCGNTPGHDAASRRSIRLDSVVFGQQRHPCNEKKKNIRNPNCRCQDNPPVRRKFGNQFVQFFFQTAPRFCCFVSCPAEKPADTVHGFGEKRLYKFG

SEQ ID NO: 38399 - DNA, 345 bp, Unknown
  Obtained from environmental sample
  misc_feature (1)..(345): n is a, c, g, or t
gtgacaattgccgcaggttgcaattccggttcttgggcaatttccgtagaatcaggctcgtcaggcacaaaagcctcgacatattccgctgattgctcattactcacttcgataagctcagttgccacactttgctcactgtccgcactttgctcattgctcactgctaactgctcactgttccctgctaactgctcactgctcagtactaactgctcattgctctctgctaactgctcactgctcagtactaactgctcattgctctctgctaactgctcactctcactgttcactgttaactgttcactgttcactgctaactgttccctgttccctgcctga

SEQ ID NO: 38400 - protein, 114 aa, Unknown
  Obtained from environmental sample
  misc_feature (1)..(114): Xaa is any amino acid
MTIAAGCNSGSWAISVESGSSGTKASTYSADCSLLTSISSVATLCSLSALCSLLTANCSLFPANCSLLSTNCSLLSANCSLLSTNCSLLSANCSLSLFTVNCSLFTANCSLFPA

SEQ ID NO: 38401 - DNA, 372 bp, Unknown
  Obtained from environmental sample
  misc_feature (1)..(372): n is a, c, g, or t
atggaacggaatttccgtaaaatcctgcgtgatgaacttgattatcaaggtttaaccgttaaggaactggctgcgaaatcttcagtagccaagggagccattgacagctaccttgggaagcaggcttctatgccgcctgcggatgttgccgttcgaatagcagtcgctctgggtgtaacagtggaatatctggtaaatggacaggacggaaaccgtgaaacacaggctccttttttttccagtccccaaaaacgttcgttacttcatgtttttgatgaattagtgccggaggatcaaaaatttgctcttgattttgttaaactgctgaaaaaaaacagggaagagggtttggggactaaaattagaaattag

SEQ ID NO: 38402 - protein, 123 aa, Unknown
  Obtained from environmental sample
  DOMAIN (9)...(64): Helix-turn-helix
  misc_feature (1)..(123): Xaa is any amino acid
MERNFRKILRDELDYQGLTVKELAAKSSVAKGAIDSYLGKQASMPPADVAVRIAVALGVTVEYLVNGQDGNRETQAPFFSSPQKRSLLHVFDELVPEDQKFALDFVKLLKKNREEGLGTKIRN

SEQ ID NO: 38403 - DNA, 876 bp, Unknown
  Obtained from environmental sample
  misc_feature (1)..(876): n is a, c, g, or t
atgtatcagatcggcacgaggatcccgagggtgaagtttattttcagggttgaggccagcggaatatacacgttgaaattttaccggcaggattttgtgcgggaccttattttaaatgatcatgtgcagattattgcgggcggagctcccgaaattaccggcctggcctggtttaacccgcctacagatcgcaacagggtgattgtcggaccgcgctggccaaatttccttgctcctcaaccgagcccgcagggcgtcgaaccagaagttcgcggttcccctcttgagtcgccgcagaggatcgacagtcatgccgaacagcagcctccccgcgctgtagaagaacctgcggcacaaccgcccgcagccgtacggccgactacaacagcacaagcgcccgcaacggcacagccacctgcaacagcacagccccctcgccagccggcaagaaatgaacctgcccgccagcaaggtctttcaggcgatgccgtcgcacagaccagccctgcgcaatcgtcaagcccatcggctccgaaggagacgacggctccgaaggagacgacgcagcctgctccggttgccgaaccagtcgatcccgattcaatcctgaagcaagccagagaagaatttaacgccggacgctttgcctcggcgattaccctgcttgaccagtttagtaaagctttcccctcaggcagtgacgaggcgtggtggctttacggtcaatgttacgaggcgagcagccccaatcggaatatgcttgccgcgcttgactattatcggcggcttgtccgcgaatatcccatgagcagccgtttaagcgacgcccgccggaggattgcctatctggagaggtactacattaatatacaatga

SEQ ID NO: 38404 - protein, 291 aa, Unknown
  Obtained from environmental sample
  misc_feature (1)..(291): Xaa is any amino acid
MYQIGTRIPRVKFIFRVEASGIYTLKFYRQDFVRDLILNDHVQIIAGGAPEITGLAWFNPPTDRNRVIVGPRWPNFLAPQPSPQGVEPEVRGSPLESPQRIDSHAEQQPPRAVEEPAAQPPAAVRPTTTAQAPATAQPPATAQPPRQPARNEPARQQGLSGDAVAQTSPAQSSSPSAPKETTAPKETTQPAPVAEPVDPDSILKQAREEFNAGRFASAITLLDQFSKAFPSGSDEAWWLYGQCYEASSPNRNMLAALDYYRRLVREYPMSSRLSDARRRIAYLERYYINIQ

SEQ ID NO: 38405 - DNA, 939 bp, Unknown
  Obtained from environmental sample
  misc_feature (1)..(939): n is a, c, g, or t
atgtttgccgccgatgaaatttttatctccgacggggcaaaatgcgacataggccgacttcaattgcttttcggctcgcaggctcaccctgttatacaggatccttcatatccagtttacgcggacggctcggttcttctgcaagccgccggaaaatgggaaggctcaggctacgaaggcattacctatctgccctgcacttctgaaaacggatattttcccgatctttcaaagctccctaaaaacagccttgtttatttttgttcacctaacaaccctacgggggcagtttcaaaccgagagcagttaaaagaacttgtcgcggccgcgataaaaaaagagtccttaattatatttgacgcggcgtattcaatgtacatcagggacgacggtctgcctaaaagcgtctttgaaatcgagggggcaaagacctgcgccattgaagtcaactcgttcagcaagagcgccggctttaccggagtgcgcctcggctggacagttgttccctctgagttaaagtattctgacgggacaggcgtaaaggcggactgggccagaatttccggcaccgtttttaacggcgcgtcgagcgtctctcaggcgggggggcttgccgcccttgacggcgagggcacagccgagatgcgcgccatgacggattatttccttgaaaacgcgcagttgataagaaaaactctggaaaaacagggcattgcctgctgcggaggcgacaactccccgtatatttgggcgcatttcccgggaaaagacagttgggacgttttttcggaaatactcgaaaaatgccgcgttcttaccactccgggatcgggattcgggcctgcaggcggatcgtttatgcggttttcagcattcggaaacgcggggcgacgtacaggaagcgtgcgaaagactgagttcgctctcgtgccgatctga

SEQ ID NO: 38406 - protein, 312 aa, Unknown
  Obtained from environmental sample
  DOMAIN (4)...(305): Aminotransferase class I and II
  misc_feature (1)..(312): Xaa is any amino acid
MFAADEIFISDGAKCDIGRLQLLFGSQAHPVIQDPSYPVYADGSVLLQAAGKWEGSGYEGITYLPCTSENGYFPDLSKLPKNSLVYFCSPNNPTGAVSNREQLKELVAAAIKKESLIIFDAAYSMYIRDDGLPKSVFEIEGAKTCAIEVNSFSKSAGFTGVRLGWTVVPSELKYSDGTGVKADWARISGTVFNGASSVSQAGGLAALDGEGTAEMRAMTDYFLENAQLIRKTLEKQGIACCGGDNSPYIWAHFPGKDSWDVFSEILEKCRVLTTPGSGFGPAGGSFMRFSAFGNAGRRTGSVRKTEFALVPI

SEQ ID NO: 38407 - DNA, 1581 bp, Unknown
  Obtained from environmental sample
  misc_feature (1)..(1581): n is a, c, g, or t
ttgcgtaaagtgtcaaaggtaaccgatgatttcatagacacgctggaggcttttgccaagcgcaccaaaaatttctcccctgaaggggtctgcctagacccattgccagacggtctcaccaaggttggctcgcaagcactggctgatttggatgccgccaaagactatatgaccaatcaaacccgccatctcgcagaccttgccgcatcagatgcttctacaagcataagccaggcaactgttattctggtggtggtgattctcatcgccattgctcttggcatattcctaaccctttccataaccgcccctctgtcaaagactgttggcatcctcggcaagatagagaaaggcgatatgaccgtccgcgtgaatttggaacgcggagacgagttcgggcagctatcaaaatcggtggacaacgttgcttccagactgcaaaccataatgaaagacttgcgcatggaatccgacagcctcgctggttctgccgaacagctttcggttataagcaagcagctcgtgacaaactccgaagagacagccaacaagagcaaggctgttcttggcgttgccgaggattgcagcaaaggcgttacctccatagcgagcacggctgaggaagcctccgcccagataagcgatgtggcaagctcggttgagcagatgactgtgaacataaacacaatggcgagcggcgcggaacaagcctccgcaaacgtgaacgatgtggcaaaagctgttgaccaagtcgcagagaacatcaacgcaatggcaagcgcagcagaagaggcttccgtgaatgccaacgaggtagcaggcgcggcagagcagatgtccacaaacatgaacaccatagccgctgcaatagaagagatgagcgcaagcataaaccaaatatctacaaatgcaagtgaagccaacaaggttgcaaaccaagccacagtcaaatctggcgatgccaccagcgttatgaacgaattgggagtggcggctaaggaaataggtcaggttaccgatgtgataaagaagatagccgacaaaaccaatcttctagcacttaacgccaccatagaagcagccagtgcaggcgaggcaggcaaaggctttgcggttgtggcaggcgaaataaaagagcttgcaaaccaaagtgcccaaagcgcagacgacatagcacggcgtatagaaggaatccagtctggcactagcaaggcagtggttgtgataaacgatgtttccgatatcatagtgaaaatcaaccaaagcgtggaagcaataaccaaccacgttacccagcaaaccaaggctagcaacgagatagcgaacaatgtttcgcaggcaaacacaggagccaagcgcgttgctggagccataggcgaggtagccaagggcagcaaagacatagcccgcaatgcaggtgaggcagccaagggagcaaacgtaattaaccagaacgttgcaggcatagctcagggcgcaaaagatagcgttcagggtgcaaagcaaatcaatcagggtgcaaacgagcttgcaaaaatagctggagaattgaagaatacgatgagtcagtttaaagtataa

SEQ ID NO: 38408 - protein, 526 aa, Unknown
  Obtained from environmental sample
  DOMAIN (79)...(148): HAMP domain
  misc_feature (1)..(526): Xaa is any amino acid
MRKVSKVTDDFIDTLEAFAKRTKNFSPEGVCLDPLPDGLTKVGSQALADLDAAKDYMTNQTRHLADLAASDASTSISQATVILVVVILIAIALGIFLTLSITAPLSKTVGILGKIEKGDMTVRVNLERGDEFGQLSKSVDNVASRLQTIMKDLRMESDSLAGSAEQLSVISKQLVTNSEETANKSKAVLGVAEDCSKGVTSIASTAEEASAQISDVASSVEQMTVNINTMASGAEQASANVNDVAKAVDQVAENINAMASAAEEASVNANEVAGAAEQMSTNMNTIAAAIEEMSASINQISTNASEANKVANQATVKSGDATSVMNELGVAAKEIGQVTDVIKKIADKTNLLALNATIEAASAGEAGKGFAVVAGEIKELANQSAQSADDIARRIEGIQSGTSKAVVVINDVSDIIVKINQSVEAITNHVTQQTKASNEIANNVSQANTGAKRVAGAIGEVAKGSKDIARNAGEAAKGANVINQNVAGIAQGAKDSVQGAKQINQGANELAKIAGELKNTMSQFKV

SEQ ID NO: 38409 - DNA, 459 bp, Unknown
  Obtained from environmental sample
  misc_feature (1)..(459): n is a, c, g, or t
atgcctgcaacgttctggttaattacgtttgctcccttggctgcctcacctgcattgcgggctatgtctttgctgcccttggctacctcgcctatggctccagcaacgcgcttggctcctgtgtttgcctgcgaaacattgttcgctatctcgttgctagccttggtttgctgggtaacgtggttggttattgcttccacgctttggttgattttcactatgatatcggaaacatcgtttatcacaaccactgccttgctagtgccagactggattccttctatacgccgtgctatgtcgtctgcgctttgggcactttggtttgcaagctcttttatttcgcctgccacaaccgcaaagcctttgcctgcctcgcctgcactggctgcttctatggtggcgttaagtgctagaagattggttttgtcggctatcttctttatcacatcggtaacctga

SEQ ID NO: 38410 - protein, 152 aa, Unknown
  Obtained from environmental sample
  SIGNAL (1)...(21)
  misc_feature (1)..(152): Xaa is any amino acid
MPATFWLITFAPLAASPALRAMSLLPLATSPMAPATRLAPVFACETLFAISLLALVCWVTWLVIASTLWLIFTMISETSFITTTALLVPDWIPSIRRAMSSALWALWFASSFISPATTAKPLPASPALAASMVALSARRLVLSAIFFITSVT

SEQ ID NO: 38411 - DNA, 981 bp, Unknown
  Obtained from environmental sample
  misc_feature (1)..(981): n is a, c, g, or t
gtgggtattatcgccaaatccgccactttaaaaaccaacgatacgttagctgcggcggacacggctttgtttacgccgctgcgcctgcccgagcctgtttattcagtcgctgtcagcgcgaatgcgaaaaaagacgaagataaactcggcgaattccttgtgcgcgccgctgaagaagacaaaaccttccgttatcactacaacaatgaaacaagggaaacagttatttcaggcatgggtgaattgcagatcaatattatattggacaagattaaggcaaaccagaaaatcgaagttgagacgcgcgttccaaaagtggcgtaccgcgagacaattaccaagaaagcaagcgccgaatacacccataaaaaacagtcgggcgggcacggtcagtacggcaaggtgttactcgaaattgcgccgttgccgcgcggcgagaaatatcaatttataaacgcgattttcggcggcgctatcccgaagaactacattcccggcgttgaaaagggcgtaattgaaggaatggcgcacggcactatggcaagttatcccgttgtagacgtggaagtaaaagtagtagacggcaaatatcacccggtagattccaatgaattgtcgttcaaacttgccgcgcgtaacgctttccgcgacgctatgaaacaggcaaatccgactcttcttgaaccggttatgaatctgacggtttttgtcgaagaanagtaccttggcgatgtaatgagcgacctttccggaaagcgcggcaagattctcggtcaggattcagccggcggcattgcggaagtaaaagcggaagttccaatgtcggaactcctgcgttactcgatagacttgcgttcaattacttcgggaacaggctctttcaatgtggacttcagtcactacgccccgatttcgggacgcaccgccgacgaagttgtgaaagcccgtgagtcgttcaaggtgcaggagtcggacgaataa

SEQ ID NO: 38412 - protein, 326 aa, Unknown
  Obtained from environmental sample
  DOMAIN (225)...(312): Elongation factor G C-terminus
  misc_feature (1)..(326): Xaa is any amino acid
MGIIAKSATLKTNDTLAAADTALFTPLRLPEPVYSVAVSANAKKDEDKLGEFLVRAAEEDKTFRYHYNNETRETVISGMGELQINIILDKIKANQKIEVETRVPKVAYRETITKKASAEYTHKKQSGGHGQYGKVLLEIAPLPRGEKYQFINAIFGGAIPKNYIPGVEKGVIEGMAHGTMASYPVVDVEVKVVDGKYHPVDSNELSFKLAARNAFRDAMKQANPTLLEPVMNLTVFVEEXYLGDVMSDLSGKRGKILGQDSAGGIAEVKAEVPMSELLRYSIDLRSITSGTGSFNVDFSHYAPISGRTADEVVKARESFKVQESDE

SEQ ID NO: 38413 - DNA, 336 bp, Unknown
  Obtained from environmental sample
  misc_feature (1)..(336): n is a, c, g, or t
ttgttacgtgataaagcaaaagcgcttgcggaagagaaaggaatgataaaagaatttaaccttcactgcctgatagaaagacttactccgattgtttttaagaaggtcaaaggctctgacaaggtaatttgcaccaacgtagatttttattcaggctttgtttacaaaatgctcggtatcccgcaagacttaaacaccccgattttcgccataagcagaatagccggatggtgcgcccaccgtttggaagaaattatcgctggcggtaggattatccgacccgcgtataaatgcgtgcagccccgtttaaaatataccgacgtaaacggacgctga

SEQ ID NO: 38414 - protein, 111 aa, Unknown
  Obtained from environmental sample
  misc_feature (1)..(111): Xaa is any amino acid
MLRDKAKALAEEKGMIKEFNLHCLIERLTPIVFKKVKGSDKVICTNVDFYSGFVYKMLGIPQDLNTPIFAISRIAGWCAHRLEEIIAGGRIIRPAYKCVQPRLKYTDVNGR

SEQ ID NO: 38415 - DNA, 1197 bp, Unknown
  Obtained from environmental sample
  misc_feature (1)..(1197): n is a, c, g, or t
atgtggaaatgtgaaatgacaaactgtaaaatgacggttattttagccgtttttatgctttttttccctcttttttccctatgggctgacgacagtcacgataactacggcgacatttcggattatttaaatggtatttacggaatcgacgacaacgcgggtttgactgcttttcctatattgaatattccgatgggaggacgttccgaaggcatggctggagcgttttccgcggtttcggacgatgtttcttttcttgaatttaacccggcaggctcatcaatgctggaaaaatcggaattggcgttctttcacaataactggatagcggacgtaaagatcgaggggatcgcctacgctacgcgttttgaaaattttggtcttgccgccggcgcgaaatggttgtacacgccttttacggagtacaatttttacggtgatagggtttcaaatggctactactctgaaggcgtggctgtcttaaacgcttcttataattttttctcagggtattatttttccgggttgtctttgggagtgaacgtgaagggcgctttccgtaccatgcccgactacacagatgataacgacaatataattaaagattcgggtctgtcccagtctgcggcaatggttatggcggatgtcggtctgcttacaagattcaatctgttaaaaggatacgcatcaagggataaaaacgcgtccattgccgtcgttattcgcaatcttggtccgcccgctcttgatgaacctctgccaacggtacttaatgcggcattttcgtataaacccatccgtccccttacccttgcctttgattttttgtaccctcttaatttgacggatatttccctttctgaatcgccttacggcgcgttaggtgtttccatcaatgttacaaactttttgtcaatgcgcacgggcgtaatggtaaaacccggaagcagccgcattaccgtaggcagcgcgattaacatgaataaaatttcttttgacataaactatacccttgatttgcttacccaattacaaccactaaacaggatcagccttgcggtgcgttttgatctaggcgacggaggccgcaaactgttatctgacaaagtggatgaactgtatcttttgggccttgacgcatattcacagggaaagcttgacgacgccaaattgtgctggaagaagctctcaagctaa

SEQ ID NO: 38416 - protein, 398 aa, Unknown
  Obtained from environmental sample
  SIGNAL (1)...(26)
  DOMAIN (12)...(333): Uncharacterised protein family (UPF0164)
  misc_feature (1)..(398): Xaa is any amino acid
MWKCEMTNCKMTVILAVFMLFFPLFSLWADDSHDNYGDISDYLNGIYGIDDNAGLTAFPILNIPMGGRSEGMAGAFSAVSDDVSFLEFNPAGSSMLEKSELAFFHNNWIADVKIEGIAYATRFENFGLAAGAKWLYTPFTEYNFYGDRVSNGYYSEGVAVLNASYNFFSGYYFSGLSLGVNVKGAFRTMPDYTDDNDNIIKDSGLSQSAAMVMADVGLLTRFNLLKGYASRDKNASIAVVIRNLGPPALDEPLPTVLNAAFSYKPIRPLTLAFDFLYPLNLTDISLSESPYGALGVSINVTNFLSMRTGVMVKPGSSRITVGSAINMNKISFDINYTLDLLTQLQPLNRISLAVRFDLGDGGRKLLSDKVDELYLLGLDAYSQGKLDDAKLCWKKLSS

SEQ ID NO: 38417 - DNA, 594 bp, Unknown
  Obtained from environmental sample
  misc_feature (1)..(594): n is a, c, g, or t
atgaaagagattttgtcccaagtggatcttatccgggaggcttttcattacaagagccgctttgagggttccaccatggtgtttaaaattgactgccccgtgaccgaagacccctgttttacatggctggtgaaggatctcgccctgctggcgcagaccggcttcagggtagttatagtgccgggggcaaaggaagctattgaccgggttttgcaggggcaaaagatagcttcatctttcatcgccgcgggcgattcgggggagcctttcaggattaccgacgctcaggcgatgccgtttgtggaaatggcggcgttccatgtggccacccgttttatgacctttctttccggcagccgtgtagacgcgattatcgggaattttgtccgggcgagggggttgggagtcatgaacggcgttgacatggggcataccggcactgttgacaaaattttcaaggaatcgataagccgtgtgcttaaccagggagcggttcccatactgccctgcataggctggagtccctcaggcaaacctacaatgtgtccagtgatgaaattgcccttgccgtatcgtcggcgctgggcgcgataa

SEQ ID NO: 38418 - protein, 197 aa, Unknown
  Obtained from environmental sample
  misc_feature (1)..(197): Xaa is any amino acid
MKEILSQVDLIREAFHYKSRFEGSTMVFKIDCPVTEDPCFTWLVKDLALLAQTGFRVVIVPGAKEAIDRVLQGQKIASSFIAAGDSGEPFRITDAQAMPFVEMAAFHVATRFMTFLSGSRVDAIIGNFVRARGLGVMNGVDMGHTGTVDKIFKESISRVLNQGAVPILPCIGWSPSGKPTMCPVMKLPLPYRRRWAR

SEQ ID NO: 38419 - DNA, 759 bp, Unknown
  Obtained from environmental sample
  misc_feature (1)..(759): n is a, c, g, or t
gtgtccagtgatgaaattgcccttgccgtatcgtcggcgctgggcgcgataaaattgttcattgtttcggtagacggaggactgcggcgggggaatttccttcttcccgaaagtattgaaaccagggacgatggcagtatagtacggcttaccccgcaggaagcgaaagcaattgttacggcttatactgcacaaaataccggcgttatgcccgcggcattacgggaacttaaactggccctgcgggcatcacgggcaggggttgaccgtgtgcatattattgacggcagagaagagggggcgattctcaaagaactgttttccaacctcggcgcgggaactatgatctatgccgatgaatacgaatcaatacggcctttccgcagcggagatatgtcggacatcctgcgcctcatggaacctttgatgcagacaggaatccttatccggcgcacagcggagcagattcaggagaaaaaggacgattatgttgtttttgaaattgacggttcggttcatgcctgcgccgccctgtatgactggggtgagaaccagggggaaattgccgctgttgcgactgaacccctctactccgggatgaatctgggccgccgtatcgtcagttacttagtggaaaaggcccgcaaaaaccgcatgaaccgggtatttatcctgaccacccaaacccaggactggtttgaatcgctcggtttccgcgaggctccggtagacagccgccggaacgctcggccaatctga

SEQ ID NO: 38420 - protein, 252 aa, Unknown
  Obtained from environmental sample
  DOMAIN (164)...(239): Acetyltransferase (GNAT) family
  misc_feature (1)..(252): Xaa is any amino acid
MSSDEIALAVSSALGAIKLFIVSVDGGLRRGNFLLPESIETRDDGSIVRLTPQEAKAIVTAYTAQNTGVMPAALRELKLALRASRAGVDRVHIIDGREEGAILKELFSNLGAGTMIYADEYESIRPFRSGDMSDILRLMEPLMQTGILIRRTAEQIQEKKDDYVVFEIDGSVHACAALYDWGENQGEIAAVATEPLYSGMNLGRRIVSYLVEKARKNRMNRVFILTTQTQDWFESLGFREAPVDSRRNARPI

SEQ ID NO: 38421 - DNA, 765 bp, Unknown
  Obtained from environmental sample
  misc_feature (1)..(765): n is a, c, g, or t
ttgcatttggctttacggccangctttctttacagaatattcagaaacgattccataattgcagctttgaccataataggctcattgtgtttggtgttcttggcaaattggattgtgttttgcgtactttgggatttgtatctgggcataagacggcttctaggcaaaagaaaactcgcaaacaaaaggctccggatgcgaaaggaacccttgttcgcaagcggggtagcagctttaacgctggcattctttttaataggcggcccgttgcattccaattttctgatggtaaccgtaaaagaaactttgcaaaccgcgccaaaaaaaacactgcgaatagccctgtttagcgatatacatttcaacgctctttttcaaaaaagcaaattggaaaaaatagtggattcactcaggattttgcgaccagatgctatatttttctcaggcgatttagccgatctcccaaaagataaattgcaagaaagaggctatgattccctgttcagccaaataagagcgcctctcggtttttatgtaaccacgggcaaccacgaatcctatatgaacccaagcgggaaaactattgaatggatgcaaagctttgacaacgttacgctcatgatggatagcaccgtttgcaacgattttttctgcgtgacggggcgtttagaccatcaatacgcagaccaacattccgagagaggcagaactccgctctcggaactcatggccagagaacaactctgtcccttggtttttggttga

SEQ ID NO: 38422 - protein, 254 aa, Unknown
  Obtained from environmental sample
  misc_feature (1)..(254): Xaa is any amino acid
MHLALRPXFLYRIFRNDSIIAALTIIGSLCLVFLANWIVFCVLWDLYLGIRRLLGKRKLANKRLRMRKEPLFASGVAALTLAFFLIGGPLHSNFLMVTVKETLQTAPKKTLRIALFSDIHFNALFQKSKLEKIVDSLRILRPDAIFFSGDLADLPKDKLQERGYDSLFSQIRAPLGFYVTTGNHESYMNPSGKTIEWMQSFDNVTLMMDSTVCNDFFCVTGRLDHQYADQHSERGRTPLSELMAREQLCPLVFG

SEQ ID NO: 38423 - DNA, 585 bp, Unknown
  Obtained from environmental sample
  misc_feature (1)..(585): n is a, c, g, or t
atgcctatgagcgacgggattctgatagacataggcggcggcagcacggaactcgttatatgcaagggcgggcatatcgacaaggccgcgtccatccccataggagcgctgggtatgtacacaaagtacgtcagcgccgttatccccaccaaagcgcagagcgcgaaaatagctcttgaaacgctaaaaaaactggaagtgataaaaggcaaatcgctccacacaatgtgcggcgttggcggaacgatgcgggcgctctacaaattgaacaacgcgatctttgaagcgccgccggacaaccgcaccgtgctcgtgaaaaacgcgaagaagatactaaatcttatagccgccgacactaagcttatggtaggcaggatactgcaaatagccccggaacgcattcacacaataacgccgggactgatcatcctgaatacgatcataaaaaagtataattgcaaaacaatttccgtcagcgaatccggagtgcgggaggggtatctgataaggaacgtgctgcatagagacataggaaaaacaggatcgccggtcacgcttacgacttccggttgcaaggggtcttaa

SEQ ID NO: 38424 - protein, 194 aa, Unknown
  Obtained from environmental sample
  misc_feature (1)..(194): Xaa is any amino acid
MPMSDGILIDIGGGSTELVICKGGHIDKAASIPIGALGMYTKYVSAVIPTKAQSAKIALETLKKLEVIKGKSLHTMCGVGGTMRALYKLNNAIFEAPPDNRTVLVKNAKKILNLIAADTKLMVGRILQIAPERIHTITPGLIILNTIIKKYNCKTISVSESGVREGYLIRNVLHRDIGKTGSPVTLTTSGCKGS

SEQ ID NO: 38425 - DNA, 1635 bp, Unknown
  Obtained from environmental sample
  misc_feature (1)..(1635): n is a, c, g, or t
atgagtaagagggtttgggttctcgtctgcacgacgttgctgttcctttgcgcgtggagtgccggggccgagcagttggagataaccggcgacgtgcgtatgcgcgccgaaccggataaatccgccgagggcataagcattgtgcccaagggctctatggtcccgtttatagaccggcaagataattggtacaaaatagagtacaacggcgaacaaggctggatattcagcaaatacgcccgccagcgcgccaacgccggagagatcttcaccaaacaagacgtgtcgatgctgccgcccgtccccgtcggcggcgacggggaaccggatcagttcgcgcggataatagccgacggcacccccatccttgaatacataggcgaagacgcgcccgtcctctacacggcgcggagcggcgagtcgttccccctgatcggcgagggcgaggcgtggtgcaaaatcgtctacaaagataccacgggctgggtcaaaaagagcggcgtggaaatatcagactccaaaccgtccaaaaaatacgcgcaagtcaaacaggacaacacgctcatccgctattacttagacccgcaagcgccatacctctacaaggcgcgtaaaggcgactggttcgtcttagtcgacgtgggcaagagcggcacttggtgcaaggtcatttacaaagataccaccggctgggtcttagtatccgatgtggatatattaaccaccgaacccaccaaagccaccatcgtcgtcgaagaggctaaaacactcttcttcggcctgctggctttgggcatagtaattttgatagcctccgtcatcataacgctccgccatttaaaggccgagcgtatgcgtaatatctacgtgcaaaagaacgccctcattctggcaaaggagagcaaacacgtccagtacatgcttacaaacgccacggaaacaatggagcgctgcttctccgagatcggcttcaaagtaatcgtgaccaaggattccgtcaccgcccgcaatattattgagaacagtatgcccgacctcgtcctagtcgactggaactttgagacggcaatattagctaaaatcgacaacctcttcgcgcgtttagcggtacagaccatgccgcacttcctgttctacaacgtgcccgacccgacgtccgtgccgccgtgcaaggcgttgcgcaacgtcaactttctaggcatatcggttgttgaccgcgacatcttcaagatagtgacgccgctattggtccacaaggccgaaacggagcaatcagccaaagacatacagaaaggcgtccaacgttgcgccctggagggcgagatcgccggcggaaacctgctggaagtcctgcaattcatagagatcggtagcaaaaccggttgccttatggtcgcgataggagaacctttcggcttggtctacttcaacgaggggcggatcacctacgccatagcgaaaggcccggacggcgggcccatacacggcgtggaaggcgtgtacgagatactcaatcagactatgggcaagttccgcttcatcacaaacaaacagccncaagtggcgaacctcaatcttcctacgcntgtcgtgcttatggagtggactaaagagaaagacgagtcgcacaaataa

SEQ ID NO: 38426 - protein, 544 aa, Unknown
  Obtained from environmental sample
  SIGNAL (1)...(23)
  DOMAIN (30)...(81): Bacterial SH3 domain
  misc_feature (1)..(544): Xaa is any amino acid
MSKRVWVLVCTTLLFLCAWSAGAEQLEITGDVRMRAEPDKSAEGISIVPKGSMVPFIDRQDNWYKIEYNGEQGWIFSKYARQRANAGEIFTKQDVSMLPPVPVGGDGEPDQFARIIADGTPILEYIGEDAPVLYTARSGESFPLIGEGEAWCKIVYKDTTGWVKKSGVEISDSKPSKKYAQVKQDNTLIRYYLDPQAPYLYKARKGDWFVLVDVGKSGTWCKVIYKDTTGWVLVSDVDILTTEPTKATIVVEEAKTLFFGLLALGIVILIASVIITLRHLKAERMRNIYVQKNALILAKESKHVQYMLTNATETMERCFSEIGFKVIVTKDSVTARNIIENSMPDLVLVDWNFETAILAKIDNLFARLAVQTMPHFLFYNVPDPTSVPPCKALRNVNFLGISVVDRDIFKIVTPLLVHKAETEQSAKDIQKGVQRCALEGEIAGGNLLEVLQFIEIGSKTGCLMVAIGEPFGLVYFNEGRITYAIAKGPDGGPIHGVEGVYEILNQTMGKFRFITNKQPQVANLNLPTXVVLMEWTKEKDESHK

SEQ ID NO: 38427 - DNA, 849 bp, Unknown
  Obtained from environmental sample
  misc_feature (1)..(849): n is a, c, g, or t
atggccctttcggaaggggtttaccgcgccggttccgcttccgtaaacgcgggaggaatactaaaggccgcggcccgttttgccgtaacccgcgccggccttcgcgatcttgtccgcgcacaagctctttcagctaacggcggcaacgccgcgtcgcccctcagccttatacgctctgtttctgatattgcctcttttcttgacagtaatcccaacaccgccatgtggctcgcggataccctgccgcaggaacccgcggctctgcttgtttcctcttcctggtatcaaaaccagcttgccggacacgccgggatgattgatcaggaagaacttcctgtccctcaggcggaaccggttatggagccgcctttcccgcagatacgggtggcgggccttatgttcaccggcataaatggggggagtctcgcgcagggggaaccgtttctccatctcgtgccgatagaaccttttatgatatgctccacggtgattccctcgccggcttttgcggattttcttgacgcgaacccccagtggagccccgatcaaaaggaaacgcttgaaagccgggggctggtaacagacgaatacctggccgactttgaacaggggacgggcagggtgattaccggcgtcagcgcggtatcatggtacgcggcgcgcgcctattgcgaatggcttggaacaaaactccccgattcgctttccggctacacagtgcgtttgccatcggaagaggaatgggaacacngcggtaaaatcaacgaagttgacgcttttcaggggcagcgcgtgggaatggtgcgggaatccctattcgcatctgcccttcatttccgcgccgcctga

SEQ ID NO: 38428 - protein, 282 aa, Unknown
  Obtained from environmental sample
  DOMAIN (128)...(282): Domain of unknown function (DUF323)
  misc_feature (1)..(282): Xaa is any amino acid
MALSEGVYRAGSASVNAGGILKAAARFAVTRAGLRDLVRAQALSANGGNAASPLSLIRSVSDIASFLDSNPNTAMWLADTLPQEPAALLVSSSWYQNQLAGHAGMIDQEELPVPQAEPVMEPPFPQIRVAGLMFTGINGGSLAQGEPFLHLVPIEPFMICSTVIPSPAFADFLDANPQWSPDQKETLESRGLVTDEYLADFEQGTGRVITGVSAVSWYAARAYCEWLGTKLPDSLSGYTVRLPSEEEWEHXGKINEVDAFQGQRVGMVRESLFASALHFRAA

SEQ ID NO: 38429 - DNA, 459 bp, Unknown
  Obtained from environmental sample
  misc_feature (1)..(459): n is a, c, g, or t
gtggcggagggcgttaatgtcattgccgtaaaccggaaggcgcggcatgattattcggttgacgaaacctacgagtgcggcatggaactgcttggcactgaggttaaatccttccgtgacggaaaaatttcattccccgacgcatgggccgaggtgatcgccggagaggtgtggctcaggtctttgcgcgtggcggagaatcctttttcatcagtattcaaccacgaccccgaccgcaaaaaacggcttctcctcaagagggacgagatcaagcggatacaccgcaaggtcgaggaaaaaggctatacccttatccccttgtcgttttacttcaaaaagggaagggtaaaggtggagcttggcctgtgcaaagggaaaaaggtttatgacaaacgcgccgacattcgggagcgggatgtaaagagggatatagcgcgcgagtttagaaataacaaataa

SEQ ID NO: 38430 - protein, 152 aa, Unknown
  Obtained from environmental sample
  DOMAIN (6)...(73): SmpB protein
  misc_feature (1)..(152): Xaa is any amino acid
MAEGVNVIAVNRKARHDYSVDETYECGMELLGTEVKSFRDGKISFPDAWAEVIAGEVWLRSLRVAENPFSSVFNHDPDRKKRLLLKRDEIKRIHRKVEEKGYTLIPLSFYFKKGRVKVELGLCKGKKVYDKRADIRERDVKRDIAREFRNNK

SEQ ID NO: 38431 - DNA, 360 bp, Unknown
  Obtained from environmental sample
  misc_feature (1)..(360): n is a, c, g, or t
ttgatcagatcggcacgagtacggttcatcggtatgctcgcctcggcaagtctcggcgcgccagcgcaaggcggaacaagacccggaatgtacgagcctattcacggctccgcccccgacatcgcgggaaaagacatagcgaatccgctggcaacaattctttcggcggcgatgatgctccgctactctttcggtcttgagaaagaagcggctgccattgaaacagcggtcaacaatgtgctggatcagggaatgcggacaggagacatcgcaagccgaagcacggcaaacagcggtgaaaaaattgtagggacaaaagcaatgggcgaagctgtgctcaaagcgttggagaaattatga

SEQ ID NO: 38432 - protein, 119 aa, Unknown
  Obtained from environmental sample
  SIGNAL (1)...(24)
  DOMAIN (1)...(112): Isocitrate/isopropylmalate dehydrogenase
  misc_feature (1)..(119): Xaa is any amino acid
MIRSARVRFIGMLASASLGAPAQGGTRPGMYEPIHGSAPDIAGKDIANPLATILSAAMMLRYSFGLEKEAAAIETAVNNVLDQGMRTGDIASRSTANSGEKIVGTKAMGEAVLKALEKL

SEQ ID NO: 38433 - DNA, 798 bp, Unknown
  Obtained from environmental sample
  misc_feature (1)..(798): n is a, c, g, or t
atgggtttgtattacctgtggcggactcacttgatataccaacttatccccaataccgccgttgtggtcaggctggaattctttacggtctattttatgatactggcccttatggcttatacggacaaactctgcaatttgcgttattccattgtaacaaaagtatacggtatcttttgtacagttctggcgttgtcccagatatttttttcacggccttacggaagcgaaacattgattgtctggcagcttgtcagtattccggcaatgatatggattcttgtttataacattattttcccgattatccgtgaattgaagaatggcaaaaaattcattgatatattgattaacacttatccgggaaatctgtcggtcgttgtcttcattcaggtgcttaccgtagtaatcgaccttattgattcttttgccctgcattactcgctggatttaaccagttacagcatggttatcttcgcggtgtcggttacgcttatgttattccggatgtccgtcataaaagacagggaactaaaagaaaaaagcgctctgctggaaaaaacaaccgatcacgcctccgcgcgtgaaaaggtatttatttcttacggattaaccgaacgcgaaagggaaattgcccgattaatggcggaaggccttgacaacacggacatcgcggagcgtctttacttatccaacagcaccgtagggtttcacataacgaatattttccgcaaattcggcatcatagacggcaaaaacaagggacgggcgatgttcttggtaaaattgttgaattaa

SEQ ID NO: 38434 - protein, 265 aa, Unknown
  Obtained from environmental sample
  DOMAIN (201)...(261): Bacterial regulatory proteins, luxR family
  misc_feature (1)..(265): Xaa is any amino acid
MGLYYLWRTHLIYQLIPNTAVVVRLEFFTVYFMILALMAYTDKLCNLRYSIVTKVYGIFCTVLALSQIFFSRPYGSETLIVWQLVSIPAMIWILVYNIIFPIIRELKNGKKFIDILINTYPGNLSVVVFIQVLTVVIDLIDSFALHYSLDLTSYSMVIFAVSVTLMLFRMSVIKDRELKEKSALLEKTTDHASAREKVFISYGLTEREREIARLMAEGLDNTDIAERLYLSNSTVGFHITNIFRKFGIIDGKNKGRAMFLVKLLN

SEQ ID NO: 38435 - DNA, 1008 bp, Unknown
  Obtained from environmental sample
  misc_feature (1)..(1008): n is a, c, g, or t
ttggggcgacttcaaaaagccgcgcagcagggcgaaaaactaaaggccaccatgatgggccttggcaagctgggtacatattcaggcatggcctttgggggcctcgccgccgccactggggttcatcaaatcgttaatggcctcgccgatgcccaggagggctttaacaagatcaaagtcctcagtggcaaaagcacagatgaaatggaaaggttcaggcgcganatatacgccatcgcaagcgaaaccgcacgggggccagaagaaatcctagccgccgccattgacaaagtgggcgaggggttgagcgacaaagacatctttgccacgctccgcaaagaaggcctgtatgcaaccgcttcattttcaaaaaacatgggtgacataagcgcggcaacgctaaaaatgagccgcctgatgaaaatggatttagacacggcaacgggtgcgtttgctggcatccacgaaataatgaaaggcgagggcaagctagactttgggggcttccttggcgcgtccgagggcattatgcgaaacgcgggtgccataatgggcagcggaacgggcaagggcaaggacggcatcatcgaactggcagccgccgccaagatagccagccgcaccatgagcgcagacgaggccaacgccagcattgagtctttcttttctgacctgatgaaatcaaagacagagggcagcttagaaaaagtggcagggatagaccttgaaaccttgatcgcacaggcaaaggcaaacggcaacaaagacggcggcgcgataatgtatatcgttgacaaggttatgaaagccacggatggaaacgacctagccttgggcaaaatattcaaaaatgattcaacccgcaatttcatcagagcgatcaaggccggacgcgaggacttcaaaaaagaggtgaaaagcgcattgggggccagccacgaccaagccaccaaagacgcgaaaactgccacgatggcaagggcatggaatttggcagtggctacatag

SEQ ID NO: 38436 - protein, 335 aa, Unknown
  Obtained from environmental sample
  misc_feature (1)..(335): Xaa is any amino acid
MGRLQKAAQQGEKLKATMMGLGKLGTYSGMAFGGLAAATGVHQIVNGLADAQEGFNKIKVLSGKSTDEMERFRRXIYAIASETARGPEEILAAAIDKVGEGLSDKDIFATLRKEGLYATASFSKNMGDISAATLKMSRLMKMDLDTATGAFAGIHEIMKGEGKLDFGGFLGASEGIMRNAGAIMGSGTGKGKDGIIELAAAAKIASRTMSADEANASIESFFSDLMKSKTEGSLEKVAGIDLETLIAQAKANGNKDGGAIMYIVDKVMKATDGNDLALGKIFKNDSTRNFIRAIKAGREDFKKEVKSALGASHDQATKDAKTATMARAWNLAVAT

SEQ ID NO: 38437 - DNA, 480 bp, Unknown
  Obtained from environmental sample
  misc_feature (1)..(480): n is a, c, g, or t
gtgcttgaccgtttctgcctctgtctgcgtaatttcggcatacgacacctgataagggccacaggcgataatccctttgtttttgctgacgcggcctatgccattataaccgagggattgacccttggcgcagactacgccggatacagcggcctccctcttggcgcgggggttgaatcggtaaacgcaaaagccctgctgctcgccggaactgaagcagtctcccaatatgatcgtgaacacgtctgtccctacttgtatacccaccctgagaaatttctccttcaccgtccgcttgcccctcaagcctggcaaggctctggaattcacctaacggtagacactcaacaggactacgaacaggcgcaggctttgtacgccgcgctggatcgtcttgaaaacaccggcaagctgtcagaaggagatcgatacaagggagaggtgataatcagtgcctatactaattgttccagcctgtga

SEQ ID NO: 38438 - protein, 159 aa, Unknown
  Obtained from environmental sample
  misc_feature (1)..(159): Xaa is any amino acid
MLDRFCLCLRNFGIRHLIRATGDNPFVFADAAYAIITEGLTLGADYAGYSGLPLGAGVESVNAKALLLAGTEAVSQYDREHVCPYLYTHPEKFLLHRPLAPQAWQGSGIHLTVDTQQDYEQAQALYAALDRLENTGKLSEGDRYKGEVIISAYTNCSSL

SEQ ID NO: 38439 - DNA, 639 bp, Unknown
  Obtained from environmental sample
  misc_feature (1)..(639): n is a, c, g, or t
gtgtactggtataccaaagcggcggaacagggagatgctttagcgcaatatcgacttggattttgttatgatagaggacaaggcgtacaaaaagattttgaaaaagcggcgtactggtacatcaagtcagcggaacagggttatcttgttgcgcaagatagcctgggattttgttatcttaatggaaaaggagtgcctaaggatatcgaaaaagcaatgtactggtacaccatggcggcggaacagggagatcttaacgcacaatgcattcttggatgttgttatgaaaaaggagaaggcgtaccacaggattacgaaaaggcagtgtactggtacaccagggcggcggaagatggaattgattcagcgcaattcaacctttcgttactttattataatggacaaggcgttccgcaggattacgaaaaagcggtggactggttgaccaagtcagcggaacagggaaatattggagcgcagcttgttcttggattatgttatatgcagggacaaggagcgcagcaggatcacgaaaaagcggcgtactggtttgccaagtcaatggaaaagggagataatcaggcgcaggagttcttaaatcaattagaggcaatacagagtgaagaaaataatgcctga

SEQ ID NO: 38440 - protein, 212 aa, Unknown
  Obtained from environmental sample
  DOMAIN (157)...(192): Sel1 repeat
  misc_feature (1)..(212): Xaa is any amino acid
MYWYTKAAEQGDALAQYRLGFCYDRGQGVQKDFEKAAYWYIKSAEQGYLVAQDSLGFCYLNGKGVPKDIEKAMYWYTMAAEQGDLNAQCILGCCYEKGEGVPQDYEKAVYWYTRAAEDGIDSAQFNLSLLYYNGQGVPQDYEKAVDWLTKSAEQGNIGAQLVLGLCYMQGQGAQQDHEKAAYWFAKSMEKGDNQAQEFLNQLEAIQSEENNA

SEQ ID NO: 38441 - DNA, 912 bp, Unknown
  Obtained from environmental sample
  misc_feature (1)..(912): n is a, c, g, or t
gtggaaatggaaacgcagattattgatttagcctcaggcggcggtacgcaaattttggctggcggggctaccacggaaaccagcgcgaactttaccggagggcttctgcaaatccacgagcaggtcgcgggctgggaaataacgagcaaacttggtacgatctcgggcgaggcggacatctacatcgcgcagaaagacgggcagaaaggcatcgtcaaatattaccggagcaccaccaggcccaagacagaaattctcgaaaaacttaaaaagcttaaccacccggacatcgtaaacatattcgattttggcctgtacaatgaccgcttctacgaaataatggagtacgccgaaggcggggctttggatacacgtaacgctgacggctcttaccgctaccttccgctttccgaagaaaaagtagaaggcatttgcaaagaagtaatcaactcttttaaaacgtgccacgaaaaaaacattatccaccgggacattaaacccgcgaacatttattatcgcacgctggaagttgaggaaatcgacggcggcgaaggagaggggaaaaaaactatttaccggggcgatgatgtggttatcgcggactttggaatttccagcgtcatggatgatgcgcagcagttccacaaaacccgcaccggttcccgtaccacgggctatgccgcgccggaagtgctttccggcattatcagtcccaaaatggattactatgcgctgggcatcaccctgtgggaactgcttaccggcaaagacccttttacattagacaacggcnagcgccgcantgacgcgcacctgatacgcgacaccattgaaggtagaattgccgacgacattttnaagcaggaaaccagggtaagccggaaaaggaacgccttatccgcgggcttttaa

SEQ ID NO: 38442 - protein, 303 aa, Unknown
  Obtained from environmental sample
  DOMAIN (45)...(303): Protein tyrosine kinase
  misc_feature (1)..(303): Xaa is any amino acid
MEMETQIIDLASGGGTQILAGGATTETSANFTGGLLQIHEQVAGWEITSKLGTISGEADIYIAQKDGQKGIVKYYRSTTRPKTEILEKLKKLNHPDIVNIFDFGLYNDRFYEIMEYAEGGALDTRNADGSYRYLPLSEEKVEGICKEVINSFKTCHEKNIIHRDIKPANIYYRTLEVEEIDGGEGEGKKTIYRGDDVVIADFGISSVMDDAQQFHKTRTGSRTTGYAAPEVLSGIISPKMDYYALGITLWELLTGKDPFTLDNGXRRXDAHLIRDTIEGRIADDIXKQETRVSRKRNALSAGF

SEQ ID NO: 38443 - DNA, 927 bp, Unknown
  Obtained from environmental sample
  misc_feature (1)..(927): n is a, c, g, or t
ttggccgagacacgccggatgaaattttacaatatgatcaacacatggaacgcgtaccagtgttttattacctttatctggtcgcgcgcggcgtctcttacatactgcggacagcgcaacggttacggttaccgcgacactgtgcaggatattcagggcatcatccaccttgatccgaaaatggcccttgaaaagatcaagttcatgatttctgcgcaggtaagccacggcggcgcgctcccgctggtaaagtacgaccataacccgggacatgaggacaagccagaagacgaatcctaccgcaagaataccgggcatccctcataccgcgccgatgacgcgctgtggctgtttcccactgtctggaaatatgtcgcggaaacaggcgacacctgtctgttagacgaaaaaatatcctatgcggacaagggcaaggacaccgtattcaaccatcttaaaaaagcaatcggcttttcgcttaacaacctgggaatacacggactgcccgcggggcttcacgcggactggaacgactgcctccgtcttggggcaaagggcgtttccgtatttgtcgcgttccagttgtactacgcgtttgagatcatgatccgtttcgctaaattcaaaaaagattccgccacagagcaggaaatgacgaaacaaaaaaaccgttttggaaaaatcgttgaaaagtattgctggaaagacgaccgctttgtgcgcggcatcaccgaacacgatgttacagtaggaaagaaagacgacccggaagcgaacatctggcttaacccgcagagttgggcggtaatcagcggctatgctgatgaaaagcgcggcaagcagatacttgatttagtctacaagaaactcaacacaaaatacggagcgcgtcttatgtccccatcttaccgtaagcacgctttttga

SEQ ID NO: 38444 - protein, 308 aa, Unknown
  Obtained from environmental sample
  misc_feature (1)..(308): Xaa is any amino acid
MAETRRMKFYNMINTWNAYQCFITFIWSRAASLTYCGQRNGYGYRDTVQDIQGIIHLDPKMALEKIKFMISAQVSHGGALPLVKYDHNPGHEDKPEDESYRKNTGHPSYRADDALWLFPTVWKYVAETGDTCLLDEKISYADKGKDTVFNHLKKAIGFSLNNLGIHGLPAGLHADWNDCLRLGAKGVSVFVAFQLYYAFEIMIRFAKFKKDSATEQEMTKQKNRFGKIVEKYCWKDDRFVRGITEHDVTVGKKDDPEANIWLNPQSWAVISGYADEKRGKQILDLVYKKLNTKYGARLMSPSYRKHAF

SEQ ID NO: 38445 - DNA, 1539 bp, Unknown
  Obtained from environmental sample
  misc_feature (1)..(1539): n is a, c, g, or t
ttgatatgcgggcacggatttttggaaaattacaggaaaatcgtccgaaacgacattggcgcgataacaaaatccggcaaaacattaaaggacgtttataacgtaatattttcgcatcgcggccttatcgcgtatgaaaggcttgttgattatgaaattgacgcggtaacctatagagagcatgatttagagataagggcattcgcggcgtatctaaaacatacctgccccgatttagccgggagatacatagctgttgaccttcccaacgcgcccaactttttaattgcgttttggggaattttaatgagcggaaacaaaccgtatctggttaattcattttatcccccggaactcagaatatccctgttaaaaaggcttgatgtcaggcttgtgataacgggcgctgccgattatgccggttttacggttgtaaacatcgacggcattgaaaatgccgataccttttacaaaaaatgcccacaaattaccgatgaattttggcaggacgagtttgcgctttcatctaccctaacgggactggaggcaaaaatatgcgtgtttgacggcgaggctgttgtaaatcaaatcctgaacgccaaagaaatcctcagaaaaaatagctggctcatgaacgactaccaaaaaagaatcaaggtcgccatgattctgccgctcttccacatctttggaataatggccgcttatttttggtttgccttttttgggcgcacaatggtttttttcaaggataattcgccggaaacgattagagggacgataaacaggcacaaggtaacgcatatttttgcgcccccgctcttgttccacaaattatataaaggaataatgaacggtatttcacaggaaagcgaaaagttgaaaaataagttccaaaagggggtaaaacttgcctttgccctgcaaaacatttttccttcgctgggtgttaagatttcaaaaagactttttagggaagcgcttgccgcctcgttcggaccgtcgccgatgtatatgatttcgggcggcgcacatatagacgccgaagcgcttaaaatcatcaactgtattggctacccgctttttaacggttacggcacgacggaaacggcgatttccggggcaaacatggcgaaaaagataagccttagaatcgacggctcgattgggagtcctttcaaaaacgcaaattacacgtttgacggggacggaacgctgattgtatcgggcagctcgatttgcaaacgaattatcacgctggagggagaggaaagcggctttagcagcataaaaacaaacgatttagtaaaaataatagacggccggtattttgtctccggacgaaaaagcgacctctttataggcgaaaacggcgaaaacataagccccgacgcgatacaaaacgagttgaaggtagaaaacgcaaacagattttgtgttttagagttaaacggaaggctttctctcattttagagtataacgaaaggctgctgagcgcgacaattgctaatgaaattgagtatataaaaaatgcttag

SEQ ID NO: 38446 - protein, 512 aa, Unknown
  Obtained from environmental sample
  DOMAIN (57)...(481): AMP-binding enzyme
  misc_feature (1)..(512): Xaa is any amino acid
MICGHGFLENYRKIVRNDIGAITKSGKTLKDVYNVIFSHRGLIAYERLVDYEIDAVTYREHDLEIRAFAAYLKHTCPDLAGRYIAVDLPNAPNFLIAFWGILMSGNKPYLVNSFYPPELRISLLKRLDVRLVITGAADYAGFTVVNIDGIENADTFYKKCPQITDEFWQDEFALSSTLTGLEAKICVFDGEAVVNQILNAKEILRKNSWLMNDYQKRIKVAMILPLFHIFGIMAAYFWFAFFGRTMVFFKDNSPETIRGTINRHKVTHIFAPPLLFHKLYKGIMNGISQESEKLKNKFQKGVKLAFALQNIFPSLGVKISKRLFREALAASFGPSPMYMISGGAHIDAEALKIINCIGYPLFNGYGTTETAISGANMAKKISLRIDGSIGSPFKNANYTFDGDGTLIVSGSSICKRIITLEGEESGFSSIKTNDLVKIIDGRYFVSGRKSDLFIGENGENISPDAIQNELKVENANRFCVLELNGRLSLILEYNERLLSATIANEIEYIKNA

SEQ ID NO: 38447 - DNA, 438 bp, Unknown
  Obtained from environmental sample
  misc_feature (1)..(438): n is a, c, g, or t
ttgggttttgatatagttggaatacgttccttccaccatgacgaattcgcaaatgtggaatacgaaaaattaataaaaaacataggcggcgatgttgcgattaatatcgccaacgtacagcattttgaagaagcgaatctgttaaacacaataaaacccgatcttttccttggacactggaacggcaactctaccgcgtcaaagatgggcataccctctcatgtaatttacaacacagggcttgcatacatcgggtatcgcggcgtgtttgaactggcgcggcggttgtatcgtcaaatgtcaaatcccgcttttaacaaagctttgagtaagtataccaagctgccctacaagaaagattggtatggcaagaatccgtacagctacattaaatcgaatcttgacattcccgcagattacaaggagggaaaaaaatga

SEQ ID NO: 38448 - protein, 145 aa, Unknown
  Obtained from environmental sample
  misc_feature (1)..(145): Xaa is any amino acid
MGFDIVGIRSFHHDEFANVEYEKLIKNIGGDVAINIANVQHFEEANLLNTIKPDLFLGHWNGNSTASKMGIPSHVIYNTGLAYIGYRGVFELARRLYRQMSNPAFNKALSKYTKLPYKKDWYGKNPYSYIKSNLDIPADYKEGKK

SEQ ID NO: 38449 - DNA, 774 bp, Unknown
  Obtained from environmental sample
  misc_feature (1)..(774): n is a, c, g, or t
atgcccctaatcggctttgtgatggttatcggcagcgtcatcggcggctacatgatgcaccacggcaagctggccgtcctttggcagcccaacgaagtggtcatcatctgcggggcggctttcggctcctttctcatcgccaaccccatgtccctcatcaaggatgccttgaagggcatccccaaagttttcttcggcggcgaactcaagaagcagcagttcatcgatatcctgctcctgatgttcgaattcctgtccatagcccgccgcgaaggcatgctggccctggaagaacacgccaacaagcctgaaagctccagcattttcggcaaatacccctccattgtcagaaaccaccacttaagggatttcctggccgacaacctcaaggtctttgtgagcggcaacattgagccctatgaatttgaaaacctcatggacatagacaccgagatccacgagcaccacggcggcctggtgccgacggccttgaccacagtctccgactccctgcccggcctgggcatcgtggccgcggtcttgggcatcatcaccaccatgggcctcatgaccgaacccccggaaatcctgggggccagcgtgggcgcggccctctgcggcaccttcctgggccttctgctcagctacggctacatggcccccatggccaagtgcctggacaaccaggcccaaggatttcgactgcctcctccaggtcgccaaatcccgtcctggccgccttcgccaaaggcatgccgcccgtcctggccatag

SEQ ID NO: 38450 - protein, 257 aa, Unknown
  Obtained from environmental sample
  misc_feature (1)..(257): Xaa is any amino acid
MPLIGFVMVIGSVIGGYMMHHGKLAVLWQPNEVVIICGAAFGSFLIANPMSLIKDALKGIPKVFFGGELKKQQFIDILLLMFEFLSIARREGMLALEEHANKPESSSIFGKYPSIVRNHHLRDFLADNLKVFVSGNIEPYEFENLMDIDTEIHEHHGGLVPTALTTVSDSLPGLGIVAAVLGIITTMGLMTEPPEILGASVGAALCGTFLGLLLSYGYMAPMAKCLDNQAQGFRLPPPGRQIPSWPPSPKACRPSWP

SEQ ID NO: 38451 - DNA, 387 bp, Unknown
  Obtained from environmental sample
  misc_feature (1)..(387): n is a, c, g, or t
atggccgaggggctgcgcctggcccggcacgacatttcctccaccaacttcgccaactcggatacccccggtttccgggccaagcacctccggtttgaggaagtcctggcccggcacctgacccggtatcccaaggaactggaagcccgccagaccgatgacaagcacatccccacccggaacccggccagggcttttgagatagcctcccacaacatcaaggtgtcgccctacggctgggatgaatatgacgacgacgttctggacatcgacaaggaaatgacgctcttgactaaaaaccagatcatctacaacaccacggtgcagatgctgtccaaatctttcgaggttttgaaatacgccatcaacggcggaggaggagcataa

SEQ ID NO: 38452 - protein, 128 aa, Unknown
  Obtained from environmental sample
  misc_feature (1)..(128): Xaa is any amino acid
MAEGLRLARHDISSTNFANSDTPGFRAKHLRFEEVLARHLTRYPKELEARQTDDKHIPTRNPARAFEIASHNIKVSPYGWDEYDDDVLDIDKEMTLLTKNQIIYNTTVQMLSKSFEVLKYAINGGGGA

SEQ ID NO: 38453 - DNA, 435 bp, Unknown
  Obtained from environmental sample
  misc_feature (1)..(435): n is a, c, g, or t
atggactttttgaattcaatggacatcagccagtcgggtctgacttcccaaaggatgcgcatgaacctggtggccatgaacctgagccatatgaacaccacccgcaccccggacggcggcccctatcgccgcaaggtgcccatatttgaaaccgccccttatttcagcggctccaggggcgtccggccccggctggaaaacaatctccaggattgccaggtgcgggaggtcatggaagaccggcgcgatttcaagctggtctatgaccccagccaccccgacgccgacgaattcggctatgtgctgatgcccaatgtcaacgtggtgcaggagatggtggatatggtttcggccaagcgcagctacgaggccaacatcaccgccgccaccgccgcccagagcatggctttgaagtccctggaccttctgcgataa

SEQ ID NO: 38454 - protein, 144 aa, Unknown
  Obtained from environmental sample
  DOMAIN (104)...(140): Domain of unknown function (DUF1078)
  misc_feature (1)..(144): Xaa is any amino acid
MDFLNSMDISQSGLTSQRMRMNLVAMNLSHMNTTRTPDGGPYRRKVPIFETAPYFSGSRGVRPRLENNLQDCQVREVMEDRRDFKLVYDPSHPDADEFGYVLMPNVNVVQEMVDMVSAKRSYEANITAATAAQSMALKSLDLLR

SEQ ID NO: 38455 - DNA, 1464 bp, Unknown
  Obtained from environmental sample
  misc_feature (1)..(1464): n is a, c, g, or t
ttgacggataccggagcgaaaccggagattcttccggctgaaagcgaggcgcaaaaaggggatatactgatcggcaatttccagcttcccttaaaaggcgtcaatacgggagatataaaagaagacgggtttgccctgacgactaacgacggttacatccgtattgttcatggaaaaggaaaaggcggcatttacggggcggttactttgctggaagattatttcggcatccgttattacgccgaaaacgcgtgtacaatacgtcaggataaaaatatgtttatgcccgccggtatagaacgcgttgataacccttctttccgttaccgccagattaacacttacagcaatagagaccctgtatataaactgtggcaccgcctggaaactcccgacgagagtttcgtccggaatatgtgggttcataccttcgaccaactgcttccggcttcggaatacggcgattcccatcccgaatactacgctttcatcaacggggagcgcaggccgggcgacgccagccaatggtgcctgactaatgccgaagtttttgaaattgtcgcttcccgtctcgagtctttgttcaaaaccgacccggacaagcgcatcatttccgtaagccagaacgacagccagacccattgtttgtgcgatgaatgtaaagcggttgacgaatatgagggcagcccctcgggtaccattatccgctttttgaataagctggcggaacgttttccagacaaggaaatatccacactggcttacctgtactctgtgcctcccccccggcataccaggcctttgcccaatgtcaatatcatgctttgcgatattgattgtaaccgggaagtttccctgacggaaaatgcctcgggacgggaatttgtgaaaagcatggaaggatgggcggcaatatcggataatatttttgtatgggattacggaattaattttgataattatatttcaccttttcccaatttccatatcatgcggcccaatatgcggttgtttcacaaaaacaaggtcacaatgcacttttttcagacaagctccgtcaaaggctccgactttacggagcttcgctcgtatctcgccgccaaactcatgtggaacgtatccgccgacgcggattccattatgcaaaatttcttaaaagaatattacggcgaaccgtccgccccgtatctgtaccagtatctcaagttacgcgaggaggcgcttgttaaaagcaagattcgcctttggatatacgacacgccgataacgcataaagaggggatgttgagcaaagacatgatgaagcgttacagggaattgtttgacaaggcggaacaggccgttagcggcaatcagaccttcctggacagggtgcgcgaagcccgcctgcctgtcatgtacgcggaactggaaatcgcccggaccgaacgggaaaaaacaccggcgaacttacggaactgctaa

SEQ ID NO: 38456 - protein, 487 aa, Unknown
  Obtained from environmental sample
  misc_feature (1)..(487): Xaa is any amino acid
MTDTGAKPEILPAESEAQKGDILIGNFQLPLKGVNTGDIKEDGFALTTNDGYIRIVHGKGKGGIYGAVTLLEDYFGIRYYAENACTIRQDKNMFMPAGIERVDNPSFRYRQINTYSNRDPVYKLWHRLETPDESFVRNMWVHTFDQLLPASEYGDSHPEYYAFINGERRPGDASQWCLTNAEVFEIVASRLESLFKTDPDKRIISVSQNDSQTHCLCDECKAVDEYEGSPSGTIIRFLNKLAERFPDKEISTLAYLYSVPPPRHTRPLPNVNIMLCDIDCNREVSLTENASGREFVKSMEGWAAISDNIFVWDYGINFDNYISPFPNFHIMRPNMRLFHKNKVTMHFFQTSSVKGSDFTELRSYLAAKLMWNVSADADSIMQNFLKEYYGEPSAPYLYQYLKLREEALVKSKIRLWIYDTPITHKEGMLSKDMMKRYRELFDKAEQAVSGNQTFLDRVREARLPVMYAELEIARTEREKTPANLRNC

SEQ ID NO: 38457 - DNA, 957 bp, Unknown
  Obtained from environmental sample
  misc_feature (1)..(957): n is a, c, g, or t
atggggattgcggcggtaaattatatttgcgaaaactgcattgccgcaggtatggacaaggatatgcctgcagccattgttgaaaatgctggagcaaactcgcaacgcaagtttttgggaacggtttctagcctacctgaaatcgtccatacaaacaaagtaaaatcgcccgccgttattatcataggcaaggcgtgtgaattttcggagcgttacgattggtttggcaaaaaaccgctccgcaacaaacgcatcgttgttgctcgcatcaaatcaaccaagctgacaaaatcccttgaagaactcggctgcaatgtaatcgaatttccgtgttttaaaatcgttccgctcatcagttccgaaaaaaatttaaaagactattcatggcttgtttttacaagcgacataggcgtaaatatattttttgattatctcattgaacgcggaattgacataagggaattagggggcataaaaatagcgtgtgttggaattgaaaccgaaaaggaagttaagaggcgtggaattaaggcagactacgttccccaagaatataacggagctgcactggcacgtggtttaataggtcttgtaaaaaacggctcaaaggtgctcatcgcgagggcaaaaaacggagaccaagatttaacacgtattttagctgatgctggaatagcctttgacgatattcctatttacgaaaaaattattgacacttcttctacaaacacaatcgcccttaacgattttgactttgccgccttcacaagcccatccgctgtggaaggctttgccaaagctgccacgaatgtggattttcacaaaataaaagttgtatgtatcggggagaaaacagcggaggtagcaagggcgtatgggatggaagtttatgtgtctaaggaagctaccataaagagtatggttgaaaaaatttctaaattatatcccccatgctaa

SEQ ID NO: 38458 - protein, 318 aa, Unknown
  Obtained from environmental sample
  DOMAIN (90)...(310): Uroporphyrinogen-III synthase HemD
  misc_feature (1)..(318): Xaa is any amino acid
MGIAAVNYICENCIAAGMDKDMPAAIVENAGANSQRKFLGTVSSLPEIVHTNKVKSPAVIIIGKACEFSERYDWFGKKPLRNKRIVVARIKSTKLTKSLEELGCNVIEFPCFKIVPLISSEKNLKDYSWLVFTSDIGVNIFFDYLIERGIDIRELGGIKIACVGIETEKEVKRRGIKADYVPQEYNGAALARGLIGLVKNGSKVLIARAKNGDQDLTRILADAGIAFDDIPIYEKIIDTSSTNTIALNDFDFAAFTSPSAVEGFAKAATNVDFHKIKVVCIGEKTAEVARAYGMEVYVSKEATIKSMVEKISKLYPPC

SEQ ID NO: 38459 - DNA, 477 bp, Unknown
  Obtained from environmental sample
  misc_feature (1)..(477): n is a, c, g, or t
atggccatcgcaaacgcgttgcagggtttggttgcctcaaagagcaagagccgcgtcattattcttataaccgacggggtcaataacacgggaaccataggaccggaaaccgcaagtgaaatggcacgcgcccttggaatacggatatatgcgatagggattggcagcgacacgcctttatcacccgcgcgccgccccggctattacctcccgagcccatcagtcatcgatcaggaagcgatgcaggagatcgcgcacaaaaccggcggggaatatttttacgcctttgacgcgcgggaactcgccggaatatacgaacgcattgacgcgcttgaaaaatccgtcatcgagcgccgtgtctttatcgagcgcgaagagcggtatcaggtttttctctggcttgcgcttgcctccatacttctttcgctgctgctccggcatctcatattccgtatcatgcctgcggaggccttatga

SEQ ID NO: 38460 - protein, 158 aa, Unknown
  Obtained from environmental sample
  misc_feature (1)..(158): Xaa is any amino acid
MAIANALQGLVASKSKSRVIILITDGVNNTGTIGPETASEMARALGIRIYAIGIGSDTPLSPARRPGYYLPSPSVIDQEAMQEIAHKTGGEYFYAFDARELAGIYERIDALEKSVIERRVFIEREERYQVFLWLALASILLSLLLRHLIFRIMPAEAL

SEQ ID NO: 38461 - DNA, 489 bp, Unknown
  Obtained from environmental sample
  misc_feature (1)..(489): n is a, c, g, or t
atgtactatccgtacaaatttaccgcggttgacgcgcttggaaattccagtacgacggacggcaaaatcggcattgacgtacttgttatccgcgagggagacaggttaaaaattcaaatcccgtcaattcaattcagaccgaactttgcggactttgaaggactgcccaaagacgttgttgataacaatatgcgtatcataagacgcattgcgcagatacttaaccaattccgcgattacaaagttcaggtggaagggcatgccaacccgacacagcccgcaggcgccgcgcgcgacaaggaagaacctacattacagcgcatcagcgaattaagagcaaaggcgattgttgatctgttggttcgtaacggcgtagcgcgcagcagacttacagccatcggcgcgggatcatccaaaacagtcgccgcctttgaggatcgcgacaactggtggaagaaccgacgtgtggatttctatttgattaagtag

SEQ ID NO: 38462 - protein, 162 aa, Unknown
  Obtained from environmental sample
  DOMAIN (58)...(154): OmpA family
  misc_feature (1)..(162): Xaa is any amino acid
MYYPYKFTAVDALGNSSTTDGKIGIDVLVIREGDRLKIQIPSIQFRPNFADFEGLPKDVVDNNMRIIRRIAQILNQFRDYKVQVEGHANPTQPAGAARDKEEPTLQRISELRAKAIVDLLVRNGVARSRLTAIGAGSSKTVAAFEDRDNWWKNRRVDFYLIK

SEQ ID NO: 38463 - DNA, 702 bp, Unknown
  Obtained from environmental sample
  misc_feature (1)..(702): n is a, c, g, or t
ttgacaaatattatccttgactcaagagaagcgggagcgtttataacaacttccgtttccgctatcgcgcctgctaataaccaaaccgccaatatggtgaatttcaatatacgtctttcattaagcgacggcattgacaactggaaactggaattaaaagatgaaacaggcagcgttcagcgcacattcaccggaaagccgcctgttcccgcggttcagggttggaacggtcttgatgaaagcggacaaatacgcgaaggtttattcactccggaacttaccgtaaattacacaaggggcgatgtggtaaaagcgtccgcttcaccggttttagtagacatatcgggaccggtgcttactgtagcgacctcgcctgaatactttagtcccgataacgacggagaaaatgacgaattgtttattagtcttaccacaaaggacgcttctccgatagcggcatggacttttgaaataagcactcctgtggagagcggcaattctcaactcttccgcaagattgaaggcaaaggaagcccagcaagcagaattattgggacggcaagagcgacaagggcgaacttgttcaatccgcaatgtactatccgtacaaatttaccgcggttgacgcgcttggaaattccagtacgacggacggcaaaatcggcattgacgtacttgttatccgcgagggagacaggttaa

SEQ ID NO: 38464 - protein, 233 aa, Unknown
  Obtained from environmental sample
  SIGNAL (1)...(27)
  misc_feature (1)..(233): Xaa is any amino acid
MTNIILDSREAGAFITTSVSAIAPANNQTANMVNFNIRLSLSDGIDNWKLELKDETGSVQRTFTGKPPVPAVQGWNGLDESGQIREGLFTPELTVNYTRGDVVKASASPVLVDISGPVLTVATSPEYFSPDNDGENDELFISLTTKDASPIAAWTFEISTPVESGNSQLFRKIEGKGSPASRIIGTARATRANLFNPQCTIRTNLPRLTRLEIPVRRTAKSALTYLLSARETG

SEQ ID NO: 38465 - DNA, 585 bp, Unknown
  Obtained from environmental sample
  misc_feature (1)..(585): n is a, c, g, or t
ttggtatgcaacgaaaaaccggaaggagaaacccattggagttgccggacattggcacggcgggtagggatagggcatacatctgtcaatacgatattacaagaagtcggattacagccgcacctgataaccacaaggaattacagtaatgatccggactttgagcataaattgaaagatgtcgtcggattgtacttgaaaccaccacaaaacgcgatagttttgtgtatagatgagaaaacacagatacaggcgctggaacgcgcccagccggtgcttcccctcatccgcaacgtaccggagcggcagagcaaagactacctacggcatggcacaacaacattattcgcggcattaaatattttaaccgggaaagtgataggcgaatgcaatgcgacgcatagctcgcaagattacatccggtttttgaagaaagtggataaagcatgttctcccaagaaggtactgcacatagtgaccgataatctgtccgcgcataaaacaaaagcggtatatgattatgttgaaagcaatccaaaaagatttggctcttcagggaatgtagtggaaaaggaaaaaatatga

SEQ ID NO: 38466 - protein, 194 aa, Unknown
  Obtained from environmental sample
  misc_feature (1)..(194): Xaa is any amino acid
MVCNEKPEGETHWSCRTLARRVGIGHTSVNTILQEVGLQPHLITTRNYSNDPDFEHKLKDVVGLYLKPPQNAIVLCIDEKTQIQALERAQPVLPLIRNVPERQSKDYLRHGTTTLFAALNILTGKVIGECNATHSSQDYIRFLKKVDKACSPKKVLHIVTDNLSAHKTKAVYDYVESNPKRFGSSGNVVEKEKI

SEQ ID NO: 38467 - DNA, 1575 bp, Unknown
  Obtained from environmental sample
  misc_feature (1)..(1575): n is a, c, g, or t
ttgtttcatgcttggcgagggaaaccgccgaagccgcgtttgaccatacgcgcccagtttacttcagcccaagtgcgtgacgcggcccttgccgcccttgcgtcgtactggcaggagaaacagtcacaactgcggataaatacacccaacgccaacatgaacaccatgatcaatatctggactctgtaccagagtgagatcaatgtgatgttctcccgtttcgccagttttattgagacgggcggacgcaccggtctgggctatcgtgatacgtcgcaggatgccatgtgcgttgttcacagcaatccgcagaaatgcagagagcggcttgtccaacttttgaaggccctggttagcgaaggttacggtctgcatctttttgagcctgagtggttcgaggaaaaaacaggaaccgggttcagaaatccaaccttgggaattgttgcggagcaaaaaccaagaatacatggtgttgaaaacgcgtgtagcgacgatgccttatggctggtttcatccatcgcggagtatatccgtgaaacaggtgacgccgcttttgcgcaaatggttcttccttacgccgacgatgaggcaaagcctgattcggtttacgagcactgtaaaaagatactcaatttttcgcgacgtatgacgggccgccacggcatctgccaggggctaaaggcggactggaacgactgtcttaacctgggcggcggcgaaagcgcgatggtgagttaccttttcctctgggcgctggataattttatcaggttggcccaattcttgggcaaaactgaagacgcggccgcttacagagcgatccatgaaaagaccgccaaagtatgccgcgatgcgctttgggacggcaagtggtatctgcggggctttaccgggaaaggccgtcccatcggtacagacgccgacgccgaaggcaaggttcatctggaaagcaatacatgggctgttatcgccggccctgatgatcaccgacggaaaatgcaggcgatggattcggtggagcaatacctgggcacgccctatggactcatgctcaacgcgccggcctatacggttatagatgacgatgtgggttttgtaacccgcgtataccccggattaaaggaaaacggggctatattcagccatcccaatccctgggcatggattgccgaatgtatacttggcagaggcgacaaggcgatggatctgtataacagactctgccccgccgcatggaatgacaaatgcgacatccgcaaggccgagccgtacagcacctgccagttcatcaccggaaaaagccatccggccttcggcgaggcgcatcacccctttatgaccggttctggcggctggagctattttgccgcagttcaatatatactgggaatcaggcctgactttgacaaacttgtcgttgacccctgcataccctccgaatgggacgggtttgacgcagtccgccgtttcaggggcggtgaatatcgtataacagtacgaaatccaaatcatttatccaagggtgtagctgaaatactgataaacggcgaaaaacgagatgtaattcctatatag

SEQ ID NO: 38468 - protein, 524 aa, Unknown
  Obtained from environmental sample
  misc_feature (1)..(524): Xaa is any amino acid
MFHAWRGKPPKPRLTIRAQFTSAQVRDAALAALASYWQEKQSQLRINTPNANMNTMINIWTLYQSEINVMFSRFASFIETGGRTGLGYRDTSQDAMCVVHSNPQKCRERLVQLLKALVSEGYGLHLFEPEWFEEKTGTGFRNPTLGIVAEQKPRIHGVENACSDDALWLVSSIAEYIRETGDAAFAQMVLPYADDEAKPDSVYEHCKKILNFSRRMTGRHGICQGLKADWNDCLNLGGGESAMVSYLFLWALDNFIRLAQFLGKTEDAAAYRAIHEKTAKVCRDALWDGKWYLRGFTGKGRPIGTDADAEGKVHLESNTWAVIAGPDDHRRKMQAMDSVEQYLGTPYGLMLNAPAYTVIDDDVGFVTRVYPGLKENGAIFSHPNPWAWIAECILGRGDKAMDLYNRLCPAAWNDKCDIRKAEPYSTCQFITGKSHPAFGEAHHPFMTGSGGWSYFAAVQYILGIRPDFDKLVVDPCIPSEWDGFDAVRRFRGGEYRITVRNPNHLSKGVAEILINGEKRDVIPI

SEQ ID NO: 38469 - DNA, 930 bp, Unknown
  Obtained from environmental sample
  misc_feature (1)..(930): n is a, c, g, or t
atggtggaagatcttcttgaacgttcaaaagaaccttgcaaaaaagcgctttctgacgcgggacttaaagccgagcaaattgacgaagtcatccttgtcggcggttccacgcgtattccggcagttcagcagattgtcaaagacctgtttaaaaaagagcctaacaaaggcgttaaccccgatgaagccgtcgctgttggcgcggctattcagggcggtattcttggcggcgacgttaaagacgtgttgttactcgacgttactcccctttcgctcggcattgaaacacttggcggcgtaatgacaaaactcattacacgtaacacgacaattcccacacgcaagagccaaatcttctccaccgccgcagacggacaaactgccgtctccattcaagtattgcagggcgagcgcgaaatggcaaaccagaaccgcgtacttgggcgcttcgatcttgtaggcatacctcccgccccgcgcggagttccgcagatcgaagtaactttcgacattgacgcaaacggtattgttcacgtcagcgcgaaagatttgggaaccggcaaagaacaaaaaatccgcatcgaaagctccagcggcttaagcgactcggacattgaccgcatggtaaaagaagcggaactccacgctgaggaagataaaagagagcgcgagaaagctgaagtgcgcaacgaggctgactcgatgatttacgccacggagaaaaacattaaagacttaggcgacaaagtaagcgccgcggataaatccaaaactgaagaagccattgccgatttacgtaaagcccttgaaagcggcgacattccatcaatcaaaaataaaaccgaagctctcaaacaggtgtcttataaaatcgccgaggaaattacaaacagcaaggcgctagggacagcaaggtctctgccgatctga

SEQ ID NO: 38470 - protein, 309 aa, Unknown
  Obtained from environmental sample
  DOMAIN (1)...(297): Hsp70 protein
  misc_feature (1)..(309): Xaa is any amino acid
MVEDLLERSKEPCKKALSDAGLKAEQIDEVILVGGSTRIPAVQQIVKDLFKKEPNKGVNPDEAVAVGAAIQGGILGGDVKDVLLLDVTPLSLGIETLGGVMTKLITRNTTIPTRKSQIFSTAADGQTAVSIQVLQGEREMANQNRVLGRFDLVGIPPAPRGVPQIEVTFDIDANGIVHVSAKDLGTGKEQKIRIESSSGLSDSDIDRMVKEAELHAEEDKREREKAEVRNEADSMIYATEKNIKDLGDKVSAADKSKTEEAIADLRKALESGDIPSIKNKTEALKQVSYKIAEEITNSKALGTARSLPI

SEQ ID NO: 38471 - DNA, 321 bp, Unknown
  Obtained from environmental sample
  misc_feature (1)..(321): n is a, c, g, or t
ttgttctttgccggttcccaaatctttcgcgctgacgtgaacaataccgtttgcgtcaatgtcgaaagttacttcgatctgcggaactccgcgcggggcgggaggtatgcctacaagatcgaagcgcccaagtacgcggttctggtttgccatttcgcgctcgccctgcaatacttgaatggagacggcagtttgtccgtctgcggcggtggagaagatttggctcttgcgtgtgggaattgtcgtgttacgtgtaatgagttttgtcattacgccgccaagtgtttcaatgccgagcgaaaggggagtaacgtcgagtaa

SEQ ID NO: 38472 - protein, 106 aa, Unknown
  Obtained from environmental sample
  misc_feature (1)..(106): Xaa is any amino acid
MFFAGSQIFRADVNNTVCVNVESYFDLRNSARGGRYAYKIEAPKYAVLVCHFALALQYLNGDGSLSVCGGGEDLALACGNCRVTCNEFCHYAAKCFNAERKGSNVE

SEQ ID NO: 38473 - DNA, 819 bp, Unknown
  Obtained from environmental sample
  misc_feature (1)..(819): n is a, c, g, or t
atgtcggtaagtctttttcgggatggacgacacattgaaagttccgctttttgtacgggcttcagaaacatcagcatagagcggcgggagcttttaattaacgaaaggccggtgttgattaagggcgtgaaccgccacgagcatgatgaaaagactggcaagaccctatcaacagaagggatgatgaaggacatcgtgctccttaaaacgcacaacttcaacgcggtgcgtacctgtcactaccccgacgacgaacgctggtacgagctttgcgacaggtacggaatctacctgctggacgaggccaatatcgagcatcactgtttttacagtcagctttgctgggacactgcctggacctatgcttacgccaggaggattcaacggatggttgagcgcgacaagaaccacccatcggttattatttggtcgttggggaacgaaagcggagacggcgcgaaccacaatatgggcgcggcctggattcgccgttacgatcctttccggcctgttagctacgaaggggcggttaggctcaagcgtaaccagggccgcattagtcttgactcccttaaccacagtaaaaaccttacggacatcgtctgccccatgtattccgaaatagaaaccattacggattttgtgaagtacattgaggatcaccgccctcttatcatgatcgaatattcccatgctatgggaaattccaacggctctntgtcggattattggaaagcgattgagagtcaccatggattacagggaggctttatatgggagtggatcgatcacgggctgagaggcctttactcccgatga

SEQ ID NO: 38474 - protein, 272 aa, Unknown
  Obtained from environmental sample
  DOMAIN (24)...(271): Glycosyl hydrolases family 2, TIM barrel domain
  misc_feature (1)..(272): Xaa is any amino acid
MSVSLFRDGRHIESSAFCTGFRNISIERRELLINERPVLIKGVNRHEHDEKTGKTLSTEGMMKDIVLLKTHNFNAVRTCHYPDDERWYELCDRYGIYLLDEANIEHHCFYSQLCWDTAWTYAYARRIQRMVERDKNHPSVIIWSLGNESGDGANHNMGAAWIRRYDPFRPVSYEGAVRLKRNQGRISLDSLNHSKNLTDIVCPMYSEIETITDFVKYIEDHRPLIMIEYSHAMGNSNGSXSDYWKAIESHHGLQGGFIWEWIDHGLRGLYSR

SEQ ID NO: 38475 - DNA, 735 bp, Unknown
  Obtained from environmental sample
  misc_feature (1)..(735): n is a, c, g, or t
atggccgaatgtaaacaggtctttgcaccggtaaggcttactcctgttccgggtaagcccttcacttttattcttgaaaaccgctacgatttttctaccctggatgcgcttgtcctgaattggaaactctgtaccgagaatgccggcgcggaaattggcgagaaaatccttcataatgggagcatggctgttccggcgctcaaacccggcgaaaagcaggaaattgaaatcacgccagccggtactcttgacaatgtccttgcgcaacattctggagccgtttattttcatgcggacttcgctttaagagaagccgttccctgggctcaggcaggccacattgttgcccaggccgagcgcatattgcgggaagccctgccggtttcgcttcgcggcgaattgtgcggctccgtcaatgcggagtcggccaatgcccttgaatccttcgccgggagtttcgtcccttccatgttccgcgcccctgtccaaaacgacggtcttaagacagttgcccacttgcgcggaaatcctgaggccgctttttacttttacaagaaggcgatgtatccctggctcgatcttgatttgctgcatatgcgtttgcttgatgaaaaaaccgaaaacataacatacgaaggccgcccggccatacgctttgccgccatgcttgctgcggggaaggacgccgttgaccctcccgcatgtgggcgcacgcccgcgtgtgttccgccataa

SEQ ID NO: 38476 - protein, 244 aa, Unknown
  Obtained from environmental sample
  misc_feature (1)..(244): Xaa is any amino acid
MAECKQVFAPVRLTPVPGKPFTFILENRYDFSTLDALVLNWKLCTENAGAEIGEKILHNGSMAVPALKPGEKQEIEITPAGTLDNVLAQHSGAVYFHADFALREAVPWAQAGHIVAQAERILREALPVSLRGELCGSVNAESANALESFAGSFVPSMFRAPVQNDGLKTVAHLRGNPEAAFYFYKKAMYPWLDLDLLHMRLLDEKTENITYEGRPAIRFAAMLAAGKDAVDPPACGRTPACVPP

SEQ ID NO: 38477 - DNA, 828 bp, Unknown
  Obtained from environmental sample
  misc_feature (1)..(828): n is a, c, g, or t
gtggacgcgacaacccttacggaagccggctatgtcggcgaagatgttgaaaatattcttcttaaattgatacagagcgcgggaggaaatatctccgccgcggaaaggggcatcgtttatatagatgaaatagacaaaatcgcgcgtaagggcgaaaatgtttcaatcacacgcgatgtttcaggcgaaggcgttcaacaggcccttttaaaaataattgagggtacaatagcctccgttccgccccaaggcggcagaaaacatcccaatcaggaaatgatacggattgacaccacaaatatcctttttatctgcggcggggcgtttgtaggactggacaaattaatcgcacgccgcgttgtgaatcatcccttgggttttggatccgagggtggcggggaaaaatcattaaaggagctttacgacgcgttacatcctgacgatttaatccgtttcggtatgattcctgaatttatcggaaggcttcccattatcgtcggtcttgaagaattaagactcgaagatttaaagcggatcatcacagagccgcgtaacgccatagtgcgccagtatcaggcgtccctgtcttatgacaacgtaaaacttgagtttacggaaaaagcgattgacgcgatagcggacaaggcaattaagcaaaaaacaggcgcgcgcggtttaagggcgattgttgaaaaattgatgactgatataatgtttgacattccttcaataccaggcgataaaaaaataataatttcccaagatacagtggaaaaatcagaaccgccgcagataatatatctggagcaaagtcaaaagagcgcgtaa

SEQ ID NO: 38478 - protein, 275 aa, Unknown
  Obtained from environmental sample
  DOMAIN (1)...(165): ATPase family associated with various cellular activities (AAA)
  misc_feature (1)..(275): Xaa is any amino acid
MDATTLTEAGYVGEDVENILLKLIQSAGGNISAAERGIVYIDEIDKIARKGENVSITRDVSGEGVQQALLKIIEGTIASVPPQGGRKHPNQEMIRIDTTNILFICGGAFVGLDKLIARRVVNHPLGFGSEGGGEKSLKELYDALHPDDLIRFGMIPEFIGRLPIIVGLEELRLEDLKRIITEPRNAIVRQYQASLSYDNVKLEFTEKAIDAIADKAIKQKTGARGLRAIVEKLMTDIMFDIPSIPGDKKIIISQDTVEKSEPPQIIYLEQSQKSA

SEQ ID NO: 38479 - DNA, 954 bp, Unknown
  Obtained from environmental sample
  misc_feature (1)..(954): n is a, c, g, or t
ttgcatgaagaaggccaaagaccgtataatgaatttatagcagtgcggcagttacaggttgacgaagcgattaaaaacgaaatgttaaaagatgacgccattaaagatgatacccttaaagacgatgcgattaaaaaagaagactctaaaaataacgccaaaacatcagttccccaatcggtaaaagggccaatcctctgttttgtaggaccgccgggaacgggaaaaacaagcctgggaaaatctgtcgcgcgcgccctgggaaggaattttgtgcgtatttcattgggcggcgtacgcgatgaggcggaaataagggggcaccgtaagacttatgtgggagcccttcccggtaaaataattcaatccatgtgcaaggcgggaacgactaaccccgtgttcttgttagatgaaattgacaaactttcaagcgattttcgcggagacccagcatccgcccttcttgaagtgcttgaccctgaacaaaactcaacttttacggaccactatcttgaagttcaatacgatctctccaaagtgatgtttttaactacggcaaactctcttcactccattccgtatcccctgcttgaccgcatggaaataatcgaagtcccgggttacggagagaatgaaaagctgagcattgcaaaacaattcctcgtgccaaaagagttacgtgaaaatggattatcttcggcaaaaattacattcagggacgatacgataaaaaacattatccgctactggacaatggaatcgggagtgcgtaatcttgagcgcgagacggcgcggtgcatcaggcgcatagcaagagacgcggtaaacaaaggttatgggaaagacaagcccgtaaaggaatttaataaaatcataacgcccgcaaacttggaaaaattactggcaagaaaaaatataaaagggatgtcgtttcaggaagctcggccgatctga

SEQ ID NO: 38480 - protein, 317 aa, Unknown
  Obtained from environmental sample
  DOMAIN (65)...(208): ATPase family associated with various cellular activities (AAA)
  misc_feature (1)..(317): Xaa is any amino acid
MHEEGQRPYNEFIAVRQLQVDEAIKNEMLKDDAIKDDTLKDDAIKKEDSKNNAKTSVPQSVKGPILCFVGPPGTGKTSLGKSVARALGRNFVRISLGGVRDEAEIRGHRKTYVGALPGKIIQSMCKAGTTNPVFLLDEIDKLSSDFRGDPASALLEVLDPEQNSTFTDHYLEVQYDLSKVMFLTTANSLHSIPYPLLDRMEIIEVPGYGENEKLSIAKQFLVPKELRENGLSSAKITFRDDTIKNIIRYWTMESGVRNLERETARCIRRIARDAVNKGYGKDKPVKEFNKIITPANLEKLLARKNIKGMSFQEARPI

SEQ ID NO: 38481 - DNA, 396 bp, Unknown
  Obtained from environmental sample
  misc_feature (1)..(396): n is a, c, g, or t
ttggggataaacgtcggggctcatcttattttcggcttgcccgatgatacacgtgaaaagatgttgtcgcaagttcacaaaatcaacgatttgcctatctattccataaaatttcatcaattgcaaatcattaagggcacaacgatggagcagcaatttttggagaacgatccgaatttcaagcctttatttttcgaattggaggattatttgaattttgtggtggattttgttgaacaacttcgtccggacattatcatcgaacgcattgccggcgaagttccgccgcaatttcaggtgggtcccgtttggggcggcattcgcaacgatcaaattatggtgaaatttgaaaaacgattaaccgagcgtgaaacgtttcagggacgcctgttttga

SEQ ID NO: 38482 - protein, 131 aa, Unknown
  Obtained from environmental sample
  misc_feature (1)..(131): Xaa is any amino acid
MGINVGAHLIFGLPDDTREKMLSQVHKINDLPIYSIKFHQLQIIKGTTMEQQFLENDPNFKPLFFELEDYLNFVVDFVEQLRPDIIIERIAGEVPPQFQVGPVWGGIRNDQIMVKFEKRLTERETFQGRLF

SEQ ID NO: 38483 - DNA, 795 bp, Unknown
  Obtained from environmental sample
  misc_feature (1)..(795): n is a, c, g, or t
atgactccatatctaaacttgttatcccaaatattggcccacggcaccgacaaatccgaccgcaccggcacgggcacccgcagcattttcgcccaccaaatgcggtttgatttggccaaaggttttccgttgctgaccacgaaaaaattgcatctcaaatccattatttacgagctgttgtggtttttgcaaggcgacaccaacgttcgctatttgcaggccaacggcgttcgtatttgggacgaatgggccgatgcagacggcaatttgggaccggtttatggcaagcaatggcgctcgtggggttgcaaagacggccgaagcatcgaccaaatttccgaactgatacaaaccatccaaaccaatcccgactcgcgccgtatgctggtatgtgcgtggaatgtaggcgaactttcagaaatggcactcccgccgtgccatatcttatttcaattttatgtggccaatggaaaactctcgtgccaactgtatcaacgttcggctgatgtgtttttgggcgtgcccttcaacattgcttcgtatgccttgctaaccttgatgattgcgcaggtttgcaacttacagcccggcgaatttattcacacgcttggcgatgcgcatctctacaccaatcacttcgaacaagcgcaaacacagctcacacgccaaccgtttccgcttccgcaaatgaaacttaatcccaacataaaaagtattttcgaattttcttacaatgattttgaattgctcaactatcaggcacatccgcatattaaagggacagtcgctgtttaa

SEQ ID NO: 38484 - protein, 264 aa, Unknown
  Obtained from environmental sample
  DOMAIN (2)...(264): Thymidylate synthase
  misc_feature (1)..(264): Xaa is any amino acid
MTPYLNLLSQILAHGTDKSDRTGTGTRSIFAHQMRFDLAKGFPLLTTKKLHLKSIIYELLWFLQGDTNVRYLQANGVRIWDEWADADGNLGPVYGKQWRSWGCKDGRSIDQISELIQTIQTNPDSRRMLVCAWNVGELSEMALPPCHILFQFYVANGKLSCQLYQRSADVFLGVPFNIASYALLTLMIAQVCNLQPGEFIHTLGDAHLYTNHFEQAQTQLTRQPFPLPQMKLNPNIKSIFEFSYNDFELLNYQAHPHIKGTVAV

SEQ ID NO: 38485 - DNA, 315 bp, Unknown
  Obtained from environmental sample
  misc_feature (1)..(315): n is a, c, g, or t
gtgcgcaacgaaattgggaaaaattatatttcgggacctctcgatggttcgtacatgaccaccgaaaccatcgtgtcgcctatcagcacggaagtcaatctcaacggtcgctatgccgttgaaactcgcgggttgtggaagttggagggcgatttcatgggcggtccgttcatcaattacgttttcttggatgaagaaaccaatcagatggtgatgatagacgcttttctgtactcacctaaaaggggcaaacgcgatttgttgatgcaactggaaggcatcatctactcgatagaaatgaaaaatgaaaaatga

SEQ ID NO: 38486 - protein, 104 aa, Unknown
  Obtained from environmental sample
  misc_feature (1)..(104): Xaa is any amino acid
MRNEIGKNYISGPLDGSYMTTETIVSPISTEVNLNGRYAVETRGLWKLEGDFMGGPFINYVFLDEETNQMVMIDAFLYSPKRGKRDLLMQLEGIIYSIEMKNEK

SEQ ID NO: 38487 - DNA, 957 bp, Unknown
  Obtained from environmental sample
  misc_feature (1)..(957): n is a, c, g, or t
ttgataatagaaaaaagcatatcactaaaaaaccgcaacacattcgccattgccgcaaccgcccgatatttctgtgaggtacgaactatagacgaattgcaaacactcgtttcgtccgagatttttcagacgcatccgcgtttgattttgggcgaaggtgctaacattttatttacgaaagattttgacgggttggtgataaggcccgtgtttaaaggcatagaagttgtttgcgaaaccgagcatgatgttttggtgaaagcttgttcgggcgaagtgtggtctgattttgtaatgcactgctgtgaaaaaaattggaacgggttggagaatttggcttatattccgggcagtgtaggtgcttcacccattcaaaatatcggcgcttacggcatcgaaattaaggatgtgttggattcgctcgaagcgtttaatcttgaaacaaaaaaacttgaaatttttaaatcggcagattgccgattcgcttatcgtgaaagcgtgtttaagaacgcctacaaaggaaaatacgtgatttgttcggtaacgtttcggttatcgaagttgcctcaattcaacacggcttatgcggccgttaatgatgagctaaagcgtttgaacgtatccgaattatcggcgaaagcgattgctacagccatcacgaatattcgcaaatccaaacttcccgagccttccgaactcggcagtgcgggcagttttttcaaaaatccgaccgtatcgcaagaaacttggcaagcgttgaaaacgcaatatccgaatatcgtggcgtatcccacagatttaggggtaaaactgtctgccggttggctcatcgaacaagccggttggaaagggtttcgagagggtagggccggtgtgcatgcacagcaagcgttggtgcttgtaaattacggnnaatgcacangcgcggacattctaaaccttgcccacgcatcatag

SEQ ID NO: 38488 - protein, 318 aa, Unknown
  Obtained from environmental sample
  DOMAIN (21)...(155): FAD binding domain
  misc_feature (1)..(318): Xaa is any amino acid
MIIEKSISLKNRNTFAIAATARYFCEVRTIDELQTLVSSEIFQTHPRLILGEGANILFTKDFDGLVIRPVFKGIEVVCETEHDVLVKACSGEVWSDFVMHCCEKNWNGLENLAYIPGSVGASPIQNIGAYGIEIKDVLDSLEAFNLETKKLEIFKSADCRFAYRESVFKNAYKGKYVICSVTFRLSKLPQFNTAYAAVNDELKRLNVSELSAKAIATAITNIRKSKLPEPSELGSAGSFFKNPTVSQETWQALKTQYPNIVAYPTDLGVKLSAGWLIEQAGWKGFREGRAGVHAQQALVLVNYGXCTXADILNLAHAS

SEQ ID NO: 38489 - DNA, 642 bp, Unknown
  Obtained from environmental sample
  misc_feature (1)..(642): n is a, c, g, or t
atgagtacggccaaatcactgcgaaaccggaaacttggcgcgaaagtagtgcaggcgctgaaagagcgtttttttgaggcctggtattttgacgagccttccgaagccctcgctaaaattttgtccctcatccccgttgaacatgtcgtatcatggggcggttcccagacgctgggtgagttaggcgtaaccgagcgcgtagcccttgagggctataaggttattgaccgggacaaggcggcagacatgcaggaaaggtttgatcttatgaggcaggcgctgttatgcgacacctttctcacgggctgcaatgctatcagcgaggacggtcagcttgtaaacatagacgcctttggcaaccgtgtggcggcgatgatctttggcccaaggcaggtaatcgtcatcgccgggataaacaaaattaccaaaaccgtggatgacgcccttgtccgagcgcgaaccatcgccgcccctgccaacacccagcgtttcccgaataacaaaaccccctgcaatgaaacaggaagctgcgccaactgtaagtcccccgattctatttgcagtttttttgtaacaaccaggctttgcaaaccagccggcaggattaaggtgatactggtagggcaggatttgggactctga

SEQ ID NO: 38490 - protein, 213 aa, Unknown
  Obtained from environmental sample
  DOMAIN (1)...(213): Protein of unknown function (DUF1121)
  misc_feature (1)..(213): Xaa is any amino acid
MSTAKSLRNRKLGAKVVQALKERFFEAWYFDEPSEALAKILSLIPVEHVVSWGGSQTLGELGVTERVALEGYKVIDRDKAADMQERFDLMRQALLCDTFLTGCNAISEDGQLVNIDAFGNRVAAMIFGPRQVIVIAGINKITKTVDDALVRARTIAAPANTQRFPNNKTPCNETGSCANCKSPDSICSFFVTTRLCKPAGRIKVILVGQDLGL

SEQ ID NO: 38491 - DNA, 813 bp, Unknown
  Obtained from environmental sample
  misc_feature (1)..(813): n is a, c, g, or t
gtgatcagatcggccgagagtcaggcggccacgggccgttactggaccaaccatttctccaccatagggatcctgggcggcaacgaggccagcctgaatcttctgggcgagagcctggccaccccgcgcggtcaggccttcatgctccgggttctccggcatatgcgggaccgtctggccgaaatccaggaggaaaccggcgatttcttcaacctggaagccacgccggcggaaggaacttccttcaatctggcccagaaggataaggaacgttataaagacgaagacatccatttcgccaattcccacctgggagacgaccgtccgcctttttacaccaattccacccaactgccggtaaaccacaccgacgatctcttcgaggccttggaactgcaggacgacctgcagtgctgctacaccgggggcacggttctgcacggcttcctgggtgaagccataaacgacccgcaggccgtcaaagccctggtccgcaccgtgaccgataatttccgcctgccttatttcaccctcaccccgactttcagcatctgcccggaccacggctatttatccggcgagcattcgacctgccccgaatgccaagctgaaacggaaatctattcccgggtggtcggctatttgcggccggtgcgttgctggaacgacggcaagcagcaggaattcgcccagcgccgcacgtacaaccccgccaagggtttacggccggccgccttgngcttggccgccgccggccttgacccgctctcgcacgaaccgcanaaccgtgaggaccagtcgctttgcgcttag

SEQ ID NO: 38492 - protein, 270 aa, Unknown
  Obtained from environmental sample
  misc_feature (1)..(270): Xaa is any amino acid
MIRSAESQAATGRYWTNHFSTIGILGGNEASLNLLGESLATPRGQAFMLRVLRHMRDRLAEIQEETGDFFNLEATPAEGTSFNLAQKDKERYKDEDIHFANSHLGDDRPPFYTNSTQLPVNHTDDLFEALELQDDLQCCYTGGTVLHGFLGEAINDPQAVKALVRTVTDNFRLPYFTLTPTFSICPDHGYLSGEHSTCPECQAETEIYSRVVGYLRPVRCWNDGKQQEFAQRRTYNPAKGLRPAALXLAAAGLDPLSHEPXNREDQSLCA

SEQ ID NO: 38493 - DNA, 726 bp, Unknown
  Obtained from environmental sample
  misc_feature (1)..(726): n is a, c, g, or t
atgagagaattggattcgcaaatattggcagtttcgctaaaagatgccaaagaggaagtgaaagatgtttttttcaggaatgtgtcacaacgcgcgaggggtatgcttgaagaagacatggagtatttgggaccggtaactgaatcggatatggaaaacgccaggcaagtcacgctggatatttatgatgatataaccagagaaaacaacaggtttgatgaagcgtgggcaaaatataaaaatccggaagaaaacaacacaaaagatcaagaagattttgatgacgaaaaacatatagtttttgcgtttcgcggcactggaactgccgctgacagcgtatcgatatttctgtttgataaatacaaatatgctgatactttttgtgattattttaataatcttaaaccggataaaggatcttttttttatgcccggcatgccgaccaaatgattgaatatgagacaacaaaaccgttgttagtatcttttgatcagatagttgaactcagcaggcgtcatggtaagtggataataaaagaagtcttgaataaaataaaaccggttattattctggcagcgcttaaaggcatggacaaacgttccaggttgcttattatgcaatgccttcctattaaaaccacagacgagatcaatgaaagaatagagcggcaatctgagaaacatctttctttatacgaatcccgtaaggcacagcaacgaatataa

SEQ ID NO: 38494 - protein, 241 aa, Unknown
  Obtained from environmental sample
  DOMAIN (1)...(62): FliG C-terminal domain
  misc_feature (1)..(241): Xaa is any amino acid
MRELDSQILAVSLKDAKEEVKDVFFRNVSQRARGMLEEDMEYLGPVTESDMENARQVTLDIYDDITRENNRFDEAWAKYKNPEENNTKDQEDFDDEKHIVFAFRGTGTAADSVSIFLFDKYKYADTFCDYFNNLKPDKGSFFYARHADQMIEYETTKPLLVSFDQIVELSRRHGKWIIKEVLNKIKPVIILAALKGMDKRSRLLIMQCLPIKTTDEINERIERQSEKHLSLYESRKAQQRI

SEQ ID NO: 38495 - DNA, 339 bp, Unknown
  Obtained from environmental sample
  misc_feature (1)..(339): n is a, c, g, or t
atgaagatgagcaaaataaccattagcggttacgccgggaccggcaagtctaccgttgggaagatgctcgcggataggctgggttatgggtttctgtccgttgggaattttgccagaaaatttgccgaaagggagttcgggatgagtataaacgagtttcaggcgaagtgcggggaagaaccggctcttgacgatcttgtcaatcataagtttcgcgatatgtgcaacagcgaggaaaaaatcgtggctgattttcggttaggatttcactttgtcagggactcaataaatattttgattgttctttccgaagaggaggcttttttgcggcttatctaa

SEQ ID NO: 38496 - protein, 112 aa, Unknown
  Obtained from environmental sample
  misc_feature (1)..(112): Xaa is any amino acid
MKMSKITISGYAGTGKSTVGKMLADRLGYGFLSVGNFARKFAEREFGMSINEFQAKCGEEPALDDLVNHKFRDMCNSEEKIVADFRLGFHFVRDSINILIVLSEEEAFLRLI

SEQ ID NO: 38497 - DNA, 621 bp, Unknown
  Obtained from environmental sample
  misc_feature (1)..(621): n is a, c, g, or t
gtgagtgaaatggggtttgagacgtccatatcactaacgggatctctcttgaaccgtagctggggcatatacaaatacatcggtacgttgggactttccgtagacagcttaaacgcggatacctgccgcaagatggggcgctgtgacagaagcggtacggttctggaattggggcgtattaaagagcttcttgatacggcgagggcggaaaatcccgacatagccgcaaaattcaacgtaacggtgaacgagcataattacaaggaatgtgtggtagggcggttgcaggaactctctcccaagagaattaaagtgctgcggcagctgccttttaacggtaactcaggtataagcgacgagatgtattctgaattcaagcgaataaacgaggaatattttggggagaataccattgttgaagacaacgaggatatgacccaaagttacctgatgatcgatccgtatgggagattcttccaaaacggaaacagtgacggttatatctacagtcggccgatttacgaggtcggtttggagcgggcactttcgcagattgattttgatgttgagaagtttgggagccggtacaataacaccgataaaaaggagggcgttttatga

SEQ ID NO: 38498 - protein, 206 aa, Unknown
  Obtained from environmental sample
  misc_feature (1)..(206): Xaa is any amino acid
MSEMGFETSISLTGSLLNRSWGIYKYIGTLGLSVDSLNADTCRKMGRCDRSGTVLELGRIKELLDTARAENPDIAAKFNVTVNEHNYKECVVGRLQELSPKRIKVLRQLPFNGNSGISDEMYSEFKRINEEYFGENTIVEDNEDMTQSYLMIDPYGRFFQNGNSDGYIYSRPIYEVGLERALSQIDFDVEKFGSRYNNTDKKEGVL

SEQ ID NO: 38499 - DNA, 1164 bp, Unknown
  Obtained from environmental sample
  misc_feature (1)..(1164): n is a, c, g, or t
atggggagaacctttttcatatatgccaaaaggcatatttttgataaaaaaacgcccaaaaacgctatgccaaaaggcatattttttttacaattccactggcaaatgaatctataccgccctgtaacaattggcagtctcgaacttgacggcaacctttttctcgccccggtagccggttactccgatcggggtttccggtcgctgtgcgttgagcagggggcgaattttacctttaccgagcttgtctccgccgaggctttatggcgtaatcccgggcactacgggctggaccccgattccgccgacagcagagctggcgtcgccggcagagccggcgcggttagtctggtaagccgggggatcaacgagccgcgttacgcgattcaattattcggcgccgaaccggtggctatttacaaggcggcgcttctgcttgccccgctaaaaccggacgccgtggatattaacgccggctgtcccgttccgaaagtggtaaaaaacggcgccggctccgccttgatgaaaaaccccgccaacctgggcaggattgtggaagcggcggcaagggcctcgcgggaagcccttggagacgcgcctgtaacgataaaaatgcgttccggctgggattctgcttcgataaattacgccgaatgcgcccgagtcgccgtggaaagcggcgccgctatggtcagcctgcacccccgcacccgcggccagcaatacggcggcaaaagcgactggtcacgcatcgccgatcttgtatcgcggctttctgtgcctgtcaccggttcgggcgatctgtatacgccggaggacgcaaagcgcatgctggaggaaacaggctgcgccgcggtgatgttcgcgcggggcgcaatgggcaacccgtttatttttccggcgacgcgttctttccttgagaccggcgggtgggaacctgccgctttttccgaacggatggcagccgccttccgtcatctggaaatgctggcagcggatattggcgagcgcagggcttgtctggaaatgcgcaaacagttctgcgcttacaccaaaggcatgaaaggaggcgcgccggcgcgggaacaggcgattcacgcgcagaccattgaggattatcggaaaataatggtagtatggggatatgataaaaaaccatgttaa

SEQ ID NO: 38500 - protein, 387 aa, Unknown
  Obtained from environmental sample
  DOMAIN (54)...(381): Dihydrouridine synthase (Dus)
  misc_feature (1)..(387): Xaa is any amino acid
MGRTFFIYAKRHIFDKKTPKNAMPKGIFFLQFHWQMNLYRPVTIGSLELDGNLFLAPVAGYSDRGFRSLCVEQGANFTFTELVSAEALWRNPGHYGLDPDSADSRAGVAGRAGAVSLVSRGINEPRYAIQLFGAEPVAIYKAALLLAPLKPDAVDINAGCPVPKVVKNGAGSALMKNPANLGRIVEAAARASREALGDAPVTIKMRSGWDSASINYAECARVAVESGAAMVSLHPRTRGQQYGGKSDWSRIADLVSRLSVPVTGSGDLYTPEDAKRMLEETGCAAVMFARGAMGNPFIFPATRSFLETGGWEPAAFSERMAAAFRHLEMLAADIGERRACLEMRKQFCAYTKGMKGGAPAREQAIHAQTIEDYRKIMVVWGYDKKPC

SEQ ID NO: 38501 - DNA, 741 bp, Unknown
  Obtained from environmental sample
  misc_feature (1)..(741): n is a, c, g, or t
atgtngggcggcggggcgaatatcctcgtngcggatgcgggcatacggnggattgtactggacacgggcggctgggcgggtgaaacggaacagcgcgggcaggaaggaatcctggagttccgctccgggacaagtcttgattttgccgctgaaattgccgcggaagccgagctntccggcctggaattccttgccggtatgcccggcagcattggcggggcggtctggatgaatgcccgctgttacgggcaggaaatcgccgatgtattaaccgaaacagaagttattgacttttccggttcaccgccggaacgtatgcggctgtccgccaataaaagtgaatttagttacaaacacagcccttttcagggccgtgattcgttaattctttccgcgtcatttcacctgacacccggtgaaacacggcaaattcgcgccataatggattcccaccgcaaggatcgtgaaacaaaaggccactaccgttacccctccgccggctctgttttcaagaacaatccgcgttttggcaagccaaccggacaaataattgatgaactgggtttatgcggtctgcgcaaaggcggcgcacaggtggccccctggcatggcaatattatcgttaataccggcggggcttgtgcagcggatatccgcgccctgattgaagaagttgccgcccgggtcaaaacggcgaccggctttgatctggaaccggaggttctttttatagggaattaa

SEQ ID NO: 38502 - protein, 246 aa, Unknown
  Obtained from environmental sample
  DOMAIN (141)...(245): UDP-N-acetylenolpyruvoylglucosamine reductase, C-terminal domain
  misc_feature (1)..(246): Xaa is any amino acid
MXGGGANILVADAGIRXIVLDTGGWAGETEQRGQEGILEFRSGTSLDFAAEIAAEAELSGLEFLAGMPGSIGGAVWMNARCYGQEIADVLTETEVIDFSGSPPERMRLSANKSEFSYKHSPFQGRDSLILSASFHLTPGETRQIRAIMDSHRKDRETKGHYRYPSAGSVFKNNPRFGKPTGQIIDELGLCGLRKGGAQVAPWHGNIIVNTGGACAADIRALIEEVAARVKTATGFDLEPEVLFIGN

SEQ ID NO: 38503 - DNA, 444 bp, Unknown
  Obtained from environmental sample
  misc_feature (1)..(444): n is a, c, g, or t
atgtttgttgaagccgaccttcccagccccctcatgggttatcccggcgctttgggcatcgacctttctgccgaggccggagacttccccgcgattctgaagaaagttgaggatgcggttagagccaagggcggagcaggcaagttcggtacctgggctttctcttacggatttaccgcttccaccggtcttggcgaattcgccaaacgcatcctggacggcaaagccaagctggaaaacactgcggatctctatgcggccctgggcgaatttacccccggcgcaaaatggaacggcggtttttacattgacgccgcgaccggcgtacgcgccaggaatcagttgcttatttacatggatacctacatcatggggcagggcttccttcccaccacagcgcaaactgttccggacaagtattaccagatcaaattccagcgctaa

SEQ ID NO: 38504 - protein, 147 aa, Unknown
  Obtained from environmental sample
  misc_feature (1)..(147): Xaa is any amino acid
MFVEADLPSPLMGYPGALGIDLSAEAGDFPAILKKVEDAVRAKGGAGKFGTWAFSYGFTASTGLGEFAKRILDGKAKLENTADLYAALGEFTPGAKWNGGFYIDAATGVRARNQLLIYMDTYIMGQGFLPTTAQTVPDKYYQIKFQR

SEQ ID NO: 38505 - DNA, 981 bp, Unknown
  Obtained from environmental sample
  misc_feature (1)..(981): n is a, c, g, or t
atgattgcaagaacaagaagactgcgcataagcgaaaccttgcggcgtatgacaagggagacaaggctttccagcgactctcttatttacccgcttttcataagggcgggtaatggcattgaagaagaattgacatctcttcccggacaaacacgctacagccccgatactgtcacgaaaggcatagatgcggctttacgtgctggtgtacactcattcctgctttttggcataccagaaaaaaaagatgataatggcagcggtgcttatgcagaaaacggagtgattcagcaggcactcaggaacattaaaaaaaattatggagacgaagtttgccttatcaccgatgtatgcttgtgcgaatacacaaaacacgggcattgcggggtgattcacaagaacggaattgacaacgatgcaacgctatcgcttctttcgcaaacggctctctcccacgctcgctccggcagcgatatggttgccccctccgcgatgatggacggaacagttgccgccataagagatgctcttgacacgggaggattcaaagagactcctataatgagttacgctactaaatacgcttctgcgctttatggtcccttccgcgatgcggcaggttccacgccccagttcgggaatagaaaaacttatcaaatggattatcacaacgcgaaggaggctttgaagcggatagatattgatattgcagaaggagcggacatgataattgtaaaacccgctctaacaagccttgacataatttctatggcatctcagcaaataaaactgcccatagcaggctacagcgtgagcggcgaatatgctatgattaaagcagcggctgcttctggttttattgatgaatacaaaacgatgtgcgaaagtgcggttgctgttttccgcgccggagcggatatattgattacatactttgcaaaagaattatccacagcaattgaaaagagagatataggataa

SEQ ID NO: 38506 - protein, 326 aa, Unknown
  Obtained from environmental sample
  DOMAIN (1)...(320): Delta-aminolevulinic acid dehydratase
  misc_feature (1)..(326): Xaa is any amino acid
MIARTRRLRISETLRRMTRETRLSSDSLIYPLFIRAGNGIEEELTSLPGQTRYSPDTVTKGIDAALRAGVHSFLLFGIPEKKDDNGSGAYAENGVIQQALRNIKKNYGDEVCLITDVCLCEYTKHGHCGVIHKNGIDNDATLSLLSQTALSHARSGSDMVAPSAMMDGTVAAIRDALDTGGFKETPIMSYATKYASALYGPFRDAAGSTPQFGNRKTYQMDYHNAKEALKRIDIDIAEGADMIIVKPALTSLDIISMASQQIKLPIAGYSVSGEYAMIKAAAASGFIDEYKTMCESAVAVFRAGADILITYFAKELSTAIEKRDIG

SEQ ID NO: 38507 - DNA, 1026 bp, Unknown
  Obtained from environmental sample
  misc_feature (1)..(1026): n is a, c, g, or t
gtgcccggcggctccagcgggggctctgccgcctcggtagccgcctgccagtgtttcgcctcgctgggcgcggacaccggcggttccatccgccagccggcggccttttgcggctgcgtgggcatcaaacccacgtatggccgcgtttcgcggtatggaggcatcagcctgggttcctccctcgatcagattgggccgctggcccgcaccgtggaagattgcgcgctggtgctttccgtcatcgcggggcatgacccgcgcgatgccacctcttcccccctgcccgtggatgattatgtggccgcgctgaaagccgcaaaagacctgaaaggactgcgtatcggcctgcccagagaatttatgacccaaggcctgagcgaggagatggaacacgcctgccgcgaggcgctggatctggcggcgcgactcggcgcggagatcgtgcctgtttcgttgccgctcacgcatctggcgaccgccgtgtattacatcatcgtcatggcggaggcgagttccaacctggcccgttatgatggaatacacttcggacgccgcgcggaaggcgtacgggatcttgaggaactctatgtgcgcacccgcagcgagggcttcggcgacgaggtgaaacgccgcatcatgctgggaacctatgtgctttcctccggctattatgacgcctattacaaaaaagccgcccaggcgcggcggctgatccggcaggattttgaagcggcgttcacgcagtgcgacatcatgtgcggccgtgtctcgccgctcgtcgcatggcctgtgggagagcaggacccggacccgctctctgtctacgtgagggacatttacaccctgcccgtgaacttggccggcctgcccggcctgtcgctgcccntgcgcctggacgcgcacgaccatatgccgacggctttgcagctcatcggccggccttttgaagaagcgacactgctcagcacggcgcatgtgctgctgtcggccatgccgcagcttgggctgccgccggcagcggtctga

SEQ ID NO: 38508 - protein, 341 aa, Unknown
  Obtained from environmental sample
  SIGNAL (1)...(23)
  DOMAIN (2)...(321): Amidase
  misc_feature (1)..(341): Xaa is any amino acid
MPGGSSGGSAASVAACQCFASLGADTGGSIRQPAAFCGCVGIKPTYGRVSRYGGISLGSSLDQIGPLARTVEDCALVLSVIAGHDPRDATSSPLPVDDYVAALKAAKDLKGLRIGLPREFMTQGLSEEMEHACREALDLAARLGAEIVPVSLPLTHLATAVYYIIVMAEASSNLARYDGIHFGRRAEGVRDLEELYVRTRSEGFGDEVKRRIMLGTYVLSSGYYDAYYKKAAQARRLIRQDFEAAFTQCDIMCGRVSPLVAWPVGEQDPDPLSVYVRDIYTLPVNLAGLPGLSLPXRLDAHDHMPTALQLIGRPFEEATLLSTAHVLLSAMPQLGLPPAAV

SEQ ID NO: 38509 - DNA, 792 bp, Unknown
  Obtained from environmental sample
  misc_feature (1)..(792): n is a, c, g, or t
atgccgaccattgttgtagttgggattgtctttttagccgttatcgcgttgatcattttcgcctacataagctcggccgtcaagctgtggctgcaagcgatattttccggctgccccgtcgggctgctaagcatcatcttcatgcgtttgcgcaaggtgccgcccgtggagatggtggaggcgaagatcacctctgtgaaggcggggattgagctttcgaccgacgagcttgagtcgcacttcttggcgggcggtaacgtgacgcgcgtcgtgctggcgctgatcgccgcggacaaggcggggattccgttgtccttcaagcgcgccgcggccatagaccttgccgggcgcaacgttctggaggctgtgcagatgagcgtcaaccccaaggtgatagagacgccgcggatcgccgccgtggcaaaggacggcatccagctcgtggcgctcacgcgggtcacggtgcgcgccaacatagaccggctggtgggcggcgccggcgaagagaccatccttgcccgcgtgggcgagggcatcgtcacgaccatcggctccgcgctctcccacaagcaggtgctcgaaaatcccgactccatatccaagcgcgtgctggaaaaggggctggactccggcaccgcctttgaaatactctccatagacatcgccgacgtggacgtaggcaagaacatcggcgcggaacttgaaaccgaccgcgcggaggccgacaaaaagatagcgcaggccaaggccgaggagcgccgcgccatggccatcgccgcggaacagagatga

SEQ ID NO: 38510 - protein, 263 aa, Unknown
  Obtained from environmental sample
  SIGNAL (1)...(21)
  DOMAIN (1)...(262): Protein of unknown function (DUF1432)
  misc_feature (1)..(263): Xaa is any amino acid
MPTIVVVGIVFLAVIALIIFAYISSAVKLWLQAIFSGCPVGLLSIIFMRLRKVPPVEMVEAKITSVKAGIELSTDELESHFLAGGNVTRVVLALIAADKAGIPLSFKRAAAIDLAGRNVLEAVQMSVNPKVIETPRIAAVAKDGIQLVALTRVTVRANIDRLVGGAGEETILARVGEGIVTTIGSALSHKQVLENPDSISKRVLEKGLDSGTAFEILSIDIADVDVGKNIGAELETDRAEADKKIAQAKAEERRAMAIAAEQR

SEQ ID NO: 38511 - DNA, 711 bp, Unknown
  Obtained from environmental sample
  misc_feature (1)..(711): n is a, c, g, or t
atggccatggcgcggcgctcctcggccttggcctgcgctatctttttgtcggcctccgcgcggtcggtttcaagttccgcgccgatgttcttgcctacgtccacgtcggcgatgtctatggagagtatttcaaaggcggtgccggagtccagccccttttccagcacgcgcttggatatggagtcgggattttcgagcacctgcttgtgggagagcgcggagccgatggtcgtgacgatgccctcgcccacgcgggcaaggatggtctcttcgccggcgccgcccaccagccggtctatgttggcgcgcaccgtgacccgcgtgagcgccacgagctggatgccgtcctttgccacggcggcgatccgcggcgtctctatcaccttggggttgacgctcatctgcacagcctccagaacgttgcgcccggcaaggtctatggccgcggcgcgcttgaaggacaacggaatccccgccttgtccgcggcgatcagcgccagcacgacgcgcgtcacgttaccgcccgccaagaagtgcgactcaagctcgtcggtcgaaagctcaatccccgccttcacagaggtgatcttcgcctccaccatctccacgggcggcaccttgcgcaaacgcatgaagatgatgcttagcagcccgacggggcagccggaaaatatcgcttgcagccacagcttgacggccgagcttatgtag

SEQ ID NO: 38512 - protein, 236 aa, Unknown
  Obtained from environmental sample
  SIGNAL (1)...(25)
  misc_feature (1)..(236): Xaa is any amino acid
MAMARRSSALACAIFLSASARSVSSSAPMFLPTSTSAMSMESISKAVPESSPFSSTRLDMESGFSSTCLWESAEPMVVTMPSPTRARMVSSPAPPTSRSMLARTVTRVSATSWMPSFATAAIRGVSITLGLTLICTASRTLRPARSMAAARLKDNGIPALSAAISASTTRVTLPPAKKCDSSSSVESSIPAFTEVIFASTISTGGTLRKRMKMMLSSPTGQPENIACSHSLTAELM

SEQ ID NO: 38513 - DNA, 492 bp, Unknown
  Obtained from environmental sample
  misc_feature (1)..(492): n is a, c, g, or t
ttgcatatgaggagaattgctatggaaaaagcaaaagaaatcctacggctgtctttacagatgggactgagccagcgggatgtggcaagcgggaccgggtgttcccttgggatggttagcatggtgctgagccgtgttaaagaagctgcggtaacagatccgttcagcctcagcatgaaagaactggggtcaatcatatacccgccggccaaagagaaagacaaagctgaaatcgactttcagcacgtcgatcgtgagatgaagaagaaaggggtgacgctcggcctgctgtgggaggaatataaaacgcgtcatcctgacggttatatgtatacccagttttgtaccaagtatcgtgagtaccggaagaaaaactcggtgtatatgcgcaagttctacaagtacggcgaaagaatgatggtggactgggcggggcttaccatgcgttatacgggagaaaaccgaaacataaaaacgtttatgtgtttgtag

SEQ ID NO: 38514 - protein, 163 aa, Unknown
  Obtained from environmental sample
  misc_feature (1)..(163): Xaa is any amino acid
MHMRRIAMEKAKEILRLSLQMGLSQRDVASGTGCSLGMVSMVLSRVKEAAVTDPFSLSMKELGSIIYPPAKEKDKAEIDFQHVDREMKKKGVTLGLLWEEYKTRHPDGYMYTQFCTKYREYRKKNSVYMRKFYKYGERMMVDWAGLTMRYTGENRNIKTFMCL

SEQ ID NO: 38515 - DNA, 612 bp, Unknown
  Obtained from environmental sample
  misc_feature (1)..(612): n is a, c, g, or t
ttgggcagctttgaaagcctttacaaggaacttccgcacgatatagagggcaatacagaatatcaccaccatacatccgtaaattccaaaaactgcttgataatgggttccgctacttcaaatagggaaattgctaccatagatttggaaaatatgatgatagtggatacaatagatgctcttttggttgcgcctcttgctagcagccaaaaggtgaaaaaattggtggatagcttaaaagaaaaacattcggatttgctccataccccccaaaccgtgattcgcccttggggaacctatgaagtgcttgatgaagaggagcatttcaaggttaagtgcatttgcgtaaaccccggcgagcgtttgtctttgcaaaagcacatgcaccgctcggaacattgggttgttgttagcggaatggcaaccgccaccattggagaagaaaccgcttatgttcgcccaaacgagtctatttatatttctgctggaacgcttcaccgtttgcaaaatgagggtataaagccactgataattattgaggttcaggttggagaatatacaggggaagatgatattattagaatggacgatgattataagaggcataaatag

SEQ ID NO: 38516 - protein, 203 aa, Unknown
  Obtained from environmental sample
  DOMAIN (112)...(182): Cupin domain
  misc_feature (1)..(203): Xaa is any amino acid
MGSFESLYKELPHDIEGNTEYHHHTSVNSKNCLIMGSATSNREIATIDLENMMIVDTIDALLVAPLASSQKVKKLVDSLKEKHSDLLHTPQTVIRPWGTYEVLDEEEHFKVKCICVNPGERLSLQKHMHRSEHWVVVSGMATATIGEETAYVRPNESIYISAGTLHRLQNEGIKPLIIIEVQVGEYTGEDDIIRMDDDYKRHK

SEQ ID NO: 38517 - DNA, 498 bp, Unknown
  Obtained from environmental sample
  misc_feature (1)..(498): n is a, c, g, or t
ttggcaaagacctggttatctgcacgggtggtaggttttccgctggggtatacttatacggttgtcaaggttaatgaaaccggtattgccctggaaaacggcgtttctgagattgacatggtgataaacgcgggcgacgtgaaaaacggcaattacgatttggttctggaggaaataagggctataaagaaagtatgcggggaaaagctcctcaaagttattattgagacttgttacctgaccgaagaagaaaaaatacgagcctgcgatattgtaacagaggcgggggcggactttataaaaacctcgacgggtttcggaacagccggggcgaccattgccgatgtaaagctgttcaaaaagcacatcggcccgcaagttaaggttaaggcggcgggcggcataaaaatccgcgaggatttggaagcgtttatccaggcgggagccgaccgcatcggtacaagctctgcggtaaaactgctaacgagggaaaagtga

SEQ ID NO: 38518 - protein, 165 aa, Unknown
  Obtained from environmental sample
  DOMAIN (1)...(163): DeoC/LacD family aldolase
  misc_feature (1)..(165): Xaa is any amino acid
MAKTWLSARVVGFPLGYTYTVVKVNETGIALENGVSEIDMVINAGDVKNGNYDLVLEEIRAIKKVCGEKLLKVIIETCYLTEEEKIRACDIVTEAGADFIKTSTGFGTAGATIADVKLFKKHIGPQVKVKAAGGIKIREDLEAFIQAGADRIGTSSAVKLLTREK

SEQ ID NO: 38519 - DNA, 711 bp, Unknown
  Obtained from environmental sample
  misc_feature (1)..(711): n is a, c, g, or t
atgggagacccccgcaacgacgacatgaagagcgccggagaattcctcggtattgacgcgggttacgatgtggacatttcgattaccacccgcgagcttgcccgtatgataaaacaggcgggcattgacatactgaagctcgccgatgaggaagcggacagccccctggggccgtacacgggcgcgggcaccattttcggggtaacgggcggagttatggaagcggcggttcgcagcgcttacttccttgtcaacaacaaggagcttccgaatgtggaattcaaaccggtgcgcgggcttgagggcgtaaagtccgccgaagttgattttggcgtgccgattccgaacggcagcggaacaaagatccgtatagcggtagcccaccagatgggaaacatcgccgcggtgctggatgaaatcaaagcggccaaacaagccgggaaagagactccgtatcactttgtggaagttatggcctgcaggggcggatgcgtggcgggcggcggccagccttacggcgccaccgacgaagtccgcagcaaacgcgcgaagggcatttaccttgacgatgaaaaatccaagtaccgctgttcgcatcaaaacccctgcatcacccaggtgtacaaggaattccttgaggaaccgaacggccataaggcgcatcaactcctgcacaccaaatatacggaacgggagctttatattaagtaa

SEQ ID NO: 38520 - protein, 236 aa, Unknown
  Obtained from environmental sample
  DOMAIN (1)...(171): Iron only hydrogenase large subunit, C-terminal domain
  misc_feature (1)..(236): Xaa is any amino acid
MGDPRNDDMKSAGEFLGIDAGYDVDISITTRELARMIKQAGIDILKLADEEADSPLGPYTGAGTIFGVTGGVMEAAVRSAYFLVNNKELPNVEFKPVRGLEGVKSAEVDFGVPIPNGSGTKIRIAVAHQMGNIAAVLDEIKAAKQAGKETPYHFVEVMACRGGCVAGGGQPYGATDEVRSKRAKGIYLDDEKSKYRCSHQNPCITQVYKEFLEEPNGHKAHQLLHTKYTERELYIK

SEQ ID NO: 38521 - DNA, 312 bp, Unknown
  Obtained from environmental sample
  misc_feature (1)..(312): n is a, c, g, or t
atggcgagctcgggaatctcgcggttcgggcaggcgtggagaagactactccttccttgcagtttccacaaccgcgagtcggagatcgtatccaaagcggaaaggcgtttcttaaagacgttgggcggcggttgcgcttcacccgccgcggtctatgggcggatattggacgacgaattattacttaccggaatgtatgtagacgcctacggcaatatcgaaaaaggaaatattggtggcgggatagacagtggcgaacagctcggcgaaacgcttgcgacacgtttaaaagagagggcgggcggcagatga

SEQ ID NO: 38522 - protein, 103 aa, Unknown
  Obtained from environmental sample
  DOMAIN (28)...(100): Porphobilinogen deaminase, C-terminal domain
  misc_feature (1)..(103): Xaa is any amino acid
MASSGISRFGQAWRRLLLPCSFHNRESEIVSKAERRFLKTLGGGCASPAAVYGRILDDELLLTGMYVDAYGNIEKGNIGGGIDSGEQLGETLATRLKERAGGR

SEQ ID NO: 38523 - DNA, 837 bp, Unknown
  Obtained from environmental sample
  misc_feature (1)..(837): n is a, c, g, or t
ttgctccttgccgaggctttttggatgatggaaggctattttgtccgcacacttggaatgcaccgcgtctacaactcggcttttatgaatatgctcaaaaacgaggagaacgcaaagtatcgcgcaaccgtcaaaaacacaatggaattcgatcctgaaattttaaaacgctttgtcaattttatgaacaaccccgatgaagaaacggcggtcgctcaattcggcaagggcgataaatatttcggtatctgcacgctgcttgtaacaatgcccggcttgcccatgttcggacacggacaaattgaaggctttgaagaaaaatacggaatggaataccgccgttcctatcgtgatgaaattcccgacggctacatggtagaccgccacgagcgcgaaattttcccgttgatgaaacgccgctccgtgttttccggcagcgccaactttaggatttatgatctttactgtaacggttccgtaaacgaaaatgttttcgcgtactcaaaccgcgcgtggataaacggacgcgaggaaaaagcgttgattttttacaacaattcctactatgaaacttccggctggataaaagtaagcgatcccgccattccctgcgaaggcggaacgcgaagggacaatttaagcgaagcccttgcaattcacggcgaaagccaatacttcacccttctgcgcgaacaaaaatcaaatttgtggtacgtccgttccttcaaggtcatttgcgaaaacggattttttgtcggcttgaaggatacgaaacgcaagttttccttgatgtttatgaagttgaagatgacgcaagaggcagattggccagactga

SEQ ID NO: 38524 - protein, 278 aa, Unknown
  Obtained from environmental sample
  misc_feature (1)..(278): Xaa is any amino acid
MLLAEAFWMMEGYFVRTLGMHRVYNSAFMNMLKNEENAKYRATVKNTMEFDPEILKRFVNFMNNPDEETAVAQFGKGDKYFGICTLLVTMPGLPMFGHGQIEGFEEKYGMEYRRSYRDEIPDGYMVDRHEREIFPLMKRRSVFSGSANFRIYDLYCNGSVNENVFAYSNRAWINGREEKALIFYNNSYYETSGWIKVSDPAIPCEGGTRRDNLSEALAIHGESQYFTLLREQKSNLWYVRSFKVICENGFFVGLKDTKRKFSLMFMKLKMTQEADWPD

SEQ ID NO: 38525 - DNA, 372 bp, Unknown
  Obtained from environmental sample
  misc_feature (1)..(372): n is a, c, g, or t
atgaaaatcgttgatacttctctatggatagaattttttgcaggaacggaattggatgagtctatcctaaataccattaagaaaaaagatgaactatatgtgcctgttatttgtttgtatgaagttaggaaaaaatttgtaaatgacaatgacattgaaaaagccgatttagcagttgagattatgagaattggcaaggttatagatataaattgtgaagtagctattttagcttcaagtatcagtaagcaattcaagctaccaatggcagatagcataatttacgcaacagcaaaaatacacaatgcggagatttacacccaagataagcattttgaaaatttagagaatgtgcattattttccaaagtaa

SEQ ID NO: 38526 - protein, 123 aa, Unknown
  Obtained from environmental sample
  DOMAIN (2)...(120): PIN domain
  misc_feature (1)..(123): Xaa is any amino acid
MKIVDTSLWIEFFAGTELDESILNTIKKKDELYVPVICLYEVRKKFVNDNDIEKADLAVEIMRIGKVIDINCEVAILASSISKQFKLPMADSIIYATAKIHNAEIYTQDKHFENLENVHYFPK

SEQ ID NO: 38527 - DNA, 573 bp, Unknown
  Obtained from environmental sample
  misc_feature (1)..(573): n is a, c, g, or t
atgtgcattattttccaaagtaaaaaaatgtatattccctctatggaaaacaaaacccaaacaaaaacgcttatgctaggcgaccacgcagttgcccaaggtgcgtacgaagcaggcgttaaggtggcggcggcataccccggtacgccgagtacggaaattaccgagtgtatggcgacattcaaagaagtgaatgccgagtggtcggttaatgagaaagtatctatggaagttggcataggggctgcaatggcgggcaaacgggctttggtcgctatgaaacacgtggggcttaatgtggctgccgaccctttatttacattttcatatacaggattgaacgctgggcttgtggttgctgttgccgatgaccctggtatgcattcaagccaaaatgagcaagactctcgctactatgctcaaagtgcccacgttccaatgcttgaaccagcagacagccaagaagcaagggatttcacaatgctcgcttacgagttgagcgaaaaatacgatactccagtattcatacgcctcacaacacgaatcgcgcactcacgttctttgtggaaatag

SEQ ID NO: 38528 - protein, 190 aa, Unknown
  Obtained from environmental sample
  DOMAIN (33)...(190): Pyruvate flavodoxin/ferredoxin oxidoreductase, thiamine diP-binding domain
  misc_feature (1)..(190): Xaa is any amino acid
MCIIFQSKKMYIPSMENKTQTKTLMLGDHAVAQGAYEAGVKVAAAYPGTPSTEITECMATFKEVNAEWSVNEKVSMEVGIGAAMAGKRALVAMKHVGLNVAADPLFTFSYTGLNAGLVVAVADDPGMHSSQNEQDSRYYAQSAHVPMLEPADSQEARDFTMLAYELSEKYDTPVFIRLTTRIAHSRSLWK

SEQ ID NO: 38529 - DNA, 633 bp, Unknown
  Obtained from environmental sample
  misc_feature (1)..(633): n is a, c, g, or t
ttgatcagatcggccgagagcgcttggatattcgccgtcgccgctgtttccgttactttgcttgtccgctcccgaagcagtattctaaaactttcagaacaatacgctatcagtatggcaaacgactccgccgctgatgttacaaattttatagatgcttatatgcacaaggcggaaactgtcgctactgttatggaacaataccgttatatgataattgctaatcgccgtactttttttaattttatcctcgatggcatgacgaaggaaagcccggaaattatcgcgacatggtgcgtatgggaaccggatgccttggaaggcgatgataaacaattcatgggaacaaaaggaacaagtgtaaccggacgtttcgccccatattattattgggataacggaaaggttaaaatgagcgttctggaagattttgaagaccctgcttatcttataccgttaaaaacgggggttcaggcagttattgacccatacgagtacgatgtgggcggaaaaactttattgataacatcaattgcctatccgatacgcaacaacggcaatgttgtgggtgttataggttttgatcttcccttaacggatattcaaaaatttctcagactcaaaaccttttga

SEQ ID NO: 38530 - protein, 210 aa, Unknown
  Obtained from environmental sample
  misc_feature (1)..(210): Xaa is any amino acid
MIRSAESAWIFAVAAVSVTLLVRSRSSILKLSEQYAISMANDSAADVTNFIDAYMHKAETVATVMEQYRYMIIANRRTFFNFILDGMTKESPEIIATWCVWEPDALEGDDKQFMGTKGTSVTGRFAPYYYWDNGKVKMSVLEDFEDPAYLIPLKTGVQAVIDPYEYDVGGKTLLITSIAYPIRNNGNVVGVIGFDLPLTDIQKFLRLKTF

SEQ ID NO: 38531 - DNA, 744 bp, Unknown
  Obtained from environmental sample
  misc_feature (1)..(744): n is a, c, g, or t
atggcaggtaaatatcttgacagttttttgaactcggtaaaaacgggaaaattcttttccttttccaatttcatagaagcactaggaaaggaaatgagaatgtttatcgttcccattatcttcggagaaacaaaaatcacatggagttacgcaatagccgttatgagcaatgtggtaatggctcctgtctatgaaatgattttcataaccatactgataagcgcgcttgttttgggtatcgttatttccgcgtcggtgttcctgtcccgctccataagcaaacccattgttaaagcggctgacactttaaaagatatttccgaaggcgagggtgatcttacgcggactattgccgtcaattcaaaagacgagattgggaatcttgccctgtactttaacaaaacgctggaaaaaatcagaaaacttgtcataaccataaaatatgaaacgggaaatcttaacaacaccggcaatgaacttgcaaccaacatgacggaaacagccgcggctataaatgagattaacgctaacattcaaagtatgaaaggacgcgttttgaaccagagcgcgagcgtgagcgaaacgcacgctactatggaacaggttgtctctaatatcaacaagcttaacaatcatgttgagaatcagagtaacgatgtatcgcaagcgtcgtccgccatagaagaaatggtagccaatattcattcggttaccgagactcttgaaaaaatacccgacatgtaa

SEQ ID NO: 38532 - protein, 247 aa, Unknown
  Obtained from environmental sample
  DOMAIN (70)...(141): HAMP domain
  misc_feature (1)..(247): Xaa is any amino acid
MAGKYLDSFLNSVKTGKFFSFSNFIEALGKEMRMFIVPIIFGETKITWSYAIAVMSNVVMAPVYEMIFITILISALVLGIVISASVFLSRSISKPIVKAADTLKDISEGEGDLTRTIAVNSKDEIGNLALYFNKTLEKIRKLVITIKYETGNLNNTGNELATNMTETAAAINEINANIQSMKGRVLNQSASVSETHATMEQVVSNINKLNNHVENQSNDVSQASSAIEEMVANIHSVTETLEKIPDM

SEQ ID NO: 38533 - DNA, 1275 bp, Unknown
  Obtained from environmental sample
  misc_feature (1)..(1275): n is a, c, g, or t
ttggcgtccggcgagacggcgacctttaccgtcaggcctttggcgaatttgcctgtcgggaatcacgacgaggttatatggatagacggcagtaacggggccggtacggccggtacgtcggtggcggtgtcgtttggcgtggtgtcggcgaagagttacgatatggaagtatcgtcgaataagttgtcgtttgggtctagggaggttggttacattacggcgccggatatgcagtttgttacggttaggaataccggtactgagccgttgtcgttgtcgcggtcggcgccgtcggcgcttttgtattacgatgaggagccgaagtctgtaactatagcgtccggcgcgacggcagactttgggttcaggcccaaggttgatttgggtgtcaatcctcagtataaggagactataactataaccggtacgagtggtgcgagcagggtgagtaaggaagtggaactcgtgtttgcggtgttggagaagggcaaaactcagaccaaggagatcagcgtgtctacggcgcctatttctttcggttctgttcagagggcgaaggcggcgccgtattacgcgcagcctgctgtgaagacggtgataataaccaatatcggtacgggcgatgttacgttgactaagccggtgttggcgaatttcgatgtgaaattggagccgtcgatcattgagtccggcggtaaggcgacgcttactatccgtccgaaagcgggtttgcagagtgggaattacggtaactatatagaaataattggcgaatacgataagccggaggagagggttagaataccggtttcgttcaccgtgatggacgcgccgaggtacacgctcacgacgtcgccgttggaggtcatgtttacgcctgttgttaagggttacagcaagacgtctataactccaaagatggtgacgataagcactaacagttcgggtacgattacgttggatgatttgccggcgtctacgaagtttttcgacataacgacgccgttgtcgacgaatgtgattgctgcgggtaagccggcgacgttctacgtccgtccgcaggagggtctctctacgcaaggtaatgatgcgtatacatataatgatgattttgagatcaccggcagcaacgaagcgttgacttgngtacggttatcgttaacagtggtgaataaggagacgtactctataagcgccacgcccgtgcgtccgttcgggtcgttgctggggccgaactacactcagccggacgcgcagactattactatatattaa

SEQ ID NO: 38534 - protein, 424 aa, Unknown
  Obtained from environmental sample
  misc_feature (1)..(424): Xaa is any amino acid
MASGETATFTVRPLANLPVGNHDEVIWIDGSNGAGTAGTSVAVSFGVVSAKSYDMEVSSNKLSFGSREVGYITAPDMQFVTVRNTGTEPLSLSRSAPSALLYYDEEPKSVTIASGATADFGFRPKVDLGVNPQYKETITITGTSGASRVSKEVELVFAVLEKGKTQTKEISVSTAPISFGSVQRAKAAPYYAQPAVKTVIITNIGTGDVTLTKPVLANFDVKLEPSIIESGGKATLTIRPKAGLQSGNYGNYIEIIGEYDKPEERVRIPVSFTVMDAPRYTLTTSPLEVMFTPVVKGYSKTSITPKMVTISTNSSGTITLDDLPASTKFFDITTPLSTNVIAAGKPATFYVRPQEGLSTQGNDAYTYNDDFEITGSNEALTXVRLSLTVVNKETYSISATPVRPFGSLLGPNYTQPDAQTITIY

SEQ ID NO: 38535 - DNA, 528 bp, Unknown
  Obtained from environmental sample
  misc_feature (1)..(528): n is a, c, g, or t
ttgcagaagaagcgaanacggccggcgttgataaattcctgtccaagcccctgtttccttccaccattgcggaagttattaatgaatgtctcggcgtggacaaacaacaggtggaaaaatcgctggccgcggggattaacggtcatctttaaggggcggcacacgcttctggttgaagacatggaaattaagcgcgagattgtacagaccttgctagtaccgacacagttagcaatagattgctcggaaaacggcgcgaagtcggtgcgtatatttgccgcggatccgcataaatacgacatgatttttatggatatacaaaggccggaaatggatgcctatgaagcgacacgctgtattcgcgctttggatattccgaagacaaaaggcattccgatagtggcaatgaccgcgaatgtgttcaaagaggattttgaaaggtgccttgaggccggcatgatcagccatgtaggtaaaccggttaatttcgaggaagtcttgaaccgtcttcacttaaatttgggttag

SEQ ID NO: 38536 - protein, 175 aa, Unknown
  Obtained from environmental sample
  DOMAIN (53)...(171): Response regulator receiver domain
  misc_feature (1)..(175): Xaa is any amino acid
MQKKRXRPALINSCPSPCFLPPLRKLLMNVSAWTNNRWKNRWPRGLTVIFKGRHTLLVEDMEIKREIVQTLLVPTQLAIDCSENGAKSVRIFAADPHKYDMIFMDIQRPEMDAYEATRCIRALDIPKTKGIPIVAMTANVFKEDFERCLEAGMISHVGKPVNFEEVLNRLHLNLG

SEQ ID NO: 38537 - DNA, 804 bp, Unknown
  Obtained from environmental sample
  misc_feature (1)..(804): n is a, c, g, or t
ttggcgcaggtcatcactaacttgcttggaaacgcaatcaaattcacgccggaaaaaggttccgtttcccttgccgtgcgccttatccagcaatcaaacaacatctgtaccctgcaattttctgtaagcgataccggaatcggcatgacccctgaacagcagacaaagattttccactcttttgaacaggcggaatccagcacaacccgcaaatacggcggcacagggcttgggcttgcgatttcaaaaaacattgtagaaatgatgggcggctcaatatgggttgaatcagaacagggaaaaggctctacatttatttttacgattcaagcgatgcgcggtacggaagaaaagcgcggatttttgtcctctgatataaatttaaaaaatatccgtattttagctgttgacgatgatcaggatattttaacgtacttccttgatataatgcagagctttggcatatcctgcgacaccgcattaaacggggagaaggccctcgagctcataagccaaagaaatggctatcatatctattttatagactggaaaatgcccggcatggacggcatacaacttgcccgtaaaataaaagagcatggatctgaaaagtccattgtcataatgatttccgccgccgaatggagcgcgattgcagaagaagcgaanacggccggcgttgataaattcctgtccaagcccctgtttccttccaccattgcggaagttattaatgaatgtctcggcgtggacaaacaacaggtggaaaaatcgctggccgcggggattaacggtcatctttaa

SEQ ID NO: 38538 - protein, 267 aa, Unknown
  Obtained from environmental sample
  DOMAIN (131)...(245): Response regulator receiver domain
  misc_feature (1)..(267): Xaa is any amino acid
MAQVITNLLGNAIKFTPEKGSVSLAVRLIQQSNNICTLQFSVSDTGIGMTPEQQTKIFHSFEQAESSTTRKYGGTGLGLAISKNIVEMMGGSIWVESEQGKGSTFIFTIQAMRGTEEKRGFLSSDINLKNIRILAVDDDQDILTYFLDIMQSFGISCDTALNGEKALELISQRNGYHIYFIDWKMPGMDGIQLARKIKEHGSEKSIVIMISAAEWSAIAEEAXTAGVDKFLSKPLFPSTIAEVINECLGVDKQQVEKSLAAGINGHL

SEQ ID NO: 38539 - DNA, 591 bp, Unknown
  Obtained from environmental sample
  misc_feature (1)..(591): n is a, c, g, or t
atgaaaaaactcgcggtagttggtgcgggcgtatcgggaatgacggcggcgatatattgccttaaatgcggatttgacgtaacggtgtatgaacagcattccaggagcggcggcctctgttcaagctgggaacggaacgggtacgtattcgaaggggcgattcgctggatcaacgattcggccaaaacagatccaatctaccgtttatggcgtgataccggtattttgggggatgatatcaaaatatatcggactgatccgtattttgtttacgattacaaaggtacaaacatatatctctatcgtgatattgataaattgaagatgcattggctggaaatttccccggaagataaaaaagccatcgagacgctttatcgggatatacaggcaatgagaacgctcaagatacccttgatggatattccgggacttaaaacaaataaaaagaaccctattgatataccgctgctggtgaaaatggtgccgggtcttttaaaaacactgcgcctgtcaaaatactcgacaaaggaatacgcggcggcttttaagcatcccggtttacggaaaatcctgggcgaatacatgtaa

SEQ ID NO: 38540 - protein, 196 aa, Unknown
  Obtained from environmental sample
  SIGNAL (1)...(22)
  misc_feature (1)..(196): Xaa is any amino acid
MKKLAVVGAGVSGMTAAIYCLKCGFDVTVYEQHSRSGGLCSSWERNGYVFEGAIRWINDSAKTDPIYRLWRDTGILGDDIKIYRTDPYFVYDYKGTNIYLYRDIDKLKMHWLEISPEDKKAIETLYRDIQAMRTLKIPLMDIPGLKTNKKNPIDIPLLVKMVPGLLKTLRLSKYSTKEYAAAFKHPGLRKILGEYM

SEQ ID NO: 38541 - DNA, 477 bp, Unknown
  Obtained from environmental sample
  misc_feature (1)..(477): n is a, c, g, or t
ttgtctattcccgccaaatggcatagtattacccccatgggaaaatcaagatcccacgggaagaagggttccggtggacaatcttccggtggaatgagggcggccagcggcgttgctgcctataaaaagaccatggaagaaggtcttataaaaaccggacaaggcgctgcggatgaaaaggcgggtgtaaccccttcaaaatacagaagagcggcccaattcatggttcttatcgggagcgatgaggcgtcaaggatattttcaaagctggatcccaagcaggtagaggccatttcaaaggaaattgttaccttaaagaccataactgccaaagaagccgagagtgtccttgaagaattccgttcccttttgtcatcctcctacgggtattctggctcgtcttcagggggcgtagaacaggcgcgccgtctgctctacgcggcctttggcccggaaaaaggcgagaccatgctgtaa

SEQ ID NO: 38542 - protein, 158 aa, Unknown
  Obtained from environmental sample
  misc_feature (1)..(158): Xaa is any amino acid
MSIPAKWHSITPMGKSRSHGKKGSGGQSSGGMRAASGVAAYKKTMEEGLIKTGQGAADEKAGVTPSKYRRAAQFMVLIGSDEASRIFSKLDPKQVEAISKEIVTLKTITAKEAESVLEEFRSLLSSSYGYSGSSSGGVEQARRLLYAAFGPEKGETML

SEQ ID NO: 38543 - DNA, 825 bp, Unknown
  Obtained from environmental sample
  misc_feature (1)..(825): n is a, c, g, or t
atgtttgttcatccaaaagacatccaggatggacttattgaggctacaagtaacgacgttgttgccaatgttccttatatcaacggctgcggcctctggtttgaccaccattccagcgaggaggaaaggcttgggaaggatatcaaattcgaaggtgtttccaggaaatcgccgagctgcgcccatgttgtttatgattactatggcggtccggaaaaactgggaaatttcgccgaaatgataaaatatgtagacaaaatggactcagcggatctcacagtagatgaaattatgcatccttcaggctgggttctgctcggctttatcaccgatccccgcacagggcttggcagaattcgcaacttcaccataagcaaccttgatctgatgaaaaaactgtcaaaagctacttttcagaaacccattgatgagatcctcgcgatgcccgatgttaaagaacgcatagatacctattttgaacagcataaccttttcattgaaatggcaaagaaacacgcaaaaacccagggaaacgccatcatttgtgatatgcgtaatattgatacaatatacgctggcaaccgcttccttctctatacgctctttccaaaacagaatatttccgtttgggttgtggatgggaaaaagaaggtcaataccgtaattaccgtaggctatagcattataaacaaaaccgctacagtcgatgttggcagtttaatgctgaaatacggcggcggcggacacaaggcggtaggtacctgccaggtggcttatgagaataccgataaaattctcaatgaaattatcgctgcggtaaaatga

SEQ ID NO: 38544 - protein, 274 aa, Unknown
  Obtained from environmental sample
  misc_feature (1)..(274): Xaa is any amino acid
MFVHPKDIQDGLIEATSNDVVANVPYINGCGLWFDHHSSEEERLGKDIKFEGVSRKSPSCAHVVYDYYGGPEKLGNFAEMIKYVDKMDSADLTVDEIMHPSGWVLLGFITDPRTGLGRIRNFTISNLDLMKKLSKATFQKPIDEILAMPDVKERIDTYFEQHNLFIEMAKKHAKTQGNAIICDMRNIDTIYAGNRFLLYTLFPKQNISVWVVDGKKKVNTVITVGYSIINKTATVDVGSLMLKYGGGGHKAVGTCQVAYENTDKILNEIIAAVK

SEQ ID NO: 38545 - DNA, 756 bp, Unknown
  Obtained from environmental sample
  misc_feature (1)..(756): n is a, c, g, or t
atgggtgagtggagggagacgacgcttggtgaagtcgtaacatttcaacgtggtttcgacattaggaaaattgatcaaaatcntggttcgattcctgtaatatcgtcttctggtataacaagttatcacaatgaatacaaagcagaaggccccggagtccttgttggacgaaaaggtactcttggaacagtattttatgtggaaaacaattactggccacatagtacatctttatgggtgaaagattttcacggtaatgatccactctttatatattattttcttaaaacattcgatttcaaaatacatgatgttggctcatctaatccaacattgaacagaaaccatattcatttattacgttgctcaatcccttctcaccttgaacaacgtgccattgccgaagccctctcctcccttgatgacaaaattgatatgctgacgcaacagaacgcaacgcttgaagcgttagcgcaaactttttttcggcaatggtttacagaggaaatacaaaaagattgggatattatgaaaataagtgattttgccgatgtcacaactggaaaaggtctaaaacgagaattttttgacgaagatggtcaatatcctgtacttggtgcaaatggcgaaattggacgaactaatagttatctttataatgaacatctactaataactgggcgagtcggaactcatggaaaggtatttcttataaacgataaggtatggatttctgataatgtacttataatttaa

SEQ ID NO: 38546 - protein, 251 aa, Unknown
  Obtained from environmental sample
  DOMAIN (4)...(142): Type I restriction modification DNA specificity domain
  misc_feature (1)..(251): Xaa is any amino acid
MGEWRETTLGEVVTFQRGFDIRKIDQNXGSIPVISSSGITSYHNEYKAEGPGVLVGRKGTLGTVFYVENNYWPHSTSLWVKDFHGNDPLFIYYFLKTFDFKIHDVGSSNPTLNRNHIHLLRCSIPSHLEQRAIAEALSSLDDKIDMLTQQNATLEALAQTFFRQWFTEEIQKDWDIMKISDFADVTTGKGLKREFFDEDGQYPVLGANGEIGRTNSYLYNEHLLITGRVGTHGKVFLINDKVWISDNVLII

SEQ ID NO: 38547 - DNA, 459 bp, Unknown
  Obtained from environmental sample
  misc_feature (1)..(459): n is a, c, g, or t
ttggaactnggcaaggggttctcttttgtggacaggcagatgcgtatcaacagcgaaaccagcgatttctatattgatttgtttttctacaactatctccttaaatgttttgtcattgttgatctgaaaacaggaaaacttactcatcaggacatagggcagatggatatgtatgtacggatgtttgacgcccttaaacggttggaaggagataatccgaccgttggtatcattctctgcgctgaaaaggatgaaattatcgctaaatattcggtgttgagtgaaggtaaaagactttttgccgccaaatacaaaacaatcctgccaaccgaaaaagagttgtccgcctatcttgcggataaaaaccgccttctgccggagaccgcaatggttaaaattggaagcagaaaaaagatagtagcaagttttcgtttgacaaaggggaagcataatgggtga

SEQ ID NO: 38548 - protein, 152 aa, Unknown
  Obtained from environmental sample
  DOMAIN (1)...(121): Protein of unknown function (DUF1016)
  misc_feature (1)..(152): Xaa is any amino acid
MELGKGFSFVDRQMRINSETSDFYIDLFFYNYLLKCFVIVDLKTGKLTHQDIGQMDMYVRMFDALKRLEGDNPTVGIILCAEKDEIIAKYSVLSEGKRLFAAKYKTILPTEKELSAYLADKNRLLPETAMVKIGSRKKIVASFRLTKGKHNG

SEQ ID NO: 38549 - DNA, 669 bp, Unknown
  Obtained from environmental sample
  misc_feature (1)..(669): n is a, c, g, or t
ttggattatcctggcgaagcggattttattgaaatggcagttgcggaatttagcccggcaggcgatagtcttccccttgtggcgagctacaacggcaagtgctttgattcccagattattaaaaatcgctgtctgctcaacagaattcatccgcctgaatattaccaggcggatcttcttcacccatcaagacggctctggaaaaatctgctgagcgactgttcccaggccacaatcgaggttcaaattctggggcttgaccggaccggggatatatcgggcgctatggctcctgaaatttggttttcgtttttaagagacggtgatgacgcggcaagcacggcggcactgctttcggtctgcgatcataacgcgagggatgtagcgggccttgcgacgcttttccttgcccttggaaaaattgcgtccgatccgttcaagagccgggacatttttcggtttgacgataaagcgctggctttattttggtggaaggccataaaaaagcatccgcttttctttgacggtgatgaatcttacgttaaaacggctttttctcttttggaaaccgccgccaaagacggaagccctcaggcggctattgtccttgccaaggatgcggaatggcggctaagggatatcaaactggcgttgtattacaccaattag

SEQ ID NO: 38550 - protein, 222 aa, Unknown
  Obtained from environmental sample
  misc_feature (1)..(222): Xaa is any amino acid
MDYPGEADFIEMAVAEFSPAGDSLPLVASYNGKCFDSQIIKNRCLLNRIHPPEYYQADLLHPSRRLWKNLLSDCSQATIEVQILGLDRTGDISGAMAPEIWFSFLRDGDDAASTAALLSVCDHNARDVAGLATLFLALGKIASDPFKSRDIFRFDDKALALFWWKAIKKHPLFFDGDESYVKTAFSLLETAAKDGSPQAAIVLAKDAEWRLRDIKLALYYTN

SEQ ID NO: 38551 - DNA, 333 bp, Unknown
  Obtained from environmental sample
  misc_feature (1)..(333): n is a, c, g, or t
atgacagatgaatctaacgcttcgttgacgttattggcaaatataggggaaaatgtctcaaaaataatcgagagaacaaaacaagaatatccgagcgttgaatggcagagaatcaagaattttagaaacagagtggtacatgattatatgggaatagatttggctattgtatatgagattattacaactgatttaaaaaaattaagacctgaaattgaaaaagttataaaagaacgaataaaacaaaagatatttgacattgatgagataaaagcgagtaaagagagtaagtattatagtcatgttgattttgagagaataatgaccttttag

SEQ ID NO: 38552 - protein, 110 aa, Unknown
  Obtained from environmental sample
  DOMAIN (2)...(72): Protein of unknown function DUF86
  misc_feature (1)..(110): Xaa is any amino acid
MTDESNASLTLLANIGENVSKIIERTKQEYPSVEWQRIKNFRNRVVHDYMGIDLAIVYEIITTDLKKLRPEIEKVIKERIKQKIFDIDEIKASKESKYYSHVDFERIMTF

SEQ ID NO: 38553 - DNA, 813 bp, Unknown
  Obtained from environmental sample
  misc_feature (1)..(813): n is a, c, g, or t
atggaagcaatcgacaaacaggcaatccgcgtactcaggcttttcggcgacacaacagcaaagcgcgtccttacaacagtcgggcctgaacaggaatattttcttatcgacaaagaaatgttccttaaacgccctgatctgatctacaccggcagaactctgttcggcgcaaggccgcccaaaggacaggaacttgaggatcattatttcggcgctatcaaaccgagagtgtccgcttttatgaaggagcttgatgaagaactctggaaactcggcgtatacgcaaagaccaagcacaacgaagtcgctcccgctcagcacgagcttgcgccgattttctcgacgacaaatatcgccacagatcacaatcagttaacgatggaacttatgaagagcattgcgaacaaacacggacttgcctgtcttcttcatgaaaaaccgtttgccggagttaacggcagcggtaaacacaacaattggtcaatctcaactgacacaggcgtgaacctgcttgaacccggcgacactccgaatgacaatgcgcagttccttctgtttcttgtagcggttatcaaagccatagacgagtatcaggaccttctgcgcgtttccgttgcaagcgcgggaaacgatcacaggctcggagcgaatgaagcgcctcccgctattgtgtccatgttcctaggcgaggaattgactgaaataattgaagccattgaatccggcaagggttataaaaacaaagaaaaacttgatatggaaattcggcgtatctgttttgccgcatttcccgaaagacactacagatcgtaa

SEQ ID NO: 38554 - protein, 270 aa, Unknown
  Obtained from environmental sample
  DOMAIN (3)...(254): Glutamine synthetase, catalytic domain
  misc_feature (1)..(270): Xaa is any amino acid
MEAIDKQAIRVLRLFGDTTAKRVLTTVGPEQEYFLIDKEMFLKRPDLIYTGRTLFGARPPKGQELEDHYFGAIKPRVSAFMKELDEELWKLGVYAKTKHNEVAPAQHELAPIFSTTNIATDHNQLTMELMKSIANKHGLACLLHEKPFAGVNGSGKHNNWSISTDTGVNLLEPGDTPNDNAQFLLFLVAVIKAIDEYQDLLRVSVASAGNDHRLGANEAPPAIVSMFLGEELTEIIEAIESGKGYKNKEKLDMEIRRICFAAFPERHYRS

SEQ ID NO: 38555 - DNA, 1470 bp, Unknown
  Obtained from environmental sample
  misc_feature (1)..(1470): n is a, c, g, or t
atggaaaaaaaaatcgcgctgtcgaggtatgtggacgcgaaagctgtcactaanaagcttgatgacctcattaagctgcctatttatggagtcagcgacgaggcgcttaaacgctacgaaagcgactactttgacaagaagtgcgccaaatcaaaacagatgattatggaagccaggaatgttattcccggcggcgtacagcataatttggctttcaactacccgttcccgcttgtatttaccggctgcaaagaccatacgctcaccgatattgacggtaacgagtatttcgattttttgcagtccggcggaccgactgttttggggagtaaccctgacgcagtaaaggcgaaagtgtttgaactaatagaaaattgcggcccttcaacggggttgttccatgagtatgagtatcttttaggagcgaaaattgccgagtgcgtccctagtgtggatatgttcagaatgtacacctctggtaccgaggcttgcatgacagccgcccgtgtcgcgcggcttgctacaaagaaaaagtacattgtaaaaatgggcggcgcttatcacgggtggagcgaccaactcgcgtatggcattcgcatacccggcacaaaagggcttcaatcgcccggcatacccggattctgctttaataaaacccgtgaatttttccctaatgatcttaacagccttgaacgcgttttgcgtggcaataccctgcggggcggcacggcggcggtatttatcgagcccatcggtcctgaaagcggaacgcgccctgttgagaaagattttaacaaaggcgtagaggcgctatgcggaaagtacggcgcgttgcttgtctttgatgaagtagtgaccggattccgtttgggactcggcggagctcaagggttctttggcatttcgcctgatttgaccgtattcggaaaggttatcgccggcggctaccccggagcgggcggattgggcggtaaacgcgaatatatgaaattccttggatcagggcttgacggcggcggcaagaaagccctgtccggcggtacattggccgcgacgccgcttagctgtattgcgggatacacgacaatttgcgagcttgagcgtactgatggctgtacaaaagcgaatgaaattggcgactacctgacggatggcctgaacgcccttattgaagaacgcaaactgccttttgtggcgtataacgtcggttcaatatgccatcttgatacgcttggcacgatgcactatgccattaactggggcaaactctggcaggtaccgggtattttaaacgcgacatctgttcgaaagcgcgaaatggagcatattggagccgcctatatggctgaaggtattgtaactcttgcgggcaaccgtctgtacactaacgccacttatacaaaaacggatattgatgaggtgctgacacgttttaacaatgtgttcgggcatattgttattaaatcgtaa

SEQ ID NO: 38556 - protein, 489 aa, Unknown
  Obtained from environmental sample
  DOMAIN (79)...(412): Aminotransferase class-III
  misc_feature (1)..(489): Xaa is any amino acid
MEKKIALSRYVDAKAVTXKLDDLIKLPIYGVSDEALKRYESDYFDKKCAKSKQMIMEARNVIPGGVQHNLAFNYPFPLVFTGCKDHTLTDIDGNEYFDFLQSGGPTVLGSNPDAVKAKVFELIENCGPSTGLFHEYEYLLGAKIAECVPSVDMFRMYTSGTEACMTAARVARLATKKKYIVKMGGAYHGWSDQLAYGIRIPGTKGLQSPGIPGFCFNKTREFFPNDLNSLERVLRGNTLRGGTAAVFIEPIGPESGTRPVEKDFNKGVEALCGKYGALLVFDEVVTGFRLGLGGAQGFFGISPDLTVFGKVIAGGYPGAGGLGGKREYMKFLGSGLDGGGKKALSGGTLAATPLSCIAGYTTICELERTDGCTKANEIGDYLTDGLNALIEERKLPFVAYNVGSICHLDTLGTMHYAINWGKLWQVPGILNATSVRKREMEHIGAAYMAEGIVTLAGNRLYTNATYTKTDIDEVLTRFNNVFGHIVIKS

SEQ ID NO: 38557 - DNA, 894 bp, Unknown
  Obtained from environmental sample
  misc_feature (1)..(894): n is a, c, g, or t
ttgcttacctgggtcatattgaccggaatcgcgccaacgagtacaaaagacccattatggaagtataagtgggttcaaaagtacgaaccggaaatcttttccggtgtatacaaatggatggacgccaaggactatctcgctgcccgtcttaccggtgtctttgccatgactgagggttctgcctttgctaccgctctctatgacacgcggcggggtaaacagggttggaacaaaaagttatgcaggattgcgggtgttaaaccggaacatctgccggatataataaagccctgcgataaattaagcggcattttgccgggcgccgcggaagaaatcggacttgccgcggggacggcggtctacggcggaggcggtgatgcggagcttattggtattggcgccggcgcggttgaaccgggaagcacgcacatctatattggaacatcaggatgggtgtcaactgttgtaaagaaacaagtagtggacataggcgcgtctatcggatctatcgtcggctgtcagcccgggttattcaattacttcgccgaaatggaaacggcgggcaagagtttggagtgggttaaagaccacctcgctcttgatgaaatcaacatatatctcgaaaaaaaagatgttaccgaaggcattgaaagcgagtacttaagcctgttcgattatctgtgccaggcgattagcaaggtacccgcgggaagtaacggagtcgtttttacgccgtggctgcacggaaaccgctgcccgtttgaggacagtaatgcaagaggcatattctttaatataggactggaaacaggaaagaccgcgctcattcgttccgtggtagaagggatttgcgttcattgcccgtatatgcttgaggcgcaaagaaaaaagtga

SEQ ID NO: 38558 - protein, 297 aa, Unknown
  Obtained from environmental sample
  misc_feature (1)..(297): Xaa is any amino acid
MLTWVILTGIAPTSTKDPLWKYKWVQKYEPEIFSGVYKWMDAKDYLAARLTGVFAMTEGSAFATALYDTRRGKQGWNKKLCRIAGVKPEHLPDIIKPCDKLSGILPGAAEEIGLAAGTAVYGGGGDAELIGIGAGAVEPGSTHIYIGTSGWVSTVVKKQVVDIGASIGSIVGCQPGLFNYFAEMETAGKSLEWVKDHLALDEINIYLEKKDVTEGIESEYLSLFDYLCQAISKVPAGSNGVVFTPWLHGNRCPFEDSNARGIFFNIGLETGKTALIRSVVEGICVHCPYMLEAQRKK

SEQ ID NO: 38559 - DNA, 564 bp, Unknown
  Obtained from environmental sample
  misc_feature (1)..(564): n is a, c, g, or t
atggctacgggttggtatgtcctgcatacatattcaggatacgaaaacaaaatagaaaaaaccatccgcatgatgacaaataacggggaattggataagaacgtcgtccgtgacgtgaaagtcccctccgaagaagttgtcgaagttaaagatggcaagaaacgcactcaaaccagaaaaatccttcccggttatatcattgtggaaatggatttacccgacgccgaaatgggctggaaggctccttgttcaaaaatcaaaaaaattcagggcgttacgggatttgtaggaacgccttcggatcgcaagccccagcctttgtccggcgacgaagcgcgggctattttacaaaagtcaggcgaaatcaagggagaacgcactgtccgcacaaggcagaattttgtcgccggcgagcaggttaaaattattgacggaccgtttgagtcatttgtcggaactatcgaagaagttaatcaggaaaagaacaagttaaaagtaatggttggtatttttggcagaaatgcgcctgtagaagtcgatcttttgcaggtagaaaaagtttaa

SEQ ID NO: 38560 - protein, 187 aa, Unknown
  Obtained from environmental sample
  DOMAIN (134)...(171): KOW motif
  misc_feature (1)..(187): Xaa is any amino acid
MATGWYVLHTYSGYENKIEKTIRMMTNNGELDKNVVRDVKVPSEEVVEVKDGKKRTQTRKILPGYIIVEMDLPDAEMGWKAPCSKIKKIQGVTGFVGTPSDRKPQPLSGDEARAILQKSGEIKGERTVRTRQNFVAGEQVKIIDGPFESFVGTIEEVNQEKNKLKVMVGIFGRNAPVEVDLLQVEKV

SEQ ID NO: 38561 - DNA, 867 bp, Unknown
  Obtained from environmental sample
  misc_feature (1)..(867): n is a, c, g, or t
atgcttatcgacccaaaaattgttgagttgaaattgtacaacgacatcccccatttattgacgccggtaattaccgattcaaaaaaagcgtttcaggctttacaatactgcatttatgaaatggagagacgctatgcctgccttgactcaatgggtgtgcgcgacattcgcagttacaacaaacgcgtcaaagaaaaaaatgtcgcgcaggaatatatgccctatatcgtcgttgtaattgacgaatacgccgatttgatgacgactaccggaaaggaattggagtccaccgtggcaaggcttgccgcgatgagccgcgccgtcggtattcaccttgtgcttgcgactcagcgtccttctatcgacgtaataacgggacttatcaaggcaaatattccaagccgtatcgcgttcatggtcgccagtaaaacggacagcagaatcataatcgacatggttggcgctgaaaaacttttaggcaagggcgatatgctttattccggcgttgtcgatcctttcccgattcgtatgcagggcgcgtttatttccgaagaagaagtagaatcggttgttgaatatgtaaaatcattcggcgagcccgattatatagacgatgaaattttctttgaagaagaagaggaagactcaggcgcttccctattctccgacggcgatgatccgttatacgaaaaagcgctggaaatagtttatcagcagggcaaggcaagcgccagctacattcaacgcagactgaagattgggtttaaccgcgccgcaaggattgttgatgagatggagcataacggggtagtcggccccgcgcacggaagcaagccaagggaactgataagggcgatgggggcttga

SEQ ID NO: 38562 - protein, 288 aa, Unknown
  Obtained from environmental sample
  DOMAIN (1)...(121): FtsK/SpoIIIE family
  misc_feature (1)..(288): Xaa is any amino acid
MLIDPKIVELKLYNDIPHLLTPVITDSKKAFQALQYCIYEMERRYACLDSMGVRDIRSYNKRVKEKNVAQEYMPYIVVVIDEYADLMTTTGKELESTVARLAAMSRAVGIHLVLATQRPSIDVITGLIKANIPSRIAFMVASKTDSRIIIDMVGAEKLLGKGDMLYSGVVDPFPIRMQGAFISEEEVESVVEYVKSFGEPDYIDDEIFFEEEEEDSGASLFSDGDDPLYEKALEIVYQQGKASASYIQRRLKIGFNRAARIVDEMEHNGVVGPAHGSKPRELIRAMGA

SEQ ID NO: 38563 - DNA, 702 bp, Unknown
  Obtained from environmental sample
  misc_feature (1)..(702): n is a, c, g, or t
ttgttcgcaggtaatacggagtcgcctgaactcaatatccttcgcgccgaaaaagaaattagtgatatggccagaattgtctcgtttatgtattcccgcttttgcacggtgttacgcggtttacacgaagagggcggcaatgacaaagagaataccgccgagttatgcgcggaactgttagaaaaagaggaatacattgatgaaatgcgggaaacactcagcggctttttaattgaatgttcccgcgtaaaactcaatccaaagactgaagcccgtatttcttaccttatgcaggtcatttccatgcttgaatcaatgagcgatgaatgttacagcataagccgtttgctggaaaaaagcgttgacaagaattacctgctaaaaaacaaggaaatggatgagcttatcccttatgttgggctagttgaggaatttttaagcttgcttgaaaaacagcttgggcgtaatccgtcatcggaactaaaaatacgcgccgccgaactggaaaataaaatcgacaaagaccgcaaaaaattgcaaaaacttgggcgcaagcgtatcgaagccggcggcaatgtaaaaaccgaattgctttttatagatttagtccgtagaatagaaagacttggagattactgttttgaaatttcagaagaaaatacgctcaaaaaattaattaacaccattattaataaaaagtga

SEQ ID NO: 38564 - protein, 233 aa, Unknown
  Obtained from environmental sample
  misc_feature (1)..(233): Xaa is any amino acid
MFAGNTESPELNILRAEKEISDMARIVSFMYSRFCTVLRGLHEEGGNDKENTAELCAELLEKEEYIDEMRETLSGFLIECSRVKLNPKTEARISYLMQVISMLESMSDECYSISRLLEKSVDKNYLLKNKEMDELIPYVGLVEEFLSLLEKQLGRNPSSELKIRAAELENKIDKDRKKLQKLGRKRIEAGGNVKTELLFIDLVRRIERLGDYCFEISEENTLKKLINTIINKK

SEQ ID NO: 38565 - DNA, 801 bp, Unknown
  Obtained from environmental sample
  misc_feature (1)..(801): n is a, c, g, or t
atggcacctgtcggaacaattcacacaatatccggtgccggaagtgaaaccagccgttcggtggttatcgtagacgacatggattcgggccataagttgagcgttaacgctgacagttgccggcctgtttttgccataatgaaccctgaattgacttattcggttcctgcttatcaaacgggagtgggagcggcggatactattgcccatacagttggcaagtactttacaaaagacaatcccgcgtgcagcctgggagacgaatttggcgaaggactgattaggacagttgtaaagtttgcccccatagccattgccaaccctaacgactacgaggccagggcggagctaatgatggcggcctccttcagccacaacgaacttaccagcattggacgcagcggcaagcgcgggggagagcatccattagaacaccagttatccggccactacgacacagcccatggtgcggggctctcggtaatcatgcccgcatggcttcagtacatagcagataatggcactggcaagcaaattgagcgggtcgcccaattcggctccaaaatctttgctgtcaaggcagataatgccagcgctaaaaccatcgcaaacgcgggacttgatgctttccgtgcctggctgcgctcaattggaatgcctctgacacttgcggagctgggcatcccaaaaactgaacttgacgccgtagtaaaacgcgcagttgacgccaacaacggaaatatctctggctttatcgacctggacgaaaaagcgataaaggcaatatattcttcggtataa

SEQ ID NO: 38566 - protein, 266 aa, Unknown
  Obtained from environmental sample
  DOMAIN (1)...(259): Iron-containing alcohol dehydrogenase
  misc_feature (1)..(266): Xaa is any amino acid
MAPVGTIHTISGAGSETSRSVVIVDDMDSGHKLSVNADSCRPVFAIMNPELTYSVPAYQTGVGAADTIAHTVGKYFTKDNPACSLGDEFGEGLIRTVVKFAPIAIANPNDYEARAELMMAASFSHNELTSIGRSGKRGGEHPLEHQLSGHYDTAHGAGLSVIMPAWLQYIADNGTGKQIERVAQFGSKIFAVKADNASAKTIANAGLDAFRAWLRSIGMPLTLAELGIPKTELDAVVKRAVDANNGNISGFIDLDEKAIKAIYSSV

SEQ ID NO: 38567 - DNA, 372 bp, Unknown
  Obtained from environmental sample
  misc_feature (1)..(372): n is a, c, g, or t
atgtatcatgtcagggtagaagaagaattttcggcagcccattttctaagccactacaggggaaaatgcgaaaatctccacggtcacaattaccttgttcacctttggctttgcgggaaagaacttgacgagggcgggatgctttttgatttttcattattaaaaaaaattctgagagaagtcctgaccattttggatcattcgaatttaaacgacatggacgttttttgcggggatcccagcgccgaacgtatcgcgaaattcatctatgaggaagttcaaaaaaaactgcctgtcggggcggcagagctattatgggcggtggatgtttttgaaaattcccgaagcatggcaaggtactcgctcagttga

SEQ ID NO: 38568 - protein, 123 aa, Unknown
  Obtained from environmental sample
  DOMAIN (1)...(123): 6-pyruvoyl tetrahydropterin synthase
  misc_feature (1)..(123): Xaa is any amino acid
MYHVRVEEEFSAAHFLSHYRGKCENLHGHNYLVHLWLCGKELDEGGMLFDFSLLKKILREVLTILDHSNLNDMDVFCGDPSAERIAKFIYEEVQKKLPVGAAELLWAVDVFENSRSMARYSLS

SEQ ID NO: 38569 - DNA, 555 bp, Unknown
  Obtained from environmental sample
  misc_feature (1)..(555): n is a, c, g, or t
ttgaaacttttactccatacctgttgcgccccatgttcaatccagtgtgtagaatctttggccgaagaagaaataaaaccgcatcttttctggtacaaccccaacatccatcctttcaccgaataccgttccagacgggatactctgtgcttttttgcccgtgaaaagacactccagttatttaccgatgacgaatacggccttcgttcctttataaaaaatgtctctcgcatcgagtctgaatcgggtgaatccaaatcaaaaattgatcgctgccttttttgctaccgtataaggcttgaaaaaaccgcgcgattggccgcggaaaaatcctttgacgctttttccacaaccctgctaataagcccatatcaaaaccatgacgccataaaagaaatcggagagcatgtggcaaacgaattctcggtgaattttctataccgcgattttcgtccgcgttttcatgaagggcaaaaacaggcaagaaaatcgagctactatatgcaaaaatactgcggctgtatttatagcgaggaagaaaggtaccttaaatga

SEQ ID NO: 38570 - protein, 184 aa, Unknown
  Obtained from environmental sample
  SIGNAL (1)...(21)
  DOMAIN (3)...(181): Uncharacterized BCR, COG1636
  misc_feature (1)..(184): Xaa is any amino acid
MKLLLHTCCAPCSIQCVESLAEEEIKPHLFWYNPNIHPFTEYRSRRDTLCFFAREKTLQLFTDDEYGLRSFIKNVSRIESESGESKSKIDRCLFCYRIRLEKTARLAAEKSFDAFSTTLLISPYQNHDAIKEIGEHVANEFSVNFLYRDFRPRFHEGQKQARKSSYYMQKYCGCIYSEEERYLK

SEQ ID NO: 38571 - DNA, 699 bp, Unknown
  Obtained from environmental sample
  misc_feature (1)..(699): n is a, c, g, or t
atggtgtttggcggggcttttccggcggaaaaggcactgcgccttgagggaggaaaggactttggaagcgaagttttccttgaccgcagggaactggggattatctgcattgcgggccggggaaaagtatccgcagacggaacagaatacgaccttaaaaaaggcgacggcctgtatgcgggcaagggggtaaaagacctggtgttctccgcaacggaaaaaaacgatccgccgaaattctacctcgccagcgctccggcccatatttcctatcctgtcgttttcatcccgattgaaaaagccaacccgcgcaagctgggcgaggccgccgcggtgaatgtacgcaccatctatcaatatgttcatcccgccgtctgtcagagctgccagttggtcatgggcatgaccgtgcttgaggaaggatcggtctggaataccatgccctgccacacccacgagaggcgcatggaggtttacctgtattttgatataaaacccggcgcggcggttttccacatgcatggccagccggatgagacccgccatatcgtcatgaataacgaacaggctgttatttcgccttcctggtcgattcattgtggagccggcacggcggcctatacctttatctgggcaatggccggggagaaccaaacatttgacgacatggatactgtccaggcacctgacttaaaatga

SEQ ID NO: 38572 - protein, 232 aa, Unknown
  Obtained from environmental sample
  DOMAIN (1)...(232): 5-keto 4-deoxyuronate isomerase
  misc_feature (1)..(232): Xaa is any amino acid
MVFGGAFPAEKALRLEGGKDFGSEVFLDRRELGIICIAGRGKVSADGTEYDLKKGDGLYAGKGVKDLVFSATEKNDPPKFYLASAPAHISYPVVFIPIEKANPRKLGEAAAVNVRTIYQYVHPAVCQSCQLVMGMTVLEEGSVWNTMPCHTHERRMEVYLYFDIKPGAAVFHMHGQPDETRHIVMNNEQAVISPSWSIHCGAGTAAYTFIWAMAGENQTFDDMDTVQAPDLK

SEQ ID NO: 38573 - DNA, 576 bp, Unknown
  Obtained from environmental sample
  misc_feature (1)..(576): n is a, c, g, or t
atggatattaatgataaattttcactgaaagggaaaatcgcctgggttaccggggcttcctacggcatcggttttggcattgccgcagccttccataaagccggcgcgacaattgtttttaatgatattggcaaggagcagcttgataaagggttagaggcgtacaagagcgcggggattccggcgcacggctatgtctgcgacgttaccgatgagaaaacggtaaacgagacagcggcgaaaatagaaaaggaagcaggcgcggttgatatccttgtcaataacgccggaatcatcaagcgcatacccatgacagagatgagcgccgctgatttcaggcttgtaatagacgtggatcttaacgccccctttattgtggcaaaagccgtcatcccatccatgataaaaaaaggcggtggcaaaattatcaatatttgcagcatgatgagcgagcttggccgcgagacggtgagcgcttatgccgcggcaaaaagcgggcttaaaatgctaaccaaaacatcgccagcgaatatggccagtacaacatacagtgcaacggtctggggccggttataa

SEQ ID NO: 38574 - protein, 191 aa, Unknown
  Obtained from environmental sample
  DOMAIN (12)...(179): short chain dehydrogenase
  misc_feature (1)..(191): Xaa is any amino acid
MDINDKFSLKGKIAWVTGASYGIGFGIAAAFHKAGATIVFNDIGKEQLDKGLEAYKSAGIPAHGYVCDVTDEKTVNETAAKIEKEAGAVDILVNNAGIIKRIPMTEMSAADFRLVIDVDLNAPFIVAKAVIPSMIKKGGGKIINICSMMSELGRETVSAYAAAKSGLKMLTKTSPANMASTTYSATVWGRL

SEQ ID NO: 38575 - DNA, 843 bp, Unknown
  Obtained from environmental sample
  misc_feature (1)..(843): n is a, c, g, or t
ttgcgttacaacgaaaagtcgctgcaattccacgtttcaaaatatttgttctcgtccaaaatacgcgagattgtccggaaaggctggaaggaagcggtccgggaacaaaaaggcgacggcgacgaacccgacggggaagaggtcccgcacttcgacgagtccgcctgcgccctgctggatttgagactgcttgacaggcttaccaagccgaacagggaattcgccatcgacacgctgcttgcctttatggaacgtcccggaagctcgggcgacgagaacacaaagcttgccgggctcggaaccccggctaccagggcggagataataaggaagcttttttcgggccagtacctgcgcgaggacaggaaaagcctttacgcaacggacagggggctttttttgcttggggcgctttcgaaaaacggatcattaaaaaagatggcggacgtcgcccagaccaccgaatgggaaaattcccttgcctcggacccgaaggctttcgaaagggagattgccgaatacgtcgcgctgtgcgtcaagggcggccgcgaaagggaaacgttccgacaggcttccttgggagcctgcccgctttgcaaaaggcccgtctacgaaaccaaaataggctacggatgctcgggatacaaggaaacccccaaatgcagcttcattatcttcaagacgattgcgggcgcatccgtcagcgcctcggacgcttcgcttcttctcacggggcaaaagacaaagcccaaaaaatgcacgagcaaggaaggcaagccgttcgaagcgtcgtttgcccttgagggcgggaacgtgaggtttctttttaaggataaaaaataa

SEQ ID NO: 38576 - protein, 280 aa, Unknown
  Obtained from environmental sample
  misc_feature (1)..(280): Xaa is any amino acid
MRYNEKSLQFHVSKYLFSSKIREIVRKGWKEAVREQKGDGDEPDGEEVPHFDESACALLDLRLLDRLTKPNREFAIDTLLAFMERPGSSGDENTKLAGLGTPATRAEIIRKLFSGQYLREDRKSLYATDRGLFLLGALSKNGSLKKMADVAQTTEWENSLASDPKAFEREIAEYVALCVKGGRERETFRQASLGACPLCKRPVYETKIGYGCSGYKETPKCSFIIFKTIAGASVSASDASLLLTGQKTKPKKCTSKEGKPFEASFALEGGNVRFLFKDKK

SEQ ID NO: 38577 - DNA, 693 bp, Unknown
  Obtained from environmental sample
  misc_feature (1)..(693): n is a, c, g, or t
ttgaggcacatggatgatggtttagggttcgatccccagattcttaatgtccaatttggtatcaatacttccaaatttctattggaaggtctttattttgggtttaagttcagtaagttcgacactagctggataagtgatgttatacctttttccggcttttctttcagtaccctatctataggagctaacgccagttaccagttgataagccaaaaacgtttactgctgggtctgttggtttggcgtgggcttaacctgggaaccgggtttatctggcagaataccagtttgaatttttcaccatctatttcaatagataataatccaattacaattggagagtacggaccaataaatatgccggttaatgcggatgttagcctggatttcgaaacaaatactaatataatacctattgaagcgatgacttcaatacggcttatcgggttttttaacctggctttgggcgcaggagttgatatagcgtttggcagttccaaaataggtatttccggttccttcaaagttgataaagaaaaagtaaacaaagatctgcaagaaaaaggattatccatgaaaacagatcccagtttggtgcttagcccactggggggaaagtcgggtccaggcattttcaatccaaaggctaatgggcgctatgggttttggttttgggcctgttataattga

SEQ ID NO: 38578 - protein, 230 aa, Unknown
  Obtained from environmental sample
  misc_feature (1)..(230): Xaa is any amino acid
MRHMDDGLGFDPQILNVQFGINTSKFLLEGLYFGFKFSKFDTSWISDVIPFSGFSFSTLSIGANASYQLISQKRLLLGLLVWRGLNLGTGFIWQNTSLNFSPSISIDNNPITIGEYGPINMPVNADVSLDFETNTNIIPIEAMTSIRLIGFFNLALGAGVDIAFGSSKIGISGSFKVDKEKVNKDLQEKGLSMKTDPSLVLSPLGGKSGPGIFNPKANGRYGFWFWACYN

SEQ ID NO: 38579 - DNA, 477 bp, Unknown
  Obtained from environmental sample
  misc_feature (1)..(477): n is a, c, g, or t
atgaaaacagcgataatttattattcctataacggagccagcgcccaagtagcggaaattctcaaggcagagttaaacgctgacatttataggattgaaaccctcgacactaaaaaaagaaaaggcatttctctaattttttggggtggcggccaggttgtaaggggcataaaaccgccgctcaagcctctttccgtggacattggcgcctacgatctcgttatccttggaacgccggtgtgggcaagttcccctgctccggcaattgtctctttcctaagcgcgaacaatatagctggaaagaaaatcgcccttttctgctgccacgccggcggtatggacaaggccctggaaaaactcaaagccctgcttagcggaaacacctttataggggagattgactttaagaatgttgcaaagatggataagggtgagctaaagaaaaagttaagcgagtgggtgaaaacactaatttga

SEQ ID NO: 38580 - protein, 158 aa, Unknown
  Obtained from environmental sample
  misc_feature (1)..(158): Xaa is any amino acid
MKTAIIYYSYNGASAQVAEILKAELNADIYRIETLDTKKRKGISLIFWGGGQVVRGIKPPLKPLSVDIGAYDLVILGTPVWASSPAPAIVSFLSANNIAGKKIALFCCHAGGMDKALEKLKALLSGNTFIGEIDFKNVAKMDKGELKKKLSEWVKTLI

SEQ ID NO: 38581 - DNA, 1050 bp, Unknown
  Obtained from environmental sample
  misc_feature (1)..(1050): n is a, c, g, or t
atgtcttttgtaagcagggacgacgtgctatccgtaacagagggaatgatgtgccatgtatttaagaaggtaatgaatgttgatctgcctaaaaatttcagacgcatggcatgggaggaggcgatggaattttatggcagcgataaaccagatacacgttttagtatgcatctgcaagatttcagcacccatgtacaagcgtcgagctttcaggcgtttaaggacgcgctgagttcaggcggagcggtaaaagcgcttgttgtcaaaggaaaggccgattattcgcgcaagcaaatagaagagcttgaagcagtcgctaaaatttacaaagcgaagggcatggcgtggatgaaagttacggaaaacgggcttgaagggggagcgtcaaaattcttcgctgataacgcttgttttataataggcgtgcttgacgcaagacccggcgaccttattttaatgattgcggacgctaacagaagaatagcaaataccgctcttggggctgtgaggactaaacttgggcgcgaccttgggctttgcgacccgtcccgttttgaatttgtgtggataatagacttccccatgtttgaatacaacgaagatgaanaaaaatgggaggcggcgcatcatctttttacatggccgcaggacaaataccactcgacaatggaaaccgatcccggctccgtaaaaggcgacctttacgacttagttcttaacggctatgagcttgcgtcaggctccattcgtatccatgaccctgaaatgcaaaagcgggtgttcaagatagtcggaattgatccggcgcaggcggaaaaaaagttcggctttttaactgaagcgtttaagtacggcgcgccccctcacggcggaatagcccccggtcttgaccgcctcgtaatgatcatggcgggtcacacttcgctgaaagacgtaatcgccttcccgaaaaattccttcgccgtaagccccatggacgattgcccatccgacgtagatcaaaaacagcttgatgagttacatcttattattaagaagcaggacaattag

SEQ ID NO: 38582 - protein, 349 aa, Unknown
  Obtained from environmental sample
  DOMAIN (73)...(166): GAD domain
  misc_feature (1)..(349): Xaa is any amino acid
MSFVSRDDVLSVTEGMMCHVFKKVMNVDLPKNFRRMAWEEAMEFYGSDKPDTRFSMHLQDFSTHVQASSFQAFKDALSSGGAVKALVVKGKADYSRKQIEELEAVAKIYKAKGMAWMKVTENGLEGGASKFFADNACFIIGVLDARPGDLILMIADANRRIANTALGAVRTKLGRDLGLCDPSRFEFVWIIDFPMFEYNEDEXKWEAAHHLFTWPQDKYHSTMETDPGSVKGDLYDLVLNGYELASGSIRIHDPEMQKRVFKIVGIDPAQAEKKFGFLTEAFKYGAPPHGGIAPGLDRLVMIMAGHTSLKDVIAFPKNSFAVSPMDDCPSDVDQKQLDELHLIIKKQDN

SEQ ID NO: 38583 - DNA, 312 bp, Unknown
  Obtained from environmental sample
  misc_feature (1)..(312): n is a, c, g, or t
atggcaagaaagcccgttatgcggatcttcgaccctgaattaacgcttgagaatttccctcttatcatggctcataatgattttgattatttaagtccgatttattttaagtttgacgtggaaataaaaacatggatttccaagatagggacaaagtcatttaccgtataccacgaagcgtggcaggaaggaaaactttgcacaaaaggaaactgcgtaattgtatatatcattgacggacagacaactccattgcctgatgatattaagaaaattttatctgagcatatggctaattgtcctgcttcttaa

SEQ ID NO: 38584 - protein, 103 aa, Unknown
  Obtained from environmental sample
  misc_feature (1)..(103): Xaa is any amino acid
MARKPVMRIFDPELTLENFPLIMAHNDFDYLSPIYFKFDVEIKTWISKIGTKSFTVYHEAWQEGKLCTKGNCVIVYIIDGQTTPLPDDIKKILSEHMANCPAS

SEQ ID NO: 38585 - DNA, 714 bp, Unknown
  Obtained from environmental sample
  misc_feature (1)..(714): n is a, c, g, or t
ttgctggcggaactggctgacggagaggttgaccgagattacgaagggttttccgccctcttggcttttgcgggcctcgatgcaggcggtgcgcagcacccattcgcctatggagaggatcaggccggtgtcttcggcgatgggtatgaattggcccggctgcaccatgccgaggtcgtggtgcttccagcgcagcaacgcctcggcgccggttatgcgtcccgattttatctccacctgcggctggtagaaggcgcagagctgcgagtgcccgatggcgttgcgcaggtcgctctccaaagagaggcgctccattgcgcgggcgttcatgctgggcttgtagtgctcgaagctgttgaggccggtctctttggcgcggcgcatagccgcctcggcgttttggagcatttgcaccttaccgtcgccgtcggtcgggaagatgcttatcccgatgcagatggtggcgtatatgtcgcggccgccgatttgcaggggttcggcgcaggagtccaaaacgcgccgcgcgacttttgcggcgtcctcggggcgggcgatctcttccaatatgatggcgaactcgtcgtcgcccgatctgaagacgacatcgacgtccctgacgcaggtgacgaggcgctcggcggtgatgcggaggagcgcgtcgcccgcctcgtagccgaaggtgtcgtttatcattttgaagcggtctatgtctaa

SEQ ID NO: 38586 - protein, 237 aa, Unknown
  Obtained from environmental sample
  misc_feature (1)..(237): Xaa is any amino acid
MLAELADGEVDRDYEGFSALLAFAGLDAGGAQHPFAYGEDQAGVFGDGYELARLHHAEVVVLPAQQRLGAGYASRFYLHLRLVEGAELRVPDGVAQVALQREALHCAGVHAGLVVLEAVEAGLFGAAHSRLGVLEHLHLTVAVGREDAYPDADGGVYVAAADLQGFGAGVQNAPRDFCGVLGAGDLFQYDGELVVARSEDDIDVPDAGDEALGGDAEERVARLVAEGVVYHFEAVYV

SEQ ID NO: 38587 - DNA, 909 bp, Unknown
  Obtained from environmental sample
  misc_feature (1)..(909): n is a, c, g, or t
atgcaaaaactatcaatagccccaatgctggattcaacaaataggcatttcaggtattttgcacgcattttaacaaaacaaaccctgctctatacagaaatggtatctacgggggctattttgcataataatccggcgaagtttttggaatacaatgaggtggaacatccggtggctttgcagctcggagggagttcaccgcgtgatttggcgaagtgtgcgaaaattggtgaggattttggctatgacgaaataaatttgaattgcggttgcccaagcgagcgtgtgcaaagcggatcttttggggcttgtttaatgaaagagagtaacttggttgcagagtgcatagcggctatgcaaaacgctgtgaaagttccagttagcatcaaaaccagaataggcatagaccgcgatgatagctgggatttttttttgaactttgtggaaacggtagcaaaaacgggttgcaaatattggattatacacgcccgcaaagctatgttaaaagggctttccccaaaggagaaccgagcagttcctcccctcaactacgaaaccgtttttaagctcaagcaaattcacccagattttaaaatttccttgaacggtggggttcgcgatttagaccaggcaaaaaatattctgcaaaaaacagacagcattatgataggcagtgccgcttatagaacgccgtggattttggcaaacgcggacagcgaaatttttggtgaaaacgcggaaataaaagataaatccgaaattttggaaaaatatattccttacgcagaaactcagctcaaaaaaggcgtgccgccaaccataataaccaagcatttgatggggcttttccacggtctgcccgatgccaaaaagcaccgcacagccttaatcaatcgtattaaactttaa

SEQ ID NO: 38588 - protein, 302 aa, Unknown
  Obtained from environmental sample
  DOMAIN (5)...(301): Dihydrouridine synthase (Dus)
  misc_feature (1)..(302): Xaa is any amino acid
MQKLSIAPMLDSTNRHFRYFARILTKQTLLYTEMVSTGAILHNNPAKFLEYNEVEHPVALQLGGSSPRDLAKCAKIGEDFGYDEINLNCGCPSERVQSGSFGACLMKESNLVAECIAAMQNAVKVPVSIKTRIGIDRDDSWDFFLNFVETVAKTGCKYWIIHARKAMLKGLSPKENRAVPPLNYETVFKLKQIHPDFKISLNGGVRDLDQAKNILQKTDSIMIGSAAYRTPWILANADSEIFGENAEIKDKSEILEKYIPYAETQLKKGVPPTIITKHLMGLFHGLPDAKKHRTALINRIKL

SEQ ID NO: 38589 - DNA, 594 bp, Unknown
  Obtained from environmental sample
  misc_feature (1)..(594): n is a, c, g, or t
ttggccgagaacctgggttcttgtggttacacgccggtaagcgcctacttttcaggcggcaattcggacgcggttgtcaccgagcgtatccgggccactcccaaaggcaccggctggataaaggcctgctccaattacgcgatagcggctctcgcgaaacacgaagcccttgaggcaggttacatggaatgcgtgtttcttgacgctgttgagcgcaagtacattgaggaaggttcctcctgcaatatctttttttatttaaaatcgggcgagcttgtaacgccgaagttaggcgacaccattctgcccggcataacccgctccagcatcattgagcttgccggcgaccggggcataaaaacaagcgagagaagcatctcgattgacgaagcgctggaggaaacaaaggaatgttttgtaagcggaaccgccgccggcgcggtgccccttacttcccttacatggcagggcaaaaaaacggtctttaataacggcaaggaaggcgagcttacaacggaaataaggaacaccctcaaaggcatacagtacggaacgattcccgatactaaaggctggatggtcaggatcaattaa

SEQ ID NO: 38590 - protein, 197 aa, Unknown
  Obtained from environmental sample
  DOMAIN (1)...(179): Aminotransferase class IV
  misc_feature (1)..(197): Xaa is any amino acid
MAENLGSCGYTPVSAYFSGGNSDAVVTERIRATPKGTGWIKACSNYAIAALAKHEALEAGYMECVFLDAVERKYIEEGSSCNIFFYLKSGELVTPKLGDTILPGITRSSIIELAGDRGIKTSERSISIDEALEETKECFVSGTAAGAVPLTSLTWQGKKTVFNNGKEGELTTEIRNTLKGIQYGTIPDTKGWMVRIN

SEQ ID NO: 38591 - DNA, 1071 bp, Unknown
  Obtained from environmental sample
  misc_feature (1)..(1071): n is a, c, g, or t
atgtactttgatccgttcttaaaatgctcaggagagcataaatcaaaaccgacgcaacattcggttaaggaattgcgctccatgggtatttccccgaacgttattatcgcgagggcagacgaccgtttaagcagcggcattaaggaaaaaatatcgctttttggcaacgtaaagatcgactgcgttatagagaacatcacaatccaatccctttatgaagcgccgctcatgctccatcagaacgggctggataaagttgtttgtcgggaattggggcttgatgttcccgaaccggatttaagcgaatggcaaaagatggtacacaaaatcgccgggaggcagcaggaggtaaaaatttcaattgtcgggaaatacattcaactgcacgacgcgtacctgtccatcatcgaaagcctgaatcacgccggttttgagattggcgcaaaaataaacatacaatggattgacagtgccgaggtaaccgccgaaacagcgggagggttgttaggcgaaacagacggaatgatcattccaggcggtttcggcgacaggggtatcgaagggaagataaatgcatgccgttacgcaagggaaaacaacataccgtatttgggaatctgtcttggaatgcagatagccgtcattgagttcgcccgcaatgtctgcggcctggagcgcgcacattcaagcgagtttgacgagacatctccctatcgcgtgattgatattatgccggatcaaaccggcctcctgggctcgggcggcacaatgcggctgggcgcttatccctgtaagatcgcaaaggatacgctgttaagctctctttacaatattgatgaaataagcgaaaggcaccgccaccgctttgaattcaacaatgattaccgcgaaacttttacgggcaaaggaatgattatctgcggaatgtcgcctaacggaagtcttgtcgaggcgattgagctgccggattgccgttttttcaccggcgttcagttccatcccgagttcaagagccgccccaacaaaccgcatcccctgtttttaggtttggtaaaagcggcgattaattga

SEQ ID NO: 38592 - protein, 356 aa, Unknown
  Obtained from environmental sample
  DOMAIN (119)...(335): Peptidase C26
  misc_feature (1)..(356): Xaa is any amino acid
MYFDPFLKCSGEHKSKPTQHSVKELRSMGISPNVIIARADDRLSSGIKEKISLFGNVKIDCVIENITIQSLYEAPLMLHQNGLDKVVCRELGLDVPEPDLSEWQKMVHKIAGRQQEVKISIVGKYIQLHDAYLSIIESLNHAGFEIGAKINIQWIDSAEVTAETAGGLLGETDGMIIPGGFGDRGIEGKINACRYARENNIPYLGICLGMQIAVIEFARNVCGLERAHSSEFDETSPYRVIDIMPDQTGLLGSGGTMRLGAYPCKIAKDTLLSSLYNIDEISERHRHRFEFNNDYRETFTGKGMIICGMSPNGSLVEAIELPDCRFFTGVQFHPEFKSRPNKPHPLFLGLVKAAIN

SEQ ID NO: 38593 - DNA, 660 bp, Unknown
  Obtained from environmental sample
  misc_feature (1)..(660): n is a, c, g, or t
ttgacggccgtcggttgcaatcacagcgttcaggggaataccatcattacggaaaggacggattattatggaaatcagaagttcgaattgataaacggaagatatacgtacacgcacgaatctaacgcggggataaattacggttggaggtcaaatgtcgacacatcggtacatgactttctaacgcgtgttgaaaacgaatacaacgcgatttaccgccggcagcaagaagaactggagcgaaaacgcttagaggccgaacggcagcgcgttgaagcggaaagacggcgggaggaggctgagagaaaacggcttgaggccgagagacaacgcgccgaagccgaaagaaaacggcttgaagccgagaagcggaaagcggaggcggaaaaaaaacgcttggaagaggagagacggagagcggaagaagagcaacggcggcaagaagaggagaggctgcgggcggaagaagagcagcggcgcttagaagaagagaggctgcgggtggaagaggagctgcggcgtttggaagaagagcggcgaacgtatgttgaaaaacagaggcaaacgatcataacaaacgcgaagtctcaaggctacgacattcgggaagaacaagtagagaataaaataaaactagtattggtcagaaccacatactga

SEQ ID NO: 38594 - protein, 219 aa, Unknown
  Obtained from environmental sample
  misc_feature (1)..(219): Xaa is any amino acid
MTAVGCNHSVQGNTIITERTDYYGNQKFELINGRYTYTHESNAGINYGWRSNVDTSVHDFLTRVENEYNAIYRRQQEELERKRLEAERQRVEAERRREEAERKRLEAERQRAEAERKRLEAEKRKAEAEKKRLEEERRRAEEEQRRQEEERLRAEEEQRRLEEERLRVEEELRRLEEERRTYVEKQRQTIITNAKSQGYDIREEQVENKIKLVLVRTTY

SEQ ID NO: 38595 - DNA, 360 bp, Unknown
  Obtained from environmental sample
  misc_feature (1)..(360): n is a, c, g, or t
atgatcgtttgcctctgtttttcaacatacgttcgccgctcttcttccaaacgccgcagctcctcttccacccgcagcctctcttcttctaagcgccgctgctcttcttccgcccgcagcctctcctcttcttgccgccgttgctcttcttccgctctccgtctctcctcttccaagcgttttttttccgcctccgctttccgcttctcggcttcaagccgttttctttcggcttcggcgcgttgtctctcggcctcaagccgttttctctcagcctcctcccgccgtctttccgcttcaacgcgctgccgttcggcctctaagcgttttcgctccagttcttcttgctgccggcggtaa

SEQ ID NO: 38596 - protein, 119 aa, Unknown
  Obtained from environmental sample
  misc_feature (1)..(119): Xaa is any amino acid
MIVCLCFSTYVRRSSSKRRSSSSTRSLSSSKRRCSSSARSLSSSCRRCSSSALRLSSSKRFFSASAFRFSASSRFLSASARCLSASSRFLSASSRRLSASTRCRSASKRFRSSSSCCRR

SEQ ID NO: 38597 - DNA, 462 bp, Unknown
  Obtained from environmental sample
  misc_feature (1)..(462): n is a, c, g, or t
ttggaaggcgttaccactaacacactgcgggcaagcccttccggccccagatcattctcaataaaatcattgacctcgcggccacgctcgccgataagggcgactacgttaacgtcggcattggtgttgcgggcaatcattcccagcagggtggatttgcccacgccggaaccggcaaaaatgcccagccgctgcccccggcccacggccaacaggccgtcgatggcccgcactccggtggtaatgtgttcggtaacacgccgccgcctgagagggtcaggaggatttgccagcgcgggatacatgacagtggacgctatttcacctttaccgtcaacaggattccccaaagcgcccagcacccgtcccagaagtttggtcgagaccggcacctcaaggcggctgccccgcgcgataacgcggttaccgacttcaagcccgccggttcctcaaatgccataa

SEQ ID NO: 38598 - protein, 153 aa, Unknown
  Obtained from environmental sample
  misc_feature (1)..(153): Xaa is any amino acid
MEGVTTNTLRASPSGPRSFSIKSLTSRPRSPIRATTLTSALVLRAIIPSRVDLPTPEPAKMPSRCPRPTANRPSMARTPVVMCSVTRRRLRGSGGFASAGYMTVDAISPLPSTGFPKAPSTRPRSLVETGTSRRLPRAITRLPTSSPPVPQMP

SEQ ID NO: 38599 - DNA, 792 bp, Unknown
  Obtained from environmental sample
  misc_feature (1)..(792): n is a, c, g, or t
atggaagccattgtgcgggaagacctccccatcacctttaagtatctgggttacgaagaagcccttgaggtgtttaccaaaaaccggcagacagacacggtgctacttatggaacagcgcagcaactcgcggatcaaggtaaatgaatgtaaagattttcttgatatttacgttgagccgctggtgccgcataccggcctgctttcttcttttgcgcttatgtcctatcaggatggccttttgctgaggttccccgcgataggcaaaggaatggagataggcccctttgaagatgagccgaaaatttttgacgtgtataacgaatataaaaaatggggccgcgtggtgggagtgcgggtagtgggcgatttgaacgctctggtaacaaaacggacgatcaacgactacatcagaattgccgaggcgcaccaaagccggaagatggctgagatagcggagcaaatctacggacagttggatcgtattaaaacggtgatgctggccggcccatccagttccggcaaaactaccagcgcaaaacggctctctattgaacttatggcgctggggattaagccggttgccatcagtctggatgattattatgtggggaaggagcggactcccaaagatgaaaaaggcgatcctgattatgaatgtctggaggctttggacattcccctgttgaacgaacatttacaggccctgtaccgcggcgaggaattactctgcccgtctacgatttcaaaaccggcagccgcaggagggcgggggaagagtgattcatcttga

SEQ ID NO: 38600 - protein, 263 aa, Unknown
  Obtained from environmental sample
  misc_feature (1)..(263): Xaa is any amino acid
MEAIVREDLPITFKYLGYEEALEVFTKNRQTDTVLLMEQRSNSRIKVNECKDFLDIYVEPLVPHTGLLSSFALMSYQDGLLLRFPAIGKGMEIGPFEDEPKIFDVYNEYKKWGRVVGVRVVGDLNALVTKRTINDYIRIAEAHQSRKMAEIAEQIYGQLDRIKTVMLAGPSSSGKTTSAKRLSIELMALGIKPVAISLDDYYVGKERTPKDEKGDPDYECLEALDIPLLNEHLQALYRGEELLCPSTISKPAAAGGRGKSDSS

SEQ ID NO: 38601 - DNA, 480 bp, Unknown
  Obtained from environmental sample
  misc_feature (1)..(480): n is a, c, g, or t
ttgaaatactggaagcttacggcaatgatccccagcagctcatcgccgtattacttgatatacaagcggcttcgggcaaaaattatgttgataaaacagtgggcgcagttggcggctgatgttttaaaagtccctctttcaaaaatcttagacgttcttactttttacgccatgttcagcacgaatccgcgcggcgaatatgtcgtggagatttgccgcagtacgccgtgctttttttcgcgctcggaagaagtcgcgcagtggtttgaaacagcggcgggcgtcaaaatgggcgaaactacggcggacggcaagctttcgcttttttacacaagctgcgtcggcgcgtgcgacattggtcccgcggcgaaaatcggcgacgatgtgttcggcggcttgaacgaggaaaaagttaaatcgctggtaaaattctgccttgaagggaaagcacaggagttaaaagcgctatgtcaaaattag

SEQ ID NO: 38602 - protein, 159 aa, Unknown
  Obtained from environmental sample
  DOMAIN (4)...(146): Respiratory-chain NADH dehydrogenase 24 Kd subunit
  misc_feature (1)..(159): Xaa is any amino acid
MKYWKLTAMIPSSSSPYYLIYKRLRAKIMLIKQWAQLAADVLKVPLSKILDVLTFYAMFSTNPRGEYVVEICRSTPCFFSRSEEVAQWFETAAGVKMGETTADGKLSLFYTSCVGACDIGPAAKIGDDVFGGLNEEKVKSLVKFCLEGKAQELKALCQN

SEQ ID NO: 38603 - DNA, 579 bp, Unknown
  Obtained from environmental sample
  misc_feature (1)..(579): n is a, c, g, or t
gtggaaatcaaaagaccgggaacttcgacttatgcggccgcgaaagccggagaccagataagccaggatactattatttctacggctttaagaagcatggccctggttgagattggcagcgcggttttaatggtacaacccctaacccgcctgtctctgaaggaaatcagcgcttcttccagcagtgaaactattaatgtgcacctccagtcgggaagggtgcgggtagatgtaaatcctcccgcgggaaaaaaggcgtccatgacggtgatcagccccagcgcgaccgcttccgtccgcggtaccagctttgattttagcacccggaatctcaatgtgcagcatggcaccgtgggttttacggggaataaaggaaaattactgctgataaaacccggctacgacagccaggtaaaaacagacggcagcgtgagcgatcccctggaaaccagaagcggcagattgctgccgccattaccggtaggaatggatacccgcgccggagcgtctgttgaagcgatccgttcaaacggaacaattatcattgatattgaatatcaacgtgaattcgataaatag

SEQ ID NO: 38604 - protein, 192 aa, Unknown
  Obtained from environmental sample
  misc_feature (1)..(192): Xaa is any amino acid
MEIKRPGTSTYAAAKAGDQISQDTIISTALRSMALVEIGSAVLMVQPLTRLSLKEISASSSSETINVHLQSGRVRVDVNPPAGKKASMTVISPSATASVRGTSFDFSTRNLNVQHGTVGFTGNKGKLLLIKPGYDSQVKTDGSVSDPLETRSGRLLPPLPVGMDTRAGASVEAIRSNGTIIIDIEYQREFDK

SEQ ID NO: 38605 - DNA, 1089 bp, Unknown
  Obtained from environmental sample
  misc_feature (1)..(1089): n is a, c, g, or t
ttgatcatatcgacttacatatctgagttttgtcctgctcggctgataatattcgtagaatctttgctaaaagacctgccttttttggattttatattaccccccgatgaatcccaaaaactctcacaaattctattcctatgccctgcccctcttaccccgtttgccaagttgatctacaaatactctgctctttattgccattcaagcggctgcaatatgcgctgcacctattgcattgtgccttatgtgcgaggaatggaacagtatagggagccggcttctattttgaaagaggttgaggtagccacagatgcaggggtttcggaaattgtgcttttggggcaaacggttaatggctatcgctataagggtttaaattttgctgaattgctaaaacaggtggcgagcataaaacaagtggagagaatccgctttgttagcccgcatccaattcactacacaagcgagcttttggatattttgatgagcgaaaaaaaaatagcaccccacgtgcatttgcctgctcaaagcggttcaaattcggtgctaaaaaaaatgaagcggcaatacacaagagaggcatatttgagcgtagtagaggctctgcgctcttttaatcctttatacggcataacaacggatatcatctgcggctaccccggcgaaacagaagcggaattcaaagaaaccctttcgcttttgcaagaggctaggtttgatggtgcgtttatgtttgcatatagcccaagagagggaactccttctgcaaacgaaaaagagttaatcacagaagaagaaaaaaaatcccgcttgcaacgtgttatagatttgcagcattccataacacttgaacgcgcaaaacttatgctcggcaggcaagagagaattttgctggaaaaattatctaaaaggaattccaacgaatgggttgggaaaaccggaaattttaaaaaggtgataattccggcacagccggaatttagagaagggatgtatgtggattgcgttattgagggtgttaaggggcatacgctatgggggggaaggttgtctgcacccccgatttttcttatagtaaatgcttga

SEQ ID NO: 38606 - protein, 362 aa, Unknown
  Obtained from environmental sample
  DOMAIN (66)...(235): Radical SAM superfamily
  misc_feature (1)..(362): Xaa is any amino acid
MIISTYISEFCPARLIIFVESLLKDLPFLDFILPPDESQKLSQILFLCPAPLTPFAKLIYKYSALYCHSSGCNMRCTYCIVPYVRGMEQYREPASILKEVEVATDAGVSEIVLLGQTVNGYRYKGLNFAELLKQVASIKQVERIRFVSPHPIHYTSELLDILMSEKKIAPHVHLPAQSGSNSVLKKMKRQYTREAYLSVVEALRSFNPLYGITTDIICGYPGETEAEFKETLSLLQEARFDGAFMFAYSPREGTPSANEKELITEEEKKSRLQRVIDLQHSITLERAKLMLGRQERILLEKLSKRNSNEWVGKTGNFKKVIIPAQPEFREGMYVDCVIEGVKGHTLWGGRLSAPPIFLIVNA

SEQ ID NO: 38607 - DNA, 582 bp, Unknown
  Obtained from environmental sample
  misc_feature (1)..(582): n is a, c, g, or t
atgggctgtggaaaaggcttgacttcaatttttcttgcaaaagagtttggtgtaactgtatttgccaatgatttatggattgacgcgactgaaaacttgagaaggtttgaagaggccggcgtggctgacagagtatttccaatacatgcggaggctcatgccctcccatacgcaaaaagtttttttgatgctgcaatctcaattgatagttatcattattatggcgcggatgagatgtattttccatgcactttcgccaaattagtgaaacccagcggtcaatttggaattgtttgccccggactaatccaggaatataaaaacggttatccggagacccataaatcattttggaatgaagatatgttttcttttcatagtgttgattggtggcgtcatttatgggaaaaaaccggtatcgttgatattatttccgcttacaatatcccagatcccaaggaaatatggtatccctgggcacattgggcaaaagaacatcttaaatttgatgatgttgaatttttggatgcggatacggaaaaccaaataactttatttgcaattaccgctgtaaaaaaataa

SEQ ID NO: 38608 - protein, 193 aa, Unknown
  Obtained from environmental sample
  DOMAIN (1)...(97): Methyltransferase domain
  misc_feature (1)..(193): Xaa is any amino acid
MGCGKGLTSIFLAKEFGVTVFANDLWIDATENLRRFEEAGVADRVFPIHAEAHALPYAKSFFDAAISIDSYHYYGADEMYFPCTFAKLVKPSGQFGIVCPGLIQEYKNGYPETHKSFWNEDMFSFHSVDWWRHLWEKTGIVDIISAYNIPDPKEIWYPWAHWAKEHLKFDDVEFLDADTENQITLFAITAVKK

SEQ ID NO: 38609 - DNA, 636 bp, Unknown
  Obtained from environmental sample
  misc_feature (1)..(636): n is a, c, g, or t
atggtttttcttagtggcaatatagtgcggattatcataacgcttgcgataaatacgctggtaatggtgttttcgctgtttttcttttacgccgacgggccgtatctttcagggctgttactccgcgccattccgataaggacagaatacatcagcgccctcacgagaaaatttttggatattacaaggaatctttttttcggttacattatcgtggcgttactgcaggcggtagtggcgtttatcattttcacaatatttaaaataaacggctcgctggtgcttgcggtagtgacatttctttttgtattcattcccgtgcttggagccacggtggtatatatacctctggctatccttaaaatcgcaagcgggaatatagcgggcggggtggttttcttcattgtatcggcggtatttatttccggcattgacaatgttctaaggccaatctttctgagagaccgtatacagcttcatccattgataatattttttgccatccttggcggcctggtcgtttttggcttcaacggttttattctcggcccggtactggtaattctgtttctcaccgttctggatctgtttttaatcgaacataagattgaagctaaggatcaggcgaaagtatag

SEQ ID NO: 38610 - protein, 211 aa, Unknown
  Obtained from environmental sample
  DOMAIN (1)...(198): Domain of unknown function DUF20
  misc_feature (1)..(211): Xaa is any amino acid
MVFLSGNIVRIIITLAINTLVMVFSLFFFYADGPYLSGLLLRAIPIRTEYISALTRKFLDITRNLFFGYIIVALLQAVVAFIIFTIFKINGSLVLAVVTFLFVFIPVLGATVVYIPLAILKIASGNIAGGVVFFIVSAVFISGIDNVLRPIFLRDRIQLHPLIIFFAILGGLVVFGFNGFILGPVLVILFLTVLDLFLIEHKIEAKDQAKV

SEQ ID NO: 38611 - DNA, 600 bp, Unknown
  Obtained from environmental sample
  misc_feature (1)..(600): n is a, c, g, or t
atgaagaatatcgcgggaatggtaaagcttggctgtatcctcgccgtttacgcggctgtcgcctgcgtaatgctggcctttgtgtacgcgggaacctcaaagataatcgccatccgcgtcgaggccgatcagcaggccgcgttaaaagaaatttttccggatgcggacagctttgagcctgtggaaaatgttacaagccccgatctttccgtaagcataattaacgcttatgccgcgaagcggaacggaacagttgtcggcatggcgcttaaattgtcgcgcgcgagctatgccgggcccatcgtgctgctggcgggggtcagcgttgacaagcgcgtaacgggcgtaaaaattatggaacattcggatactccggggctgggagcgaacgccgcctcgccctcgtattttgtcgaccgggctaaagggatcactttttacggccagttcgcgggaaagagcgtcgctgatcggtttatggtaaaggacgacgttgccgcgattacagcgtccaccattaccagcagggccgtcactcaggcggttaaggcggcgggccaggccgcggtttcatggctttctaccggaggtttaaaatga

SEQ ID NO: 38612 - protein, 199 aa, Unknown
  Obtained from environmental sample
  SIGNAL (1)...(28)
  DOMAIN (96)...(189): FMN-binding domain
  misc_feature (1)..(199): Xaa is any amino acid
MKNIAGMVKLGCILAVYAAVACVMLAFVYAGTSKIIAIRVEADQQAALKEIFPDADSFEPVENVTSPDLSVSIINAYAAKRNGTVVGMALKLSRASYAGPIVLLAGVSVDKRVTGVKIMEHSDTPGLGANAASPSYFVDRAKGITFYGQFAGKSVADRFMVKDDVAAITASTITSRAVTQAVKAAGQAAVSWLSTGGLK

SEQ ID NO: 38613 - DNA, 849 bp, Unknown
  Obtained from environmental sample
  misc_feature (1)..(849): n is a, c, g, or t
atggacatcgcaagtgcaatatctgactattacgagttgactactgctgacatagggaagtatatcagcgtaaccgttacccgcgccggatataacagcagcgtgagcagcaataaaatagggcccatagtggctagtacccttcctcctttagggggaaccgtaagcataaccgtaccctcagccggaaccatagtggggctgacgctgacagcggttcctgctctggacagcgcatcgggaaccgtgtcctaccagtggagccactttgacaatgacatccacacgaccattagcggcgcaaccgagaggacttacaaactggttgccgaagacgaagggaagcatattgccgtaaccgtaaggagggacggaaattccggcagcgttaccagcgccgaagtaggccccgttaccttccccgttttaacaggaaccgtaaccataaccggaaacgccatagtggagcagacactcacagcggttcccgttttgaccaacgcaaatggagccttgtcctaccactggaaatacgatggtgccccaacggtcatagtaaccacaaccacccccacttacacactggttgacgcagacgtaggcaagtctatcaccgtaaccgtaacgagcgttggaaattccggcggggttcccgccaccgccgcaaaaggccccgttgtccttcccgctcttagcggaaccataagcataaacgaagcccccgtagtgggaaatgtgctcacggtaaacattggcggccttacttacagaggcagcttgaattaccaatgggccgctgataacgcggttatggcagacactaccactacacgctctcggccgatctga

SEQ ID NO: 38614 - protein, 282 aa, Unknown
  Obtained from environmental sample
  misc_feature (1)..(282): Xaa is any amino acid
MDIASAISDYYELTTADIGKYISVTVTRAGYNSSVSSNKIGPIVASTLPPLGGTVSITVPSAGTIVGLTLTAVPALDSASGTVSYQWSHFDNDIHTTISGATERTYKLVAEDEGKHIAVTVRRDGNSGSVTSAEVGPVTFPVLTGTVTITGNAIVEQTLTAVPVLTNANGALSYHWKYDGAPTVIVTTTTPTYTLVDADVGKSITVTVTSVGNSGGVPATAAKGPVVLPALSGTISINEAPVVGNVLTVNIGGLTYRGSLNYQWAADNAVMADTTTTRSRPI

SEQ ID NO: 38615 - DNA, 360 bp, Unknown
  Obtained from environmental sample
  misc_feature (1)..(360): n is a, c, g, or t
ttgctgcttattgccgaaggtataaaggtcatttccgaaaaccaaagaaacgtagtcatatccaatgtggttcaggccctccgcaaggttaagggaaggggaaacatcattatccgcgtaaacatggtggatctgaaactgactaccgaacatacaaaagattttatcaatcttgtggaaggcgcaaaatcgattcaggtggttgaggatacttcagtagacgaaggcggctgcataatcgaaactgactttggcgagattgacgcgcgtatagcaagccagcttgcggagctggaaacaaagatacttgagatttctcccataaaatcatgggccaaaaacgaagctcaggagagctaa

SEQ ID NO: 38616 - protein, 119 aa, Unknown
  Obtained from environmental sample
  misc_feature (1)..(119): Xaa is any amino acid
MLLIAEGIKVISENQRNVVISNVVQALRKVKGRGNIIIRVNMVDLKLTTEHTKDFINLVEGAKSIQVVEDTSVDEGGCIIETDFGEIDARIASQLAELETKILEISPIKSWAKNEAQES

SEQ ID NO: 38617 - DNA, 765 bp, Unknown
  Obtained from environmental sample
  misc_feature (1)..(765): n is a, c, g, or t
ttgaaaataaagattttcaaccgggggtttaattattctcaagacggcaagggtaatcgcctggtgatacacatgcagggctgtaatctgcgctgtccctggtgtaccaatcccgaaggcatgaataaagacggcattatgatgcgcaaatatagaaaccgcattccccgcctttcctgcgaagaatgggaattgggtgatctgttaaacctttgtcaagaaagtgttccgctttactttgatggtggcggtgttacctttaccggaggcgagccaactatgcaaatagcggcactggaagcggctttgcattccctctgtgagatgggtatccacacagctgtcgagaccaacggcacttcaaccgcgctaccaggtttattaccactgattgggcagttaattatagatttcaagactgtgaatacggaaaaacaccgaaggtatttgggaaacgggggggaaattctgattgccaatatccgccatgcgctgaaaaatcaccatgacctccttgtccgtatcccactaattcatggtttcaatacatccagcgaagacctggaaggatttctttcggttataggggaaggtccctggcctggtactttttttgagtttttgccttttcatgaatttggcaaagaaaaatggcagcaatgtggccttgaataccatcagaccgaagcctatgtaccggaagaaacacagattctgtttacagaaacttttcgtattcatcagttacgggtatttcacacctga

SEQ ID NO: 38618 - protein, 254 aa, Unknown
  Obtained from environmental sample
  DOMAIN (22)...(192): Radical SAM superfamily
  misc_feature (1)..(254): Xaa is any amino acid
MKIKIFNRGFNYSQDGKGNRLVIHMQGCNLRCPWCTNPEGMNKDGIMMRKYRNRIPRLSCEEWELGDLLNLCQESVPLYFDGGGVTFTGGEPTMQIAALEAALHSLCEMGIHTAVETNGTSTALPGLLPLIGQLIIDFKTVNTEKHRRYLGNGGEILIANIRHALKNHHDLLVRIPLIHGFNTSSEDLEGFLSVIGEGPWPGTFFEFLPFHEFGKEKWQQCGLEYHQTEAYVPEETQILFTETFRIHQLRVFHT

SEQ ID NO: 38619 - DNA, 720 bp, Unknown
  Obtained from environmental sample
  misc_feature (1)..(720): n is a, c, g, or t
ttgcctgtaattatcgatcatactgttaccgcaatgaatgacgcagtaacaggcgcattgtctaaagacctgcactacaaacacgccgcatacggcagagattttcaggggtggacgattgacggacagcagtctgtcgatatccgcacagtaaaagccggagattgctgttcacaatgcggcggtgaactttacacaaaaatgggaaatgagcttggacacattttcaaacttgggtataaatacacccgttccatgaatgtaacttatcttgatgagaacggaaaaacccaaatgccgacaatgggctgctacggcatcggagttgaccgcactttagcttcggtaatagaagaacatcacgatgatgcgggcattatctggcccgcttctgtcgcgccgtaccatgtaataatcgttccgattaaatatgacggcaaagtaaaagaaagcgccgatatgcttgcgcaggagctggcgcaaaaaggcattgaggttcttcttgacgaccgtaatgaacggcctggagtcaagtttaacgacgcagaccttaccggcatcccttggcgtgtcgtaatcggcgacaaaaacctcgcaggtgaaagcccaaaggtagaactcaagcgccgctcagaaaaagaaagctgcctggttgaacttggcaaagccgccggggagttgagagaggaaatcatagcgaagctggcggagatgaattaa

SEQ ID NO: 38620 - protein, 239 aa, Unknown
  Obtained from environmental sample
  DOMAIN (136)...(230): Anticodon binding domain
  misc_feature (1)..(239): Xaa is any amino acid
MPVIIDHTVTAMNDAVTGALSKDLHYKHAAYGRDFQGWTIDGQQSVDIRTVKAGDCCSQCGGELYTKMGNELGHIFKLGYKYTRSMNVTYLDENGKTQMPTMGCYGIGVDRTLASVIEEHHDDAGIIWPASVAPYHVIIVPIKYDGKVKESADMLAQELAQKGIEVLLDDRNERPGVKFNDADLTGIPWRVVIGDKNLAGESPKVELKRRSEKESCLVELGKAAGELREEIIAKLAEMN

SEQ ID NO: 38621 - DNA, 345 bp, Unknown
  Obtained from environmental sample
  misc_feature (1)..(345): n is a, c, g, or t
atgacagatcggccgagaaaaccgctgacgttgctaagacatggagatcttcggccctgtggtttcgatcatcggttttacaccctggaagaggcagtggaaatcgccaacgcctccaggttcgggctctgcggctgcatttttaccgcagacatgaaaaccgcatggaaaacagcgtcccagcttgaatgtggcggggttataatcaacggtgctagcttcttccgcagttttgagatgcccttcggcggctacaagtactcagggatcgggacggaaggagtcctgtccacctttaacgaggtaacgctgacaaagacgattgtgctaaagaacattatctga

SEQ ID NO: 38622 - protein, 114 aa, Unknown
  Obtained from environmental sample
  misc_feature (1)..(114): Xaa is any amino acid
MTDRPRKPLTLLRHGDLRPCGFDHRFYTLEEAVEIANASRFGLCGCIFTADMKTAWKTASQLECGGVIINGASFFRSFEMPFGGYKYSGIGTEGVLSTFNEVTLTKTIVLKNII
